United States Patent Application Publication US 2007/0099251 A1 - sequence listing, part 4

SEQ ID NO: 11726 - DNA, 7434 bp, Homo sapiens
cggccaggtgtgtgggactgaagttcttggagaagggagtccaactcttcaaggtgaactatgaccactttactctgggttttcgtgactctgagggtcatcactgcagctgtcactgtagaaacttcagaccatgacaactcgctgagtgtcagcatcccccaaccgtccccgctgagggtcctcctggggacctccctcaccatcccctgctatttcatcgaccccatgcaccctgtgaccaccgccccttctaccgccccactggccccaagaatcaagtggagccgtgtgtccaaggagaaggaggtagtgctgctggtggccactgaagggcgcgtgcgggtcaacagtgcctatcaggacaaggtctcactgcccaactacccggccatccccagtgacgccaccttggaagtccagagcctgcgctccaatgactctggggtctaccgctgcgaggtgatgcatggcatcgaggacagcgaggccaccctggaagtcgtggtgaaaggcatcgtgttccattacagagccatctctacacgctacaccctcgactttgacagggcgcagcgggcctgcctgcagaacagtgccatcattgccacgcctgagcagctgcaggccgcctacgaagacggcttccaccagtgtgacgccggctggctggctgaccagactgtcagataccccatccacactccccgggaaggctgctatggagacaaggatgagtttcctggtgtgaggacgtatggcatccgagacaccaacgagacctatgatgtgtactgcttcgccgaggagatggagggtgaggtcttttatgcaacatctccagagaagttcaccttccaggaagcagccaatgagtgccggcggctgggtgcccggctggccaccacgggccacgtctacctggcctggcaggctggcatggacatgtgcagcgccggctggctggccgaccgcagcgtgcgctaccccatctccaaggcccggcccaactgcggtggcaacctcctgggcgtgaggaccgtctacgtgcatgccaaccagacgggctaccccgacccctcatcccgctacgacgccatctgctacacaggtgaagactttgtggacatcccagaaaacttctttggagtggggggtgaggaggacatcaccgtccagacagtgacctggcctgacatggagctgccactgcctcgaaacatcactgagggtgaagcccgaggcagcgtgatccttaccgtaaagcccatcttcgaggtctcccccagtcccctggaacccgaggagcccttcacgtttgcccctgaaataggggccactgccttcgctgaggttgagaatgagactggagaggccaccaggccctggggctttcccacacctggcctgggccctgccacggcattcaccagtgaggacctcgtcgtgcaggtgaccgctgtccctgggcagccgcatttgccagggggggtcgtcttccactaccgcccgggacccacccgctactcgctgacctttgaggaggcacagcaggcctgccctggcacgggggcggtcattgcctcgccggagcagctccaggccgcctacgaagcaggctatgagcagtgtgacgccggctggctgcgggaccagaccgtcagataccccattgtgagcccacggaccccatgcgtgggtgacaaggacagcagcccaggggtcaggacctatggcgtgcgcccatcaacagagacctacgatgtctactgctttgtagacagacttgagggggaggtgttcttcgccacacgccttgagcagttcaccttccaggaagcactggagttctgtgaatctcacaatgccactgccaccacgggccagctctacgccgcctggagccgcggcctggacaagtgctatgccggctggctggccgacggcagcctccgctaccccatcgtcaccccaaggcctgcctgcggtggggacaagccaggcgtgagaacggtctacctctaccctaaccagacgggcctcccagacccactgtcccggcaccatgccttctgcttccgaggcatttcagcggttccttctccaggagaagaagagggtggcacacccacatcaccctctggtgtggaggagtggatcgtgacccaagtggttcctggtgtggctgctgtccccgtagaagaggagacaactgctgtaccctcaggggagactactgccatcctagagttcaccaccgagccagaaaaccagacagaatgggaaccagcctataccccagtgggcacatccccgctgccagggatccttcctacttggcctcctactggcgccgaaacagaggaaagtacagaaggcccttctgcaactgaagtgccctctgcctcagaggaaccatccccctcagaggtgccattcccctcagaggagccatccccctcagaggaaccattcccctcagtgaggccattcccctcagtggagctgttcccctcagaggagccattcccctccaaggagccatccccctcagaggaaccatcagcctcagaagagccgtatacaccttcaccccccgagcccagctggactgagctgcccagctctggggaggaatctggggcccctgatgtcagtggtgacttcacaggcagtggagatgtttcaggacaccttgacttcagtgggcagctgtcaggggacagggcaagtggactgccctctggagacctggactccagtggtcttacttccacagtgggctcaggcctgactgtggaaagtggactaccctcaggggatgaagagagaattgagtggcccagcactcctacggttggtgaactgccctctggagctgagatcctagagggctctgcctctggagttggggatctcagtggacttccttctggagaagttctagagacctctgcctctggagtaggagacctcagtgggcttccttctggagaagttctagagaccactgcccctggagtagaggacatcagcgggcttccttctggagaagttctagagaccactgcccctggagtagaggacatcagcgggcttccttctggagaagttctagagaccactgcccctggagtagaggacatcagcgggcttccttctggagaagttctagagaccactgcccctggagtagaggacatcagcgggcttccttctggagaagttctagagaccactgcccctggagtagaggacatcagcgggcttccttctggagaagttctagagaccgctgcccctggagtagaggacatcagcgggcttccttctggagaagttctagagaccgctgcccctggagtagaggacatcagcgggcttccttctggagaagttctagagaccgctgcccctggagtagaggacatcagcgggcttccttctggagaagttctagagaccgctgcccctggagtagaggacatcagcgggcttccttctggagaagttctagagaccgctgcccctggagtagaggacatcagcgggcttccttctggagaagttctagagaccgctgcccctggagtagaggacatcagcgggcttccttctggagaagttctagagaccgctgcccctggagtagaggacatcagcgggcttccttctggagaagttctagagactgctgcccctggagtagaggacatcagcgggcttccttctggagaagttctagagactgctgcccctggagtagaggacatcagcgggcttccttctggagaagttctagagactgctgcccctggagtagaggacatcagcgggcttccttctggagaagttctagagactgctgcccctggagtagaggacatcagcgggcttccttctggagaagttctagagactactgcccctggagtagaggagatcagcgggcttccttctggagaagttctagagactactgcccctggagtagatgagatcagtgggcttccttctggagaagttctagagactactgcccctggagtagaggagatcagcgggcttccttctggagaagttctagagacttctacctctgcggtaggggacctcagtggacttccttctggaggagaagttctagagatttctgtctctggagtagaggacatcagtgggcttccttctggagaggttgtagagacttctgcctctggaatagaggatgtcagtgaacttccttcaggagaaggtctagagacctctgcttctggagtagaggacctcagcaggctcccttctggagaagaagttctagagatttctgcctctggatttggggacctcagtggagttccttctggaggagaaggtctagagacctctgcttctgaagtagggactgacctcagtgggcttccttctggaagggagggtctagagacttcagcttctggagctgaggacctcagtgggttgccttctggaaaagaagacttggtggggtcagcttctggagacttggacttgggcaaactgccttctggaactctaggaagtgggcaagctccagaaacaagtggtcttccctctggatttagtggtgagtattctggggtggaccttggaagtggcccaccctctggcctgcctgactttagtggacttccatctggattcccaactgtttccctagtggattctacattggtggaagtggtcacagcctccactgcaagtgaactggaagggaggggaaccattggcatcagtggtgcaggagaaatatctggactgccctccagtgagctggacattagtgggagagctagtggactcccttcaggaactgaactcagtggccaagcatctgggtctcctgatgtcagtggggaaatacctggactctttggtgtcagtggacagccatcagggtttcctgacactagtggggaaacatctggagtgactgagcttagcgggctgtcctctggacaaccaggtgttagtggagaagcatctggagttctttatggcactagtcaaccctttggcataactgatctgagtggagaaacatctggggtccctgatctcagtgggcagccttcagggttaccagggttcagtggggcaacatcaggagtccctgacctggtttctggtaccacgagtggcagcggtgaatcttctgggattacatttgtggacaccagtttggttgaagtggcccctactacatttaaagaagaagaaggcttagggtctgtggaactcagtggcctcccttccggagaggcagatctgtcaggcaaatctgggatggtggatgtcagtggacagttttctggaacagtcgattccagtgggtttacatcccagactccggaattcagtggcctaccaagtggcatagctgaggtcagtggagaatcctccagagctgagattgggagcagcctgccctcgggagcatattatggcagtggaactccatctagtttccccacggtctctcttgtagacagaactttggtggaatctgtaacccaggctccaacagcccaagaggcaggagaagggccttctggcattttagaactcagtggtgctcattctggagcaccagacatgtctggggagcattctggatttctggacctaagtgggctgcagtccgggctgatagagcccagcggagagccaccaggtactccatattttagtggggattttgccagcaccaccaatgtaagtggagaatcctctgtagccatgggcaccagtggagaggcctcaggacttccagaagttactttaatcacttctgagttcgtggagggtgttactgaaccaactatttctcaggaactaggccaaaggccccctgtgacacacacaccccagctttttgagtccagtggaaaagtctccacagctggggacgttagtggagctaccccagtgctccctgggtctggagtagaagtatcatcagtcccagaatctagcagtgagacgtccgcctatcctgaagctgggttcggggcatctgccgcccctgaggccagcagagaagattctgggtcccctgatctgagtgaaaccacctctgcattccacgaagctaacctcgagagatcctctggcctaggagtgagcggcagcactttgacatttcaagaaggcgaggcgtccgctgccccagaagtgagtggagaatccaccaccaccagtgatgtggggacagaggcaccaggcttggcttcagccactcccacggcttctggagacaggactgaaatcagcggagacctgtctggtcacacctcgcagctgggcgttgtcatcagcaccagcatcccagagtctgagtggacccagcagacccagcgccctgcagagacgcatctagaaattgagtcctcaagcctcctgtactcaggagaagagactcacacagtcgaaacagccacctccccaacagatgcgtccatcccagcttctccggaatggaaacgtgaatcagaatcaactgctgcagcccccgccaggtcctgtgcagaggagccctgtggagctgggacctgcaaggagacagagggacacgtcatatgcctgtgcccccctggctacactggcgagcactgtaacatagaccaggaggtatgtgaggagggctggaacaagtaccagggccactgttaccgccacttcccggaccgcgagacctgggtggatgctgagcgccggtgtcgggagcagcagtcacacctgagcagcatcgtcacccccgaggagcaggagtttgtcaacaacaatgcccaagactaccagtggatcggcctgaacgacaggaccatcgaaggggacttccgctggtcagatggacaccccatgcaatttgagaactggcgccccaaccagcctgacaacttttttgccgctggagaggactgtgtggtgatgatctggcacgagaagggcgagtggaatgatgttccctgcaattaccacctccccttcacgtgtaaaaagggcacagtggcctgcggagagccccctgtggtggagcatgccaggaccttcgggcagaagaaggaccggtatgagatcaattccctggtgcggtaccagtgcacagaggggtttgtccagcgccacatgcccaccatccggtgccagcccagcgggcactgggaggagcctcggatcacctgcacagaccccaccacctacaaacgcagactacagaagcggagctcacggcaccctcggaggagccgccccagcacagcccactgagaagagcttccaggacgcacccaggacgctgagcccaggagcctgccaggctgacgtgcatcccacccagacggtgtcctcttcttgtcgctttttgtcatataaggaatcccattaaaaaaaaaa

SEQ ID NO: 11727 - DNA, 7137 bp, Homo sapiens
cggccaggtgtgtgggactgaagttcttggagaagggagtccaactcttcaaggtgaactatgaccactttactctgggttttcgtgactctgagggtcatcactgcagctgtcactgtagaaacttcagaccatgacaactcgctgagtgtcagcatcccccaaccgtccccgctgagggtcctcctggggacctccctcaccatcccctgctatttcatcgaccccatgcaccctgtgaccaccgccccttctaccgccccactggccccaagaatcaagtggagccgtgtgtccaaggagaaggaggtagtgctgctggtggccactgaagggcgcgtgcgggtcaacagtgcctatcaggacaaggtctcactgcccaactacccggccatccccagtgacgccaccttggaagtccagagcctgcgctccaatgactctggggtctaccgctgcgaggtgatgcatggcatcgaggacagcgaggccaccctggaagtcgtggtgaaaggcatcgtgttccattacagagccatctctacacgctacaccctcgactttgacagggcgcagcgggcctgcctgcagaacagtgccatcattgccacgcctgagcagctgcaggccgcctacgaagacggcttccaccagtgtgacgccggctggctggctgaccagactgtcagataccccatccacactccccgggaaggctgctatggagacaaggatgagtttcctggtgtgaggacgtatggcatccgagacaccaacgagacctatgatgtgtactgcttcgccgaggagatggagggtgaggtcttttatgcaacatctccagagaagttcaccttccaggaagcagccaatgagtgccggcggctgggtgcccggctggccaccacgggccacgtctacctggcctggcaggctggcatggacatgtgcagcgccggctggctggccgaccgcagcgtgcgctaccccatctccaaggcccggcccaactgcggtggcaacctcctgggcgtgaggaccgtctacgtgcatgccaaccagacgggctaccccgacccctcatcccgctacgacgccatctgctacacaggtgaagactttgtggacatcccagaaaacttctttggagtggggggtgaggaggacatcaccgtccagacagtgacctggcctgacatggagctgccactgcctcgaaacatcactgagggtgaagcccgaggcagcgtgatccttaccgtaaagcccatcttcgaggtctcccccagtcccctggaacccgaggagcccttcacgtttgcccctgaaataggggccactgccttcgctgaggttgagaatgagactggagaggccaccaggccctggggctttcccacacctggcctgggccctgccacggcattcaccagtgaggacctcgtcgtgcaggtgaccgctgtccctgggcagccgcatttgccagggggggtcgtcttccactaccgcccgggacccacccgctactcgctgacctttgaggaggcacagcaggcctgccctggcacgggggcggtcattgcctcgccggagcagctccaggccgcctacgaagcaggctatgagcagtgtgacgccggctggctgcgggaccagaccgtcagataccccattgtgagcccacggaccccatgcgtgggtgacaaggacagcagcccaggggtcaggacctatggcgtgcgcccatcaacagagacctacgatgtctactgctttgtagacagacttgagggggaggtgttcttcgccacacgccttgagcagttcaccttccaggaagcactggagttctgtgaatctcacaatgccactgccaccacgggccagctctacgccgcctggagccgcggcctggacaagtgctatgccggctggctggccgacggcagcctccgctaccccatcgtcaccccaaggcctgcctgcggtggggacaagccaggcgtgagaacggtctacctctaccctaaccagacgggcctcccagacccactgtcccggcaccatgccttctgcttccgaggcatttcagcggttccttctccaggagaagaagagggtggcacacccacatcaccctctggtgtggaggagtggatcgtgacccaagtggttcctggtgtggctgctgtccccgtagaagaggagacaactgctgtaccctcaggggagactactgccatcctagagttcaccaccgagccagaaaaccagacagaatgggaaccagcctataccccagtgggcacatccccgctgccagggatccttcctacttggcctcctactggcgccgaaacagaggaaagtacagaaggcccttctgcaactgaagtgccctctgcctcagaggaaccatccccctcagaggtgccattcccctcagaggagccatccccctcagaggaaccattcccctcagtgaggccattcccctcagtggagctgttcccctcagaggagccattcccctccaaggagccatccccctcagaggaaccatcagcctcagaagagccgtatacaccttcaccccccgagcccagctggactgagctgcccagctctggggaggaatctggggcccctgatgtcagtggtgacttcacaggcagtggagatgtttcaggacaccttgacttcagtgggcagctgtcaggggacagggcaagtggactgccctctggagacctggactccagtggtcttacttccacagtgggctcaggcctgactgtggaaagtggactaccctcaggggatgaagagagaattgagtggcccagcactcctacggttggtgaactgccctctggagctgagatcctagagggctctgcctctggagttggggatctcagtggacttccttctggagaagttctagagacctctgcctctggagtaggagacctcagtgggcttccttctggagaagttctagagaccactgcccctggagtagaggacatcagcgggcttccttctggagaagttctagagaccactgcccctggagtagaggacatcagcgggcttccttctggagaagttctagagaccactgcccctggagtagaggacatcagcgggcttccttctggagaagttctagagaccactgcccctggagtagaggacatcagcgggcttccttctggagaagttctagagaccactgcccctggagtagaggacatcagcgggcttccttctggagaagttctagagaccgctgcccctggagtagaggacatcagcgggcttccttctggagaagttctagagaccgctgcccctggagtagaggacatcagcgggcttccttctggagaagttctagagaccgctgcccctggagtagaggacatcagcgggcttccttctggagaagttctagagaccgctgcccctggagtagaggacatcagcgggcttccttctggagaagttctagagaccgctgcccctggagtagaggacatcagcgggcttccttctggagaagttctagagaccgctgcccctggagtagaggacatcagcgggcttccttctggagaagttctagagaccgctgcccctggagtagaggacatcagcgggcttccttctggagaagttctagagactgctgcccctggagtagaggacatcagcgggcttccttctggagaagttctagagactgctgcccctggagtagaggacatcagcgggcttccttctggagaagttctagagactgctgcccctggagtagaggacatcagcgggcttccttctggagaagttctagagactgctgcccctggagtagaggacatcagcgggcttccttctggagaagttctagagactactgcccctggagtagaggagatcagcgggcttccttctggagaagttctagagactactgcccctggagtagatgagatcagtgggcttccttctggagaagttctagagactactgcccctggagtagaggagatcagcgggcttccttctggagaagttctagagacttctacctctgcggtaggggacctcagtggacttccttctggaggagaagttctagagatttctgtctctggagtagaggacatcagtgggcttccttctggagaggttgtagagacttctgcctctggaatagaggatgtcagtgaacttccttcaggagaaggtctagagacctctgcttctggagtagaggacctcagcaggctcccttctggagaagaagttctagagatttctgcctctggatttggggacctcagtggagttccttctggaggagaaggtctagagacctctgcttctgaagtagggactgacctcagtgggcttccttctggaagggagggtctagagacttcagcttctggagctgaggacctcagtgggttgccttctggaaaagaagacttggtggggtcagcttctggagacttggacttgggcaaactgccttctggaactctaggaagtgggcaagctccagaaacaagtggtcttccctctggatttagtggtgagtattctggggtggaccttggaagtggcccaccctctggcctgcctgactttagtggacttccatctggattcccaactgtttccctagtggattctacattggtggaagtggtcacagcctccactgcaagtgaactggaagggaggggaaccattggcatcagtggtgcaggagaaatatctggactgccctccagtgagctggacattagtgggagagctagtggactcccttcaggaactgaactcagtggccaagcatctgggtctcctgatgtcagtggggaaatacctggactctttggtgtcagtggacagccatcagggtttcctgacactagtggggaaacatctggagtgactgagcttagcgggctgtcctctggacaaccaggtgttagtggagaagcatctggagttctttatggcactagtcaaccctttggcataactgatctgagtggagaaacatctggggtccctgatctcagtgggcagccttcagggttaccagggttcagtggggcaacatcaggagtccctgacctggtttctggtaccacgagtggcagcggtgaatcttctgggattacatttgtggacaccagtttggttgaagtggcccctactacatttaaagaagaagaaggcttagggtctgtggaactcagtggcctcccttccggagaggcagatctgtcaggcaaatctgggatggtggatgtcagtggacagttttctggaacagtcgattccagtgggtttacatcccagactccggaattcagtggcctaccaagtggcatagctgaggtcagtggagaatcctccagagctgagattgggagcagcctgccctcgggagcatattatggcagtggaactccatctagtttccccacggtctctcttgtagacagaactttggtggaatctgtaacccaggctccaacagcccaagaggcaggagaagggccttctggcattttagaactcagtggtgctcattctggagcaccagacatgtctggggagcattctggatttctggacctaagtgggctgcagtccgggctgatagagcccagcggagagccaccaggtactccatattttagtggggattttgccagcaccaccaatgtaagtggagaatcctctgtagccatgggcaccagtggagaggcctcaggacttccagaagttactttaatcacttctgagttcgtggagggtgttactgaaccaactatttctcaggaactaggccaaaggccccctgtgacacacacaccccagctttttgagtccagtggaaaagtctccacagctggggacattagtggagctaccccagtgctccctgggtctggagtagaagtatcatcagtcccagaatctagcagtgagacgtccgcctatcctgaagctgggttcggggcatctgccgcccctgaggccagcagagaagattctgggtcccctgatctgagtgaaaccacctctgcattccacgaagctaaccttgagagatcctctggcctaggagtgagcggcagcactttgacatttcaagaaggcgaggcgtccgctgccccagaagtgagtggagaatccaccaccaccagtgatgtggggacagaggcaccaggcttgccttcagccactcccacggcttctggagacaggactgaaatcagcggagacctgtctggtcacacctcgcagctgggcgttgtcatcagcaccagcatcccagagtctgagtggacccagcagacccagcgccctgcagagacgcatctagaaattgagtcctcaagcctcctgtactcaggagaagagactcacacagtcgaaacagccacctccccaacagatgcttccatcccagcttctccggaatggaaacgtgaatcagaatcaactgctgcagaccaggaggtatgtgaggagggctggaacaagtaccagggccactgttaccgccacttcccggaccgcgagacctgggtggatgctgagcgccggtgtcgggagcagcagtcacacctgagcagcatcgtcacccccgaggagcaggagtttgtcaacaacaatgcccaagactaccagtggatcggcctgaacgacaggaccatcgaaggggacttccgctggtcagatggacaccccatgcaatttgagaactggcgccccaaccagcctgacaacttttttgccgctggagaggactgtgtggtgatgatctggcacgagaagggcgagtggaatgatgttccctgcaattaccacctccccttcacgtgtaaaaagggcacagccaccacctacaaacgcagactacagaagcggagctcacggcaccctcggaggagccgccccagcacagcccactgagaagagcttccaggacgcacccaggacgctgagcccaggagcctgccaggctgacgtgcatcccacccagacggtgtcctcttcttgtcgctttttgtcatataaggaatcccattaaaaaaaaaa

SEQ ID NO: 11728 - DNA, 4171 bp, Homo sapiens
gggccgcctctgcacgtccgccccggagcccgcacccgcgccccacgcgccgccgaggactcggcccggctcgtggagcccttcgcccgcggcgtgagtacccccgacccgcccgtccccgctctgctcgcgccctgccgctgcgccgccctcggtggcttttccgacgggcgagccccgtgctgtgcgggaaagaatccgacaacttcgcagcccatcccggctggacgcgaccgggagtgcagcagcccgttcccctcctcggtgccgcctctgcccagcgtttgcttggctgggctaccacctgcgctcggacggcgctcggagggtcctcgcccccggcctgcctacctgaaaaccagaactgatggctctatttgcagtctttcagacaacattcttcttaacattgctgtccttgaggacttaccagagtgaagtcttggctgaacgtttaccattgactcctgtatcacttaaagtttccaccaattctacgcgtcagagtttgcacttacaatggactgtccacaaccttccttatcatcaggaattgaaaatggtatttcagatccagatcagtaggattgaaacatccaatgtcatctgggtggggaattacagcaccactgtgaagtggaaccaggttctgcattggagctgggaatctgagctccctttggaatgtgccacacactttgtaagaataaagagtttggtggacgatgccaagttccctgagccaaatttctggagcaactggagttcctgggaggaagtcagtgtacaagattctactggacaggatatattgttcgttttccctaaagataagctggtggaagaaggcaccaatgttaccatttgttacgtttctaggaacattcaaaataatgtatcctgttatttggaagggaaacagattcatggagaacaacttgatccacatgtaactgcattcaacttgaatagtgtgcctttcattaggaataaagggacaaatatctattgtgaggcaagtcaaggaaatgtcagtgaaggcatgaaaggcatcgttctttttgtctcaaaagtacttgaggagcccaaggacttttcttgtgaaaccgaggacttcaagactttgcactgtacttgggatcctgggacggacactgccttggggtggtctaaacaaccttcccaaagctacactttatttgaatcattttctggggaaaagaaactttgtacacacaaaaactggtgtaattggcaaataactcaagactcacaagaaacctataacttcacactcatagctgaaaattacttaaggaagagaagtgtcaatatcctttttaacctgactcatcgagtttatttaatgaatccttttagtgtcaactttgaaaatgtaaatgccacaaatgccatcatgacctggaaggtgcactccataaggaataatttcacatatttgtgtcagattgaactccatggtgaaggaaaaatgatgcaatacaatgtttccatcaaggtgaacggtgagtacttcttaagtgaactggaacctgccacagagtacatggcgcgagtacggtgtgctgatgccagccacttctggaaatggagtgaatggagtggtcagaacttcaccacacttgaagctgctccctcagaggcccctgatgtctggagaattgtgagcttggagccaggaaatcatactgtgaccttattctggaagccattatcaaaactgcatgccaatggaaagatcctgttctataatgtagttgtagaaaacctagacaaaccatccagttcagagctccattccattccagcaccagccaacagcacaaaactaatccttgacaggtgttcctaccaaatctgcgtcatagccaacaacagtgtgggtgcttctcctgcttctgtaatagtcatctctgcagaccccgaaaacaaagaggttgaggaagaaagaattgcaggcacagagggtggattctctctgtcttggaaaccccaacctggagatgttataggctatgttgtggactggtgtgaccatacccaggatgtgctcggtgatttccagtggaagaatgtaggtcccaataccacaagcacagtcattagcacagatgcttttaggccaggagttcgatatgacttcagaatttatgggttatctacaaaaaggattgcttgtttattagagaaaaaaacaggatactctcaggaacttgctccttcagacaaccctcacgtgctggtggatacattgacatcccactccttcactctgagttggaaagattactctactgaatctcaacctggttttatacaagggtaccatgtctatctgaaatccaaggcgaggcagtgccacccacgatttgaaaaggcagttctttcagatggttcagaatgttgcaaatacaaaattgacaacccggaagaaaaggcattgattgtggacaacctaaagccagaatccttctatgagtttttcatcactccattcactagtgctggtgaaggccccagtgctacgttcacgaaggtcacgactccggatgaacactcctcgatgctgattcatatcctactgcccatggttttctgcgtcttgctcatcatggtcatgtgctacttgaaaagtcagtggatcaaggagacctgttatcctgacatccctgacccttacaagagcagcatcctgtcattaataaaattcaaggagaaccctcacctaataataatgaatgtcagtgactgtatcccagatgctattgaagttgtaagcaagccagaagggacaaagatacagttcctaggcactaggaagtcactcacagaaaccgagttgactaagcctaactacctttatctccttccaacagaaaagaatcactctggccctggcccctgcatctgttttgagaacttgacctataaccaggcagcttctgactctggctcttgtggccatgttccagtatccccaaaagccccaagtatgctgggactaatgacctcacctgaaaatgtactaaaggcactagaaaaaaactacatgaactccctgggagaaatcccagctggagaaacaagtttgaattatgtgtcccagttggcttcacccatgtttggagacaaggacagtctcccaacaaacccagtagaggcaccacactgttcagagtataaaatgcaaatggcagtctccctgcgtcttgccttgcctcccccgaccgagaatagcagcctctcctcaattacccttttagatccaggtgaacactactgctaaccagcatgccgatttcataccttatgctacacagacattaagaagagcagagctggcaccctgtcatcaccagtggccttggtccttaatcccagtacaatttgcaggtctggtttatataagaccactacagtctggctaggttaaaggccagaggctatggaacttaacactccccattggagcaagcttgccctagagacggcaggatcatgggagcatgcttaccttctgctgtttgttccaggctcacctttagaacaggagacttgagcttgacctaaggatatgcattaaccactctacagactcccactcagtactgtacagggtggctgtggtcctagaagttcagtttttactgaggaaatatttccattaacagcaattattatattgaaggctttaataaaggccacaggagacattactatagcatagattgtcaaatgtaaatttactgagcgtgttttataaaaaactcacaggtgtttgaggccaaaacagattttagacttaccttgaacggataagaatctatagttcactgacacagtaaaattaactctgtgggtgggggcggggggcatagctctaatctaatatataaaatgtgtgatgaatcaacaagatttccacaattcttctgtcaagcttactacagtgaaagaatgggattggcaagtaacttctgacttactgtcagttgtacttctgctccatagacatcagtattctgccatcatttttgatgactacctcagaacataaaaaggaacgtatatcacataattccagtcacagtttttggttcctcttttctttcaagaactatatataaatgacctgttttcacgcggccgc

SEQ ID NO: 11729 - DNA, 1526 bp, Homo sapiens
attctcctagatcaagaagacttcctcatcaagacctcattctatttgcacagccctgcagtggagagatttattgcgtttctttcatgcaatcaacgcagactttgatgtgaacacggggagagacagtgcacgtgcagctgacccacggggaacagtcagccccgggcacttgaaggagaacagaggcttccctaactcaagtcgctgtctcctgccagctgaacattctagaagcaacctctaaggagagaatgaattctaaaagaatgctgttattggttttatttgctttttcactgatgttggttgagcgttatttcaggaatcaccaagtagaagaacttcggctctcagactggtttcatcctagaaaacgccctgatgttataacgaaaacagactggctcgctcctgtcctatgggaagggactttcgacaggcgggtcctggaaaaacattacagaaggcggaatatcactgtgggcctggccgtctttgctactggcaggtttgcagaggagtacctgaggccgttcctacactccgcaaataagcacttcatgacaggctaccgagtgatcttctacatcatggtggacgccttcttcaagctgcctgacatagagcccagtcctcttcgaacgttcaaagcatttaaagtgggcaccgagaggtggtggctcgatggccccctggtgcatgtgaagagcctgggtgaacacatcgccagtcacatccaggacgaggtggacttcctcttcagcatggctgccaaccaggtcttccagaatgagttcggggtggagaccctgggcccgttggtggcccagctccacgcctggtggtatttcagaaacaccaagaacttcccttatgagaggaggccgacctcagcagcttgcatcccgtttggacagggagatttctattatggcaacttgatggttggtggcacaccccataatattttagacttcatcaaagaatatctgaacggagttattcatgacatcaaaaatggactcaatagcacttatgaaaagcaccttaacaaatatttttacctcaataaacccactaagctgttatcaccagcatacagctgggatcttgcattttctcctcctccacagatccaatacgtcaaggtcgcacatgattcccagaggaaattatgaattacgccatgaggtttatgacgaataaatgaatcacggcaatttcttataaatgagggaagtcttaagaccttccattttttagagacatacaaatttacatccttcccaaataaatgtttcttcttgccattttgagccatcttatttggctaatgtaggataaagaataaaaggataattacttaatgttaatacacagtaatgttattatctatgtattgtagacaatgtgaaaatacatttgacatagaatgaatatttttaatggagaaagactctagttgagaaaaaacattcataaaatggaaaagtagttcacgcaaaggaaaaaataaatgccag

SEQ ID NO: 11730 - DNA, 5046 bp, Homo sapiens
ctttacggcaagggtacctacggtacctgaaaacaacgatggcatggaaaacacttcccatttacctgttgttgctgctgtctgttttcgtgattcagcaagtttcatctcaagatttatcaagctgtgcagggagatgtggggaagggtattctagagatgccacctgcaactgtgattataactgtcaacactacatggagtgctgccctgatttcaagagagtctgcactgcggagctttcctgtaaaggccgctgctttgagtccttcgagagagggagggagtgtgactgcgacgcccaatgtaagaagtatgacaagtgctgtcccgattatgagagtttctgtgcagaagtgcataatcccacatcaccaccatcttcaaagaaagcacctccaccttcaggagcatctcaaaccatcaaatcaacaaccaaacgttcacccaaaccaccaaacaagaagaagactaagaaagttatagaatcagaggaaataacagaagaacattctgtttctgaaaatcaagagtcctcctcctcctcctcctcttcctcttcttcttcaacaattcggaaaatcaagtcttccaaaaattcagctgctaatagagaattacagaagaaactcaaagtaaaagataacaagaagaacagaactaaaaagaaacctacccccaaaccaccagttgtagatgaagctggaagtggattggacaatggtgacttcaaggtcacaactcctgacacgtctaccacccaacacaataaagtcagcacatctcccaagatcacaacagcaaaaccaataaatcccagacccagtcttccacctaattctgatacatctaaagagacgtctttgacagtgaataaagagacaacagttgaaactaaagaaactactacaacaaataaacagacttcaactgatggaaaagagaagactacttccgctaaagagacacaaagtatagagaaaacatctgctaaagatttagcacccacatctaaagtgctggctaaacctacacccaaagctgaaactacaaccaaaggccctgctctcaccactcccaaggagcccacgcccaccactcccaaggagcctgcatctaccacacccaaagagcccacacctaccaccatcaagtctgcacccaccacccccaaggagcctgcacccaccaccaccaagtctgcacccaccactcccaaggagcctgcacccaccaccaccaaggagcctgcacccaccactcccaaggagcctgcacccaccaccaccaaggagcctgcacccaccaccaccaagtctgcacccaccactcccaaggagcctgcacccaccacccccaagaagcctgccccaactacccccaaggagcctgcacccaccactcccaaggagcctacacccaccactcccaaggagcctgcacccaccaccaaggagcctgcacccaccactcccaaagagcctgcacccactgcccccaagaagcctgccccaactacccccaaggagcctgcacccaccactcccaaggagcctgcacccaccaccaccaaggagccttcacccaccactcccaaggagcctgcacccaccaccaccaagtctgcacccaccactaccaaggagcctgcacccaccactaccaagtctgcacccaccactcccaaggagccttcacccaccaccaccaaggagcctgcacccaccactcccaaggagcctgcacccaccacccccaagaagcctgccccaactacccccaaggagcctgcacccaccactcccaaggaacctgcacccaccaccaccaagaagcctgcacccaccactcccaaagagcctgccccaactacccccaaggagactgcacccaccacccccaagaagctcacgcccaccacccccgagaagctcgcacccaccacccctgagaagcccgcacccaccacccctgaggagctcgcacccaccacccctgaggagcccacacccaccacccctgaggagcctgctcccaccactcccaaggcagcggctcccaacacccctaaggagcctgctccaactacccctaaggagcctgctccaactacccctaaggagcctgctccaactacccctaaggagactgctccaactacccctaaagggactgctccaactaccctcaaggaacctgcacccactactcccaagaagcctgcccccaaggagcttgcacccaccaccaccaaggagcccacatccaccacctgtgacaagcccgctccaactacccctaaggggactgctccaactacccctaaggagcctgctccaactacccctaaggagcctgctccaactacccctaaggggactgctccaactaccctcaaggaacctgcacccactactcccaagaagcctgcccccaaggagcttgcacccaccaccaccaaggggcccacatccaccacctctgacaagcctgctccaactacacctaaggagactgctccaactacccccaaggagcctgcacccactacccccaagaagcctgctccaactactcctgagacacctcctccaaccacttcagaggtctctactccaactaccaccaaggagcctaccactatccacaaaagccctgatgaatcaactcctgagctttctgcagaacccacaccaaaagctcttgaaaacagtcccaaggaacctggtgtacctacaactaagactcctgcagcgactaaacctgaaatgactacaacagctaaagacaagacaacagaaagagacttacgtactacacctgaaactacaactgctgcacctaagatgacaaaagagacagcaactacaacagaaaaaactaccgaatccaaaataacagctacaaccacacaagtaacatctaccacaactcaagataccacaccattcaaaattactactcttaaaacaactactcttgcacccaaagtaactacaacaaaaaagacaattactaccactgagattatgaacaaacctgaagaaacagctaaaccaaaagacagagctactaattctaaagcgacaactcctaaacctcaaaagccaaccaaagcacccaaaaaacccacttctaccaaaaagccaaaaacaatgcctagagtgagaaaaccaaagacgacaccaactccccgcaagatgacatcaacaatgccagaattgaaccctacctcaagaatagcagaagccatgctccaaaccaccaccagacctaaccaaactccaaactccaaactagttgaagtaaatccaaagagtgaagatgcaggtggtgctgaaggagaaacacctcatatgcttctcaggccccatgtgttcatgcctgaagttactcccgacatggattacttaccgagagtacccaatcaaggcattatcatcaatcccatgctttccgatgagaccaatatatgcaatggtaagccagtagatggactgactactttgcgcaatgggacattagttgcattccgaggtcattatttctggatgctaagtccattcagtccaccatctccagctcgcagaattactgaagtttggggtattccttcccccattgatactgtttttactaggtgcaactgtgaaggaaaaactttcttctttaaggattctcagtactggcgttttaccaatgatataaaagatgcagggtaccccaaaccaattttcaaaggatttggaggactaactggacaaatagtggcagcgctttcaacagctaaatataagaactggcctgaatctgtgtattttttcaagagaggtggcagcattcagcagtatatttataaacaggaacctgtacagaagtgccctggaagaaggcctgctctaaattatccagtgtatggagaaacgacacaggttaggagacgtcgctttgaacgtgctataggaccttctcaaacacacaccatcagaattcaatattcacctgccagactggcttatcaagacaaaggtgtccttcataatgaagttaaagtgagtatactgtggagaggacttccaaatgtggttacctcagctatatcactgcccaacatcagaaaacctgacggctatgattactatgccttttctaaagatcaatactataacattgatgtgcctagtagaacagcaagagcaattactactcgttctgggcagaccttatccaaagtctggtacaactgtccttagactgatgagcaaaggaggagtcaactaatgaagaaatgaataataaattttgacactgaaaaacattttattaataaagaatattgacatgagtataccagtttatatataaaaatgtttttaaacttgacaatcattacactaaaacagatttgataatcttattcacagttgttattgtttacagaccatttaattaatatttcctctgtttattcctcctctccctcccattgcatggctcacacctgtaaaagaaaaaagaatcaaattgaatatatcttttaagaattcaaaactagtgtattcacttaccctagttcattataaaaaatatctaggcattgtggatataaaactgttgggtattctacaacttcaatggaaattattacaagcagattaatccctctttttgtgacacaagtacaatctaaaagttatattggaaaacatggaaatattaaaattttacacttttactagctaaaacataatcacaaagctttatcgtgttgtataaaaaaattaacaatataatggcaataggtagagatacaacaaatgaatataacactataacacttcatattttccaaatcttaatttggatttaaggaagaaatcaataaatataaaatataagcacatatttattatatatctaaggtatacaaatctgtctacatgaagtttacagattggtaaatatcacctgctcaacatgtaattatttaataaaactttggaacattaaaaaaataaattggaggcttaaaaaaaaaaaaaaaaa

SEQ ID NO: 11731 - DNA, 3396 bp, Homo sapiens
cctttaagagcggctggccaggcacggcctccgcctctcagtacgcggagcgccggcggtcacctggggctcgcggagcggccagatcgcggcggagtcggcgcgcttccccgagggaaggtgggagaggggacccggacgcgaggtgccccgaagccctctcgagcgtaaccgtcccgcgcctctctgaggcggaggatgcgggagcgcatctgggcgccgccgctgctgctgctgctgccgctgctactgccgccgccactgtggggcggccccccggacagcccacgccgggagctggagctggagcccgggcctctgcagcccttcgacctgctctacgccagcggcgcggccgcctactacagcggagactacgagcgagcggtgcgcgacttggaagcggcgctgcgcagccaccggcgcctgcgggaaatccgcacgcgctgtgcccgccactgcgcggcgcgccacccgctcccgcccccgccccccggcgagggccccggcgctgagctgccccttttccgctccttgttggggcgggcgcgctgttatcgcagctgtgagacccagcgcctcgggggccccgcatcccgccaccgcgtcagcgaggatgtgcgcagcgacttccagcgcagagtgccctacaactacctgcagcgggcctacatcaagcttaaccagctcgaaaaagcagtggaagcagctcacacatttttcgtggctaaccctgagcacatggaaatgcagcagaacattgagaattacagggcgacagctggtgttgaagcattgcagttggtagacagagaagccaagccacacatggagagttacaatgcaggagttaaacattatgaggctgatgactttgagatggctatcaggcatttcgaacaagccttaagagaatatttcgttgaagatacagaatgccggaccctatgtgaggggcctcagagatttgaagaatatgagtatttagggtataaggctggtctgtatgaagctattgcagatcactacatgcaggtgcttgtttgtcagcatgaatgtgtgagggaacttgccacccgccctggccgcctctctcccatcgagaattttcttcctctgcactatgattacctacagtttgcctactatcgagttggtgagtatgtgaaagccctggagtgtgccaaagcctatcttctatgccatccagatgatgaggatgtcctagacaatgtggattactatgagagtctgctggatgatagcattgacccggcatccattgaggccagagaggatttaacaatgtttgtgaaacgtcataagctggagtctgagctgataaaatcagctgcagaaggtctggggttttcatacactgaaccgaattattggatcagatatggaggacgacaggatgagaatcgggtcccttcaggagtgaacgtagagggagcagaagttcatggattctcaatgggaaaaaagctatcacccaagatagatcgagacctaagagaaggtggtcctctactctatgagaacatcacattcgtctacaactcggagcagctgaacgggactcagcgggttctcctggataacgtcctgtcggaagaacagtgccgggagctccacagcgtggccagtggaatcatgcttgttggtgatggatacagaggaaaaacttcaccccatacacccaatgaaaagtttgaaggtgcaactgtcctgaaagcactcaaatctggttatgaaggtcgagtcccactgaagagcgctcgtctgttttatgacatcagcgaaaaggctcgaaggattgtagaatcttattttatgctgaactcaactctgtatttttcctatacacacatggtctgccgaacagccctgtctggtcagcaggatagaagaaatgacctcagtcatcccatccatgctgacaactgtttgttggatccagaggccaacgaatgctggaaggagcctcctgcttacacatttcgagactatagtgctctcctatatatgaatgatgactttgaaggaggagaattcatattcacagagatggatgctaagactgtgactgcctctataaaaccaaaatgtgggcgcatgatcagcttctcatctggaggagagaaccctcatggggtgaaggcagtcaccaagggaaagaggtgtgctgtggctctgtggttcaccttggacccactttatagagaattggagcgaatacaggctgatgaagtgattgcaattctggatcaagaacagcaagggaagcatgaactgaatatcaaccctaaagatgagctataaaaatgagaaagaatgttctatcaaatatttatttaaattgttaatcttatgagaacctttttatttttgtacagagccatggtataaattaacaggttaatgtcagtcatcagatcttccttctcttcctaaggatgcttgtgttgcctcaatctatcaatctatctttcttgttttgggttgttttctctctctctctctctctctcttcttagagacatggtctaaccatgttgtctaggatatagggcagtggctattcacagatgtgatgatagcacactggagcctcaaactcttaggctcaggcgatccttcaagcctcccggggagctgggaccacaggcacgtgccaccacacccagctctctttcttggtttttcatcatttcatgtatctatcaaagcccagttcacctcctcccccaaacacacacacacacacacacacacacacacacaattaagttgctgcagattcaaaagcttagagagaataagcttcttggtggtgaaactacaactctcacgtgtgctccagttctaaaattaacctgtgcctggtctctgaagccctttcttgctctgtgcctttcagccacatccttaggtgctaacggccatgagctccgactctccaaagtgagctccactttgggtctgaggagcccctggcagagtccacgctgcctcaggtatcatgggcgtaatgatcacccaggctccgggagatctcatggatgattactgtatgagacagaggggacttcagtctttccagggccttggtggaatttttggctctggtgttttcgccagacaataaacttacactggaagctttgatccaccctccacagtactccagaaaggactgtcctataagttgtacactttaaaaggtcatgtagaggttgtagtagaatggcttttcaccctggtgactttggaagaaactcttgaatactgcctgcatccgggcaccatggccaggttgcctaggagtggggtccactgatgaaaagaggtgttttgtacttacataagaaaaataaatttctgattgatttt

SEQ ID NO: 11732 - DNA, 13268 bp, Homo sapiens
ggtcctccccttctcctcccctgctcgctgcagactccctcctcactgtcgctgccgagatccacagtcggttgtggctcagcccctgttgcaggggacaagtgagggagacttccctgtcctgccctgagacgccgccctcccggggttggggacagagcaggtgcagaggcactgcagctgctcggttgcccagcctcctgaatgatgccagcccagtatgctctaacctccagcctggttctcctggtgctgctgagcacagccagagcaggccccttctcttcacggtccaatgtgacactgccagccccccggccccctccccagccagggggccacacagtgggggctggagtgggaagcccctcttctcagctttacgagcacacagtggaaggaggggagaagcaggtggtattcacccaccgcattaacctgcccccttccactggctgtggctgtcccccaggcaccgagcccccagtccttgcttcagaggtacaggccctgagggtccgtctagagatcctggaggagttggtgaaggggctcaaggaacagtgcactgggggatgttgtcctgcctctgcccaagctggcacaggtcagacagatgtgcggaccctctgcagtctccatggtgtgtttgatctgagccgctgcacctgttcctgtgagccaggctggggtgggcccacctgctcagaccccacagatgctgagatccctccctcttccccaccctcagcctcggggtcctgcccagatgactgcaatgatcagggtcgctgtgtccgtggtcgttgcgtgtgctttcccggctacactggccccagctgtggctggccatcctgtcccggggactgccaaggccgtgggcgctgcgtgcagggcgtgtgtgtgtgccgggcaggcttctcaggccccgactgcagccagcgctcctgccctcgaggttgcagccagaggggacgctgtgagggtgggcgctgcgtgtgtgacccaggctacactggtgacgactgtggcatgaggagctgccctcgcggttgcagtcagagggggcgctgtgagaatgggcgctgcgtgtgtaaccccggctacactggcgaggactgtggggtgaggagctgccctcggggctgcagccagcggggacgctgcaaggacgggcgctgcgtgtgtgaccccggctacactggcgaggactgtggtacgcggagctgcccctgggactgtggcgagggcgggcgctgcgtggacggccgctgcgtgtgctggcccgggtacacaggcgaggactgcagcacgcggacatgtccgagggactgccggggccgcgggcgctgcgaggacggcgaatgcatttgcgacacgggctacagcggggacgactgcggcgtgcgcagctgccctggcgactgcaaccaaaggggccgctgcgaggacggccgctgcgtgtgctggccggggtacactggaaccgattgcggctcgcgcgcctgcccacgcgactgtagaggtcgcgggcgctgcgagaacggcgtgtgtgtttgcaatgcgggctacagcggcgaggactgcggtgtgcgcagctgtcctggggactgtcgtggccggggccgctgtgagagtggccgctgcatgtgttggccggggtacacaggccgggactgcggcacgcgcgcctgtcctggcgactgtcgcgggcgcgggcgctgcgtggatggccgctgcgtgtgcaacccgggcttcaccggtgaggactgtgggagccgtcgctgtcccggggactgccgtgggcacggcctttgcgaggatggcgtgtgcgtgtgtgacgcaggctactcaggggaagactgcagcacgcgcagctgccccgggggctgccgaggccgcggccagtgcctagatgggcggtgtgtgtgcgaggacggctactctggcgaggattgcggtgtgaggcagtgcccgaatgactgcagccagcacggcgtgtgccaggacggtgtgtgcatctgttgggaaggctacgtgagtgaggactgcagcatccgcacctgcccctccaactgccacgggaggggccgctgtgaggaagggcgctgcctgtgcgacccaggctacaccggccctacctgtgccacccgcatgtgcccggctgactgccggggacgtgggcggtgtgtgcaaggagtgtgcctgtgccacgtgggctatggcggtgaggactgcgggcaggaagagcctccagccagcgcctgccctggaggctgcgggccccgggaactgtgccgggcaggccagtgtgtgtgtgtagagggcttccgaggccctgactgtgccatccagacatgcccaggggactgccgtggccgaggagagtgtcacgatggcagctgtgtctgcaaagatgggtatgctggcgaagactgcggagaagcacgggttccaagctctgcctcagcctatgaccagagaggactggcccctggacaggagtaccaggtcactgtccgagcccttcgagggaccagctggggccttcctgcctccaagaccatcaccaccatgatcgatgggccccaggacctccgagtggtggctgtgacaccgacaacactggagcttggctggctgcgtccccaggctgaggtggaccgatttgtggtgtcctacgtcagtgccggcaaccagagggtgaggctggaagtgccccctgaagcagacgggacgctgctgactgacctgatgccaggcgtagaatatgtggtgactgtcacagcggagcggggccgggcagtcagctacccagcttctgtcagggccaacacagaggaaagggaggaggagtccccgcccaggccaagcctgtcccagcccccacggcggccttggggcaacctgacggccgagctgagccgtttccgcggcacggtgcaggacctggagcgccacctgcgggctcacggctacccactgcgggccaaccagacttacacgtcggtggcgcgccacatccatgaatacttgcagcggcaggtgctgggcagttccgccgatggcgcgcttctcgtgtctctcgacgggctccgcggccagttcgagcgcgtggtgctgcgctggcggcctcagccgcctgcagagggccccggcggtgagctgactgtgccgggcaccacgcgcaccgtcagcctgcccgacctcaggcccggcaccacctaccacgtggaggtccacggggtgcgggcggggcagacctccaagtcctacgccttcatcaccaccacaggcccctcgacgacgcaaggggcccaggctcctctcctgcagcagcgcccccaggagctgggagagttgagggtgctgggcagagatgagacagggcgcctccgtgtggtctggaccgcccagcctgacacctttgcctacttccaactgcgcatgcgggtgcccgaggggccgggggcacatgaggaagtgctgccaggggacgtccgccaggctctggtgcctccaccccctcctggaaccccgtatgagctgtcacttcatggggtccctcctgggggcaagccctctgaccccatcatctaccaaggcattatggacaaggatgaggagaagcctgggaagtcctcaggcccaccacgcctgggtgagctgacggtgacagacaggacctccgactccttgctcctgcgctggacggtccccgagggcgagtttgactccttcgtgatccagtacaaagacagggacgggcagccccaggtggtgcccgtggaaggaccccagcgctcggccgtcatcacctccctggatcctggccgcaagtacaaatttgtcctgtatgggtttgttggcaagaagaggcatggtccgctggtggctgaagccaagatcttgcctcagagtgacccaagtccagggactccaccccacctgggaaacctgtgggtgacagaccctaccccagattcactgcacctctcctggactgtccctgagggccagtttgacaccttcatggtccagtacagggacagggatggacggccccaggtggtacctgtggaagggcccgagcgttcatttgttgtctcctcactggaccctgaccacaagtacagattcactctgtttggaattgcgaacaagaagcggtatggccccctcacggccgatggcaccactgctccagagaggaaagaggagcccccccgccctgagttcctggagcagcccctcctgggggaactgacagtgaccggcgtgaccccagactccttgcgtctctcatggacagtggcccagggccccttcgactcattcatggtccagtacaaggatgcacaggggcagccccaggcagtgcctgttgcgggggatgagaatgaggttactgtccccggcctggatcccgaccggaagtataagatgaacctctacgggcttcgtggcaggcagcgtgtggggcccgagtctgtggtggccaagactgctcctcaggaggatgtggacgagacccccagccccacagaactgggcacggaggccccggagtcccccgaggagccgctcctgggggagctgacagtgacaggatcctcccctgattcgctgagcctcttctggaccgtcccccagggcagcttcgactctttcaccgtgcagtacaaggacagggatgggcggccccgggcggtgcgtgttgggggcaaggagagtgaggtcaccgtgggaggcctagagcccgggcacaagtacaagatgcacctgtacggcctccacgaggggcagcgcgtgggcccggtgtccgccgtgggcgtgacagccccacaacaagaagagacccctccagccactgagtccccgctggagccacgcctaggagagctgacagtgacagatgtgacccccaactctgtgggcctctcctggacagtccccgagggccagtttgactccttcatagtccagtacaaggacaaggacgggcagccccaggtggtgccggtggcggcagaccagcgagaggtcacagtctacaacctggagcctgagagaaaatataagatgaacatgtatggactacatgatgggcaacgcatgggccccctgtctgtggtcatcgtgacggccccagccacagaggcctccaagcctcccctggagccacgcctaggggagctgacagtgacggatataacccctgactctgtgggcctctcatggacagtccctgagggtgaattcgactcctttgtggttcagtacaaggacagggacgggcagccccaggtggtgcccgtggctgcagatcagcgggaggtcactatccctgacctggaaccctcccgcaagtacaagttcctgctctttgggatccaggatgggaaacgacgcagcccagtctctgtggaggcaaagacggttgcccgaggtgacgccagcccaggggccccaccccgccttggggagctgtgggtgacagaccccaccccagactcactgcgcctctcctggacggttcctgagggccagttcgactcttttgtggtccagttcaaggacaaagacgggccccaggtggtgcccgtggagggccatgagcgctctgtcactgtcacccctctggatgccggccgcaagtacagattcctcctctatggcctcctgggcaagaagcgccatggccctctcactgccgacggcaccacggaagcccggagtgctatggatgatactggaacaaagcgtcccccaaaaccccgtctgggggaggagctgcaggtgaccaccgtgacccagaactccgtgggcctctcctggacagtccctgagggccagtttgactcctttgtggtccagtacaaagacagggacgggcagccccaggtggtgcccgtggagggcagcctcagggaggtcagcgtgccgggcctggaccctgcccacaggtacaagctgctgctctacgggctgcaccacggcaagcgtgtgggccccatctcggccgtcgccattactgccggcagggaagaaacggaaactgagaccacggccccgacccctccagcgcctgagccccacctcggggagttgacagtggaggaggccacgtcacacaccctgcatctctcctggatggtgactgagggagaatttgactccttcgaaatccagtacacagatagagacgggcaactccaaatggtccgcataggaggtgaccggaatgacatcaccctctctggcctggaatccgaccacagatacctggtgaccctgtatggtttcagtgatgggaagcatgtaggtcctgtccatgtcgaggccctgacagtcccggaggaggagaagccttcagaacctcccaccgcaacccccgagccccccatcaagcctcgcctgggggagctgaccgtgacagatgccacccctgactccctcagcctgtcctggacagttcccgagggacagtttgaccacttcctggtccagtacaggaatggagatgggcagcccaaggcagtgagggtgccagggcacgaggaaggggtcaccatctcgggcctggagccagaccataaatacaagatgaacctgtacggcttccacggtggccagcgcatgggccctgtgtctgtcgtcggggtgacagaacccagcatggaggccccggagcccgctgaggagccgctcctgggggagctaacagtgacaggatcctcccctgactcgctgagcctctcctggaccgtcccccagggccgcttcgactccttcaccgtgcagtacaaggacagggacgggcggccccaggtggtgcgtgttgggggcgaggagagtgaagtcaccgtggggggcctggagcctgggcgcaagtacaagatgcacctgtacggcctccacgaggggcggcgcgtgggcccagtgtctgctgtgggcgtcacggcccccgaagaggagtcccctgatgctcctcttgcaaagctgcgcctagggcagatgacagtgagagacatcacctccgactccctcagcctctcctggacagtccccgagggccagtttgaccatttcttggtccagtttaagaatggggacgggcagcccaaggcggtgcgggtgccgggacacgaggatggggtcaccatctcgggcctggagccagaccacaagtacaagatgaacctgtacggcttccacggtggccagcgcgtgggccccgtgtctgctgttggtttaactgcctcgacagaacctcccacccctgaaccccccatcaagcctcgcctggaggagctgaccgtgacagatgcgacccctgactccctcagcctgtcctggacggttcccgagggacagtttgaccacttcctggtccagtacaagaatggggatgggcagcccaaggcaacacgggtgccaggacatgaggacagggtcaccatctccggcctggagccagacaacaagtacaagatgaacctgtacggcttccacggtggccagcgtgtgggccccgtgtctgccatcggggtgacagaggaagagacccccagccccacagaacccagcatggaggccccggagccccctgaggagccgctcctgggggagctaacagtgacaggatcctcccctgactcgctgagcctctcctggaccgtcccccagggccgcttcgactccttcaccgtgcagtacaaggacagggacgggcggccccaggtggtgcgtgttgggggcgaggagagcgaggtcaccgtggggggcctggagcctgggcgcaaatacaagatgcacctgtatggcctccacgaggggcggcgcgtgggcccggtgtccaccgtgggcgtgactgccccacaagaggatgtggacgagacccccagccctacagaaccaggcacagaggccccagggccccccgaggagcctctcctgggggagctgacagtgacaggatcctcccctgactcgctgagcctttcctggaccgtcccccagggccgctttgactccttcaccgtgcagtacaaggacagggacgggcggccccaggcggtgcgtgttgggggccaggagagcaaggtcactgtgaggggcctggagcctgggcgcaagtacaagatgcacctgtacggcctccacgaggggcggcgcctgggcccggtgtctgccgtgggcgtcacagaggatgaagccgagaccacccaagcagtgcctaccatgacccctgagccccccatcaagcctcgcctgggggagctgaccatgacagatgccacccctgactccctcagcctgtcctggacggttcccgagggccagtttgaccacttcctggtccagtacaggaatggggatgggcagcccaaggcggtgcgggtgccggggcacgaggacggggtcaccatctcaggcctggagccagaccataaatacaagatgaacctgtacggcttccacggtggccagcgcgtgggccccatctctgtcattggggtgacggaggaagagacccccagccccacggaactcagcactgaggccccggagccccctgaggagccgctcctgggggagctgacagtgacaggatcctcccctgactcgctgagcctctcctggaccatcccccagggccacttcgactccttcaccgtgcagtacaaggacagggacgggcggccccaggtgatgcgtgtcaggggcgaggagagcgaggtcaccgtggggggcctggagcccgggcgcaaatacaagatgcacctgtacggcctccacgaggggcggcgtgtgggcccggtgtccaccgtgggtgtgacagtgcccaccacaacccctgagccccccaacaagcctcgcctcggggagctgaccgtgacagatgccacccctgactccctcagcctgtcctggatggtccccgagggccagtttgaccacttcctggtccagtacaggaatggggatgggcagcccaaggtggtgcgggtgccggggcacgaggacggggtcaccatctcaggcctggagccagaccacaagtacaagatgaacctgtacggcttccacggtggccagcgcgtgggccccatctctgtcattggggtgacagaggaagaaactcccgcccccacagaacccagcacggaggccccggagccccctgaggagccgctcctgggggagctgacagtgacaggatcctcccctgactcgctgagcctctcctggaccatcccccagggccgcttcgactccttcactgtgcagtacaaggacagggacgggcggccccaggtggtgcgtgtcaggggcgaggagagcgaggtcaccgtggggggcctggagcccgggtgcaaatacaagatgcacctgtacggcctccacgaggggcagcgcgtgggcccagtgtccgctgtgggtgtgacagctccaaaggatgaagccgagaccacccaagcagtgcctaccatgacccctgagccccccatcaagcctcgcctgggggagctgaccgtgacagatgccacccccgactccctcagcctgtcctggatggttcccgagggccagtttgaccacttcctggtccagtacaggaatggggatgggcagcccaaggcggtgcgggtgccggggcacgaggacggggtcaccatctcaggcctggagccagaccataaatacaagatgaacctgtacggcttccacggtggccagcgcgtaggccctgtgtctgccattggggtgacggaggaagagacccccagccccacagaacccagcactgaggccccggaggcccctgaggagccgctcctgggggagttgacagtgacaggatcctcccctgactcgctgagcctctcctggaccgtcccccagggccgcttcgactccttcaccgtgcagtacaaggacagggacgggcagccccaggtggtgcgtgtcaggggcgaggagagcgaggtcaccgtggggggcctggagcccgggcgcaaatacaagatgcatctgtacggcctccacgaggggcagcgcgtgggcccagtgtccaccgtgggcatcacggcgcccctgcccacaccactgccggtggagccccgcctgggggagctggcggtggcggccgtgacctcggactcagtgggcctctcatggacggtggcccagggcccctttgactccttcctggtacagtacagggacgcgcaggggcagccccaggcagtgcctgtgagcggagacctccgagcggtcgccgtctcggggctggacccggcccgcaagtacaagttcctgctctttggactccagaatgggaaacgccacggcccagtccctgtggaggccaggaccgccccagacaccaaaccgtctccccgcctgggggagctgactgtgacagatgcgacccctgactccgtgggcctctcgtggacggtccctgagggcgaattcgactccttcgtggtccagtacaaggataaggatggtcggctccaggtggtgccggtggcagccaaccagcgggaggtcacagtccagggcctggagcccagtaggaaatacaggttcctgctctatggtctgtcaggcaggaaacgactgggccccatctctgctgacagcaccacagctcccctggagaaggagctacctccccacctgggggaactgaccgtggctgaggagacctccagctctctgcgcctgtcctggacggtagcccagggcccctttgactccttcgtggtccagtacagggacacggacgggcagcccagggcagtgcctgtggccgcagaccagcgcacagtcaccgtagaggacctggagcctggcaagaaatacaagtttctgctctacgggctccttgggggaaagcgcctgggcccggtctctgccctgggaatgacagccccagaagaggacacaccagccccagagttagccccagaggcccctgagcctcctgaagagccccgcctaggagtgctgaccgtgaccgacacaaccccagactccatgcgcctctcgtggagcgtggcccagggcccctttgattccttcgtggtccagtatgaggacacgaacgggcagccccaggccttgctcgtggacggcgaccagagcaagatcctcatctcaggcctggagcccagcaccccctacaggttcctcctctatggcctccatgaagggaagcgcctggggcccctctcagctgagggcaccacagggctggctcctgctggtcagacctcagaggagtcaaggccccgcctgtcccagctgtctgtgactgacgtgaccaccagttcactgaggctcaactgggaggccccaccgggggccttcgactccttcctgctccgctttggggttccatcaccaagcactctggagccgcatccgcgtccactgctgcagcgcgagctgatggtgccggggacgcggcactcggccgtgctccgggacctgcgttccgggactctgtacagcctgacactgtatgggctgcgaggaccccacaaggccgacagcatccagggaaccgcccgcaccctcagcccagttctggagagcccccgtgacctccaattcagtgaaatcagggagacctcagccaaggtcaactggatgcccccaccatcccgggcggacagcttcaaagtctcctaccagctggcggacggaggggagcctcagagtgtgcaggtggatggccaggcccggacccagaaactccaggggctgatcccaggcgctcgctatgaggtgaccgtggtctcggtccgaggctttgaggagagtgagcctctcacaggcttcctcaccacggttcctgacggtcccacacagttgcgtgcactgaacttgaccgagggattcgccgtgctgcactggaagcccccccagaatcctgtggacacctatgacgtccaggtcacagcccctggggccccgcctctgcaggcggagaccccaggcagcgcggtggactaccccctgcatgaccttgtcctccacaccaactacaccgccacagtgcgtggcctgcggggccccaacctcacttccccagccagcatcaccttcaccacagggctagaggcccctcgggacttggaggccaaggaagtgaccccccgcaccgccctgctcacttggactgagcccccagtccggcccgcaggctacctgctcagcttccacacccctggtggacagaaccaggagatcctgctcccaggagggatcacatctcaccagctccttggcctctttccctccacctcctacaatgcacggctccaggccatgtggggccagagcctcctgccgcccgtgtccacctctttcaccacgggtgggctgcggatccccttccccagggactgcggggaggagatgcagaacggagccggtgcctccaggaccagcaccatcttcctcaacggcaaccgcgagcggcccctgaacgtgttttgcgacatggagactgatgggggcggctggctggtgttccagcgccgcatggatggacagacagacttctggagggactgggaggactatgcccatggttttgggaacatctctggagagttctggctgggcaatgaggccctgcacagcctgacacaggcaggtgactactccatgcgcgtggacctgcgggctggggacgaggctgtgttcgcccagtacgactccttccacgtagactcggctgcggagtactaccgcctccacttggagggctaccacggcaccgcaggggactccatgagctaccacagcggcagtgtcttctctgcccgtgatcgggaccccaacagcttgctcatctcctgcgctgtctcctaccgaggggcctggtggtacaggaactgccactacgccaacctcaacgggctctacgggagcacagtggaccatcagggagtgagctggtaccactggaagggcttcgagttctcggtgcccttcacggaaatgaagctgagaccaagaaactttcgctccccagcggggggaggctgagctgctgcccacctctctcgcaccccagtatgactgccgagcactgaggggtcgccccgagagaagagccagggtccttcaccacccagccgctggaggaagccttctctgccagcgatctcgcagcactgtgtttacaggggggaggggaggggttcgtacgggagcaataaaggagaaactgaggtacccgg

SEQ ID NO: 11733 - DNA, 3129 bp, Homo sapiens
ccttgtgcatttgggctgaagacaaagatgactgcaggagtgggcaggccggagtggggcgccctggcctgtccccaggaaggaggaggagtctgcagccctgtgggcttcaacatccatcaaggagtccagagcaggagccaggccaggcgggagggaaaggccctgggaggggctctctaatctcccagccccgactctgccccgtcactgccactgctcctcattactcgctggggctgctgtcgcctccccgaagggtggccttgtccagatagcggcaaacctccctgccgtggatgagtcaggagcattttcttaagaggaacatcactggaaaacaaaatgagcggggacacagaaaccaacagcagtggctgcatttgtggtacaggctcctcttccagagctcgctgatgcccacctcagacaggcctgaccacggcacggctggtgggatttgccagtcacctcaaccagccagttccaccctcagcttctctcagaagggagcaccacactcctcaagctcagtgaatgtatcccggcatgggtggggccagagcctgtgatatctcgaggtgggctcggcaggacaccggggtgtggaagggggaagcgagcacctgactcagacagcgcgggagctcgcaggagtcacgaggccacagcgacttcattgtctgactgggcctggacctataaacttcccacctcagccttgggccaagcctggaagataaaaatggagcaccccatggcgcccctcactcagattctcccctgggcttctcccacgcagccccagaagaggacacaccagccccagagttagccccagaggcccctgagcctcctgaagagccccgcctaggagtgctgaccgtgaccgacacaaccccagactccatgcgcctctcgtggagcgtggcccagggcccctttgattccttcgtggtccagtatgaggacacgaacgggcagccccaggccttgctcgtggacggcgaccagagcaagatcctcatctcaggcctggagcccagcaccccctacaggttcctcctctatggcctccatgaagggaagcgcctggggcccctctcagctgagggcaccacagggctggctcctgctggtcagacctcagaggagtcaaggccccgcctgtcccagctgtctgtgactgacgtgaccaccagttcactgaggctcaactgggaggccccaccgggggccttcgactccttcctgctccgctttggggttccatcaccaagcactctggagccgcatccgcgtccactgctgcagcgcgagctgatggtgccggggacacggcactcggccgtgctccgggacctgcgttccgggactctgtacagcctgacactgtatgggctgcgaggaccccacaaggccgacagcatccagggaaccgcccgcaccctcagcccagttctggagagcccccgtgacctccaattcagtgaaatcagggagacctcagccaaggtcaactggatgcccccaccatcccgggcggacagcttcaaagtctcctaccagctggcggacggaggggagcctcagagtgtgcaggtggatggccaggcccggacccagaaactccaggggctgatcccaggcgctcgctatgaggtgaccgtggtctcggtccgaggctttgaggagagtgagcctctcacaggcttcctcaccacggttcctgacggtcccacacagttgcgtgcactgaacttgaccgagggattcgccgtgctgcactggaagcccccccagaatcctgtggacacctatgacgtccaggtcacagcccctggggccccgcctctgcaggcggagaccccaggcagcgcggtggactaccccctgcatgaccttgtcctccacaccaactacaccgccacagtgcgtggcctgcggggccccaacctcacttccccagccagcatcaccttcaccacagggctagaggcccctcgggacttggaggccaaggaagtgaccccccgcaccgccctgctcacttggactgagcccccagtccggcccgcaggctacctgctcagcttccacacccctggtggacagaaccaggagatcctgctcccaggagggatcacatctcaccagctccttggcctctttccctccacctcctacaatgcacggctccaggccatgtggggccagagcctcctgccgcccgtgtccacctctttcaccacgggtgggctgcggatccccttccccagggactgcggggaggagatgcagaacggagccggtgcctccaggaccagcaccatcttcctcaacggcaaccgcgagcggcccctgaacgtgttttgcgacatggagactgatgggggcggctggctggtgttccagcgccgcatggatggacagacagacttctggagggactgggaggactatgcccatggttttgggaacatctctggagagttctggctgggcaatgaggccctgcacagcctgacacaggcaggtgactactccatgcgcgtggacctgcgggctggggacgaggctgtgttcgcccagtacgactccttccacgtagactcggctgcggagtactaccgcctccacttggagggctaccacggcaccgcaggggactccatgagctaccacagcggcagtgtcttctctgcccgtgatcgggaccccaacagcttgctcatctcctgcgctgtctcctaccgaggggcctggtggtacaggaactgccactacgccaacctcaacgggctctacgggagcacagtggaccatcagggagtgagctggtaccactggaagggcttcgagttctcggtgcccttcacggaaatgaagctgagaccaagaaactttcgctccccagcggggggaggctgagctgctgcccacctctctcgcaccccagtatgactgccgagcactgaggggtcgccccgagagaagagccagggtccttcaccacccagccgctggaggaagccttctctgccagcgatctcgcagcactgtgtttacaggggggaggggaggggttcgtacaggagcaataaaggagaaactgaggtacccggaaaa

SEQ ID NO: 11734 - DNA, 1239 bp, Homo sapiens
cggcgagggtcctgccgagggacccgttctgcgcccaggcaggctcgaagcacgcgtccctctctcctcgcagtccatggcgcggttcctgacactttgcacttggctgctgttgctcggccccgggctcctggcgaccgtgcgggccgaatgcagccaggattgcgcgacgtgcagctaccgcctagtgcgcccggccgacatcaacttcctggcttgcgtaatggaatgtgaaggtaaactgccttctctgaaaatttgggaaacctgcaaggagctcctgcagctgtccaaaccagagcttcctcaagatggcaccagcaccctcagagaaaatagcaaaccggaagaaagccatttgctagccaaaaggtatgggggcttcatgaaaaggtatggaggcttcatgaagaaaatggatgagctttatcccatggagccagaagaagaggccaatggaagtgagatcctcgccaagcggtatgggggcttcatgaagaaggatgcagaggaggacgactcgctggccaattcctcagacctgctaaaagagcttctggaaacaggggacaaccgagagcgtagccaccaccaggatggcagtgataatgaggaagaagtgagcaagagatatgggggcttcatgagaggcttaaagagaagcccccaactggaagatgaagccaaagagctgcagaagcgatatgggggcttcatgagaagagtaggtcgcccagagtggtggatggactaccagaaacggtatggaggtttcctgaagcgctttgccgaggctctgccctccgacgaagaaggcgaaagttactccaaagaagttcctgaaatggaaaaaagatacggaggatttatgagattttaatatttttcccactagtggccccaggccccagcaagcctccctccatcctccagtgggaaactgttgatggtgttttattgtcatgtgttgcttgccttgtatagttgacttcattgtctggataactatacaacctgaaaactgtcatttcaggttctgtgctctttttggagtctttaagctcagtattagtctattgcagctatctcgttttcatgctaaaatagtttttgttatcttgtctcttatttttgacaaacatcaataaatgcttacttgtatatagagataataaacctattaccccaagtgcaaaaaaaaaaaaaaaaaaaaaaaaaaaaaaaaaaaaaaaaaaaaaa

SEQ ID NO: 11735 - DNA, 4617 bp, Homo sapiens
ctccatctttctagtccccaccttccccggtgcagacacccggcgaagcccacccggttttcccagcggcatttccgatgacagcttcggggctacgtgtcctgtgctgtcggagacgcacaggaagcaaagtttgtgagaagccttgggggcgactttgccttgggcacccgcatttgtgcgtctgcgaggtgcctcggtgtgcgcggagctagtttcccagtttcccgggcccctcccttctccgagcccctctagcgatttgtttaggaaaagtgatgacatgaactagtagtggagaatcgcagcgccgctccccgccctggggagggaggggagccccggagagcctgccggtgggagctggaagcaggctcccggctgagcgccccagcccgaaaggcagggtctgggtgcgggaagagggctcggagctgccttcctgctgccttggggccgcccagatgagggaacagcccgatttgcctggttctgattctccaggctgtcgtggttgtggaatgcaaacgccagcacataatggaaacaggacctgaagacccttccagcatgccagaggaaagttcccccaggcggaccccgcagagcattccctaccaggacctccctcacctggtcaatgcagacggacagtacctcttctgcaggtactggaaacccacaggcacacccaaggccctcatctttgtgtcccatggagccggagagcacagtggccgctatgaagagctggctcggatgctgatggggctggacctgctggtgttcgcccacgaccatgttggccacggacagagcgaaggggagaggatggtagtgtctgacttccacgttttcgtcagggatgtgttgcagcatgtggattccatgcagaaagactaccctgggcttcctgtcttccttctgggccactccatgggaggcgccatcgccatcctcacggccgcagagaggccgggccacttcgccggcatggtactcatttcgcctctggttcttgccaatcctgaatctgcaacaactttcaaggtccttgctgcgaaagtgctcaaccttgtgctgccaaacttgtccctcgggcccatcgactccagcgtgctctctcggaataagacagaggtcgacatttataactcagaccccctgatctgccgggcagggctgaaggtgtgcttcggcatccaactgctgaatgccgtctcacgggtggagcgcgccctccccaagctgactgtgcccttcctgctgctccagggctctgccgatcgcctatgtgacagcaaaggggcctacctgctcatggagttagccaagagccaggacaagactctcaagatttatgaaggtgcctaccatgttctccacaaggagcttcctgaagtcaccaactccgtcttccatgaaataaacatgtgggtctctcaaaggacagccacggcaggaactgcgtccccaccctgaatgcattggccggtgcccggctcatggtctgggggatgcaggcaggggaagggcagagatggcttctcagatatggcttgccaaaaaaaaaaaaaaaaaaaaatcagaaattggagaaatccttagcacaattttctaaaaaataacagacatttttgttatacattagactatcagacactggacctaccttaatggttagacactttatgcaaaaaaagagaaaggtcccaggtgattttccacaaagaatgtgctaaaatgtccactgaaaacaaagccaagcctctgccctgcctctcccagctcccacaagggttccaggaattcctggtgttcccaggacaccagactgcaataactggaggcgcctccttcctgcccacccttcgctcacgccccagcgccctctctgaccagcctccgcttggtggccttcctctggccgtgtgatgaggtggttgctgtctccataggggccagctccccagggcagactcacgtgcccctctgaggctcagaaaatgcccagcccttcctcaaaatgagcagccacccatgactttgtgggctccttgttagcctgagaccaggctttgcagaggggcggggggtgaggcttagcccagaaggagaactgagcaggaaaccaaggctcttctctgtcccctgcccttcccctcctgccagggggaggctcaggttggtccccgagtgccgcctgtactcacaaaggctgcctttcctctagagtcactaattttacctgatgctatgagagaatcatattgaagatgaaatgtctaatatataatgtatattttaaagcagagactattttggtggataggtgggagggagcaaggggagtttgagggaatcagagcttgatgctactgtacagaactggacaggttgggccggcagtggtggggccagagggctctgtgctctaggagctaagccagcagcccccgagaggggacttggctgggcctttcctatgggcaaggcccagtgctcttcctgcccaccagggaccatggagcagtggcaccctatggggctatgatccctaggcctgggcctgggcctgcctatggcccagagctaccctgggagtgtcagtgctagcagcacagctacctctggtggcaggagaagagaggcccagcacagcagcaggccaggccttcctgtccaggtctgcatggagcactcggtgacccagagcagggactggaggcacccccagccctgccccaggccacagcaggacaggccgggacaggcctcacccaaggccaaggctggcatcagccaatcattcagagctgaggccctgggcctagcctgcccttctcaggtgccaataccaccccagccctgcccttggcctcactttttcccagcaataagtggggttcaccacccgcctcgggaatactttccccttctaaatgggacttgctgttacctcaggaggctccttagtgcaaatatgaccctggtcagggctttgccaccgttgaagccctgcagaaggtgcaatgtaggggttctggggccacagaggagaggccacttcccaccaggacccccaacatgaagtctaggcctcaggggctcccgcccttcttcctccagcagcgggaactgccactgctctcccaggccctgttctggaggctaaccttggttcctggagagtgtgcccctccaccctccctccagcagccctgatcacaccatgagagccaggaacgggtcaccctgctgaagatcactctgtgccctgggggaggagccaagccctcaccccacaaggggcaggtgggggcttggttgctgacccggcccaagtccccacagagcaccttctgtagctccagcttgtctccctggcttctctttgaaggagaaaaatgtaaaatatgcactgagaaagccagccccgcctgcttagtcagccccggcagcagggcagccatgggaactcaggaaaagcaggaaccctttccaaaagcccagagatgccctgggctcagatctgtaattctcccaggagctgtgatagagcaggccacacaaagtccctacgcctccctgctgcctcccccagatgcatgtggtggcatcaccattccccaaattgaatatcagcatgcggcctgaccagggactctttagatgcatgaatttatttatatgaaggctctcacagagacacacacagcacttcagtagcatttgcattcctggttaaagaatcaccaatatttaaaataaaaactttcctgaaattgggactgtcatgttatccagaagggctggtacatccgcccaccatgtccccctgctgggtcaggagccaacacaggaccctgcgtgtgagcgtgcctgacatctcacgcacggccactccagagccggtccctgtccttggaaagctgtgaagccttgcgttgagttccttctcgatactgacggctccgtgctgacattctgagctctggagtcacaccagcgcaggggcgtggaggaactgaggtttggaaggaatgccaggtctcgcacagcttggcctcgagaaggtgagaggaaggcaaaggccagggaggggacccagagaggcctggcacacaaggcccaagcaccaccgtcaacacagcccagtccatacagaaatgggtttcatgcctgaaaagctttttacagaaagatgccgcctgtagccagtgacagccgcaaccctacaggcctcagttccttgcagaggtgaggggtagagagtcagcctccctcccttccagcagcgacccagcttccctccacttccaggtggtgctgggctcaccgagggagcactggtgggtgctctgaaaacccacaggatcccacctccaggcccacctgggtcccatctcactctcttcttctttcaccaattgctaacatagaccttgttgggatcacgatggcttcacaagccagctgttgggtttgctatgtcactgtggctcagtcacatccctgcgtgtatactgtctgcggggcacatatgtatccatttagagctaaaggaatcagtgtacactacagctaatcctaataaatccgatgttttcggaaaaa

SEQ ID NO: 11736 - DNA, 1700 bp, Homo sapiens
cggaattggtgggttcttggtctcactgagttctagaatgaagctgcagaccctcgcagtgagtgttacagctcttaaggctctctgactgccacccctgcctgcctgcccggccctgcacaacatgcagccctccggcctcgagggtcccggcacgtttggtcggtggcctctgctgagtctgctgctcctgctgctgctgctccagcctgtaacctgtgcctacaccacgccaggcccccccagagccctcaccacgctgggcgcccccagagcccacaccatgccgggcacctacgctccctcgaccacactcagtagtcccagcacccagggcctgcaagagcaggcacgggccctgatgcgggacttcccgctcgtggacggccacaacgacctgcccctggtcctaaggcaggtttaccagaaagggctacaggatgttaacctgcgcaatttcagctacggccagaccagcctggacaggcttagagatggcctcgtgggcgcccagttctggtcagcctatgtgccatgccagacccaggaccgggatgccctgcgcctcaccctggagcagattgacctcatacgccgcatgtgtgcctcctattctgagctggagcttgtgacctcggctaaagctctgaacgacactcagaaattggcctgcctcatcggtgtagagggtggccactcgctggacaatagcctctccatcttacgtaccttctacatgctgggagtgcgctacctgacgctcacccacacctgcaacacaccctgggcagagagctccgctaagggcgtccactccttctacaacaacatcagcgggctgactgactttggtgagaaggtggtggcagaaatgaaccgcctgggcatgatggtagacttatcccatgtctcagatgctgtggcacggcgggccctggaagtgtcacaggcacctgtgatcttctcccactcggctgcccggggtgtgtgcaacagtgctcggaatgttcctgatgacatcctgcagcttctgaagaagaacggtggcgtcgtgatggtgtctttgtccatgggagtaatacagtgcaacccatcagccaatgtgtccactgtggcagatcacttcgaccacatcaaggctgtcattggatccaagttcatcgggattggtggagattatgatggggccggcaaattccctcaggggctggaagacgtgtccacatacccggtcctgatagaggagttgctgagtcgtggctggagtgaggaagagcttcagggtgtccttcgtggaaacctgctgcgggtcttcagacaagtggaaaaggtacaggaagaaaacaaatggcaaagccccttggaggacaagttcccggatgagcagctgagcagttcctgccactccgacctctcacgtctgcgtcagagacagagtctgacttcaggccaggaactcactgagattcccatacactggacagccaagttaccagccaagtggtcagtctcagagtcctccccccacatggccccagtccttgcagttgtggccaccttcccagtccttattctgtggctctgatgacccagttagtcctgccagatgtcactgtagcaagccacagacaccccacaaagttcccctgttgtgcaggcacaaatatttcttgaaataaatgttttggacatagaaaaaa

SEQ ID NO: 11737 - DNA, 1147 bp, Homo sapiens
cgaccaggttctccttccccagtcaccagttgctcgagttagaattgtctgcaatggccgccctgcagaaatctgtgagctctttccttatggggaccctggccaccagctgcctccttctcttggccctcttggtacagggaggagcagctgcgcccatcagctcccactgcaggcttgacaagtccaacttccagcagccctatatcaccaaccgcaccttcatgctggctaaggaggctagcttggctgataacaacacagacgttcgtctcattggggagaaactgttccacggagtcagtatgagtgagcgctgctatctgatgaagcaggtgctgaacttcacccttgaagaagtgctgttccctcaatctgataggttccagccttatatgcaggaggtggtgcccttcctggccaggctcagcaacaggctaagcacatgtcatattgaaggtgatgacctgcatatccagaggaatgtgcaaaagctgaaggacacagtgaaaaagcttggagagagtggagagatcaaagcaattggagaactggatttgctgtttatgtctctgagaaatgcctgcatttgaccagagcaaagctgaaaaatgaataactaaccccctttccctgctagaaataacaattagatgccccaaagcgattttttttaaccaaaaggaagatgggaagccaaactccatcatgatgggtggattccaaatgaacccctgcgttagttacaaaggaaaccaatgccacttttgtttataagaccagaaggtagactttctaagcatagatatttattgataacatttcattgtaactggtgttctatacacagaaaacaatttattttttaaataattgtctttttccataaaaaagattactttccattcctttaggggaaaaaacccctaaatagcttcatgtttccataatcagtactttatatttataaatgtatttattattattataagactgcattttatttatatcattttattaatatggatttatttatagaaacatcattcgatattgctacttgagtgtaaggctaatattgatatttatgacaataattatagagctataacatgtttatttgacctcaataaacacttggatatcc

SEQ ID NO: 11738 - DNA, 1853 bp, Homo sapiens
gccaaagggaagtgctgcgaggtttacaaccagctgcagtggttcgatgggaaggatctttctccaagtggttcctcttgaggggagcatttctgctggctccaggactttggccatctataaagcttggcaatgagaaataagaaaattctcaaggaggacgagctcttgagtgagacccaacaagctgcttttcaccaaattgcaatggagcctttcgaaatcaatgttccaaagcccaagaggagaaatggggtgaacttctccctagctgtggtggtcatctacctgatcctgctcaccgctggcgctgggctgctggtggtccaagttctgaatctgcaggcgcggctccgggtcctggagatgtatttcctcaatgacactctggcggctgaggacagcccgtccttctccttgctgcagtcagcacaccctggagaacacctggctcagggtgcatcgaggctgcaagtcctgcaggcccaactcacctgggtccgcgtcagccatgagcacttgctgcagcgggtagacaacttcactcagaacccagggatgttcagaatcaaaggtgaacaaggcgccccaggtcttcaaggtcacaagggggccatgggcatgcctggtgcccctggcccgccgggaccacctgctgagaagggagccaagggggctatgggacgagatggagcaacaggcccctcgggaccccaaggcccaccgggagtcaagggagaggcgggcctccaaggaccccagggtgctccagggaagcaaggagccactggcaccccaggaccccaaggagagaagggcagcaaaggcgatgggggtctcattggcccaaaaggggaaactggaactaagggagagaaaggagacctgggtctcccaggaagcaaaggggacaggggcatgaaaggagatgcaggggtcatggggcctcctggagcccaggggagtaaaggtgacttcgggaggccaggcccaccaggtttggctggttttcctggagctaaaggagatcaaggacaacctggactgcagggtgttccgggccctcctggtgcagtgggacacccaggtgccaagggtgagcctggcagtgctggctcccctgggcgagcaggacttccagggagccccgggagtccaggagccacaggcctgaaaggaagcaaaggggacacaggacttcaaggacagcaaggaagaaaaggagaatcaggagttccaggccctgcaggtgtgaagggagaacaggggagcccagggctggcaggtcccaagggagcccctggacaagctggccagaagggagaccagggagtgaaaggatcttctggggagcaaggagtaaagggagaaaaaggtgaaagaggtgaaaactcagtgtccgtcaggattgtcggcagtagtaaccgaggccgggctgaagtttactacagtggtacctgggggacaatttgcgatgacgagtggcaaaattctgatgccattgtcttctgccgcatgctgggttactccaaaggaagggccctgtacaaagtgggagctggcactgggcagatctggctggataatgttcagtgtcggggcacggagagtaccctgtggagctgcaccaagaatagctggggccatcatgactgcagccacgaggaggacgcaggcgtggagtgcagcgtctgacccggaaaccctttcacttctctgctcccgaggtgtcctcgggctcatatgtgggaaggcagaggatctctgaggagttccctggggacaactgagcagcctctggagaggggccattaataaagctcaacatcattggcaaaaaaaaaaaaaaaaaa

SEQ ID NO: 11739 - DNA, 5084 bp, Homo sapiens
gatcccatcgcagctaccgcgatgagaggcgctcgcggcgcctgggattttctctgcgttctgctcctactgcttcgcgtccagacaggctcttctcaaccatctgtgagtccaggggaaccgtctccaccatccatccatccaggaaaatcagacttaatagtccgcgtgggcgacgagattaggctgttatgcactgatccgggctttgtcaaatggacttttgagatcctggatgaaacgaatgagaataagcagaatgaatggatcacggaaaaggcagaagccaccaacaccggcaaatacacgtgcaccaacaaacacggcttaagcaattccatttatgtgtttgttagagatcctgccaagcttttccttgttgaccgctccttgtatgggaaagaagacaacgacacgctggtccgctgtcctctcacagacccagaagtgaccaattattccctcaaggggtgccaggggaagcctcttcccaaggacttgaggtttattcctgaccccaaggcgggcatcatgatcaaaagtgtgaaacgcgcctaccatcggctctgtctgcattgttctgtggaccaggagggcaagtcagtgctgtcggaaaaattcatcctgaaagtgaggccagccttcaaagctgtgcctgttgtgtctgtgtccaaagcaagctatcttcttagggaaggggaagaattcacagtgacgtgcacaataaaagatgtgtctagttctgtgtactcaacgtggaaaagagaaaacagtcagactaaactacaggagaaatataatagctggcatcacggtgacttcaattatgaacgtcaggcaacgttgactatcagttcagcgagagttaatgattctggagtgttcatgtgttatgccaataatacttttggatcagcaaatgtcacaacaaccttggaagtagtagataaaggattcattaatatcttccccatgataaacactacagtatttgtaaacgatggagaaaatgtagatttgattgttgaatatgaagcattccccaaacctgaacaccagcagtggatctatatgaacagaaccttcactgataaatgggaagattatcccaagtctgagaatgaaagtaatatcagatacgtaagtgaacttcatctaacgagattaaaaggcaccgaaggaggcacttacacattcctagtgtccaattctgacgtcaatgctgccatagcatttaatgtttatgtgaatacaaaaccagaaatcctgacttacgacaggctcgtgaatggcatgctccaatgtgtggcagcaggattcccagagcccacaatagattggtatttttgtccaggaactgagcagagatgctctgcttctgtactgccagtggatgtgcagacactaaactcatctgggccaccgtttggaaagctagtggttcagagttctatagattctagtgcattcaagcacaatggcacggttgaatgtaaggcttacaacgatgtgggcaagacttctgcctattttaactttgcatttaaaggtaacaacaaagagcaaatccatccccacaccctgttcactcctttgctgattggtttcgtaatcgtagctggcatgatgtgcattattgtgatgattctgacctacaaatatttacagaaacccatgtatgaagtacagtggaaggttgttgaggagataaatggaaacaattatgtttacatagacccaacacaacttccttatgatcacaaatgggagtttcccagaaacaggctgagttttgggaaaaccctgggtgctggagctttcgggaaggttgttgaggcaactgcttatggcttaattaagtcagatgcggccatgactgtcgctgtaaagatgctcaagccgagtgcccatttgacagaacgggaagccctcatgtctgaactcaaagtcctgagttaccttggtaatcacatgaatattgtgaatctacttggagcctgcaccattggagggcccaccctggtcattacagaatattgttgctatggtgatcttttgaattttttgagaagaaaacgtgattcatttatttgttcaaagcaggaagatcatgcagaagctgcactttataagaatcttctgcattcaaaggagtcttcctgcagcgatagtactaatgagtacatggacatgaaacctggagtttcttatgttgtcccaaccaaggccgacaaaaggagatctgtgagaataggctcatacatagaaagagatgtgactcccgccatcatggaggatgacgagttggccctagacttagaagacttgctgagcttttcttaccaggtggcaaagggcatggctttcctcgcctccaagaattgtattcacagagacttggcagccagaaatatcctccttactcatggtcggatcacaaagatttgtgattttggtctagccagagacatcaagaatgattctaattatgtggttaaaggaaacgctcgactacctgtgaagtggatggcacctgaaagcattttcaactgtgtatacacgtttgaaagtgacgtctggtcctatgggatttttctttgggagctgttctctttaggaagcagcccctatcctggaatgccggtcgattctaagttctacaagatgatcaaggaaggcttccggatgctcagccctgaacacgcacctgctgaaatgtatgacataatgaagacttgctgggatgcagatcccctaaaaagaccaacattcaagcaaattgttcagctaattgagaagcagatttcagagagcaccaatcatatttactccaacttagcaaactgcagccccaaccgacagaagcccgtggtagaccattctgtgcggatcaattctgtcggcagcaccgcttcctcctcccagcctctgcttgtgcacgacgatgtctgagcagaatcagtgtttgggtcacccctccaggaatgatctcttcttttggcttccatgatggttattttcttttctttcaacttgcatccaactccaggatagtgggcaccccactgcaatcctgtctttctgagcacactttagtggccgatgatttttgtcatcagccaccatcctattgcaaaggttccaactgtatatattcccaatagcaacgtagcttctaccatgaacagaaaacattctgatttggaaaaagagagggaggtatggactgggggccagagtcctttccaaggcttctccaattctgcccaaaaatatggttgatagtttacctgaataaatggtagtaatcacagttggccttcagaaccatccatagtagtatgatgatacaagattagaagctgaaaacctaagtcctttatgtggaaaacagaacatcattagaacaaaggacagagtatgaacacctgggcttaagaaatctagtatttcatgctgggaatgagacataggccatgaaaaaaatgatccccaagtgtgaacaaaagatgctcttctgtggaccactgcatgagcttttatactaccgacctggtttttaaatagagtttgctattagagcattgaattggagagaaggcctccctagccagcacttgtatatacgcatctataaattgtccgtgttcatacatttgaggggaaaacaccataaggtttcgtttctgtatacaaccctggcattatgtccactgtgtatagaagtagattaagagccatataagtttgaaggaaacagttaataccattttttaaggaaacaatataaccacaaagcacagtttgaacaaaatctcctcttttagctgatgaacttattctgtagattctgtggaacaagcctatcagcttcagaatggcattgtactcaatggatttgatgctgtttgacaaagttactgattcactgcatggctcccacaggagtgggaaaacactgccatcttagtttggattcttatgtagcaggaaataaagtataggtttagcctccttcgcaggcatgtcctggacaccgggccagtatctatatatgtgtatgtacgtttgtatgtgtgtagacaaatatttggaggggtatttttgccctgagtccaagagggtcctttagtacctgaaaagtaacttggctttcattattagtactgctcttgtttcttttcacatagctgtctagagtagcttaccagaagcttccatagtggtgcagaggaagtggaaggcatcagtccctatgtatttgcagttcacctgcacttaaggcactctgttatttagactcatcttactgtacctgttccttagaccttccataatgctactgtctcactgaaacatttaaattttaccctttagactgtagcctggatattattcttgtagtttacctctttaaaaacaaaacaaaacaaaacaaaaaactccccttcctcactgcccaatataaaaggcaaatgtgtacatggcagagtttgtgtgttgtcttgaaagattcaggtatgttgcctttatggtttcccccttctacatttcttagactacatttagagaactgtggccgttatctggaagtaaccatttgcactggagttctatgctctcgcacctttccaaagttaacagattttggggttgtgttgtcacccaagagattgttgtttgccatactttgtctgaaaaattcctttgtgtttctattgacttcaatgatagtaagaaaagtggttgttagttatagatgtctaggtacttcaggggcacttcattgagagttttgtcttgccatactttgtctgaaaaattcctttgtgtttctattgacttcaatgatagtaagaaaagtggttgttagttatagatgtctaggtacttcaggggcacttcattgagagttttgtcaatgtcttttgaatattcccaagcccatgagtccttgaaaatattttttatatatacagtaactttatgtgtaaatacataagcggcgtaagtttaaaggatgttggtgttccacgtgttttattcctgtatgttgtccaattgttgacagttctgaagaattc

SEQ ID NO: 11740 - DNA, 1895 bp, Homo sapiens
gtctacagcaaggcctaataggggacctgagggcacagtcctcaggatgtttcggggagaataggagccagaacctgagcccctaagccattcccctcaccaatgatggggtccccagtgagtcatctgctggccggcttctgtgtgtgggtcgtcttgggctgggtagggggctcagtccccaacctgggccctgctgagcaggagcagaaccattacctggcccagctgtttggcctgtacggcgagaatgggacgctgactgcagggggcttggcgcggcttctccacagcctggggctaggccgagttcaggggcttcgcctgggacagcatgggcctctgactggacgggctgcatccccagctgcagacaattccacacacaggccacagaaccctgagctgagtgtggatgtctgggcagggatgcctctgggtccctcagggtggggtgacctggaagagtcaaaggcccctcacctaccccgtgggccagccccctcgggcctggacctccttcacaggcttctgttgctggaccactcattggctgaccacctgaatgaggattgtctgaacggctcccagctgctggtcaattttggcttgagccccgctgctcctctgacccctcgtcagtttgctctgctgtgcccagccctgctttatcagatcgacagccgcgtctgcatcggcgctccggcccctgcacccccaggggatctactatctgccctgcttcagagtgccctggcagtcctgttgctcagcctcccttctcccctatccctgctgctgctgcggctcctgggacctcgtctactacggcccttgctgggcttcctgggggccctggcggtgggcactctttgtggggatgcactgctacatctgctaccgcatgcacaagaagggcggcacgcaggacctggcggactaccagagaaggacctgggcccggggctgtcagtgctcggaggcctcttcctgctctttgtgctggagaacatgctggggcttttgcggcaccgagggctcaggccaagatgctgcaggcgaaaacgaaggaatctcgaaacacgcaacttggatccggagaatggcagtgggatggcccttcagcccctacaggcagctccagagccaggggctcagggccagagggagaagaacagccagcacccaccagctctggcccctcctgggcaccaaggccacagtcatgggcaccagggtggcactgatatcacgtggatggtcctcctgggagatggtctacacaacctcactgatgggctggccataggtgctgccttctctgatggcttctccagcggcctcagtaccaccttagcggtcttctgccatgagctgccccacgaactgggtgactttgccatgctgctccagtcagggctgtcctttcggcggctgctgctgctgagcctcgtgtctggagccctgggattggggggtgcagtcctgggggtggggctcagcctgggccctgtccccctcactccctgggtgtttggggtcactgctggggtcttcctctatgtggcccttgtggacatgctaccagccctgcttcgtcctccggagcccctgcctacgccccatgtgctcctgcaggggctggggctgctgctggggggcggcctcatgcttgccataaccctgctggaggagcggctactgcccgtgaccactgagggctgatggggccagtggaaaggggtcgggttgcccttccttccccccaaccacaggaatggaggcgggacacagggccagtaggagcaataggattttaataaacagaacccatcccaaaaaaaaaaaaaaaaaaaaaaaaaaaaaaaaaaaaaaaaaaaaaaaaaaaaaaaaaa

SEQ ID NO: 11741 - DNA, 4187 bp, Homo sapiens
ggcggcgcaggggcggggctttacggacgcaagcacgtcgaagcgctgctcctggagccgcggagggtgcgggtttggctgcggtggtttctgtggcggttgctgtggcggagtttggaggttggagagaaatccaggtactcactagactggtaccttctgccaccatgggggagcttttccggagtgaagaaatgacactggcccagctttttctacagtcagaggctgcttattgttgtgtcagtgaattaggagaacttggaaaggttcagtttcgtgacttaaatccagatgtgaatgttttccaacggaaatttgtgaatgaagttagaagatgtgaagaaatggatcgaaagcttcgatttgttgagaaagagataagaaaagctaacattccgattatggacaccggtgaaaacccagaggttcccttcccccgggacatgattgacttagaggccaattttgagaagattgaaaatgaactgaaggaaatcaacacaaaccaggaagctctgaagagaaacttcctggaactgaccgaattaaaatttatacttcgcaaaactcagcaattttttgatgagatggcggatccagacttgttggaagagtcctcatccctcttggagccaagtgagatgggaagaggcactcctttaagacttggcttcgtggctggtgtcattaaccgggagcgcatccctacttttgagcgcatgctttggcgggtatgccggggaaatgtgttcctgcgacaggctgaaatcgagaaccccctggaggatcctgtgactggcgactacgtgcacaagtctgtgtttatcattttcttccaaggcgatcagctgaaaaacagagtcaagaaaatctgtgaagggttccgagcctcactctatccctgtcctgagacaccacaggagaggaaggaaatggcttctggagtgaataccaggattgatgatctccaaatggttctgaatcaaacggaggatcaccgccagagggttctgcaggcagctgctaagaacatccgtgtctggttcatcaaagtgcggaagatgaaggccatctatcacaccctgaacctgtgcaacatagatgtgactcagaaatgcttgattgcagaggtctggtgccctgtcaccgaccttgactccatccagtttgcactcagaaggggcacggaacacagtggttccactgtaccttccattttgaacaggatgcagacaaaccagactcccccaacctataacaaaaccaacaagtttacctatggctttcagaacatagtagatgcttatggaattggaacttaccgagagataaatccagctccgtatactattatcacgttcccttttctatttgctgtgatgtttggagacttcggtcatggcattttaatgaccctttttgctgtgtggatggtactgagggagagccggatcctttcccagaagaatgagaatgagatgtttagcactgtgttcagtggtcgatacattattttattgatgggtgtgttctccatgtacactggcctcatctacaatgattgcttttccaagtctcttaatatctttgggtcatcctggagtgtacggccgatgtttacttataattggactgaagagacgcttcgggggaaccctgttctacagctgaacccagccctccctggagtgtttggtggaccatacccttttggcattgatccaatttggaacattgctaccaataaactgacgttcttgaactcctttaagatgaagatgtctgttatccttggtatcatccatatgctgtttggagtcagcctgagtctgttcaaccatatctatttcaagaagcccctgaatatctactttggatttattcctgaaataatcttcatgacctctttgtttggctatttggttatccttattttttacaagtggacggcctatgatgctcatacctctgagaatgcaccaagccttctgatccatttcataaacatgttcctcttttcctacccagagtctggttattcaatgttgtattctggacagaaaggaattcagtgtttcctggtagtggttgcactactgtgtgtaccttggatgctgctgtttaaaccattggtccttcgccgtcagtatttgaggagaaagcatttgggaactctcaactttggtgggatcagggtgggcaacggaccgacagaggaggatgctgagattattcagcatgaccagctctccacccactcagaggacgcagacgagtttgactttggggacaccatggtccaccaggccatccacaccatcgagtactgcctgggctgcatctccaacactgcctcctacttgcggctctgggccctcagcctcgctcatgcgcagctgtctgaggtgctttggaccatggtgatccacatcggcctgagcgtgaagagcttggcgggaggtttggtgctgttcttcttcttcactgcctttgccaccctgaccgtggccatcctcctgatcatggagggcctctcggcctttctccacgcactgcgcttacactgggttgagttccagaataaattctacagcgggaccggtttcaagttcttacccttctccttcgagcatattcgggaagggaagtttgaagagtgagtccctgtgagggccgtgtgccccatgctaccctccccgcctccctccacagtgatcagctgtgcctctctgcctgttggttgtgatctgtgggcaccagctcattcgtgtcaccctgtctgtgagtcatttagatagaatagtcctccttgggtctcccaccacccctagctttgtgtgtagtgtagtgattttctggctgtcactcatactcactgggcaccagccttgccctcttagcctccatccatccagacagcccttcccacctcctggtggtgagccagtctgcattcccacgccatcccaaagccctttcatcttccccgtgcattgtagatggaaggagcacccatgccattcacatctagactttgagttccctgcatctgccaccgtagtttctagcaggagtagtggggggagtaatacagattcttccctagaaggggacactggtaacatgtcccactcttggattagcaggggtgggtccaggaagatgatatttgcgtcttttgcccacccccctggcattcagctggacccaactaggccatcatgagtggcttctccctgtcatccccaggggtcataggatatctacaccgcctttctgaccccaccctgcactcccatcctttcctctctccccgttcatgccctgcactacatagcacagccgggatgcttggaacagaggccttggctgctccgcagtgcacagggcttccctctctcggggttggcttcttcccaggccttgcatgggccctgcccacaagcacaccctcaggccgagggtgcagactgatgctcttccctgatggagaccctgagatcttccccacccccaatcatgatgtcttcagtgtgggactggggtcctcttggttctgcctgcagcctgcctggctccgcccctagtgccccctcctcaccacactggccccaggtctcaggaggggtgtcctgggcagggaaggtcagtgtcactgatggtttgctgtttggaagccattggcagggctgccgtgcatgtggctgtgagggctgcacagtcctgccaaggggcttcctccttgtcaccccgaaccttgtaatcgtgtgctggcgtggcagccctggctaagttaatccccaccgctttcagtggtagaaagaattccctgagtgggccaggctggtgccctcctcctaccctggcttttctgagtgagctgcctggagccctcatcccctctcccaggctgggctggccctgggcggggccactgtgtgctggcccactgtgacctgacccgaccttgtgcagcccccctgccctggtgtcctgggttttcgtgatgatctttgctctgtttccagtggggtttgaagcagagttcagggaaccctgcccaaggtcctcctgttcagacattcctatgttgaataaagtatgtttgacttccccggaaaaaaaaaaaaaaaaaaaaaaaaaaaaaaaaaaaaaaaaaaaaaaaaaaaaaaaaaaaaaaaaaa

SEQ ID NO: 11742 - DNA, 2517 bp, Homo sapiens
gcgggaaactcgagttggctcgagcttgccctgaagacgcgccacgccccctcccctatctgagccggacagggagccggggtggaaactgcgcccgcatcccagcgccaagcagacgtgaactctgcgcccgttccccgggaccttcagcgttaaggagaactccgaggagagcagggggagtggaggggaacggcggcgacaaagcggatttgaaactaggagtcaaggaggacgtggggagctggcgccacaggagctaccgaggcggcggccgggggagcctcgcggcctgcgggagagcccggcggtcatgggcgagccggcggtggggcgcccgggagctggctgagcgccggggcccttatttcccgggggtgtgggcgagactccgccgacgcccggtgccgtgggcctgggggctgcccccgggggcccggccatggctggccggggtttcagctggggcccgggccacctgaacgaggacaacgcgcgctttctgctgctggccgcgctcatcgtgctctacctgctgggcggcgccgccgtcttctccgcgctggagctggcgcacgagcgccaggccaagcagcgctgggaggagcgcctggccaacttcagccgcggccacaacctgagccgcgacgagctgcgcggcttcctccgccactacgaggaggccactcgggccggcatccgcgtggacaacgtccgcccgcgctgggacttcaccggcgccttctacttcgtgggcaccgtcgtttccaccatagggtttgggatgacaactccggcgacagtaggaggaaaaatctttctgatcttttacggccttgttgggtgttccagcaccatcttgttcttcaacctcttcctggagcgcctgatcaccatcatcgcctacatcatgaagtcgtgccaccagcggcagctccggagacgaggggccctgccccaggagagcctgaaggatgcggggcagtgtgaggtggacagcctggccggctggaagccctccgtgtactacgtcatgctgatcctatgcacagcctccatcctcatctcttgctgcgcctcagccatgtacacccccattgaaggctggagctactttgactcactctacttctgttttgtggctttcagcaccattggctttggggacctggtcagcagccagaacgcccactatgagagccaaggcctctatcgctttgccaacttcgtcttcatcctcatgggtgtctgctgcatctactccttgttcaatgtcatctctatcctcatcaaacagtccttgaactggatcctgaggaaaatggacagcgggtgctgcccgcaatgccagagaggactcttgcgatcacgcaggaacgtggtgatgccaggcagcgtccggaaccgctgcaacatctccatagagacagacggggtggcagagagtgacacggacgggcgccggctctcaggggagatgatctccatgaaggacttgctggcagccaacaaggcctcgttggccatcctgcagaagcaactgtctgagatggccaacggctgcccccaccagaccagcacactggcccgggacaatgaattctcagggggggtgggagcctttgcaatcatgaacaacaggttggcagagaccagtggggacaggtagaagccaggaatggatgctgggcagaggccagagtagaatggaggatgattgccgcccaggggacgagctcagccctgcgccttggctctgttccttctgggagctgttcccgggagcctccgcaagcatctttagaaatctgatctcggctccaaccaacagccaccttccagggatggggggcctgaagcctcgatgcttgtctcctgatccttattctttaagtctaaattcagtcttttcaaaacaaatcacaaaagcagcattagacattgccttgtttcattaatcttgtttcagagctttagctgcctgaggagataggttttccttaagccttgatttcctgaagctctctctgttccttatttgggaacaaaaattgcgaagactcatctttccctagaactctgaatggatgaatttttaaaagtggggagaatgtttggggatgtgtctgggctttctttttgccaggcttccttcaaagcatacctgccaatggtgtctgcatagggaaaatgtctgttgtactctttatacctgtttctgttttttgttgtccctttctttttatttttaaggccttaatgcctggctgtggcgtctgtgagacctcaatgtaataagaaaattaaattcagcttcaggcctttaaactgcagcaagatggtggtgtaggggtgtgggacagggagagactcacttttgtaactaaagaacatagcttaacattttccctttgaatggtcacacagaccatttcatttttaccagggcttggggacccaatgcaaagatgatgactatttaataaaatgaaaaatttaataaatcctcattttatt

SEQ ID NO: 11743 - DNA, 2439 bp, Homo sapiens
atagagccctcagtgggatgagggtgaaactgctattgccggcggctcctgttttaccgcgtcacgatgctggtgcatttatttcgggtcgggattcggggtggcccattcccaggcaggctgctaccgcccctccgcttccagacattctcagctgtcaggtactctgatggctaccgcagctcctccctcctccgggccgtggcccacctgcggtcccagctctgggcccacctccctcgagcccccctagctcccagatggagcccctctgcctggtgctgggttgggggagccctgctaggccccatggtactgagtaagcatccccacctctgccttgtggccctgtgtgaggcagaagaggcccctcctgccagctccacaccccatgtcgtggggtctcgctttaactggaagctcttctggcagtttctgcacccccacctgctggtcctgggggtagccgtcgtgctggccttgggtgcggcactcgtgaatgtacagatccccctgctcctgggccagctggtaaaggtcgtggccaagtacacaagggaccacgtagggagtttcatgactgagtcccagaatctcagcacccacctgcttatcctctatggtgtccagggactgctgaccttcgggtacctggtgctgctgtcccacgttggcgagcgcatggctgtggacatgcggagggccctcttcagctccctgctccgacaaaacatcaccttctttgacgccaataagacagggcagctggtgagccgcttgacaactgacgtgcaggaatttaagtcatccttcaagcttgtcatctcccaggggctgcgaagctgctcccaggtggcaggctgcctggtgtccctgtccatgctgtcgacacgcctcacgctgctgctgatggtggccacaccagccctgatgggagtgggcaccctgatgggctcaggcctccgaaaattgtctcgccagtgtcaggaacatatcgccagggcaatgggcgtagcagacgaggccctgggcaatgtgcggactgtgcgagccttggccatggagcaacgggaagaggagcgctatggggcagagctggaagcctgccgctgccgggcagaggagctgggccgcggcatcgccttgttccaagggctttccaacatcgccttcaactgcatggtcttgggtaccctatttattgggggctcccttgtggccggacagcagctgacagggggagacctcatgtccttcctggtggcctcccagacagtgcaaaggtccatggccaacctctctgtcctgtttgggcaggtggtccgggggctgagtgcaggtgcccgggtctttgagtacatggccctgaacccctgcatcccactgtctgggggctgctgcgtccccaaagagcagctgcgtggctccgttacatttcagaacgtctgcttcagctacccctgccgccccggcttcgaggtgctgaaagacttcaccctgacgctgccccctggcaagatcgtggccctcgtgggccagtctggcggaggaaagaccaccgtggcttccctgctggagcgcttctacgaccccacggcaggcgtggtgatgctggatgggcgggacctgcgcacccttgacccctcctggctccggggccaggttgtcggtttcatcagccaggagcccgtcctgtttgggacgaccatcatggaaaacatccgctttgggaagctggaagcttccgatgaagaggtgtacacagccgcccgggaagcgaatgctcacgagttcatcaccagtttccccgagggctacaacacggtcgtcggtgaacggggcactaccctgtctgggggccagaagcagcgcctggccatcgcccgagcccttatcaagcagcccacggtgctgatactggatgaagctaccagcgcgctggatgcagagtccgagcgggttgtacaggaggccctggaccgggccagtgcaggccgcacggtgctggtaattgcccaccggctcagcactgtccgtggggcccactgcattgtcgtcatggccgatggccgtgtctgggaggctgggacacatgaagagctcctgaagaaaggcgggctatacgccgagctcatccggaggcaggccctggatgccccgaggacagcggccccaccgcccaaaaagccagaaggccccaggagccaccagcacaagtcctgagaagggccccctgaggtgtggtcgctgccaagcatcagtgttagggctggggctcagcctgggggagcctactggggactgagcccccaggagggccagcatgtggagagtcgctgcggctgctcctgctcacaataaagccggggccgagcagctggcaggggaggccaatccctccctcccctccccagtcctgccggctgcctccctcccacc

SEQ ID NO: 11744 - DNA, 1613 bp, Homo sapiens
tttgcagacatatgggtgattggtacagtaggtttataaacagaagtttaaacttgtaagcttaagcttccgtttataaacagaagtttaaaattataggtcctgtttaacattcagctctgttaactcactcatctttttgtgtttttacactttgtcaagatttctttacatattcatcaatgtctgaagaagttacttatgcagatcttcaattccagaactccagtgagatggaaaaaatcccagaaattggcaaatttggggaaaaagcacctccagctccctctcatgtatggcgtccagcagccttgtttctgactcttctgtgccttctgttgctcattggattgggagtcttggcaagcatgtttcacgtaactttgaagatagaaatgaaaaaaatgaacaaactacaaaacatcagtgaagagctccagagaaatatttctctacaactgatgagtaacatgaatatctccaacaagatcaggaacctctccaccacactgcaaacaatagccaccaaattatgtcgtgagctatatagcaaagaacaagagcacaaatgtaagccttgtccaaggagatggatttggcataaggacagctgttatttcctaagtgatgatgtccaaacatggcaggagagtaaaatggcctgtgctgctcagaatgccagcctgttgaagataaacaacaaaaatgcattggaatttataaaatcccagagtagatcatatgactattggctgggattatctcctgaagaagattccactcgtggtatgagagtggataatataatcaactcctctgcctgggttataagaaacgcacctgacttaaataacatgtattgtggatatataaatagactatatgttcaatattatcactgcacttataaaaaaagaatgatatgtgagaagatggccaatccagtgcagcttggttctacatattttagggaggcatgaggcatcaatcaaatacatttaaggagtgtagggggtgggggttctaggctataggtaaatttaaatattttctggttgacaattagttgagtttgtctgaagacctgggattttatcatgcagatgaaacatccaggtagcaagcttcagagagaatagactgtgaatgttaatgccagagaggtataatgaagcatgtcccacctcccactttccatcatggcctgaaccctggaggaagaggaagtccattcagatagttgtggggggccttcgaattttcattttcatttacgttcttccccttctggccaagatttgccagaggcaacatcaaaaaccagcaaattttaattttgtcccacagcgttgctagggtggcatggctccccatctcgggtccatcctatacttccatgggactccctatggctgaaggccttatgagtcaaaggacttatagccaattgattgttctaggccaggtaagaatggatatggacatgcatttattacctcttaaaattattattttaagtaaaagccaataaacaaaaacgaaaaggcaaaaaaaaaaaaaaaaaaaaaaaaaaaaaaaaaaaaaaaaaaaaaaaaaaaaaaaaaaaaaaaaaa

SEQ ID NO: 11745 - DNA, 8429 bp, Homo sapiens
actacaaaggatgtctgtgatgacagtggccatcccatttgatcctcgttattcttcttttatcgaaggaaactgagagtcaccttcttttctaggcagttaggtaactgaagccgaaaggtattgtgacagatccactgggctgtaaaaggcagcgtgtggaggtggagcccagagtttctgcctccacagttaaaagctcagacagggctttgggagcagggcctgcaaatcaaagatgaaagaacaacctgtcttggagcgcttgcagtcccagaaatcctggattaaaggagtatttgacaagagagaatgtagcacaatcatacccagctcaaaaaatcctcacagatgtactccagtatgccaagtctgccagaatttaatcaggtgttactgtggccgactgattggagaccatgctgggatagattattcctggaccatctcagctgccaagggtaaagaaagtgaacaatggtctgttgaaaagcacacaacgaaaagcccaacagatacttttggcacgattaatttccaagatggagagcacacccatcatgccaagtatattagaacttcttatgatacaaaactggatcatctgttacatttaatgttgaaagagtggaaaatggaactgcccaagcttgtgatctcagtccatgggggcatccagaactttactatgccctctaaatttaaagagattttcagccaaggtttggttaaagctgcagagacaacaggagcgtggataataactgaaggcatcaatacaggagtgtccaagcatgttggggatgccttgaaatcccattcctctcattccttgagaaaaatctggacagttggaatccctccttggggtgtcattgagaaccagagagaccttattggaaaagatgtggtgtgcctgtaccagactctggataaccccctcagcaagctcacaacactcaacagcatgcactcgcacttcatcctgtctgatgatgggaccgtgggcaagtatggaaatgaaatgaagctcagaaggaacctggagaagtacctctctctgcagaaaatacactgccgctcaagacaaggcgtgccggtcgtggggctggtggtggaaggcggtcccaacgtcatcctgtcagtgtgggagactgtcaaggacaaggacccagtggtggtgtgtgagggcacaggtagggcggctgacctcctggccttcacacacaaacacctggcagatgaagggatgctgcgacctcaggtgaaagaggagatcatctgcatgattcagaacactttcaactttagtcttaaacagtccaagcaccttttccaaattctaatggagtgtatggttcacagggattgtattaccatatttgatgctgactctgaagagcagcaagacctggacttagcaatcctaacagctttgctgaagggcacaaatttatcagcgtcagagcaattaaatctggcaatggcttgggacagggtggacattgccaagaaacatatcctaatttatgaacaacactggaagcctgatgccctggaacaagcaatgtcagatgctttagtgatggatcgggtggattttgtgaagctcttaatagaatatggagtgaacctccatcgctttcttaccatccctcgactggaagagctctacaatacaaaacaaggacctactaatacactcttgcatcatctcgtccaagatgtgaaacagcatacccttctttcaggctaccgaataaccttgattgacattggattagtagtagaatacctcattggtagagcatatcgcagcaactacactagaaaacatttcagagccctctacaacaacctctacagaaaatacaagcaccagagacactcctcaggaaatagaaatgagtctgcagaaagtacgctgcactcccagttcattagaactgcacagccatacaaattcaaggaaaagtctatagtccttcataaatcaaggaagaagtcaaaagaacaaaatgtatcagatgaccctgagtctactggctttctttacccttacaatgacctgctggtttgggctgtgctgatgaaaaggcagaagatggctatgttcttctggcagcatggagaggaggccacggttaaagccgtgattgcgtgtatcctctaccgggcaatggcccatgaagctaaggagagtcacatggtggatgatgcctcagaagagttgaagaattactcaaaacagtttggccagctggctctggacttgttggagaaggcattcaagcagaatgagcgcatggccatgacgctgttgacgtatgaactcaggaactggagcaattcgacctgccttaaactggccgtgtcgggaggattacgaccctttgtttcacatacttgtacccagatgctactgacagacatgtggatggggaggctgaaaatgaggaaaaactcttggttaaagattattataagcattattttaccacccaccattttgacactggaatttaaaagcaaagctgagatgtcacatgttccccagtcccaggacttccaatttatgtggtattacagtgaccagaacgccagcagttccaaagaaagtgcttctgtgaaagagtatgatttggaaaggggccatgatgagaaactggatgaaaatcagcattttggtttggaaagtgggcaccaacaccttccgtggaccaggaaagtctatgagttctacagtgctccaattgtcaagttttggttttatacgatggcgtatttggcattcctcatgctgttcacttacaccgtgttggtggagatgcagccccagcccagcgtgcaggagtggcttgttagcatttacatcttcaccaatgctattgaggtggtcagggagatctgtatttcagaacctgggaagtttacccaaaaggtgaaggtatggattagtgagtactggaacttaacagaaactgtggccattggcctgttttcagctggcttcgtccttcgatggggtgaccctccttttcacacagcgggaagactgatctactgcatagacatcatattctggttctcacggctcctggacttctttgctgtgaatcaacatgcaggtccatatgtgaccatgattgcaaaaatgacagcaaacatgttctatattgtgatcatcatggccatagtcctgctgagctttggagtggcacgcaaggccatcctttcgccaaaagagccaccatcttggagtctagctcgagatattgtatttgagccatactggatgatatacggagaagtctatgctggagaaatagatgtttgttcaagccagccatcctgccctcctggttcttttcttactccattcttgcaagctgtctacctcttcgtgcaatatatcatcatggtgaacctgttgattgctttcttcaacaacgtttacttagatatggaatccatttcaaataacctgtggaaatacaaccgctatcgctacatcatgacctaccacgagaagccctggctgcccccacctctcatcctgctgagccacgtgggccttctcctccgccgcctgtgctgtcatcgagctcctcacgaccaagaagagggtgacgttggattaaaactctacctcagtaaggaggatctgaaaaaacttcatgattttgaggagcagtgcgtggaaaaatacttccatgagaagatggaagatgtgaattgtagttgtgaggaacgaatccgagtgacatcagaaagggttacagagatgtacttccagctgaaagaaatgaatgaaaaggtgtcttttataaaggactccttactgtctttggacagccaggtgggacacctgcaggatctctctgccctgactgtggataccctgaaagtcctttctgctgttgacactttgcaagaggatgaggctctcctggccaagagaaagcattctacttgcaaaaaacttccccacagctggagcaatgtcatctgtgcagaggttctaggcagcatggagatcgctggagagaagaaataccagtattatagcatgccctcttctttgctgaggagcctggctggaggccggcatcccccaagagtgcagaggggggcacttcttgagattacaaacagtaaaagagaggctacaaatgtaagaaatgaccaggaaaggcaagaaacacaaagtagtatagtggtttctggggtgtctcctaacaggcaagcacactcaaagtatggccagtttcttctggtcccctctaatctaaagcgagttcctttttcagcagaaactgtcttgcctctgtccagaccctctgtgccagatgtgctggcaactgaacaggacatccagactgaggttcttgttcatctgactgggcagaccccagttgtctctgactgggcatcagtggatgaacccaaggaaaagcacgagcctattgctcacttactggatggacaagacaaggcagagcaagtgctacccactttgagttgcacacctgaacccatgacaatgagctcccctctttcccaagccaagatcatgcaaactggaggtggatatgtaaactgggcattttcagaaggtgatgaaactggtgtgtttagcatcaagaaaaagtggcaaacctgcttgccctccacttgtgacagtgattcctctcggagtgaacagcaccagaagcaggcccaggacagctccctatctgataactcaacaagatcggcccagagtagtgaatgctcagaggtgggaccatggcttcagccaaacacatccttttggatcaatcctctccgcagatacaggcccttcgctaggagtcatagttttagattccataaggaggagaaattgatgaagatctgtaagattaaaaatctttcaggctcttcagaaatagggcagggagcatgggtcaaagcgaaaatgctaaccaaagacaggagactgtcaaagaaaaagaagaatactcaaggactccaggtgccaatcataacagtcaatgcctgctctcagagtgaccagttgaatccagagccaggagaaaacagcatctctgaagaggagtacagcaagaactggttcacagtgtccaaatttagtcacacaggtgtagaaccttacatacatcagaaaatgaaaactaaagaaattggacaatgtgctatacaaatcagtgattacctaaagcagtctcaagaggatctcagcaaaaactctttgtggaattccaggagcaccaacctcaataggaactccctgctgaaaagttcaattggagttgacaagatctcagcctccttaaaaagccctcaagagcctcaccatcattattcagccattgaaaggaataatttaatgaggctttctcagaccataccatttacaccagtccaactgtttgcaggagaagaaataactgtctacaggttggaggagagttcccctttaaaccttgataaaagcatgtcctcttggtctcagcgtgggagagcggcaatgatccaggtattgtcccgagaggagatggatgggggcctccgtaaagctatgagagtcgtcagcacttggtctgaggatgacattctcaagccgggacaagttttcattgtcaagtcctttcttcctgaggttgtgcggacatggcataaaatcttccaggagagcactgtgcttcatctttgcctcagggaaattcaacaacaaagagctgctcaaaaattgatctataccttcaaccaagtgaaaccacaaaccataccctacacaccaaggttcctggaagttttcttaatctactgccattcagccaaccagtggttgaccattgagaagtatatgacaggggagttccggaagtataacaacaacaatggtgatgaaatcacccccaccaacaccctggaggagctgatgttggctttctctcactggacctatgagtacactcggggagagctgctggttttagatttgcaaggtgttggagaaaatttgacagatccatctgttataaaacctgaagtcaaacaatcaagaggaatggtgtttggaccggccaatttgggggaagatgcaattagaaacttcattgcaaaacatcattgtaactcctgctgccggaagctcaaactcccggatttaaaaagaaatgactattcccctgaaaggataaattccacctttggacttgagataaaaatagaatcagctgaggagcctccagcaagggagacgggtagaaattccccagaagatgatatgcaactataaaaagggaggagcaagaagatcccagtgcttgccctgcctgccaggaactctgtgataacatagattgatcaacgtgatgttgattacatcagcgtctccttgggacacgccttctgagcctcacatctccttctgttcaaaggcctcattggtatatgatcaatgggttctcctagacactgacctctgtccagggcactttgcagctccatcctcaagttccacacgaagatgcttggatgagtcagctgggaatattgttcttgtgtacctcattgctttagctggtcacttggaactttggagcagaatcctgcacattaaaggatggggttgggggggatacatttattttattttctcactatgtatgcagactggaccccctactactatttgtcacctcacccacagattgtatttatgtctatatatatgttcataaaaagttatgtgatttcctcctctgtcttttccacaacataggactttgaatagcaatgataggaaaaacaatggaacaagggtgggtttgcacagattggagcacattcctgcacaaactaccaagtatactggtgaaatctcgatgggtttcagatattgtcagtgaatcatatgatgcctggatatttcaggtttctgtaaaagaaagggaaacctaaaacaaatacccttccatatataatatatatggaatatgtatattatatatatttttatatatataatatatatggaatatatatattatatatataaaatacatatggaatatatatattttatatatatatatatatttttatttttgagatggagtttcactctttttacccaggctggagtgcaatgatgcgatctcactgcaacctctgcctcccgggcttgagcgattcttgtgtctcagtcttccgggtagctgggactacaggtgtgcaccactatgcctggctaattttgtatttttagtagagatggggtttcaccatgttggccaggctggtctcaaactcctgacctcagatgatccacctgccttggcttcccaaagtgctgggattacaggcgtgagccactgcgcctggcctttttttttttttttttaaacgagaacaagaatatgaagaactggaaatcattaagaaagggtttcccttccttaaagctcaggggtactattagttaggagttgactaactcaacctgtaaaacaccactcctccttccaaagttgtatatataatattgcaggttaaattactttatgtcaggtcctatgaagaaagatacggtttcagactgaaaacatgtttcacaggtgtttgcttccttccagagcagagttccctattcccctggcataaagaatgtatatatattttgaaatatggctgagaacatgtcattggtttgtgaggcctaaggtgaagcactcctggcagccacactgtgtagtgtatttgagggatcagtcatccctcttgtatgctgggcctggttgccctacctcgaacaagcaccagcttttcacacaaggagagatgtggggctgggagtcctctccccatcctattgcatctcctttcttattataagctgttccagttcacaggcagcaaacctcctgggtttgaaaaattccaacttatttttatctttaatcctgacattagctgacttgctagtgagcttgctttaaaaatctacactcttgcattcttaggcatacaggggaaatgttgaaaaggaaggtggaaaaccaagaatttagtttgccaatgattgcctctgattcttgtaagtttgagttccacaagggctaatttattccccttttacttgggttttggggtggtggaaagcgggaaatttgggtgatttgttgattggcaatgaggataaaatgttaatacttttttggggacttaacaactttatcctattctacaagtcagtaaaggaacaattggtactcacctcagtgctgcactcaactatggaaagaggcagagtttgcttgcccaattgccaaactaaagacatcagttcattggtcaaatatttgttacctggaatggaacttgaaagcaaatacatttggatttcaaatttcaaaaaa

SEQ ID NO: 11746 - DNA, 1468 bp, Homo sapiens
atggccaacttcacacctgtcaatggcagctcgggcaatcagtccgtgcgcctggtcacgtcatcatcccacaatcgctatgagacggtggaaatggtcttcattgccacagtgacaggctccctgagcctggtgactgtcgtgggcaacatcctggtgatgctgtccatcaaggtcaacaggcagctgcagacagtcaacaactacttcctcttcagcctggcgtgtgctgatctcatcataggcgccttctccatgaacctctacaccgtgtacatcatcaagggctactggcccctgggcgccgtggtctgcgacctgtggctggccctggactacgtggtgagcaacgcctccgtcatgaaccttctcatcatcagctttgaccgctacttctgcgtcaccaagcctctcacctaccctgcccggcgcaccaccaagatggcaggcctcatgattgctgctgcctgggtactgtccttcgtgctctgggcgcctgccatcttgttctggcagtttgtggtgggtaagcggacggtgcccgacaaccagtgcttcatccagttcctgtccaacccagcagtgacctttggcacagccattgctgccttctacctgcctgtggtcatcatgacggtgctgtacatccacatctccctggccagtcgcagccgagtccacaagcaccggcccgagggcccgaaggagaagaaagccaagacgctggccttcctcaagagcccactaatgaagcagagcgtcaagaagcccccgcccggggaggccgcccgggaggagctgcgcaatggcaagctggaggaggcccccccgccagcgctgccaccgccaccgcgccccgtggctgataaggacacttccaatgagtccagctcaggcagtgccacccagaacaccaaggaacgcccagccacagagctgtccaccacagaggccaccacgcccgccatgcccgcccctcccctgcagccgcgggccctcaacccagcctccagatggtccaagatccagattgtgacgaagcagacaggcaatgagtgtgtgacagccattgagattgtgcctgccacgccggctggcatgcgccctgcggccaacgtggcccgcaagttcgccagcatcgctcgcaaccaggtgcgcaagaagcggcagatggcggcccgggagcgcaaagtgacacgaacgatctttgccattctgctagccttcatcctcacctggacgccctacaacgtcatggtcctggtgaacaccttctgccagagctgcatccctgacacggtgtggtccattggctactggctctgctacgtcaacagcaccatcaaccctgcctgctatgctctgtgcaacgccacctttaaaaagaccttccggcacctgctgctgtgccagtatcggaacatcggcactgccaggtaggcaggcaggagttccctaggaggtgctg

SEQ ID NO: 11747 - DNA, 3445 bp, Homo sapiens
gagcaaccgcagcttctagtatccagactccagcgccgccccgggcgcggaccccaaccccgacccagagcttctccagcggcggcgcagcgagcagggctccccgccttaacttcctccgcggggcccagccaccttcgggagtccgggttgcccacctgcaaactctccgccttctgcacctgccacccctgagccagcgcgggcgcccgagcgagtcatggccaacgcggggctgcagctgttgggcttcattctcgccttcctgggatggatcggcgccatcgtcagcactgccctgccccagtggaggatttactcctatgccggcgacaacatcgtgaccgcccaggccatgtacgaggggctgtggatgtcctgcgtgtcgcagagcaccgggcagatccagtgcaaagtctttgactccttgctgaatctgagcagcacattgcaagcaacccgtgccttgatggtggttggcatcctcctgggagtgatagcaatctttgtggccaccgttggcatgaagtgtatgaagtgcttggaagacgatgaggtgcagaagatgaggatggctgtcattgggggtgcgatatttcttcttgcaggtctggctattttagttgccacagcatggtatggcaatagaatcgttcaagaattctatgaccctatgaccccagtcaatgccaggtacgaatttggtcaggctctcttcactggctgggctgctgcttctctctgccttctgggaggtgccctactttgctgttcctgtccccgaaaaacaacctcttacccaacaccaaggccctatccaaaacctgcaccttccagcgggaaagactacgtgtgacacagaggcaaaaggagaaaatcatgttgaaacaaaccgaaaatggacattgagatactatcattaacattaggaccttagaattttgggtattgtaatctgaagtatggtattacaaaacaaacaaacaaacaaaaaacccatgtgttaaaatactcagtgctaaacatggcttaatcttattttatcttctttcctcaatataggagggaagatttttccatttgtattactgcttcccattgagtaatcatactcaattgggggaaggggtgctccttaaatatatatagatatgtatatatacatgtttttctattaaaaatagacagtaaaatactattctcattatgttgatactagcatacttaaaatatctctaaaataggtaaatgtatttaattccatattgatgaagatgtttattggtatattttctttttcgtctatatatacatatgtaacagtcaaatatcatttactcttcttcattagctttgggtgcctttgccacaagacctagcctaatttaccaaggatgaattctttcaattcttcatgcgtgcccttttcatatacttattttattttttaccataatcttatagcacttgcatcgttattaagcccttatttgttttgtgtttcattggtctctatctcctgaatctaacacatttcatagcctacattttagtttctaaagccaagaagaatttattacaaatcagaactttggaggcaaatctttctgcatgaccaaagtgataaattcctgttgaccttcccacacaatccctgtactctgacccatagcactcttgtttgctttgaaaatatttgtccaattgagtagctgcatgctgttcccccaggtgttgtaacacaactttattgattgaatttttaagctacttattcatagttttatatccccctaaactacctttttgttccccattccttaattgtattgttttcccaagtgtaattatcatgcgttttatatcttcctaataaggtgtggtctgtttgtctgaacaaagtgctagactttctggagtgataatctggtgacaaatattctctctgtagctgtaagcaagtcacttaatctttctacctcttttttctatctgccaaattgagataatgatacttaaccagttagaagaggtagtgtgaatattaattagtttatattactctcattctttgaacatgaactatgcctatgtagtgtctttatttgctcagctggctgagacactgaagaagtcactgaacaaaacctacacacgtaccttcatgtgattcactgccttcctctctctaccagtctatttccactgaacaaaacctacacacataccttcatgtggttcagtgccttcctctctctaccagtctatttccactgaacaaaacctacgcacataccttcatgtggctcagtgccttcctctctctaccagtctatttccattctttcagctgtgtctgacatgtttgtgctctgttccattttaacaactgctcttacttttccagtctgtacagaatgctatttcacttgagcaagatgatgtaatggaaagggtgttggcattggtgtctggagacctggatttgagtcttggtgctatcaatcaccgtctgtgtttgagcaaggcatttggctgctgtaagcttattgcttcatctgtaagcggtggtttgtaattcctgatcttcccacctcacagtgatgttgtggggatccagtgagatagaatacatgtaagtgtggttttgtaatttaaaaagtgctatactaagggaaagaattgaggaattaactgcatacgttttggtgttgcttttcaaatgtttgaaaacaaaaaaaatgttaagaaatgggtttcttgccttaaccagtctctcaagtgatgagacagtgaagtaaaattgagtgcactaaacaaataagattctgaggaagtcttatcttctgcagtgagtatggcccgatgctttctgtggctaaacagatgtaatgggaagaaataaaagcctacgtgttggtaaatccaacagcaagggagatttttgaatcataataactcataaggtgctatctgttcagtgatgccctcagagctcttgctgttagctggcagctgacgctgctaggatagttagtttggaaatggtacttcataataaactacacaaggaaagtcagccactgtgtcttatgaggaattggacctaataaattttagtgtgccttccaaacctgagaatatatgcttttggaagttaaaatttaaatggcttttgccacatacatagatcttcatgatgtgtgagtgtaattccatgtggatatcagttaccaaacattacaaaaaaattttatggcccaaaatgaccaacgaaattgttacaatagaatttatccaattttgatctttttatattcttctaccacacctggaaacagaccaatagacattttggggttttataataggaatttgtataaagcattactctttttcaataaattgttttttaatttaaaaaaaggaaaaaaaaaaaaaaaaa

SEQ ID NO: 11748 - DNA, 2243 bp, Homo sapiens
cgccggaggcagcggcggcgtggcgcagcggcgacatggccgttgtctcagaggacgactttcagcacagttcaaactccacctacggaaccacaagcagcagtctccgagctgaccaggaggcactgcttgagaagctgctggaccgcccgccccctggcctgcagaggcccgaggaccgcttctgtggcacatacatcatcttcttcagcctgggcattggcagtctactgccatggaacttctttatcactgccaaggagtactggatgttcaaactccgcaactcctccagcccagccaccggggaggaccctgagggctcagacatcctgaactactttgagagctaccttgccgttgcctccaccgtgccctccatgctgtgcctggtggccaacttcctgcttgtcaacagggttgcagtccacatccgtgtcctggcctcactgacggtcatcctggccatcttcatggtgataactgcactggtgaaggtggacacttcctcctggacccgtggtttttttgcggtcaccattgtctgcatggtgatcctcagcggtgcctccactgtcttcagcagcagcatctacggcatgaccggctcctttcctatgaggaactcccaagcactgatatcaggaggagccatgggcgggacggtcagcgccgtggcctcattggtggacttggctgcatccagtgatgtgaggaacagcgccctggccttcttcctgacggccaccatcttcctcgtgctctgcatgggactctacctgctgctgtccaggctggagtatgccaggtactacatgaggcctgttcttgcggcccatgtgttttctggtgaagaggagcttccccaggactccctcagtgccccttcggtggcctccagattcattgattcccacacaccccctctccgccccatcctgaagaagacggccagcctgggcttctgtgtcacctacgtcttcttcatcaccagcctcatctaccccgccgtctgcaccaacatcgagtccctcaacaagggctcgggctcactgtggaccaccaagtttttcatccccctcactaccttcctcctgtacaactttgctgacctatgtggccggcagctcaccgcctggatccaggtgccagggcccaacagcaaggcgctcccagggttcgtgctcctccggacctgcctcatccccctcttcgtgctctgtaactaccagccccgcgtccacctgaagactgtggtcttccagtccgatgtgtaccccgcactcctcagctccctgctggggctcagcaacggctacctcagcaccctggccctcctctacgggcctaagattgtgcccagggagctggctgaggccacgggagtggtgatgtccttttatgtgtgcttgggcttaacactgggctcagcctgctctaccctcctggtgcacctcatctagaagggaggacacaaggacattggtgcttcagagcctttgaagatgagaagagagtgcaggagggctgggggccatggaggaaaggcctaaagtttcacttggggacagagagcagagcacactcgggcctcatccctcccaagatgccagtgagccacgtccatgcccattccgtgcaaggcagatattccagtcatattaacagaacactcctgagacagttgaagaagaaatagcacaaatcaggggtactcccttcacagctgatggttaacattccaccttctttctagcccttcaaagatgctgccagtgttcgccctagagttattacaaagccagtgccaaaacccagccatgggctctttgcaacctcccagctgcgctcattccagctgacagcgagatgcaagcaaatgctcagctctccttaccctgaaggggtctccctggaatggaagtcccctggcatggtcagtcctcaggcccaagactcaagtgtgcacagacccctgtgttctgcgggtgaacaactgcccactaaccagactggaaaacccagaaagatgggccttccatgaatgcttcattccagagggaccagagggcctccctgtgcaagggatcaagcatgtctggcctgggttttcaaaaaaagagggatcctcatgacctggtggtctatggcctgggtcaagatgagggtctttcagtgttcctgtttacaacatgtcaaagccattggttcaagggcgtaataaatacttgcgtattcaaaaa

SEQ ID NO: 11749 - DNA, 570 bp, Homo sapiens
cacctgcaccccgcccgggcatagcaccatgcctgcttgtcgcctaggcccgctagccgccgccctcctcctcagcctgctgctgttcggcttcaccctagtctcaggcacaggagcagagaagactggcgtgtgccccgagctccaggctgaccagaactgcacgcaagagtgcgtctcggacagcgaatgcgccgacaacctcaagtgctgcagcgcgggctgtgccaccttctgctctctgcccaatgataaggagggttcctgcccccaggtgaacattaactttccccagctcggcctctgtcgggaccagtgccaggtggacagccagtgtcctggccagatgaaatgctgccgcaatggctgtgggaaggtgtcctgtgtcactcccaatttctgagctccagccaccaccaggctgagcagtgaggagagaaagtttctgcctggccctgcatctggttccagcccacctgccctcccctttttcgggactctgtattccctcttgggctgaccacagcttctccctttcccaaccaataaagtaaccactttcagcaaaaa

SEQ ID NO: 11750 - DNA, 358 bp, Homo sapiens
cacctgcaccccgcccgggcatagcaccatgcctgcttgtcgcctaggcccgctagccgccgccctcctcctcagcctgctgctgttcggcttcaccctagtctcaggcacaggagcagagaagactggcgtgtgccccgagctccaggctgaccagaactgcacgcaagagtgcgtctcggacagcgaatgcgccgacaacctcaagtgctgcagcgcgggctgtgccaccttctgctctctgcccaatgcactgttccactggcacctaaagacacggaggctctgggagatttctggccctaggccacgaaggcccacttgggactcaagctgaggtcctgtgattccatttggg

SEQ ID NO: 11751 - DNA, 2844 bp, Homo sapiens
atgaggcccggcctctcatttctcctagcccttctgttcttccttggccaagctgcaggggatttgggggatgtgggacctccaattcccagccccggcttcagctctttcccaggtgttgactccagctccagcttcagctccagctccaggtcgggctccagctccagccgcagcttaggcagcggaggttctgtgtcccagttgttttccaatttcaccggctccgtggatgaccgtgggacctgccagtgctctgtttccctgccagacaccacctttcccgtggacagagtggaacgcttggaattcacagctcatgttctttctcagaagtttgagaaagaactttccaaagtgagggaatatgtccaattaattagtgtgtatgaaaagaaactgttaaacctaactgtccgaattgacatcatggagaaggataccatttcttacactgaactggacttcgagctgatcaaggtagaagtgaaggagatggaaaaactggtcatacagctgaaggagagttttggtggaagctcagaaattgttgaccagctggaggtggagataagaaatatgactctcttggtagagaagcttgagacactagacaaaaacaatgtccttgccattcgccgagaaatcgtggctctgaagaccaagctgaaagagtgtgaggcctctaaagatcaaaacacccctgtcgtccaccctcctcccactccagggagctgtggtcatggtggtgtggtgaacatcagcaaaccgtctgtggttcagctcaactggagagggttttcttatctatatggtgcttggggtagggattactctccccagcatccaaacaaaggactgtattgggtggcgccattgaatacagatgggagactgttggagtattatagactgtacaacacactggatgatttgctattgtatataaatgctcgagagttgcggatcacctatggccaaggtagtggtacagcagtttacaacaacaacatgtacgtcaacatgtacaacaccgggaatattgccagagttaacctgaccaccaacacgattgctgtgactcaaactctccctaatgctgcctataataaccgcttttcatatgctaatgttgcttggcaagatattgactttgctgtggatgagaatggattgtgggttatttattcaactgaagccagcactggtaacatggtgattagtaaactcaatgacaccacacttcaggtgctaaacacttggtataccaagcagtataaaccatctgcttctaacgccttcatggtatgtggggttctgtatgccacccgtactatgaacaccagaacagaagagattttttactattatgacacaaacacagggaaagagggcaaactagacattgtaatgcataagatgcaggaaaaagtgcagagcattaactataacccttttgaccagaaactttatgtctataacgatggttaccttctgaattatgatctttctgtcttgcagaagccccagtaagctgtttaggagttagggtgaaagagaaaatgtttgttgaaaaaatagtcttctccacttacttagatatctgcaggggtgtctaaaagtgtgttcattttgcagcaatgtttaggtgcatagttctaccacactagagatctaggacatttgtcttgatttggtgagttctcttgggaatcatctgcctcttcaggcgcattttgcaataaagtctgtctagggtgggattgtcagaggtctaggggcactgtgggcctagtgaagcctactgtgaggaggcttcactagaagccttaaattaggaattaaggaacttaaaactcagtatggcgtctagggattctttgtacaggaaatattgcccaatgactagtcctcatccatgtagcaccactaattcttccatgcctggaagaaacctggggacttagttaggtagattaatatctggagctcctcgagggaccaaatctccaacttttttttcccctcactagcacctggaatgatgctttgtatgtggcagataagtaaatttggcatgcttatatattctacatctgtaaagtgctgagttttatggagagaggcctttttatgcattaaattgtacatggcaaataaatcccagaaggatctgtagatgaggcacctgctttttcttttctctcattgtccaccttactaaaagtcagtagaatcttctacctcataacttccttccaaaggcagctcagaagattagaaccagacttactaaccaattccaccccccaccaacccccttctactgcctactttaaaaaaattaatagttttctatggaactgatctaagattagaaaaattaattttctttaatttcattatgaacttttatttacatgactctaagactataagaaaatctgatggcagtgacaaagtgctagcatttattgttatctaataaagaccttggagcatatgtgcaacttatgagtgtatcagttgttgcatgtaatttttgcctttgtttaagcctggaacttgtaagaaaatgaaaatttaatttttttttctaggacgagctatagaaaagctattgagagtatctagttaatcagtgcagtagttggaaaccttgctggtgtatgtgatgtgcttctgtgcttttgaatgactttatcatctagtctttgtctatttttcctttgatgttcaagtcctagtctataggattggcagtttaaatgctttactcccccttttaaaataaatgattaaaatgtgctttgaaaaaaaaaaaaaaaaaaaaaaaaaaaaaaa

SEQ ID NO: 11752 - DNA, 1791 bp, Homo sapiens
ggaggctgcagcagcggaagaccccagtccagatccaggactgagatcccagaaccatgaacctggccatcagcatcgctctcctgctaacagtcttgcaggtctcccgagggcagaaggtgaccagcctaacggcctgcctagtggaccagagccttcgtctggactgccgccatgagaataccagcagttcacccatccagtacgagttcagcctgacccgtgagacaaagaagcacgtgctctttggcactgtgggggtgcctgagcacacataccgctcccgaaccaacttcaccagcaaatacaacatgaaggtcctctacttatccgccttcactagcaaggacgagggcacctacacgtgtgcactccaccactctggccattccccacccatctcctcccagaacgtcacagtgctcagagacaaactggtcaagtgtgagggcatcagcctgctggctcagaacacctcgtggctgctgctgctcctgctctccctctccctcctccaggccacggatttcatgtccctgtgactggtggggcccatggaggagacaggaagcctcaagttccagtgcagagatcctacttctctgagtcagctgaccccctccccgcaatccctcaaaccttgaggagaagtggggaccccacccctcatcaggagttccagtgctgcatgcgattatctacccacgtccacgcggccacctcaccctctccgcacacctctggctgtctttttgtactttttgttccagagctgcttctgtctggtttatttaggttttatccttccttttctttgagagttcgtgaagagggaagccaggattggggacctgatggagagtgagagcatgtgaggggtagtgggatggtggggtaccagccactggaggggtcatccttgcccatcgggaccagaaacctgggagagacttggatgaggagtggttgggctgtgcctgggcctagcacggacatggtctgtcctgacagcactcctcggcaggcatggctggtgcctgaagaccccagatgtgagggcaccaccaagaatttgtggcctaccttgtgagggagagaactgagcatctccagcattctcagccacaaccaaaaaaaaataaaaagggcagccctccttaccactgtggaagtccctcagaggccttggggcatgacccagtgaagatgcaggtttgaccaggaaagcagcgctagtggagggttggagaaggaggtaaggatgagggttcatcatccctccctgcctaaggaagctaaaagcatggccctgctgcccctccctgcctccacccacagtggagagggctacaaaggaggacaagaccctctcaggctgtcccaagctcccaagagcttccagagctctgacccacagcctccaagtcaggtggggtggagtcccagagctgcacagggtttggcccaagtttctaagggaggcacttcctcccctcgcccatcagtgccagcccctgctggctggtgcctgagcccctcagacagccccctgccccgcaggcctgccttctcagggacttctgcggggcctgaggcaagccatggagtgagacccaggagccggacacttctcaggaaatggcttttcccaacccccagcccccacccggtggttcttcctgttctgtgactgtgtatagtgccaccacagcttatggcatctcattgaggacaaagaaaactgcacaataaaaccaagcctctggaatctaaaaaaaaaaaaaaaaaaaa

SEQ ID NO: 11753 - DNA, 4748 bp, Homo sapiens
cctcgcggggttgcggcgagcccggcccgcgaacgtcacgtccctgcgcgctccctgcactctcccgagctgcgctaggcgggcgccacggctgcccggcgaaggaaaccgaaaccgagtccgggcccgtccctccgcggccccatccgcccggtgcacccggggccgcgctcgccaggccgcggagcccagagctgcgcgcacgaaccgtgcgccgggagggcgtgggcgtggcgccgaagggtcccgggtcttcgacgcctctgcggcggctcctccctccttgcagttggatccctggcgggtgcggcccggcccggcccgtgagcggcgcacagaatgggccgatgctgcttctacacggcggggacgttgtccctgctcctgctggtgaccagcgtcacgctgctggtggcccgggtcttccagaaggctgtagaccagagtatcgagaagaaaattgtgttaaggaatggtactgaggcatttgactcctgggagaagccccctctgcctgtgtatactcagttctatttcttcaatgtcaccaatccagaggagatcctcagaggggagacccctcgggtggaagaagtggggccatacacctacagggaactcagaaacaaagcaaatattcaatttggagataatggaacaacaatatctgctgttagcaacaaggcctatgtttttgaacgagaccaatctgttggagaccctaaaattgacttaattagaacattaaatattcctgtattgactgtcatagagtggtcccaggtgcacttcctcagggagatcatcgaggccatgttgaaagcctatcagcagaagctctttgtgactcacacagttgacgaattgctctggggctacaaagatgaaatcttgtcccttatccatgttttcaggcccgatatctctccctattttggcctattctatgagaaaaatgggactaatgatggagactatgtttttctaactggagaagacagttaccttaactttacaaaaattgtggaatggaatgggaaaacgtcacttgactggtggataacagacaagtgcaatatgattaatggaacagatggagattcttttcacccactaataaccaaagatgaggtcctttatgtcttcccatctgacttttgcaggtcagtgtatattactttcagtgactatgagagtgtacagggactgcctgcctttcggtataaagttcctgcagaaatattagccaatacgtcagacaatgccggcttctgtatacctgagggaaactgcctgggctcaggagttctgaatgtcagcatctgcaagaatggtgcacccatcattatgtctttcccacacttttaccaagcagatgagaggtttgtttctgccatagaaggcatgcacccaaatcaggaagaccatgagacatttgtggacattaatcctttgactggaataatcctaaaagcagccaagaggttccaaatcaacatttatgtcaaaaaattagatgactttgttgaaacgggagacattagaaccatggttttcccagtgatgtacctcaatgagagtgttcacattgataaagagacggcgagtcgactgaagtctatgattaacactactttgatcatcaccaacataccctacatcatcatggcgctgggtgtgttctttggtttggtttttacctggcttgcatgcaaaggacagggatccatggatgagggaacagcggatgaaagagcacccctcattcgaacctaaacattgcctttgcttggtgaagaaactgtgtgagctgtcctgacctggacgatgacgtggggaaaccctccacctccttgcaggcttgttgcctgttgaaagaaggaaaaagacacggcgctggcaagtgataggaacattctggccagaggttaaagagcaggctgacatggctggccattaagctttataaaatcatgtgggctctgaaattgttcttttatgtgtctagcaagtatttaataaacccttgtatagtaattttgttgttgttgggtgctggtagctccagaattttgtgaccactattgtgggtaaaatgtctctgcatcacttgttaatgctactggtctaacttcattcagtatgcttcattcaccgaactttgtgctcaaaatgcgtatataccattttatgttgtattcctccatttcacttgcaaaacagaagtaaataagagttcgggacccagggtaaaatggtagcttcatccaatatatcattcaaatgcatctgatttctaaaacatattacattttatgctgatcttcagttcataattcttccaggaaaactcagtcttccaactgcaataaaatactgggtagaatcaaatgggaaaggggttgggtggggcaatacccatgagttgatagtgataagctcctaaggatttttaacttgtacttttgtgaacgaagagaatgcataaataatgttggtgaggataaagtacagatatttcatgtagaattaattgctagttatgatgcttgtggatagttaactgttttttttttagtcaaaatgatcatgctacgaaaagatgcttctgagagaatgtaatgagtaactgatttttcttcctgagtcgcccttgccaaatatgttactgtattaattaatctaatattgagtgattatttgtaaaattatgaatatgggaaatccatctatctacagcctaagttacacataagtttcagaaagtctgattagactaaagagatatttcttctgggacagccgccttcttggtaattttgaagttctttttacaagttccttcctcagtttcagttctttccagtgttttgtagctcactgtcactcactgaatagagaaacgtgtgccctatacttcctgtgacaatcattttgctgacagaatgatggatgtttaaaatattgcacaaagtactttaaagaaaggtctgttaggaccagaagcagagacaccacttttcaaaggacttcttggtttcagcataacctaagacagggaattgggagccatcatatgtcacagtgttcagaattcaagcatatttaagggcattttctttgattctcaaagttcagcattcattttgaattgagaagcctatacatttagctgacaaagtgcttatagaatttcttaacaactgaaccattcaaaaggattttttttgtttaaaactggatttcaatgtaagcaaatgaagaaaaaaatatagatttcatttccatagcttcttatccctgtattgaggtaataaattgttttactgacaatttttcctttttctacactaaaacaatatgtgatatatttcccctcttgaagaggcaattcattaaactctcaaattttctatagaatcaagatagaacctttagatactccaactcaccaaaatgtaaaaaaactaacaaaaatatttggtcttcaataatgctaaatatctacatttttagaatttatcaacatttaactagataattgggcatgtcttaattatgcatgtacttatccatactaataaaattgacaatgctagtgcatacttattggtttagtcctattatcaggatataatcatctgtgaggaggatattttaaatactgtaaatgataacagttaatgatatacacatttagactgagttgcacactggcagggagaccaaaaacattacttccatacttgtgtcatgattcttttttttttgagagagtctcactctgtcgccaggctggagtacagtggcatgatctcggctcactgcaacctctgcctcccgggttcaagcaattctcctgcctcagccacccaagtagctgggactacaggtgcgtgccaccacgcccagctaaattttgtatttttagtggagacggggtttcaccatgttggccaggatggtctcaatctcctgaccctgcgatctgcccacctcagcctcccaaagtgctgggattacaggcgtaagccaccgggcctggcctgttttatgattcttaatagttacttggtttaaatcacatttgatactatccttctgaaaagtctgagacagatctacaaactacagtcaaaattatagattaagaggaatgaatgcacctatttggctttaagttgaagatgaattatttctcatgctcattttcttgcggcagttatcttagaaagacccccaaaggctttgtgattgtaagcactgtcatgatcacagaatgcaagcttctggtaccatgatcctcaacttagagaggaagaaaccaagacagagagcttaactcacttctctcagggaaaattaggagttgagcacaggacaggaaatgggctttgccacttttagctccaggcttttctaaccagacttgatttcctcatgttctagaaagatcactaatggtcaagtggaacaagcactacacgactaacccctattggggtttttaacttaagggaggctaatttttaatttaaactgctcgagatatgagttctgcaaaaggtggtccgcatccttggccctctggacattatcactaaattgcttgtgcctgttaacaagaatactgaccagaatgctcttcatgtagcttatacagttggttcacttcatgcggttcttgacatgtttatttctacccttaatgcaatgaaatgtttcattaataaaaaaccactttatat

SEQ ID NO: 11754 - DNA, 3934 bp, Homo sapiens
ctcggctggctaagcctgcgccgggccgcctcgctcgctcccagctctgtcagtggcccgcggggcccgatcgctgcgcccgcggccagggccgaggcaggcctgacccggggccgggcagcccgcgcgactttcggaacatggcaacccgtgtgtgtctcatcccagaaagagaagactttaaccactgtgatgcctgagaatccagtgagtgtgacgtttctccagatacttcatgctgttcacctgtgtcctcgccgcaccactgccgcacacgactcctgaaccatgggggaaaacgaggatgagaagcaggcccaggcggggcaggtttttgagaactttgtccaggcatccacgtgcaaaggtaccctccaggccttcaacattctcacacgacacctggacctagaccctctggaccacagaaacttttattccaagctcaagtccaaggtgaccacctggaaagccaaagccctgtggtacaaattggataagcgtggttcccacaaagagtataagcgagggaagtcgtgcacgaacaccaagtgtctcatagttgggggaggaccctgtggcttgcgcactgccattgaacttgcctacctgggagccaaagtggtcgtggtggagaagagggactccttctcccggaacaacgtgctacacctctggcctttcaccatccatgaccttcggggcctgggagccaagaagttctatgggaagttctgtgctggctccatcgaccatatcagtattcgccaactacagctcatcctattcaaggtggccctgatgctgggagttgaaatccatgtgaatgtggagttcgtgaaggttctagagcctcctgaagatcaagaaaatcaaaaaattggctggcgggcagaatttctccctacagaccattctctgtcggagtttgagtttgacgtcatcattggtgccgatggccgcaggaacaccctggaagggttcagaagaaaagaattccgtgggaagctggcgattgccatcaccgccaacttcataaacagaaacagcacagcggaagccaaggtggaagagattagtggtgtggctttcatcttcaatcagaaattttttcaggaccttaaagaagaaacaggcatagatcttgagaacattgtttactacaaggactgcacccactattttgtaatgacagccaagaagcagagcctgctcgacaaaggtgtcatcattaacgactacatcgacacagagatgctgctgtgtgcggagaacgtgaaccaagacaacctgctatcctatgcccgggaagctgcagactttgccaccaactaccagctgccatccttagactttgccatgaaccactatgggcagcctgatgtggccatgtttgactttacctgcatgtatgcctcagagaacgcggccctggtgcgggagcggcaggcgcaccagctgctcgtggcccttgtgggtgacagcttgcttgagccattttggcccatgggtacaggctgtgcccgtggcttcctggcagcctttgacacggcatggatggtgaagagctggaaccagggcacccctcccctggagctgctggctgaaagggaaagtctctaccggctgttacctcagacaaccccggagaacatcaacaagaactttgagcagtacacgttggacccagggacacggtacccaaacctcaactcacactgtgtcaggccccatcaggtgaagcatttgtatatcactaaggagctggagcactaccctctcgagagactgggctcggtgaggagatctgtcaacctctccaggaaggagtcagatatccggcccagcaagctcctgacctggtgccagcagcagacagagggctaccagcatgtcaacgtcaccgacctgaccacatcctggcgcagtgggttggccctgtgtgccatcatccaccgcttccggcctgagctcatcaactttgactctttgaatgaagatgatgctgtggagaacaaccagctcgcatttgatgtggccgagcgagagtttgggatccctccagtgaccacgggcaaagagatggcatctgcccaggagcctgacaagctcagcatggtcatgtacctctccaagttctacgagctcttccggggcaccccactgaggcccgtggattcttggcgcaaaaactatggagaaaatgctgacctcagcttggccaaatcatccatttctaataactatctcaacctcacatttccaaggaagaggactccacgggtggatggtcaaaccggagagaatgacatgaacaaacggagacggaagggcttcaccaacctggacgagccttcaaacttttccagccgtagcttgggctccaatcaagagtgtgggagcagtaaggaaggtggaaatcagaacaaagtcaagtccatggcgaatcagctgctggccaagtttgaggagagcactcggaacccctcactcatgaagcaggaacgccgtgtctcagggataggtaagccggtcctgtgctcttcctccggccctcctgttcactcttgctgccccaagccggaggaggccacacccagcccatcacctcctctgaaaaggcagttcccctctgtggtcgtgacggggcacgtgctcagagagctcaagcaagtgtctgctggcagtgagtgcctgagcagaccttggagagccagagccaagtctgacctacagctgggtgggacagaaaatttcgctaccctgccttctacccgcccgagggcgcaggctctttccggggtgctgtggcggctgcagcaagtggaggaaaagattctccagaagagggctcagaacttggccaacagggaatttcacacaaagaacattaaggagaaggcggctcaccttgcctccatgtttggacacggggatttcccgcagaataaactactctctaaaggcctgtctcatactcatcctccatctcctccctctcgccttccgtctcctgatccagctgcttcttcctctccatcaactgttgactctgcttctcctgccagaaaggaaaagaagtcaccttcagggttccattttcatcccagccatttgagaacagtgcatcctcagctgacggtagggaaagtgtccagcggaataggggctgcagctgaagtcctggtcaatctgtacatgaatgatcacagacctaaggcccaggccacctctccagacctggaatctatgcgaaagtcatttccccttaacctgggaggcagcgacacgtgttacttctgtaagaaacgtgtgtacgtgatggaacggctgagcgccgagggccacttcttccaccgggagtgtttccgctgcagcatctgtgccaccaccttgcgcctggccgcctacacctttgactgcgatgaaggcaaattttactgcaagcctcacttcattcactgtaaaaccaatagcaaacaacggaagagacgggcagagttgaagcaacaaagagaggaggaggcaacatggcaagagcaggaagcccctcggagagacactcccaccgaaagttcttgcgcagtggccgccattggcaccctggaaggcagccccccagttcatttcagccttccagtgctacacccacttcttggctgacacacttctgctctaagagtctccctccctttatagaatgtcaaccaaagagtgccctcctcccctctcagcctcctctttagctagcctccccatctcatcacaacgcatgtctgtgacctttggtaatcatttacagtgccacacggaaccctgtattttgcacacagcaaaacaaacaatgtttagctttatttatggtatttgatgctgtaaatggaaataaatattgttctttataaaaaaaaaaaaaagaaaaaaaaaaaaaaaa

SEQ ID NO: 11755 - DNA, 1759 bp, Homo sapiens
ctcaggcctgacggtccgagtggagctgcgggacagcccgaacctccaggtcagccccgcggccctccatggcgctggtgcgcgcactcgtctgctgcctgctgactgcctggcactgccgctccggcctcgggctgcccgtggcgcccgcaggcggcaggaatcctcctccggcgataggacagttttggcatgtgactgacttacacttagaccctacttaccacatcacagatgaccacacaaaagtgtgtgcttcatctaaaggtgcaaatgcctccaaccctggcccttttggagatgttctgtgtgattctccatatcaacttattttgtcagcatttgattttattaaaaattctggacaagaagcatctttcatgatatggacaggggatagcccacctcatgttcctgtacctgaactctcaacagacactgttataaatgtgatcactaatatgacaaccaccatccagagtctctttccaaatctccaggttttccctgcgctgggtaatcatgactattggccacaggatcaactgcctgtagtcaccagtaaagtgtacaatgcagtagcaaacctctggaaaccatggctagatgaagaagctattagtactttaaggaaaggtggtttttattcacagaaagttacaactaatccaaaccttaggatcatcagtctaaacacaaacttgtactacggcccaaatataatgacactgaacaagactgacccagccaaccagtttgaatggctagaaagtacattgaacaactctcagcagaataaggagaaggtgtatatcatagcacatgttccagtggggtatctgccatcttcacagaacatcacagcaatgagagaatactataatgagaaattgatagatatttttcaaaaatacagtgatgtcattgcaggacaattttatggacacactcacagagacagcattatggttctttcagataaaaaaggaagtccagtaaattctttgtttgtggctcctgctgttacaccagtgaagagtgttttagaaaaacagaccaacaatcctggtatcagactgtttcagtatgatcctcgtgattataaattattggatatgttgcagtattacttgaatctgacagaggcgaatctaaagggagagtccatctggaagctggagtatatcctgacccagacctacgacattgaagatttgcagccggaaagtttatatggattagctaaacaatttacaatcctagacagtaagcagtttataaaatactacaattacttctttgtgagttatgacagcagtgtaacatgtgataagacatgtaaggcctttcagatttgtgcaattatgaatcttgataatatttcctatgcagattgcctcaaacagctttatataaagcacaattactagtatttcacagtttttgctaatagaaaatgctgattctgattctgagatcaatttgtgggaattttacataaatctttgttaattactgagtgggcaagtagacttcctgtctttgctttcttttttttttctttttgatgccttaatgtagatatctttatcattctgaattgtattatatatttaaagtgctcattaatagaatgatggatgtaaattggatgtaaatattcagtttatataattatatctaatttgtacccttgttgaaattgtcatttatacaataaagcgaattctttatctctaaaaaaaaaaaaaaaaaaaaa

SEQ ID NO: 11756 - DNA, 2805 bp, Homo sapiens
cgggtctgatagtccctacctgtcaggactggtgttaggatgagataatgtttgtgaactgtaaacatatataaacgtgtgctactgtgagaactggaacaaagaagagagggagtgagagaaatcaagggagggctggggctgggaaagaacgaaaagggagtcgcgtatagaggagaggcgacagtcgcgagccacactttgcaatgaaactctttagactttctgccgggagagcggcccagacgcgccaggtctgtagcaggaggccgcgagggcgggtccccagaagcctacaggtgagtatcggttctccccttcccggctttcggtccggaggaggcgggagcagcttccctgttctgatcctatcgcgggcggcgcagggccggcttggccttccgtgggacggggaggggggcgggatgtgtcacccaaataccagtggggacggtcggtggtggaaccagccgggcaggtcgggtagagtataagagccggagggagcggccggggcgcagacgcctgcagaccatcccagacgccggagcccgagccccgacgagtccccgcgcctcatccgcccgcgtccggtccgcgttcctccgccccaccatggctcggggccccggcctcgcgccgccaccgctgcggctgccgctgctgctgctggtgctggcggcggtgaccggccacacggccgcgcaggacaactgcacgtgtcccaccaacaagatgaccgtgtgcagccccgacggccccggcggccgctgccagtgccgcgcgctgggctcgggcatggcggtcgactgctccacgctgacctccaagtgtctgctgctcaaggcgcgcatgagcgcccccaagaacgcccgcacgctggtgcggccgagtgagcacgcgctcgtggacaacgatggcctctacgaccccgactgcgaccccgagggccgcttcaaggcgcgccagtgcaaccagacgtcggtgtgctggtgcgtgaactcggtgggcgtgcgccgcacggacaagggcgacctgagcctacgctgcgatgagctggtgcgcacccaccacatcctcattgacctgcgccaccgccccaccgccggcgccttcaaccactcagacctggacgccgagctgaggcggctcttccgcgagcgctatcggctgcaccccaagttcgtggcggccgtgcactacgagcagcccaccatccagatcgagctgcggcagaacacgtctcagaaggccgccggtgaagtggatatcggcgatgccgcctactacttcgagagggacatcaagggcgagtctctattccagggccgcggcggcctggacttgcgcgtgcgcggagaacccctgcaggtggagcgcacgctcatctattacctggacgagattcccccgaagttctccatgaagcgcctcaccgccggcctcatcgccgtcatcgtggtggtcgtggtggccctcgtcgccggcatggccgtcctggtgatcaccaaccggagaaagtcggggaagtacaagaaggtggagatcaaggaactgggggagttgagaaaggaaccgagcttgtaggtacccggcggggcaggggatggggtggggtaccggatttcggtatcgtcccagacccaagtgagtcacgcttcctgattcctcggcgcaaaggagacgtttatcctttcaaattcctgccttccccctcccttttgcgcacacaccaggtttaatagatcctggcctcagggtctcctttctttctcacttctgtcttgagggaagcatttctaaaatgtatcccctttcggtccaacaacaggaaacctgactggggcagtgaaggaagggatggcacagcgttatgtgtaaaaaacaagtatctgtatgacaacccgggatcgtttgcaagtaactgaatccattgcgacattgtgaaggcttaaatgagtttagatgggaaatagcgttgttatcgccttgggtttaaattatttgatgagttccacttgtatcatggcctacccgaggagaagaggagtttgttaactgggcctatgtagtagcctcatttaccatcgtttgtattactgaccacatatgcttgtcactgggaaagaagcctgtttcagctgcctgaacgcagtttggatgtctttgaggacagacattgcccggaaactcagtctatttattcttcagcttgcccttactgccactgatattggtaatgttcttttttgtaaaatgtttgtacatatgttgtctttgataatgttgctgtaattttttaaaataaaacacgaatttaataaaatatgggaaaggcacaaaccagaagtcggcatttgtgaaaagtccctccagatttctatcactttggtctctaatttcccaagacttgtattttttttttatttcaaattataacacttttttttcccccagaagtgggtgtttcatgttgctactctggtgtgtcccaagatatcctaactggccagtgtaaatgctattctttctaaataagattatttggaaacttccttcaaactgcaggagggcgagctctgagggcacgagaagctaaaactagctgcttttgatgaaaaagagtgccagtctttggtcatctctaaacaaggcttatcaccaatggagacagaaaactctagttcaagagctgtacctcctttgaatcccagccctactcgaaataagtggtactatttccatttagcctttgagcaaatcacttaactcaaaggcgttgtggctctaagattaaacgacttt

SEQ ID NO: 11757 - DNA, 2076 bp, Homo sapiens
agagctaccggtggacccacggtgcctccctccctgggatctacacagaccatggccttgccaacggctcgacccctgttggggtcctgtgggacccccgccctcggcagcctcctgttcctgctcttcagcctcggatgggtgcagccctcgaggaccctggctggagagacagggcaggaggctgcgcccctggacggagtcctggccaacccacctaacatttccagcctctcccctcgccaactccttggcttcccgtgtgcggaggtgtccggcctgagcacggagcgtgtccgggagctggctgtggccttggcacagaagaatgtcaagctctcaacagagcagctgcgctgtctggctcaccggctctctgagccccccgaggacctggacgccctcccattggacctgctgctattcctcaacccagatgcgttctcggggccccaggcctgcacccgtttcttctcccgcatcacgaaggccaatgtggacctgctcccgaggggggctcccgagcgacagcggctgctgcctgcggctctggcctgctggggtgtgcgggggtctctgctgagcgaggctgatgtgcgggctctgggaggcctggcttgcgacctgcctgggcgctttgtggccgagtcggccgaagtgctgctaccccggctggtgagctgcccgggacccctggaccaggaccagcaggaggcagccagggcggctctgcagggcgggggacccccctacggccccccgtcgacatggtctgtctccacgatggacgctctgcggggcctgctgcccgtgctgggccagcccatcatccgcagcatcccgcagggcatcgtggccgcgtggcggcaacgctcctctcgggacccatcctggcggcagcctgaacggaccatcctccggccgcggttccggcgggaagtggagaagacagcctgtccttcaggcaagaaggcccgcgagatagacgagagcctcatcttctacaagaagtgggagctggaagcctgcgtggatgcggccctgctggccacccagatggaccgcgtgaacgccatccccttcacctacgagcagctggacgtcctaaagcataaactggatgagctctacccacaaggttaccccgagtctgtgatccagcacctgggctacctcttcctcaagatgagccctgaggacattcgcaagtggaatgtgacgtccctggagaccctgaaggctttgcttgaagtcaacaaagggcacgaaatgagtcctcaggctcctcggcggcccctcccacaggtggccaccctgatcgaccgctttgtgaagggaaggggccagctagacaaagacaccctagacaccctgaccgccttctaccctgggtacctgtgctccctcagccccgaggagctgagctccgtgccccccagcagcatctgggcggtcaggccccaggacctggacacgtgtgacccaaggcagctggacgtcctctatcccaaggcccgccttgctttccagaacatgaacgggtccgaatacttcgtgaagatccagtccttcctgggtggggcccccacggaggatttgaaggcgctcagtcagcagaatgtgagcatggacttggccacgttcatgaagctgcggacggatgcggtgctgccgttgactgtggctgaggtgcagaaacttctgggaccccacgtggagggcctgaaggcggaggagcggcaccgcccggtgcgggactggatcctacggcagcggcaggacgacctggacacgctggggctggggctacagggcggcatccccaacggctacctggtcctagacctcagcatgcaagaggccctctcggggacgccctgcctcctaggacctggacctgttctcaccgtcctggcactgctcctagcctccaccctggcctgagggccccactcccttgctggccccagccctgctggggatccccgcctggccaggagcaggcacgggtggtccccgttccaccccaagagaactcgcgctcagtaaacgggaacatgccccctgcagacacgt

SEQ ID NO: 11758 - DNA, 2052 bp, Homo sapiens
agagctaccggtggacccacggtgcctccctccctgggatctacacagaccatggccttgccaacggctcgacccctgttggggtcctgtgggacccccgccctcggcagcctcctgttcctgctcttcagcctcggatgggtgcagccctcgaggaccctggctggagagacagggcaggaggctgcgcccctggacggagtcctggccaacccacctaacatttccagcctctcccctcgccaactccttggcttcccgtgtgcggaggtgtccggcctgagcacggagcgtgtccgggagctggctgtggccttggcacagaagaatgtcaagctctcaacagagcagctgcgctgtctggctcaccggctctctgagccccccgaggacctggacgccctcccattggacctgctgctattcctcaacccagatgcgttctcggggccccaggcctgcacccgtttcttctcccgcatcacgaaggccaatgtggacctgctcccgaggggggctcccgagcgacagcggctgctgcctgcggctctggcctgctggggtgtgcgggggtctctgctgagcgaggctgatgtgcgggctctgggaggcctggcttgcgacctgcctgggcgctttgtggccgagtcggccgaagtgctgctaccccggctggtgagctgcccgggacccctggaccaggaccagcaggaggcagccagggcggctctgcagggcgggggacccccctacggccccccgtcgacatggtctgtctccacgatggacgctctgcggggcctgctgcccgtgctgggccagcccatcatccgcagcatcccgcagggcatcgtggccgcgtggcggcaacgctcctctcgggacccatcctggcggcagcctgaacggaccatcctccggccgcggttccggcgggaagtggagaagacagcctgtccttcaggcaagaaggcccgcgagatagacgagagcctcatcttctacaagaagtgggagctggaagcctgcgtggatgcggccctgctggccacccagatggaccgcgtgaacgccatccccttcacctacgagcagctggacgtcctaaagcataaactggatgagctctacccacaaggttaccccgagtctgtgatccagcacctgggctacctcttcctcaagatgagccctgaggacattcgcaagtggaatgtgacgtccctggagaccctgaaggctttgcttgaagtcaacaaagggcacgaaatgagtcctcaggtggccaccctgatcgaccgctttgtgaagggaaggggccagctagacaaagacaccctagacaccctgaccgccttctaccctgggtacctgtgctccctcagccccgaggagctgagctccgtgccccccagcagcatctgggcggtcaggccccaggacctggacacgtgtgacccaaggcagctggacgtcctctatcccaaggcccgccttgctttccagaacatgaacgggtccgaatacttcgtgaagatccagtccttcctgggtggggcccccacggaggatttgaaggcgctcagtcagcagaatgtgagcatggacttggccacgttcatgaagctgcggacggatgcggtgctgccgttgactgtggctgaggtgcagaaacttctgggaccccacgtggagggcctgaaggcggaggagcggcaccgcccggtgcgggactggatcctacggcagcggcaggacgacctggacacgctggggctggggctacagggcggcatccccaacggctacctggtcctagacctcagcatgcaagaggccctctcggggacgccctgcctcctaggacctggacctgttctcaccgtcctggcactgctcctagcctccaccctggcctgagggccccactcccttgctggccccagccctgctggggatccccgcctggccaggagcaggcacgggtggtccccgttccaccccaagagaactcgcgctcagtaaacgggaacatgccccctgcagacacgt

SEQ ID NO: 11759 - DNA, 1327 bp, Homo sapiens
cagggtcccagatgcacaggaggagaagcaggagctgtcgggaagatcagaagccagtcatggatgaccagcgcgaccttatctccaacaatgagcaactgcccatgctgggccggcgccctggggccccggagagcaagtgcagccgcggagccctgtacacaggcttttccatcctggtgactctgctcctcgctggccaggccaccaccgcctacttcctgtaccagcagcagggccggctggacaaactgacagtcacctcccagaacctgcagctggagaacctgcgcatgaagcttcccaagcctcccaagcctgtgagcaagatgcgcatggccaccccgctgctgatgcaggcgctgcccatgggagccctgccccaggggcccatgcagaatgccaccaagtatggcaacatgacagaggaccatgtgatgcacctgctccagaatgctgaccccctgaaggtgtacccgccactgaaggggagcttcccggagaacctgagacaccttaagaacaccatggagaccatagactggaaggtctttgagagctggatgcaccattggctcctgtttgaaatgagcaggcactccttggagcaaaagcccactgacgctccaccgaaagagtcactggaactggaggacccgtcttctgggctgggtgtgaccaagcaggatctgggcccagtccccatgtgagagcagcagaggcggtcttcaacatcctgccagccccacacagctacagctttcttgctcccttcagcccccagcccctcccccatctcccaccctgtacctcatcccatgagaccctggtgcctggctctttcgtcacccttggacaagacaaaccaagtcggaacagcagataacaatgcagcaaggccctgctgcccaatctccatctgtcaacaggggcgtgaggtcccaggaagtggccaaaagctagacagatccccgttcctgacatcacagcagcctccaacacaaggctccaagacctaggctcatggacgagatgggaaggcacagggagaagggataaccctacacccagaccccaggctggacatgctgactgtcctctcccctccagcctttggccttggcttttctagcctatttacctgcaggctgagccactctcttccctttccccagcatcactccccaaggaagagccaatgttttccacccataatcctttctgccgacccctagttccctctgctcagccaagcttgttatcagctttcagggccatggttcacattagaataaaaggtagtaattagaaaaaaaaaaaaaaaaaa

SEQ ID NO: 11760 - DNA, 2580 bp, Homo sapiens
tcgggccccgcggccgcctttataaggcggcgggggtggtggcccgggccgcgttgcgctcccgccactccgcgcccgctatcctggctccgtgctcccacgcgcttgtgcctggacggaccctcgccagtgctctgcgcaggattggaacatcagttaacatctgaccactgccagcccaccccctcccacccacgtcgattgcatctctgggctccagggataaagcaggtcttggggtgcaccatgatttcaccattcttagtactggccattggcacctgccttactaactccttagtgccagagaaagagaaagaccccaagtactggcgagaccaagcgcaagagacactgaaatatgccctggagcttcagaagctcaacaccaacgtggctaagaatgtcatcatgttcctgggagatgggatgggtgtctccacagtgacggctgcccgcatcctcaagggtcagctccaccacaaccctggggaggagaccaggctggagatggacaagttccccttcgtggccctctccaagacgtacaacaccaatgcccaggtccctgacagcgccggcaccgccaccgcctacctgtgtggggtgaaggccaatgagggcaccgtgggggtaagcgcagccactgagcgttcccggtgcaacaccacccaggggaacgaggtcacctccatcctgcgctgggccaaggacgctgggaaatctgtgggcattgtgaccaccacgagagtgaaccatgccacccccagcgccgcctacgcccactcggctgaccgggactggtactcagacaacgagatgccccctgaggccttgagccagggctgtaaggacatcgcctaccagctcatgcataacatcagggacattgacgtgatcatggggggtggccggaaatacatgtaccccaagaataaaactgatgtggagtatgagagtgacgagaaagccaggggcacgaggctggacggcctggacctcgttgacacctggaagagcttcaaaccgagatacaagcactcccacttcatctggaaccgcacggaactcctgacccttgacccccacaatgtggactacctattgggtctcttcgagccaggggacatgcagtacgagctgaacaggaacaacgtgacggacccgtcactctccgagatggtggtggtggccatccagatcctgcggaagaaccccaaaggcttcttcttgctggtggaaggaggcagaattgaccacgggcaccatgaaggaaaagccaagcaggccctgcatgaggcggtggagatggaccgggccatcgggcaggcaggcagcttgacctcctcggaagacactctgaccgtggtcactgcggaccattcccacgtcttcacatttggtggatacaccccccgtggcaactctatctttggtctggcccccatgctgagtgacacagacaagaagcccttcactgccatcctgtatggcaatgggcctggctacaaggtggtgggcggtgaacgagagaatgtctccatggtggactatgctcacaacaactaccaggcgcagtctcctgtgcccctgcgccacgagacccacggcggggaggacgtggccgtcttctccaagggccccatggcgcacctgctgcacggcgtccacgagcagaactacgtcccccacgtgatggcgtatgcagcctgcatcggggccaacctcggccactgtgctcctgccagctcggcaggcagccttgctgcaggccccctgctgctcgctctggccctctaccccctgagcgtcctgttctgagggcccagggcccgggcacccacaagcccgtgacagatgccaacttcccacacggcagcccccccctcaaggggcagggaggtgggggcctcctcagcctctgcaactgcaagaaaggggacccaggaaaccaaagtctgccgcccacctcgctcccctctggaatcttccccaagggccaaacccacttctggcctccagcctttgctccctccccgctgccctttggccaccagggtagatttctcttgggcaggcagagagtacagactgcagacattctcaaagcctcttatttttctagcgaacgtatttctccagacccagaggccctgaagcctccgtggaacattgtggatctgaccctcccagtctcatctcctgaccctcccactcccatctccttacctctggaaccccccaggccctacaatgctcatgtccctgtccccaggcgagccctccttcaggggagttgaggtctttctcctcaggacaaggccttgctcactcactcactccaagaccaccagggtcccaggaagccggtgcctgggtggccatcctacccagcgtgcccaggccgggaagagccacctggcagggctcacactcctgggctctgaacacacacgccagctcctctctgaagcgactctcctgtttggaacggcaaaaaaaaatttttttttctctttttggtggtggttaaaagggaacacaaaacatttaaataaaactttccaaatatttccgagg

SEQ ID NO: 11761 - DNA, 2459 bp, Homo sapiens
agcctgtgactttcctccctggacaaaggcatcatgagttgtcagatctcttgcaaatctcgaggaagaggaggaggtggaggaggattccggggcttcagcagcggctcagctgtggtgtctggtggaagccggagatcaacttccagcttctcctgcttgagccgccatggtggtggtggcgggggcttcggtggaggcggctttggcagtcggagtcttgttggccttggagggaccaagagcatctccattagtgtggctggaggaggtggtggctttggcgccgctggtggatttggtggcagaggaggtggttttggaggcggcagcagctttggaggtggcagcggcttcagtggtggtggtttcggtggaggcggctttggtggaggccgctttggaggttttgggggccctggtggtgttggaggtttagggggtcctggtggctttgggcctggaggataccctggtggcatccacgaagtctctgtcaaccagagcctcctgcagcctctcaacgtgaaagttgacccagagatccagaatgtgaaggcccaagagcgtgagcagatcaaaactctcaacaacaaatttgcctccttcattgacaaggtgcggttcttggagcagcagaaccaggtgttacagaccaaatgggagctgctacaacaaatgaatgttggcacccgccccatcaacctggagcccatcttccaggggtatatcgacagcctcaagagatatctggatgggctcactgcagaaagaacatcacagaattcagagctgaataacatgcaggatcttgtggaggattataagaagaagtatgaggatgaaatcaataagcgcacagctgctgagaatgattttgtgacgcttaaaaaggacgtggacaatgcctacatgataaaggtggagttgcagtccaaggtggacctgctgaaccaggaaattgagtttctgaaagttctctatgatgcggagatatcccagatacatcagagtgtcactgacaccaacgtcatcctctccatggacaacagccgcaacctggacttggatagcatcatcgccgaggtcaaggcccagtatgaggagatcgcccagaggagcaaggaagaagcggaggccctgtaccacagcaagtatgaggagctccaggtgactgtcgggagacatggagacagcctgaaagagatcaagatagagatcagcgagctgaaccgcgtgatccagaggctgcagggggagatcgcacatgtgaagaagcagtgtaagaatgtgcaagatgccatcgcagatgccgagcagcgtggggagcatgccctcaaggatgccaggaacaagttgaatgacctggaggaggccctgcagcaggccaaggaggacttggcgcggctgctgcgtgactaccaggagctgatgaacgtgaagctggccctagatgtggagatcgccacctaccgcaaactgctggagggcgaggagtgcaggatgtctggagacctcagcagcaatgtgactgtgtctgtgacaagcagcaccatttcatcaaatgtggcatccaaggctgcctttggaggttctggaggtagagggtccagttccggaggaggatacagctctggaagcagcagttatggctctggaggccgacagtctggctccagaggcggtagtggaggaggaggttctatctctggaggaggatatggctctggcggtggttctggaggaagatacggatctggtggtggctctaagggagggtccatctctggaggaggatatggctctggaggtggaaaacacagctctggaggtggctctagaggaggctccagctctggaggaggatatggctctggaggtgggggttctagctctgtaaagggtagctcaggtgaagcttttggttccagcgtgaccttctcttttagataaagatgagcccccaccaccaccgactctcccaacccagactctcccactccagaatgtagaagcctgtctctgtacctctaactggcagcaagttaaatttttgtcatttatctctgatggcactttgagggaaaagaatgtccacatacagtttttgaaagatcttctctccaaaccagttagttagagccagtgacgcctctgtgttctggggcggaatctgtgctgtctaggtttgtgcttctagccatgcccattcccgcccccaccatgcctctttgcattgcccattttccagatgtgtattctgttgaggacccaggcccatccagggatttcatctctaagcctggcagtgctggggggaaatgtgtttctgtgtatatagctcctcttgtccactctgctttcggaagtgctgtggtctgggggtcttcataataaacctcatttgcaattcaaaaaaaaaaaaaaaaaaaaaaaaaaaaaaaaaaaaaaaaaaaaaa

SEQ ID NO: 11762 - DNA, 2507 bp, Homo sapiens
agctccttcccttactctaccttgctcctacttttctctaagtcaacatgagtcgacagtttagttccaggtctgggtaccgaagtggagggggcttcagctctggctctgctgggatcatcaactaccagcgcaggaccaccagcagctccacacgccgcagtggaggaggtggtgggagattttcaagctgtggtggtggtggtggtagctttggtgctggtggtggatttggaagtcggagtcttgttaaccttggtggcagtaaaagcatctccataagtgtggctagaggaggtggacgtggtagtggctttggtggtggttatggtggtggtggctttggtggtggtggctttggtggtggtggctttggtggaggtggcattgggggtggtggctttggtggttttggcagtggtggtggtggttttggtggaggtggctttgggggtggtggatatgggggtggttatggtcctgtctgccctcctggtggcatacaagaagtcactatcaaccagagccttcttcagcccctcaatgtggagattgaccctgagatccaaaaggtgaagtctcgagaaagggagcaaatcaagtcactcaacaaccaatttgcctccttcattgacaaggtgaggttcctggagcagcagaaccaggtactgcaaacaaaatgggagctgctgcagcaggtagatacctccactagaacccataatttagagccctactttgagtcattcatcaacaatctccgaaggagagtggaccaactgaagagtgatcaatctcggttggattcggaactgaagaacatgcaggacatggtggaggattaccggaacaagtatgaggatgaaatcaacaagcggacaaatgcagagaatgaatttgtgaccatcaagaaggatgtggatggtgcttatatgaccaaggtggaccttcaggccaaacttgacaacttgcagcaggaaattgatttccttacagcactctaccaagcagagttgtctcagatgcagactcaaatcagtgaaactaatgtcatcctctctatggacaacaaccgcagtctcgacctggacagcatcattgctgaggtcaaggcccagtacgaggatatagcccagaagagcaaagctgaggccgagtccttgtaccagagcaagtatgaagagctgcagatcactgctggcagacatggggatagtgtgagaaattcaaagatagaaatttctgagctgaatcgtgtgatccagagacttagatctgaaatcgacaatgtcaagaagcagatctccaacttgcagcagtccatcagtgatgcagagcagcgtggcgagaatgccctcaaggatgccaagaacaagctgaatgacctggaggatgccctgcagcaggccaaggaagacctggcccgcctgctgcgcgactaccaggagctgatgaacaccaagctggccctggatctggagattgccacctacaggaccctcctggagggagaagaaagcaggatgtctggagaatgtgccccgaacgtgagtgtgtctgtgagcacaagccacaccaccatcagtggaggtggcagccgaggaggtggcggcggtggctacggctctggaggtagcagctatggctccggaggtggtagctatggttctggaggtggcggcggcggcggccgtggcagctatggctccggaggtagcagctacggctccggaggtggcagctatggctctggaggtggcggcggcggccatggcagctacggctccggaagcagcagtgggggctacagaggtggctctggaggcggcggcggcggcagctctggcggccggggctctggcggcgggagctctggaggctccataggaggccggggatccagctctgggggtgtcaagtcctctggtggcagttccagcgtgaggtttgtttctaccacttattccggagtaaccagataaagagatgccctctgtttcattagctctagttctcccccagcatcactaacaaatatgcttggcaagaccgaggtcgatttgtcccagccttaccggagaaaagagctatggttagttacactagctcatcctattcccccagctctttcttttctgctgtttcccaatgaagttttcagatcagtggcaatctcagtcccctggctatgaccctgctttgttctttccctgagaaacagttcagcagtgaccaccacccacatgacatttcaaagcacctccttaagccagccagagtaggaccagttagacccagggtgtggacagctccttagcatcttatctctgtgctgttttggttttgtacataaggtgtaagcaagttgtttttcttttgtggagaggtcttaaactccccatttccttgttttgctgcaataaactgcatttgaaattctccatgtctcgatcgcccttgtttacggctctgtctaacctggatgggtgttttgtgaggtaaaagaa

SEQ ID NO: 11763 - DNA, 9105 bp, Homo sapiens
ggagccgccgggaggtaggcgcgggacgggcggctgcggtggcggcgggtggaccgattgtcgctcggcggcgggagtcggtggagtctcgctctttcgcaaggctggagtgcaatggcatgatctcggctcactgcagcctccgcctcctgggttcaagtgattcttctgcctcagcctcccgagtagctgggactacagaaatgctggtaatttcagtcacttgctgatgacttctgatgtcccagcaaatgttggcattgttgactgctgagaagatacttctgaggacccacgtctaaggtggacttggttcgcactcttctggttagtccctgaacaggagtgatgcctccaggcaggtggcatgctgcctatccagctcaggcccagtcttcgagggagcgagggcggcttcagacagtaaagaaggaagaagaggatgaaagctatactccagtgcaggctgccaggccacagactctcaaccgccctggccaggagctgttccgccagctcttcagacagcttcgctaccatgagtcttcagggcccctagaaactctgagccggctccgggaactctgtcgctggtggctgaggcctgacgttctctccaaggcacagatcctagagctgctggtgctggaacagttcctgagcatcctgcctggggagctccgggtttgggtgcagcttcataaccctgagagtggcgaggaggctgtggccttgctggaggagctgcagagggaccttgatgggacatcctggagggacccgggccctgcccagagcccagatgtgcattggatgggtacaggagccctgcgatctgcacagatatggtcccttgcttcacctctcaggagcagctctgctctgggggaccacctggagcctccctatgaaatagaagcacgtgacttcctggctgggcaatccgatactcctgctgcccagatgcctgcccttttcccgagagaggggtgcccgggagaccaggtaacaccaaccaggtccctgacagcccagctccaggagaccatgactttcaaggatgtggaggtgaccttctcccaggacgagtgggggtggctggactctgctcagaggaacctgtacagggatgtgatgctggagaattataggaacatggcttccctggtgggaccattcaccaaacctgctctgatctcctggttggaagcaagggagccatggggcctgaacatgcaggcagctcagcctaaggggaatccagttgctgctcctacaggagatgacctccagagtaaaacaaacaaattcatcttaaatcaggaacctttggaagaagcagaaaccttagctgtgtcatcaggatgtcctgcgacaagtgtttctgagggaattgggctcagagaatcttttcaacagaagagcaggcagaaggatcaatgtgaaaatcccatacaagtaagagttaagaaagaagagaccaatttcagtcacaggacaggaaaagactctgaagtatcaggaagtaatagtcttgacttaaaacatgttacatatttgagagtttctggaagaaaggaatcccttaaacatggctgtggcaaacacttcagaatgagttcacaccactatgactacaagaaatatgggaaggggctcagacacatgattgggggcttcagcctacatcagagaattcatagtggactgaaagggaacaaaaaggacgtgtgtggaaaagacttcagccttagctctcatcaccaacgtgggcagagtcttcacacagtgggagtgtcatttaagtgcagtgactgtggaaggactttcagtcatagctcccatcttgcgtatcatcagagacttcacactcaagagaaagcatttaaatgtagggtgtgtgggaaagccttccggtggagttccaactgtgcgcggcatgagaaaattcacactggagtgaagccttataaatgcgatttatgtgagaaagctttccgacgcctgtcagcctaccgtctgcaccgagaaacccatgctaagaagaaatttcttgaattgaatcagtatagggcagctctcacctacagctcagggtttgatcatcatttgggagaccaaagtggggagaaactctttgactgcagccagtgcaggaaatccttccactgtaagtcatatgttcttgaacatcaaaggattcacacccaggagaagccctataaatgtaccaaatgtaggaaaacctttagatggagatcaaactttactcgtcatatgaggttgcatgaggaggaaaaattctacaaacaagatgaatgtcgtgaaggcttcaggcaatctcctgactgcagtcagccccagggtgctcccgctgtggagaaaacatttctgtgtcagcagtgtgggaaaacttttactagaaagaaaactctcgttgaccaccagagaattcacacaggtgagaaaccttaccagtgtagcgattgtgggaaggactttgcctataggtcagcctttattgttcataagaagaagcatgccatgaaaagaaaacctgagggcgggccatcttttagtcaggacacagtgttccaggttcctcagagcagtcactccaaagaggagccctacaaatgcagccagtgtggcaaggccttccgcaatcactcattcctcctcatccatcagagagttcacactggagagaagccatataagtgcagggagtgtgggaaagccttcagatggagttccaatctctaccgacatcagaggattcactctcttcaaaaacagtatgattgccatgaaagtgaaaagactccaaatgtggagccaaaaatcctcactggtgagaaacgtttttggtgtcaagaatgtgggaaaacctttacacgtaaaagaacccttttagatcataagggaatacacagtggagagaagcgctataaatgtaatctatgtgggaaatcttatgatagaaactatcgccttgttaaccatcagaggatccactctacagagagacctttcaaatgtcagtggtgtgggaaagagttcattgggagacataccctttccagtcaccagaggaaacacaccagagcagcacaggctgaacgtagcccgcctgcacggtcttcctctcaggacacaaagttgagattacagaagctaaaaccaagtgaagagatgcccctcgaagactgcaaagaagcttgcagccagagctccaggctcactggactccaggacataagcattgggaaaaagtgccacaaatgcagcatatgtgggaaaacttttaacaagagttcacaactcattagccacaagagatttcatactcgagagaggcccttcaaatgcagcaagtgtggaaagaccttcaggtggtcttcgaacctggctcggcatatgaaaaaccatattagagattagcctgggacctgacagtgacagtgggggtgggttctcagtcccctgctagagaacccttaattataggcattgtggagtaactttgataaagggcccagccctttctgttttggaagctagtgacagaatcccaaggatttgaaagctcggggagtccccagcctgcctgctaggatgtgacgctggggaagtgcagcaccatgtcctttggagcccttctggagactccggcccctaggagtggcctctgcaccatagcctgcggctcccctattcaggtctccttccacaactctgaagagagagaccactgccctttgtggttggacagaatatctgtggcatcatgggctatggctgctggaaaggggccagtgggatcctagatttgtcttcaagtttggcctgtggccatgcctattctgttgactttaaaagcagcagcatcaagaactcctagccttcccaaatgccccctggggagttctggctggggcttcagccttcctggctggcttttggatatctgctagggggttagagtggtctcagcggcaggtggaggagagcaggatgctgggctcaagcgcttggcgtgtggatctctaccagtaccctgttgccatccccatcccacaggcctgcataggcagcagcggtccatctgtttaacagaaatgtgctgagcactcccatacaccaggcgctggtgtgtttgccagagacccagcagggaccagaacagatgaaaatcctgccatcttggatctttacagatgacaaacaaatgggatacgcagtattctggatggtgatgtgtgtagtggacaaagtgaatcagagaagagcagagggagtgctggattgggagatcagtcgtgattttagatagtctggtcagggagggcctcaactgagaaggtgaaatgtgagcaaagacgtgaaggaagccagggaggtagcaggtagctctctagggagagttgcaggcagaggagattgggtcttgactggtgtcctcaggaaggaagcccctgggatggagtgcagggagccagctggaagggaaggagaggggccagggaggccacaggcccggccatatgagcatcatgggtcattacgggggcttgagctggctcagagggaggcagggagcttttggacaattttgagttgaggagtgatgtggtttgaatctgaattatattttataagggttaaccacagatccaaggactcagtaaaagggtgaaaggcttctcatgcagttagccttgctgccagttcccataaatcagactcctccccactccgtttctgaattttctataggatcctcggcctcagcagatataaacgcttaccattgttgtgttcatgtctctagcccctgcacactgcaggcccctctcagcttcacatacccctctccatgtatgagatctggtgctagcaatcagattcaacccgaaggaacaagtgcatgtgcctgctgctctcaggagaaaaggcagcctgttctgggaggagctccctcactggcccacccacttgtgttgaagcaaaaagcaagaatcaattacttaaaggcaaaggagtgatattgctaaagcatgtgagtaatcattgcttctgattattgaagaggtcagattatgaatgaaaggataaaatgttttaatagtagagcagtgtcctgactataggggcccgttcatggagctggtcatttcttgaaatgagaagaaaccaacctggaagatgtctttttcagtagagtatggaataatcttacctgctctggattgccatgagcaggtgaaaatgaaggctctgatattgtgtggtggtgtcacaggatggtgggggcggggcagaagtctcctgttggtgttctgatgcctgttcagctttgtcctcaggaaggtttggtcatcttggttctgccatcctcttgccttcctacggcagcagctgttcatggcactgaagatgtcccttcactgtcccaaaactggcactagaagtggctgggcaggggggccagagtcataggaagggtcttggagtcatcagatctgggttccaggcatggtgtgccttttcttggcaggattgatcttgagcaagtcaatgaacctctgcatcaatttccttatgtgtgaagttagagtgcttggctgtgctacctgattcctgagattggtgaaagagggcttggtttaccaaggctctccatcaggtggttgacctctaggaccagggccctctcagaggtgcagcttccatgtcagttggtgttgtaaccatggaaaagtccctttccaatcaaacttttagcacccctttccccccatctctgctccctttgccacaggataccttgtaaagttcctgccccagtatagggatatttttactgtcttttttattttttgagacagggttgcccagggtggagtgcagtggcaggatcacagcttactgcagccttgacctcccaggctcaggtcccatctgagcctcccgagtagctggggctacaggtgtgtgccaccctgccagctaattttttatatttttttgtagagacaaaacttttatttttttttcccatgttgctcatgctggtctcaaactcctgggctcaagcaatccacccacctctgcctcccaaagtgctgggattacaggcgtgagccactgtgcctgacctgtcatttttatagaatgaaatgtgcttatttctaaacattctaatcaaattttaaaatgtgcaaagaatgaagtgaaaaactgaatttttttttttttttgatacggagtctcactctgttacccaggctagagtgcagtggcgcgatctccgctcactgcaagctctgcctcctgggctcacaccattctcctgcctcagcctcctcagtagctgggactacaagtgcctgccaccacgcctgggttattttttatatttttagtagagacggggtttcactgtgttagccaggatggtctcgatctccaggatggtctcgatctccaggatggtctcgatctcctgacgtcgtgatccacccgcctcggcctcccaaaatgctgggattacaggtgtgagccactgtgcccggccaaaagaacagaaattattttatcctgaagtaagctgtttatatttgggattatactgaacctatttgtccaataacctgagttttcaaataattttagttctataagtactataattatataaatattaatgaattcagattagctgaaaggaaaaaaagtagaagcctgactacttggtgctaactactaaagattttggcagaatcaatgttggatttggctttcctgtcccttccccatgccagccccccagagtgttctgccttgtgctgcctcccttcacctggagtgccacacccctctctctgccagttcagctcttcattcttcaaggcctgaccttgtctgacccttgtgcctctaaacccgtggccccacctctcttggttcctatgtcaggtgatgtttgtgtttttggttatgcccatctccatagccagaccaagcactctggaagccagggttgggtgcttatttatctgtttgccatgcagaaaatatcttgcacaaaattacctctgttaaggaatctgaagctgaatttagtttggctgagtcagggttgggttttttttaaggggctgtggggtgaaatgttgactggaagccacccacaaacacacacctgctggttaggaacccggctgtgggtggttctgagctgtttggcttcagttgacagtttctgattgccctgagcaccaggtctcatcttgcatctcatcctggcctggagaacattcagtttccttccaacccttcccacctttcccccactcccttggaggaactgaagttggggttgaggagagccagatggctggagtgggtatttgaaggtctttctgtcacctgttcagtgtggtctgccccacccctgctgaccaagactgactgaaatgtaaaataatacagaccatctcacactcagaaagctggcacatttttgaaagcccaagtgtgggtaagtgcgtggaacaacgataattcacactgctttatgagtagaaattgtgagaaatattgtgccaggcaatttgcaaaatcttggaaggttgtgtgcacttaaccacccagcaactactcctggatgcatcctagagaagtgccatgtgaacagagaatgattttaagacttcactgaagtattgtttaggtagcaagattgggaaaagcctgcatttcatcagcagaagaatggataaataaatgggttgtttttggtccttggaaagtgaatatgaaagagttacgtctcaacacagatagatgaaaaattatgctgagaaagttggtgaagctacatacaaggtacccttagtgtaaagttaagcatactgtgtacctgtgggcacgttacttcaacttgtttttcactttttctgtaaaatgggatagtagtggcaatctcacagggtgattgtgggtgggggggtggtcaatgaagtaatgcatgtaaaatgcttagaatagtgtctagcatgtaagccttgtggacatatagaaagtgttattgttttgcacagtaatctattttctgtggattcaaataatatgaaatgagtataaaatcatgtattggaacgatgtgtgcaagtcaccattctgccttcctaaggcaggagacctgatggatttggggagggtacatggggccttcagttgtgttttctttgtttttttctaaaaattgatgcagaggcatcacaatgttaagatttttacagggtagtgtggtgggtactttttaactgtttgcttaaagtgtttcaaagtaaaaatatttcttaagcatagtctctgacatcttatgactttatagaaatccctgccaggtacatgatgttacttagagtgagccacctaatctttcaaggcttccatttcctcacctgcaaaaattgggagtgtcagaggcgtttgaaccagagtgactccatcttgaatagggaactgggtaaaataaggctgagacctactgggctgcattcccaggaggttaggcattccaagtcatgggatgagataggaggtcagcacaagatacagtcataaagaccttgccaataaaacagcatgtggtaaagaagccggtcaaaaccaagatggcaatgaaagtgacctctggttgtcctcactgctgtaattatactgtaattataatgcattagcatgctaacagacactcccaccagtgccatgacagtttacaaacgccatggcaggcctggcacgatggctcatgcctgtaatcccagcactttgggaggccaaggcgggcggattatgaggtcaggagattgagaccagcctggccaacatggtgaaaccctgtctctactaaaaaatacaaaaattagctgggcatggtggcacgtgcctgtaatcccagctacttgagaggctgaggcaggagaatctctagatcccgggagttggaggttgcagtgagccaagatggtgccactgcactccagcctgggtgacagagcaagactctgtctcaaaaaaaaaaaaaaaaaa

SEQ ID NO: 11764 - DNA, 6059 bp, Homo sapiens
cgccgggcgggcgggcactgcagcttcttcctccgtggagcggagagcgagacagagctacagcgaacgagagagcggcgaaggcgggtagaggggcgcgggcgaggcggcgcagccatccccggaccaggggccgcgccgccaccatgctaaacaacctgacggactgcgaggacggcgatgggggagccaacccgggtgatggcaaccccaaggaaagcagtcccttcatcaacagcaccgacacagagaagggaaaggagtatgatggcaagaacatggccttgtttgaggaggagatggacaccagccctatggtgtcctccttgctcagtggcctggccaactacaccaacctgccccagggaagtagggagcatgaagaggcagaaaacaatgagggtggaaaaaagaagccggtgcaggccccacgcatgggcaccttcatgggcgtgtacctgccgtgcctgcagaacatctttggcgtcatcctcttcctgcggctcacctgggtggtgggcattgcaggcatcatggagtccttctgcatggtgttcatctgctgctcctgtacgatgctcacggccatctccatgagtgcaattgcaacgaatggtgttgtgcctgctggtggctcctactacatgatttccaggtctctgggcccagagtttgggggtgccgtgggcctctgcttctacctgggcactacctttgcaggagccatgtacatcctgggcaccatcgaaatcctgctggcttacctcttcccagccatggccatcttcaaggcagaagatgccagtggggaggcagcagccatgctgaacaacatgcgtgtttacggcacctgtgtgctcacctgcatggccactgtggtgtttgtgggtgtcaagtatgtcaacaagtttgcccttgtcttcctgggttgtgtcatcctctccatcctggccatctatgctggggtcatcaagtctgccttcgacccacccaacttcccgatctgcctcctgggtaaccgcacgctgtctcgccatggctttgatgtctgtgccaagctggcttgggaaggaaatgagacggtgaccacacggctatggggccttttctgctcctctcgcttcctcaacgccacctgtgatgaatacttcacccgaaacaatgtcacagagatccagggcatccctggtgctgccagtggcctcatcaaagagaacctctggagctcctacctgaccaagggcgtgattgtggagaggagtgggatgacctcggtgggcctggccgatggcactcctatcgacatggaccacccttatgtcttcagtgatatgacctcctacttcaccctgctggttggcatctacttcccctcagtcacagggatcatggctggttctaaccgctctggggacctgagggatgcccagaagtcaatccccactggcaccatcctggccatcgccaccacctctgctgtctacatcagctccgttgttctgtttggggcctgcattgagggggtcgtcctgcgggacaagtttggcgaagctgtgaatggcaacctcgtggtgggcactctggcctggccatctccatgggtaattgtcatcggatccttcttctccacctgtggggctgggctgcagagcctcacgggggccccacgcctgctgcaggccatctcgagggatggcattgtgcccttcctgcaggtctttggccatggcaaggccaatggagagccgacctgggccctgctcctgactgcctgcatctgcgagattggcatcctcattgcatccctcgacgaggtggcccccatcctctctatgttcttcctgatgtgctacatgtttgtgaatctggcctgtgcagtgcagacgctgctgaggacacccaactggaggccacgctttcgatattaccactggaccctctccttcctgggcatgagcctctgcctggccctcatgttcatctgctcctggtattatgcactggtagccatgctcattgctggactcatctacaagtacattgagtaccgtggggcagagaaggagtggggcgatgggatacgaggtctgtctctcagtgcggctcgctatgccctcttacgcctggaggaagggcccccacacaccaagaactggaggccacagctgctggtgctggtgcgtgtggaccaagaccagaatgtggtgcacccccagctgctctcactgacctcccagctgaaggcagggaagggcctgaccatcgtgggctctgtccttgagggcacctttctggaaaatcatccacaggcccagcgggcagaagagtctatcaggcgcctgatggaggcagagaaggtgaagggcttctgccaggtggtgatctcctccaacttgcgtgatggcgtgtcccatctgatccagtccgggggcctcggggggctgcagcacaacactgtgcttgttggctggccccgcaactggcgccagaaggaagatcatcagacgtggaggaacttcattgagctggtccgggaaaccacagctggccacttagccctgctggtcaccaagaacgtttccatgtttcctgggaaccctgagcgcttctctgagggcagcatcgacgtttggtggattgtgcacgatggaggcatgctcatgctgctgcccttcctgctgcggcaccacaaggtctggcggaagtgcaagatgcgtatcttcactgtggcccagatggatgacaatagcatccagatgaagaaggatctgaccacatttctgtatcatttacgcatcactgcggaggtcgaggtggtggagatgcatgagagcgacatctcagcttacacctatgagaagacgttggtgatggagcagcgttcccagatcctcaaacagatgcatttaaccaagaatgagcgggagcgggagatccagagtatcacagatgagtcacgaggctcaatccggagaaagaatccagccaacacgcggctccgcctgaacgtcccagaagagacggctggtgacagtgaagagaagccagaggaggaggtgcagctgatccacgatcagagtgctcccagctgccccagcagctccccgtccccaggggaggagcctgagggggaaggggagacagatccggagaaggtgcatctcacctggaccaaggacaagtcggtggcagagaagaataagggccccagtcctgtctcctctgagggcatcaaggacttcttcagcatgaagccggagtgggagaacttgaaccagtccaacgtgcggcgcatgcacacggccgtgcggctgaacgaggtcatcgtgaagaaatcccgggacgccaagcttgttttgctcaacatgcctgggcctccccgcaaccgcaatggtgatgaaaactacatggagtttctcgaggtcctcacagagcacctggaccgggtgatgctggtccgcggcggcggccgcgaggtcatcaccatctactcctgagaaccaggtcctgccacccgggcccgagcgcgcccggcccgcggctccggagccctcgccgcgccccccgccgctgtcaccgtttacatacagaccctgtgcccgtgtcctggccccttaccccgctgcctgaagcccggaggccacgcctgttggggctgattcggagagggcgccccgccgcgcagagaccagagctcctcagtgccagtttggcccctgggtcttcgctgccctttttctaagcccggcctcgtctcgccggaggagacgctgcaataaaggttgggagaaggcgcggaaaggagaggagctggggccttggggacccccaggtagtccatgcggcccattcctccccttcccactcccgccgcggtcctcgctctgcgctcctccggcgctgctccctggctcccggcggcccggaggcccgcggggtgggaaggccgcgcttgccgtctccgccgccccttctcgccgagccgtggggcgcgggcggccgagcctatacatagtgtacaggagacatcgcgtgtatttttaacgtccccatatttatgtgactagaagcgcaacagacttctcgccatagtcgagctctcccgctgggggcactgcggggaggcgaggcctcgggaagctgaattttccttgacgtccaagagtttgagagcgaaagtgctttaggcccaggcgggggtcgtggcctcgttccctcgacacctccgtcctgctctcgcctcttcgccctttccgcgcgcccttggcttcccaccctcctctccagtccttttccgagatgaggtgagacaagggtccaacttttcctggattcgcctcccagcggacgtgagcttccactgcggctgcagagacgcgagcaacctcttctcatcggctcttatgcaagttggggccaggataggggaggggtgctcctcaagaggaagaaaccgagaggcccgcgccccaccgaggaagccccgccccggtgccttcgctggggagcaggcgtctctcctcagtcggcttgtcgcctgctccccgtatcccatggctcctcgccaaagactgaaattgtggagctggagggcgccccctccccggagtttcctccctgggacaagtgagggaggagggggccgattctggtttaggggccggacccactgagaggccccagagccgcccgtgatgttcctcccccgtccccatctggcagctcctgtctcgcctgagggacccagccgccttctccgtgctctggggccgggcctcgctgcttagcagcggcctctagctccgtctcccggggacctgggcctgagggagggctggagtcgcacgcgctttgtccttagcgcctgtctgctctcctctaactaggacccagggcctttggcttccccagctcatccttggcccttccgctccaccagcctggtctgaggcgtgctctgtccttagagaaggcgcggtggccgggttcccttcccctagggcacattactaagggggtcaggcactgcatgctcgttccagcaccatctgggactgggtacagtacctccagccccagggccctgacctgcgcacctagcttgacatctcacgcacctcccagagctggcgccactgagtaatccggacctcaccacctcttttcctttgagcccaaggcagagctggagctggcgccacccagacagcgtcaggtgtggctggggtaggtttggaggtctgccagttacgccaagtcccctctgagattcgatcaggggactggatagattctttcaggtactcaatcaggaagctggaggtgttagacaccagccccctgcatccttcagtagacctccctctgaacaccacagccaggtcctgccttctgggggcctgaatattccagagctgatgtgatgggctgtgcagaagggggctgtatcaacatcaattagggaaccaaagttgcactatctgggcccagattgtctggttggcaagagcaaagtttccgttgatgaaacagacatcccacaacaaaaacccaagttttctgtgctacatgtgcaatatttgttatgaatgttatcacaagtcattcatcaagttatctttataatcactgtagttagatgtttcatgtccattcaagtgacttttattctgagtgcaatatttcaatagccttgtagtgataactagtgttgcttttgttttagatgatctatgtgcagggcaatgcaatgaagttgaaaacccttgtaaataggagaggttgcaaaccaaatcaagagtatttattactattactgctattattattaggcctgcctttaattttcagtgtaagtgttcagtatgccgcatcctgcctcagtattgatcttgtgttctttgtgccaatatgaaaaggagagggttggttctttcctttattgttgaatgctcccatttaatgctttatggcttttactgtattacttttttagactcccgtctgcacaaaatgcaataaaaataattttattatacccttaaaaaaaaaaaaaaaaa

SEQ ID NO: 11765 - DNA, 5014 bp, Homo sapiens
gagtggagttctggaggaatgtttaccagacacagagcccagagggacagcgcccagagcccagatagagagacacggcctcactggctcagcaccagggtccccttccccctcctcagctccctccctggcccctttaagaaagagctgatcctctcctctcttgagttaacccctgattgtccaggtggcccctggctctggcctggtgggcggaggcaaagggggagccaggggcggagaaagggttgcccaagtctgggagtgagggaaggaggcaggggtgctgagaaggcggctgctgggcagagccggtggcaagggcctcccctgccgctgtgccaggcaggcagtgccaaatccggggagcctggagctggggggagggccggggacagcccggccctgccccctcccccgctgggagcccagcaacttctgaggaaagtttggcacccatggcgtggcggtgccccaggatgggcagggtcccgctggcctggtgcttggcgctgtgcggctgggcgtgcatggcccccaggggcacgcaggctgaagaaagtcccttcgtgggcaacccagggaatatcacaggtgcccggggactcacgggcacccttcggtgtcagctccaggttcagggagagccccccgaggtacattggcttcgggatggacagatcctggagctcgcggacagcacccagacccaggtgcccctgggtgaggatgaacaggatgactggatagtggtcagccagctcagaatcacctccctgcagctttccgacacgggacagtaccagtgtttggtgtttctgggacatcagaccttcgtgtcccagcctggctatgttgggctggagggcttgccttacttcctggaggagcccgaagacaggactgtggccgccaacacccccttcaacctgagctgccaagctcagggacccccagagcccgtggacctactctggctccaggatgctgtccccctggccacggctccaggtcacggcccccagcgcagcctgcatgttccagggctgaacaagacatcctctttctcctgcgaagcccataacgccaagggggtcaccacatcccgcacagccaccatcacagtgctcccccagcagccccgtaacctccacctggtctcccgccaacccacggagctggaggtggcttggactccaggcctgagcggcatctaccccctgacccactgcaccctgcaggctgtgctgtcagacgatgggatgggcatccaggcgggagaaccagaccccccagaggagcccctcacctcgcaagcatccgtgcccccccatcagcttcggctaggcagcctccatcctcacaccccttatcacatccgcgtggcatgcaccagcagccagggcccctcatcctggacccactggcttcctgtggagacgccggagggagtgcccctgggcccccctgagaacattagtgctacgcggaatgggagccaggccttcgtgcattggcaagagccccgggcgcccctgcagggtaccctgttagggtaccggctggcgtatcaaggccaggacaccccagaggtgctaatggacatagggctaaggcaagaggtgaccctggagctgcagggggacgggtctgtgtccaatctgacagtgtgtgtggcagcctacactgctgctggggatggaccctggagcctcccagtacccctggaggcctggcgcccagggcaagcacagccagtccaccagctggtgaaggaaccttcaactcctgccttctcgtggccctggtggtatgtactgctaggagcagtcgtggccgctgcctgtgtcctcatcttggctctcttccttgtccaccggcgaaagaaggagacccgttatggagaagtgtttgaaccaacagtggaaagaggtgaactggtagtcaggtaccgcgtgcgcaagtcctacagtcgtcggaccactgaagctaccttgaacagcctgggcatcagtgaagagctgaaggagaagctgcgggatgtgatggtggaccggcacaaggtggccctggggaagactctgggagagggagagtttggagctgtgatggaaggccagctcaaccaggacgactccatcctcaaggtggctgtgaagacgatgaagattgccatctgcacgaggtcagagctggaggatttcctgagtgaagcggtctgcatgaaggaatttgaccatcccaacgtcatgaggctcatcggtgtctgtttccagggttctgaacgagagagcttcccagcacctgtggtcatcttacctttcatgaaacatggagacctacacagcttcctcctctattcccggctcggggaccagccagtgtacctgcccactcagatgctagtgaagttcatggcagacatcgccagtggcatggagtatctgagtaccaagagattcatacaccgggacctggcggccaggaactgcatgctgaatgagaacatgtccgtgtgtgtggcggacttcgggctctccaagaagatctacaatggggactactaccgccagggacgtatcgccaagatgccagtcaagtggattgccattgagagtctagctgaccgtgtctacaccagcaagagcgatgtgtggtccttcggggtgacaatgtgggagattgccacaagaggccaaaccccatatccgggcgtggagaacagcgagatttatgactatctgcgccagggaaatcgcctgaagcagcctgcggactgtctggatggactgtatgccttgatgtcgcggtgctgggagctaaatccccaggaccggccaagttttacagagctgcgggaagatttggagaacacactgaaggccttgcctcctgcccaggagcctgacgaaatcctctatgtcaacatggatgagggtggaggttatcctgaaccccctggagctgcaggaggagctgaccccccaacccagccagaccctaaggattcctgtagctgcctcactgcggctgaggtccatcctgctggacgctatgtcctctgcccttccacaacccctagccccgctcagcctgctgataggggctccccagcagccccagggcaggaggatggtgcctgagacaaccctccacctggtactccctctcaggatccaagctaagcactgccactggggaaaactccaccttcccactttcccaccccacgccttatccccacttgcagccctgtcttcctacctatcccacctccatcccagacaggtccctccccttctctgtgcagtagcatcaccttgaaagcagtagcatcaccatctgtaaaaggaaggggttggattgcaatatctgaagccctcccaggtgttaacattccaagactctagagtccaaggtttaaagagtctagattcaaaggttctaggtttcaaagatgctgtgagtctttggttctaaggacctgaaattccaaagtctctaattctattaaagtgctaaggttctaaggcctacttttttttttttttttttttttttttttttttttgcgatagagtctcactgtgtcacccaggctggagtgcagtggtgcaatctcgcctcactgcaaccttcacctaccgagttcaagtgattttcctgccttggcctcccaagtagctgggattacaggtgtgtgccaccacacccggctaatttttatatttttagtagagacagggtttcaccatgttggccaggctggtctaaaactcctgacctcaagtgatctgcccacctcagcctcccaaagtgctgagattacaggcatgagccactgcactcaaccttaagacctactgttctaaagctctgacattatgtggttttagattttctggttctaacatttttgataaagcctcaaggttttaggttctaaagttctaagattctgattttaggagctaaggctctatgagtctagatgtttattcttctagagttcagagtccttaaaatgtaagattatagattctaaagattctatagttctagacatggaggttctaaggcctaggattctaaaatgtgatgttctaaggctctgagagtctagattctctggctgtaaggctctagatcataaggcttcaaaatgttatcttctcaagttctaagattctaatgatgatcaattatagtttctgaggctttatgataatagattctcttgtataagatcctagatcctaagggtcgaaagctctagaatctgcaattcaaaagttccaagagtctaaagatggagtttctaaggtccggtgttctaagatgtgatattctaagacttactctaagatcttagattctctgtgtctaagattctagatcagatgctccaagattctagatgattaaataagattctaacggtctgttctgtttcaaggcactctagattccattggtccaagattccggatcctaagcatctaagttataagactctcacactcagttgtgactaactagacaccaaagttctaataatttctaatgttggacacctttaggttctttgctgcattctgcctctctaggaccatggttaagagtccaagaatccacatttctaaaatcttatagttctaggcactgtagttctaagactcaaatgttctaagtttctaagattctaaaggtccacaggtctagactattaggtgcaatttcaaggttctaaccctatactgtagtattctttggggtgcccctctccttcttagctatcattgcttcctcctccccaactgtgggggtgtgcccccttcaagcctgtgcaatgcattagggatgcctcctttcccgcaggggatggacgatctcccacctttcgggccatgttgcccccgtgagccaatccctcaccttctgagtacagagtgtggactctggtgcctccagaggggctcaggtcacataaaactttgtatatcaacgaaaaaaa

SEQ ID NO: 11766 - DNA, 4987 bp, Homo sapiens
gagtggagttctggaggaatgtttaccagacacagagcccagagggacagcgcccagagcccagatagagagacacggcctcactggctcagcaccagggtccccttccccctcctcagctccctccctggcccctttaagaaagagctgatcctctcctctcttgagttaacccctgattgtccaggtggcccctggctctggcctggtgggcggaggcaaagggggagccaggggcggagaaagggttgcccaagtctgggagtgagggaaggaggcaggggtgctgagaaggcggctgctgggcagagccggtggcaagggcctcccctgccgctgtgccaggcaggcagtgccaaatccggggagcctggagctggggggagggccggggacagcccggccctgccccctcccccgctgggagcccagcaacttctgaggaaagtttggcacccatggcgtggcggtgccccaggatgggcagggtcccgctggcctggtgcttggcgctgtgcggctgggcgtgcatggcccccaggggcacgcaggctgaagaaagtcccttcgtgggcaacccagggaatatcacaggtgcccggggactcacgggcacccttcggtgtcagctccaggttcagggagagccccccgaggtacattggcttcgggatggacagatcctggagctcgcggacagcacccagacccaggtgcccctgggtgaggatgaacaggatgactggatagtggtcagccagctcagaatcacctccctgcagctttccgacacgggacagtaccagtgtttggtgtttctgggacatcagaccttcgtgtcccagcctggctatgttgggctggagggcttgccttacttcctggaggagcccgaagacaggactgtggccgccaacacccccttcaacctgagctgccaagctcagggacccccagagcccgtggacctactctggctccaggatgctgtccccctggccacggctccaggtcacggcccccagcgcagcctgcatgttccagggctgaacaagacatcctctttctcctgcgaagcccataacgccaagggggtcaccacatcccgcacagccaccatcacagtgctcccccagcagccccgtaacctccacctggtctcccgccaacccacggagctggaggtggcttggactccaggcctgagcggcatctaccccctgacccactgcaccctgcaggctgtgctgtcagacgatgggatgggcatccaggcgggagaaccagaccccccagaggagcccctcacctcgcaagcatccgtgcccccccatcagcttcggctaggcagcctccatcctcacaccccttatcacatccgcgtggcatgcaccagcagccagggcccctcatcctggacccactggcttcctgtggagacgccggagggagtgcccctgggcccccctgagaacattagtgctacgcggaatgggagccaggccttcgtgcattggcaagagccccgggcgcccctgcagggtaccctgttagggtaccggctggcgtatcaaggccaggacaccccagaggtgctaatggacatagggctaaggcaagaggtgaccctggagctgcagggggacgggtctgtgtccaatctgacagtgtgtgtggcagcctacactgctgctggggatggaccctggagcctcccagtacccctggaggcctggcgcccagtgaaggaaccttcaactcctgccttctcgtggccctggtggtatgtactgctaggagcagtcgtggccgctgcctgtgtcctcatcttggctctcttccttgtccaccggcgaaagaaggagacccgttatggagaagtgtttgaaccaacagtggaaagaggtgaactggtagtcaggtaccgcgtgcgcaagtcctacagtcgtcggaccactgaagctaccttgaacagcctgggcatcagtgaagagctgaaggagaagctgcgggatgtgatggtggaccggcacaaggtggccctggggaagactctgggagagggagagtttggagctgtgatggaaggccagctcaaccaggacgactccatcctcaaggtggctgtgaagacgatgaagattgccatctgcacgaggtcagagctggaggatttcctgagtgaagcggtctgcatgaaggaatttgaccatcccaacgtcatgaggctcatcggtgtctgtttccagggttctgaacgagagagcttcccagcacctgtggtcatcttacctttcatgaaacatggagacctacacagcttcctcctctattcccggctcggggaccagccagtgtacctgcccactcagatgctagtgaagttcatggcagacatcgccagtggcatggagtatctgagtaccaagagattcatacaccgggacctggcggccaggaactgcatgctgaatgagaacatgtccgtgtgtgtggcggacttcgggctctccaagaagatctacaatggggactactaccgccagggacgtatcgccaagatgccagtcaagtggattgccattgagagtctagctgaccgtgtctacaccagcaagagcgatgtgtggtccttcggggtgacaatgtgggagattgccacaagaggccaaaccccatatccgggcgtggagaacagcgagatttatgactatctgcgccagggaaatcgcctgaagcagcctgcggactgtctggatggactgtatgccttgatgtcgcggtgctgggagctaaatccccaggaccggccaagttttacagagctgcgggaagatttggagaacacactgaaggccttgcctcctgcccaggagcctgacgaaatcctctatgtcaacatggatgagggtggaggttatcctgaaccccctggagctgcaggaggagctgaccccccaacccagccagaccctaaggattcctgtagctgcctcactgcggctgaggtccatcctgctggacgctatgtcctctgcccttccacaacccctagccccgctcagcctgctgataggggctccccagcagccccagggcaggaggatggtgcctgagacaaccctccacctggtactccctctcaggatccaagctaagcactgccactggggaaaactccaccttcccactttcccaccccacgccttatccccacttgcagccctgtcttcctacctatcccacctccatcccagacaggtccctccccttctctgtgcagtagcatcaccttgaaagcagtagcatcaccatctgtaaaaggaaggggttggattgcaatatctgaagccctcccaggtgttaacattccaagactctagagtccaaggtttaaagagtctagattcaaaggttctaggtttcaaagatgctgtgagtctttggttctaaggacctgaaattccaaagtctctaattctattaaagtgctaaggttctaaggcctacttttttttttttttttttttttttttttttttttgcgatagagtctcactgtgtcacccaggctggagtgcagtggtgcaatctcgcctcactgcaaccttcacctaccgagttcaagtgattttcctgccttggcctcccaagtagctgggattacaggtgtgtgccaccacacccggctaatttttatatttttagtagagacagggtttcaccatgttggccaggctggtctaaaactcctgacctcaagtgatctgcccacctcagcctcccaaagtgctgagattacaggcatgagccactgcactcaaccttaagacctactgttctaaagctctgacattatgtggttttagattttctggttctaacatttttgataaagcctcaaggttttaggttctaaagttctaagattctgattttaggagctaaggctctatgagtctagatgtttattcttctagagttcagagtccttaaaatgtaagattatagattctaaagattctatagttctagacatggaggttctaaggcctaggattctaaaatgtgatgttctaaggctctgagagtctagattctctggctgtaaggctctagatcataaggcttcaaaatgttatcttctcaagttctaagattctaatgatgatcaattatagtttctgaggctttatgataatagattctcttgtataagatcctagatcctaagggtcgaaagctctagaatctgcaattcaaaagttccaagagtctaaagatggagtttctaaggtccggtgttctaagatgtgatattctaagacttactctaagatcttagattctctgtgtctaagattctagatcagatgctccaagattctagatgattaaataagattctaacggtctgttctgtttcaaggcactctagattccattggtccaagattccggatcctaagcatctaagttataagactctcacactcagttgtgactaactagacaccaaagttctaataatttctaatgttggacacctttaggttctttgctgcattctgcctctctaggaccatggttaagagtccaagaatccacatttctaaaatcttatagttctaggcactgtagttctaagactcaaatgttctaagtttctaagattctaaaggtccacaggtctagactattaggtgcaatttcaaggttctaaccctatactgtagtattctttggggtgcccctctccttcttagctatcattgcttcctcctccccaactgtgggggtgtgcccccttcaagcctgtgcaatgcattagggatgcctcctttcccgcaggggatggacgatctcccacctttcgggccatgttgcccccgtgagccaatccctcaccttctgagtacagagtgtggactctggtgcctccagaggggctcaggtcacataaaactttgtatatcaacgaaaaaaa

SEQ ID NO: 11767 - DNA, 2077 bp, Homo sapiens
gcggcgggcggggcggcgctcggggctcggctggcctcggctcgcctcggctgcgctcggcaggctgcggtaaatccgggcttgcggccgctggcgtagtctgtggccgggtggtcgttgctgcgcgccccgagccccgagagccatgcagatgtcctacgccatccggtgcgccttctaccagctgctgctggccgcgctcatgctggtggcgatgctgcagctgctctacctgtcgctgctgtccggactgcacgggcaggaggagcaagaccaatattttgagttctttcccccgtccccacggtccgtggaccaggtcaaggcgcagctccgcaccgcgctggcctctggaggcgtcctggacgctagcggcgattaccgcgtctacaggggcctgctgaagaccaccatggaccccaacgatgtgatcctggccacgcacgccagcgtggacaacctgctgcacctgtcgggtctgctggagcgctgggagggcccgctgtccgtgtcggtgttcgcggccaccaaggaggaggcgcagctggccacggtgctggcctacgcgctgagcagccactgccccgacatgcgcgccagggtcgccatgcacctcgtgtgcccctcgcgttacgaggcagccgtgcccgacccccgggagccgggggagtttgccctgctgcggtcctgccaggaggtctttgacaagctagccagggtggcccagcccgggattaattatgcgctgggcaccaatgtctcctaccccaataacctgctgaggaatctggctcgtgagggggccaactatgccctggtgatcgatgtggacatggtgcccagcgaggggctgtggagaggcctgcgggaaatgctggatcagagcaaccagtggggaggcaccgcgctggtggtgcctgccttcgaaatccgaagagcccgccgcatgcccatgaacaaaaacgagctggtgcagctctaccaggttggcgaggtgcggcccttctattatgggttgtgcaccccctgccaggcacccaccaactattcccgctgggtcaacctgccggaagagagcttgctgcggcccgcctacgtggtaccttggcaggacccctgggagccattctacgtggcaggaggcaaggtgcccaccttcgacgagcgctttcggcagtacggcttcaaccgaatcagccaggcctgcgagctgcatgtggcggggtttgattttgaggtcctgaacgaaggtttcttggttcataagggcttcaaagaagcgttgaagttccatccccaaaaggaggctgaaaatcagcacaataagatcctatatcgccagttcaaacaggagttgaaggccaagtaccccaactctccccgacgctgctgagcccttccctcccctaatctgagaagtcagcctcttggctcctcaggccaccatttaggcctgactggggtaagaaatgtcgctccactttacagaggtagctgtggtgttgaaacactggacttggatatggggtgctgggatcgattcctagctttaccactaactagctgtgtggccttgagtaaatcccgttacctctctgagcctcggttaccctgtctgtaaaaagggaggtgagaatacctacctcacggaactgttgggaggctcagatgagatgctatatgtgaaaacattctgtaagcttcgtacaaatgtgaagtattaatattatcgcagtattattgttgttattattattgttattattaacaatcttgggtgggtagtaggagagcaaaaagtatgaatgggatggagctaagaagtctgaatacttaatgaaatggactttttggaaagaaatcagatgaaggcataaaatttagttcttagctcttgaacagaagcctaaaattcctggttctctcagggcttcgccttcaagggttctggaggagggaagggtctgcaggttccatgggtgacagcctgagatctgtcccttcaacgggctgggctgggtatgtgcctaccgatgacaatgtgtaaataaatgcgtgttcacacccacaaaaaaaa

SEQ ID NO: 11768 - DNA, 2412 bp, Homo sapiens
ctccactgaccgtcccgacgatgctacgcgcgcccggctgcctcctccggacctccgtagcgcctgccgcggccctggctgcggcgctgctctcgtcgcttgcgcgctgctctcttctagagccgagggacccggtggcctcgtcgctcagcccctatttcggcaccaagactcgctacgaggatgtcaaccccgtgctattgtcgggccccgaggctccgtggcgggaccctgagctgctggaggggacctgcaccccggtgcagctggtcgccctcattcgccacggcacccgctaccccacggtcaaacagatccgcaagctgaggcagctgcacgggttgctgcaggcccgcgggtccagggatggcggggctagtagtaccggcagccgcgacctgggtgcagcgctggccgactggcctttgtggtacgcggactggatggacgggcagctagtagaaaagggacggcaggatatgcgacagctggcgctgcgtctggcctcgctcttcccggcccttttcagccgtgagaactacggccgcctgcggctcatcaccagttccaagcaccgctgcatggatagcagcgccgccttcctgcaggggctgtggcagcactaccaccctggcttgccgccgccggacgtcgcagatatggagtttggacctccaacagttaatgataaactaatgagattttttgatcactgtgagaagtttttaactgaagtagaaaaaaatgctacagctctttatcacgtggaagccttcaaaactggaccagaaatgcagaacattttaaaaaaagttgcagctactttgcaagtgccagtaaatgatttaaatgcagatttaattcaagtagcctttttcacctgttcatttgacctggcaattaaaggtgttaaatctccttggtgtgatgtttttgacatagatgatgcaaaggtattagaatatttaaatgatctgaaacaatattggaaaagaggatatgggtatactattaacagtcgatccagctgcaccttgtttcaggatatctttcagcacttggacaaagcagttgaacagaaacaaaggtctcagccaatttcttctccagtcatcctccagtttggtcatgcagagactcttcttccactgctttctctcatgggctacttcaaagacaaggaacccctaacagcgtacaattacaaaaaacaaatgcatcggaagttccgaagtggtctcattgtaccttatgcctcgaacctgatatttgtgctttaccactgtgaaaatgctaagactcctaaagaacaattccgagtgcagatgttattaaatgaaaaggtgttacctttggcttactcacaagaaactgtttcattttatgaagatctgaagaaccactacaaggacatccttcagagttgtcaaaccagtgaagaatgtgaattagcaagggctaacagtacatctgatgaactatgagtaactgaagaacatttttaattctttaggaatctgcaatgagtgattacatgcttgtaataggtaggcaattccttgattacaggaagcttttatattacttgagtatttctgtcttttcacagaaaaacattgggtttctctctgggtttggacatgaaatgtaagaaaagatttttcactggagcagctctcttaaggagaaacaaatctatttagagaaacagctggccctgcaaatgtttacagaaatgaaattcttcctacttatataagaaatctcacactgagatagaattgtgatttcataataacacttgaaaagtgctggagtaacaaaatatctcagttggaccatccttaacttgattgaactgtctaggaactttacagattgttctgcagttctctcttcttttcctcaggtaggacagctctagcattttcttaatcaggaatattgtggtaagctgggagtatcactctggaagaaagtaacatctccagatgagaatttgaaacaagaaacagagtgttgtaaaaggacaccttcactgaagcaagtcggaaagtacaatgaaaataaatatttttggtatttatttatgaaatatttgaacattttttcaataattcctttttacttctaggaagtctcaaaagaccatcttaaattattatatgtttggacaattagcaacaagtcagatagttagaatcgaagtttttcaaatccattgcttagctaactttttcattctgtcacttggcttcgatttttatattttcctattatatgaaatgtatcttttggttgtttgatttttctttctttctttgtaaatagttctgagttctgtcaaatgccgtgaaagtatttgctataataaagaaaattcttgtgactttaaaaaaaaaaaaaaaaaaa

SEQ ID NO: 11769 - DNA, 5878 bp, Homo sapiens
ccgggcgagcgcagccaacatgtcggataccaaggtaaaagttgccgtccgggtccggcccatgaaccgacgagaactggaactgaacaccaagtgcgtggtggagatggaagggaatcaaacggtcctgcaccctcctccttctaacaccaaacagggagaaaggaaacctcccaaggtatttgcctttgattattgcttttggtccatggatgaatctaacactacaaaatacgctggtcaagaagtggttttcaagtgccttggggaaggaattcttgaaaaagcctttcaggggtataatgcgtgtatttttgcatatggacagacaggttcgggaaaatccttttccatgatgggccatgctgagcagctgggccttattccaaggctctgctgtgctttatttaaaaggatctctttggagcaaaatgagtcacagacctttaaagttgaagtgtcctatatggaaatttataatgagaaagttcgggatcttttagaccccaaagggagtagacagtctcttaaagttcgagaacataaagttttgggaccatatgtagatggtttatctcaactagctgtcactagttttgaggatattgagtcattgatgtctgagggaaataagtctcgaacggtagctgctaccaacatgaacgaagaaagcagccgctcccatgctgtgttcaacatcataatcacacagacactttatgacctgcagtctgggaattccggggagaaagtcagtaaggtcagcttggtagacctggcgggtagcgaaagagtatctaaaacaggagctgcaggagagcgactgaaagaaggcagcaacattaacaaatcgcttacaaccttggggttggttatatcatcactggctgaccaggcagctggcaagggtaaaagcaaatttgtgccttatcgagattcagtcctcacttggctgcttaaggacaacttggggggcaacagccaaacctctatgatagccacaatcagcccagccgcagacaactatgaagagaccctctccacattaagatatgcagaccgagccaaaaggattgtgaaccatgctgttgtgaatgaggaccccaacgcaaaagtgatccgagaactgcgggaggaagtcgagaaactgagagagcagctctctcaggcagaggccatgaaggcccctgaactgaaggagaagctcgaagagtctgaaaagctgataaaagaactaacagtgacttgggaagagaagctgagaaaaacagaagagatagcacaggaaagacaacgacaacttgaaagcatggggatttccctggagatgtccggtatcaaggtgggggatgacaaatgctacttagtcaatctgaatgcagaccctgctcttaacgaacttctggtttattatttaaaggatcacaccagggtgggtgcagatacctctcaagatatccagctttttggcataggaattcagcctcagcactgtgagattgacattgcatctgatggagacgtcactctcactccaaaagaaaatgcaaggtcctgtgtgaacggcacccttgtgtgcagtaccacccagctgtggcatggtgaccgaatcctatggggaaataatcacttttttagaataaacttacctaagaggaaacgtcgagattggttgaaagactttgaaaaagaaacgggcccgccagagcatgacctggatgcagccagtgaggcttcctctgaaccagactataactatgaatttgcacagatggaagttatcatgaaaaccctgaatagtaatgacccagttcaaaatgtggttcaggtcctggagaaacaatacctagaagaaaagagaagtgccctagaggagcagcggctcatgtatgagcgggaactggagcaactccgccagcagctctcccccgacaggcagccacagagtagcggccctgaccgcctggcctacagcagccagacagcgcagcagaaggtgacccagtgggcagaagagagggatgaactcttccgacaaggcctggcaaaactgcgagagcagctggttaaagctaataccttggtgagggaagcaaacttcctggctgaggaaatgagcaaactcaccgattaccaagtgactcttcagatccctgctgcaaacctcagtgccaataggaagagaggtgcaatagtgagtgaaccagctatccaagtgaggaggaaaggaaagagcacccaagtgtggaccattgagaagctggagaataaattaattgacatgagagacctttaccaagaatggaaggaaaaagttcctgaggcaaagagactctacggaaaacgaggtgaccctttctatgaagctcaagaaaatcacaacctcatcggggtggcgaatgtattcttggaatgcctcttctgtgatgtgaaacttcagtatgcagtccctatcatcagccagcagggggaggttgcagggcgtctccacgtggaagtgatgcgtgttacaggagctgttccagagcgtgtggtggaggatgactcttcggagaattccagtgaaagtgggagccttgaagtcgtagacagcagcggggaaatcattcaccgagtcaaaaagctgacatgtcgggtaaaaattaaagaagcaacggggctgcccttaaacctctcaaattttgtcttctgtcaatacacattctgggaccagtgtgagtctacggtggctgccccggtggtggaccccgaggtgccttcaccacagtccaaggatgcccagtacacagtggccttctcccactgtaaggactatgtggtgaatgtaacagaagaatttctggagttcatttcagatggagcactggccattgaagtatggggccaccggtgtgctggaaatggcagctccatctgggaggtcgattctcttcatgctaagacaagaacactgcatgacaggtggaatgaagtaacgcgaagaatagaaatgtggatctccatattagaattgaatgagttaggagagtatgctgcagtggaacttcatcaggcaaaagatgtcaacacaggaggcatctttcaacttagacagggtcattcccgtagagtacaagtcacggtgaaacctgtgcagcattcagggacactgccacttatggttgaagccatcctgtcagtatccatcggctgtgtaactgccaggtccaccaaactccaaagagggctggacagttaccagagagatgatgaggatggtgatgatatggatagttatcaggaagaagacttaaactgcgtaagggagaggtggtcagatgcactcattaaacgacgagaatacctggatgaacagataaaaaaagtcagcaataaaacagagaaaacagaggacgatgtggagcgggaagcccagcttgtggagcagtgggtagggctgactgaggaaaggaatgctgtgctggtgccagccccaggcagtgggattcctggggcacctgccgactggatcccacctcctggaatggaaacccacataccagttctcttcctcgatttgaatgcggatgaccccagtgccaatgagcagcttgttggcccccatgcatccggcgtgaactccatcctgcccaaggagcatggcagtcagtttttctacctgcccatcataaagcacagtgatgatgaggtttcagccacagcctcttgggattcctcggtgcatgattctgttcacttgaatagggtcacaccacagaatgaaaggatttacctaattgtgaaaaccacagttcaactcagccaccctgctgctatggagttagtattacgaaaacgaattgcagccaatatttacaacaaacagagtttcacgcagagtttgaagaggagaatatccctgaaaaatatattttattcctgtggtgtaacctatgaaatagtatccaatataccaaaggcaactgaggagatagaggaccgggaaacgctggctctcctggcagcaaggagtgaaaacgaaggcacatcagatggggagacgtacattgagaagtacactcgaggcgtgctgcaggtggaaaacattctgagtcttgaacggctccggcaggccgtcacagtcaaagaagcactttccaccaaagcccggcacattcggaggagcctcagtacaccaaatgttcataatgtctcttccagccgaccggacctttctggctttgatgaagatgacaagggttggccagagaaccagttggacatgtctgactatagctccagttaccaagatgtagcatgttatggaactttacccagggattctcctcgaaggaataaagaaggttgtacatcagagactcctcatgccttaaccgtcagcccttttaaagcattctctcctcagccaccaaagtttttcaagcccctaatgcctgtaaaagaggagcataagaaaaggatagccctggaagcaaggcctcttctaagccaggagagcatgcctccacctcaggcacataaccctggctgcattgtaccctcaggaagcaatggcagcagcatgccagtagaacacaataacaaacgtgagaagaagattgactctgaggaggaagaaaatgagctggaagctattaacaggaagctaataagttcacagccttatgtacctgtggagtttgctgacttcagtgtttacaatgccagcttggagaacagggaatggttttcctctaaagtagatctgtcaaactcacgggtcttggagaaagaagtgtcccgtagccctaccaccagcagtattaccagtggctacttttcccacagtgcctccaatgccaccctgtctgacatggtggtcccttctagtgacagctcagaccagctggccattcagacgaaggatgcagactccaccgagcactccacaccatcgcttgtgcatgatttcaggccgtcctcaaacaaagagttgacagaagtcgaaaaaggcttggtaaaggacaagataattgtggtgccactcaaggaaaacagtgccttagccaaagggagcccatcatcccagagcatccctgagaaaaactccaaatcactgtgcaggactggctcatgttcagaactagatgcctgccccagcaaaattagccagccagccaggggattctgccccagggaggtgacggtagaacacaccaccaacatccttgaagaccattctttcacagaatttatgggagtgtcagagggaaaagattttgatggtttgacagattcttctgctggagagctttccagtaggaggagtctaccaaataaaacaggcggcaagactgtctccgatgggctccaccaccccagccagctgcattccaagttagagaatgaccaggtaataattccagaggcagccttttgggttctgtgctgtcaatgagtatgtctaactgtatgtcaaccccagaggcccttcaccgcaacaacttggtaggaaagattcatccagttgtttgtgacggcaaagatgagcccacagagaagcaggctcacttcctgcacagctgtctctgtcggagagcaagtctgttttgggaactagaacgcaattgtgaaattataagaccagtggatttttttacctggcacatgggttggtgttgaatgaagtgttcagatggataaggatcaatctcatattcattccctgggatgtttagttaccagttttcccaaagtgttctggtagcatctaccatatttcatcaaatctgtgattcctttgattattatatgaaccattattttatgtatcattaagaaaaaatactgccaattaaactctgtcatatcaaaaaaaaaaaaaaaaaaaaaaaaaaaa

SEQ ID NO: 11770 - DNA, 4637 bp, Homo sapiens
aggtgaacaggtcctcacgcccagctccgccccctcacgcgctctcgccgggaccccgcttccgctggcagccatgggccccggccccagccgcgcgccccgcgccccacgcctgatgctctgtgcgctcgccttgatggtggcggccggcggctgcgtcgtctccgccttcaacctggatacccgattcctggtagtgaaggaggccgggaacccgggcagcctcttcggctactcggtcgccctccatcggcagacagagcggcagcagcgctacctgctcctggctggtgccccccgggagctcgctgtgcccgatggctacaccaaccggactggtgctgtgtacctgtgcccactcactgcccacaaggatgactgtgagcggatgaacatcacagtgaaaaatgaccctggccatcacattattgaggacatgtggcttggagtgactgtggccagccagggccctgcaggcagagttctggtctgtgcccaccgctacacccaggtgctgtggtcagggtcagaagaccagcggcgcatggtgggcaagtgctacgtgcgaggcaatgacctagagctggactccagtgatgactggcagacctaccacaacgagatgtgcaatagcaacacagactacctggagacgggcatgtgccagctgggcaccagcggtggcttcacccagaacactgtgtacttcggcgcccccggtgcctacaactggaaaggaaacagctacatgattcagcgcaaggagtgggacttatctgagtatagttacaaggacccagaggaccaaggaaacctctatattgggtacacgatgcaggtaggcagcttcatcctgcaccccaaaaacatcaccattgtgacaggtgccccacggcaccgacatatgggcgcggtgttcttgctgagccaggaggcaggcggagacctgcggaggaggcaggtgctggagggctcgcaggtgggcgcctattttggcagcgcaattgccctggcagacctgaacaatgatgggtggcaggacctcctggtgggcgccccctactacttcgagaggaaagaggaagtagggggtgccatctatgtcttcatgaaccaggcgggaacctccttccctgctcacccctcactccttcttcatggccccagtggctctgcctttggtttatctgtggccagcattggtgacatcaaccaggatggatttcaggatattgctgtgggagctccgtttgaaggcttgggcaaagtgtacatctatcacagtagctctaaggggctccttagacagccccagcaggtaatccatggagagaagctgggactgcctgggttggccaccttcggctattccctcagtgggcagatggatgtggatgagaacttctacccagaccttctagtgggaagcctgtcagaccacattgtgctgctgcgggcccggccagtcatcaacatcgtccacaagaccttggtgcccaggccagctgtgctggaccctgcactttgcacggccacctcttgtgtgcaagtggagctgtgctttgcttacaaccagagtgccgggaaccccaactacaggcgaaacatcaccctggcctacactctggaggctgacagggaccgccggccgccccggctccgctttgccggcagtgagtccgctgtcttccacggcttcttctccatgcccgagatgcgctgccagaagctggagctgctcctgatggacaacctccgtgacaaactccgccccatcatcatctccatgaactactctttacctttgcggatgcccgatcgcccccggctggggctgcggtccctggacgcctacccgatcctcaaccaggcacaggctctggagaaccacactgaggtccagttccagaaggagtgcgggcctgacaacaagtgtgagagcaacttgcagatgcgggcagccttcgtgtcagagcagcagcagaagctgagcaggctccagtacagcagagacgtccggaaattgctcctgagcatcaacgtgacgaacacccggacctcggagcgctccggggaggacgcccacgaggcgctgctcaccctggtggtgcctcccgccctgctgctgtcctcagtgcgcccccccggggcctgccaagctaatgagaccatcttttgcgagctggggaaccccttcaaacggaaccagaggatggagctgctcatcgcctttgaggtcatcggggtgaccctgcacacaagggaccttcaggtgcagctgcagctctccacgtcgagtcaccaggacaacctgtggcccatgatcctcactctgctggtggactatacactccagacctcgcttagcatggtaaatcaccggctacaaagcttctttggggggacagtgatgggtgagtctggcatgaaaactgtggaggatgtaggaagccccctcaagtatgaattccaggtgggcccaatgggggaggggctggtgggcctggggaccctggtcctaggtctggagtggccctacgaagtcagcaatggcaagtggctgctgtatcccacggagatcaccgtccatggcaatgggtcctggccctgccgaccacctggagaccttatcaaccctctcaacctcactctttctgaccctggggacaggccatcatccccacagcgcaggcgccgacagctggatccagggggaggccagggccccccacctgtcactctggctgctgccaaaaaagccaagtctgagactgtgctgacctgtgccacagggcgtgcccactgtgtgtggctagagtgccccatccctgatgcccccgttgtcaccaacgtgactgtgaaggcacgagtgtggaacagcaccttcatcgaggattacagagactttgaccgagtccgggtaaatggctgggctaccctattcctccgaaccagcatccccaccatcaacatggagaacaagaccacgtggttctctgtggacattgactcggagctggtggaggagctgccggccgaaatcgagctgtggctggtgctggtggccgtgggtgcagggctgctgctgctggggctgatcatcctcctgctgtggaagtgcggcttcttcaagcgagcccgcactcgcgccctgtatgaagctaagaggcagaaggcggagatgaagagccagccgtcagagacagagaggctgaccgacgactactgagggggcagccccccgcccccggcccacctggtgtgacttctttaagcggacccgctattatcagatcatgcccaagtaccacgcagtgcggatccgggaggaggagcgctacccacctccagggagcaccctgcccaccaagaagcactgggtgaccagctggcagactcgggaccaatactactgacgtcctccctgatcccaccccctcctcccccagtgtcccctttcttcctatttatcataagttatgcctctgacagtccacaggggccaccacctttggctggtagcagcaggctcaggcacatacacctcgtcaagagcatgcacatgctgtctggccctggggatcttcccacaggagggccagcgctgtggaccttacaacgccgagtgcactgcattcctgtgccctagatgcacgtggggcccactgctcgtggactgtgctggtgcatcacggatggtgcatgggctcgccgtgtctcagcctctgccagcgccagcgccaaaacaagccaaagagcctcccaccagagccgggaggaaaaggcccctgcaatgtggtgacacctcccctttcacacctggatccatcttgagagccacagtcactggattgactttgctgtcaaaactactgacagggagcagcccccgggccgctggctggtgggcccccaattgacacccatgccagagaggtggggatcctgcctaaggttgtctacgggggcacttggaggacctggcgtgctcagacccaacagcaaaggaactagaaagaaggacccagaaggcttgctttcctgcatctctgtgaagcctctctccttggccacagactgaactcgcagggagtgcagcaggaaggaacaaagacaggcaaacggcaacgtagcctgggctcactgtgctggggcatggcgggatcctccacagagaggaggggaccaattctggacagacagatgttgggaggatacagaggagatgccacttctcactcaccactaccagccagcctccagaaggccccagagagaccctgcaagaccacggagggagccgacacttgaatgtagtaataggcagggggccctgccaccccatccagccagaccccagctgaaccatgcgtcaggggcctagaggtggagttcttagctatccttggctttctgtgccagcctggctctgcccctcccccatgggctgtgtcctaaggcccatttgagaagctgaggctagttccaaaaacctctcctgacccctgcctgttggcagcccactccccagccccagccccttccatggtactgtagcaggggaattccctccccctccttgtgccttctttgtatataggcttctcaccgcgaccaataaacagctcccagtttgt

SEQ ID NO: 11771 - DNA, 4495 bp, Homo sapiens
aggtgaacaggtcctcacgcccagctccgccccctcacgcgctctcgccgggaccccgcttccgctggcagccatgggccccggccccagccgcgcgccccgcgccccacgcctgatgctctgtgcgctcgccttgatggtggcggccggcggctgcgtcgtctccgccttcaacctggatacccgattcctggtagtgaaggaggccgggaacccgggcagcctcttcggctactcggtcgccctccatcggcagacagagcggcagcagcgctacctgctcctggctggtgccccccgggagctcgctgtgcccgatggctacaccaaccggactggtgctgtgtacctgtgcccactcactgcccacaaggatgactgtgagcggatgaacatcacagtgaaaaatgaccctggccatcacattattgaggacatgtggcttggagtgactgtggccagccagggccctgcaggcagagttctggtctgtgcccaccgctacacccaggtgctgtggtcagggtcagaagaccagcggcgcatggtgggcaagtgctacgtgcgaggcaatgacctagagctggactccagtgatgactggcagacctaccacaacgagatgtgcaatagcaacacagactacctggagacgggcatgtgccagctgggcaccagcggtggcttcacccagaacactgtgtacttcggcgcccccggtgcctacaactggaaaggaaacagctacatgattcagcgcaaggagtgggacttatctgagtatagttacaaggacccagaggaccaaggaaacctctatattgggtacacgatgcaggtaggcagcttcatcctgcaccccaaaaacatcaccattgtgacaggtgccccacggcaccgacatatgggcgcggtgttcttgctgagccaggaggcaggcggagacctgcggaggaggcaggtgctggagggctcgcaggtgggcgcctattttggcagcgcaattgccctggcagacctgaacaatgatgggtggcaggacctcctggtgggcgccccctactacttcgagaggaaagaggaagtagggggtgccatctatgtcttcatgaaccaggcgggaacctccttccctgctcacccctcactccttcttcatggccccagtggctctgcctttggtttatctgtggccagcattggtgacatcaaccaggatggatttcaggatattgctgtgggagctccgtttgaaggcttgggcaaagtgtacatctatcacagtagctctaaggggctccttagacagccccagcaggtaatccatggagagaagctgggactgcctgggttggccaccttcggctattccctcagtgggcagatggatgtggatgagaacttctacccagaccttctagtgggaagcctgtcagaccacattgtgctgctgcgggcccggccagtcatcaacatcgtccacaagaccttggtgcccaggccagctgtgctggaccctgcactttgcacggccacctcttgtgtgcaagtggagctgtgctttgcttacaaccagagtgccgggaaccccaactacaggcgaaacatcaccctggcctacactctggaggctgacagggaccgccggccgccccggctccgctttgccggcagtgagtccgctgtcttccacggcttcttctccatgcccgagatgcgctgccagaagctggagctgctcctgatggacaacctccgtgacaaactccgccccatcatcatctccatgaactactctttacctttgcggatgcccgatcgcccccggctggggctgcggtccctggacgcctacccgatcctcaaccaggcacaggctctggagaaccacactgaggtccagttccagaaggagtgcgggcctgacaacaagtgtgagagcaacttgcagatgcgggcagccttcgtgtcagagcagcagcagaagctgagcaggctccagtacagcagagacgtccggaaattgctcctgagcatcaacgtgacgaacacccggacctcggagcgctccggggaggacgcccacgaggcgctgctcaccctggtggtgcctcccgccctgctgctgtcctcagtgcgcccccccggggcctgccaagctaatgagaccatcttttgcgagctggggaaccccttcaaacggaaccagaggatggagctgctcatcgcctttgaggtcatcggggtgaccctgcacacaagggaccttcaggtgcagctgcagctctccacgtcgagtcaccaggacaacctgtggcccatgatcctcactctgctggtggactatacactccagacctcgcttagcatggtaaatcaccggctacaaagcttctttggggggacagtgatgggtgagtctggcatgaaaactgtggaggatgtaggaagccccctcaagtatgaattccaggtgggcccaatgggggaggggctggtgggcctggggaccctggtcctaggtctggagtggccctacgaagtcagcaatggcaagtggctgctgtatcccacggagatcaccgtccatggcaatgggtcctggccctgccgaccacctggagaccttatcaaccctctcaacctcactctttctgaccctggggacaggccatcatccccacagcgcaggcgccgacagctggatccagggggaggccagggccccccacctgtcactctggctgctgccaaaaaagccaagtctgagactgtgctgacctgtgccacagggcgtgcccactgtgtgtggctagagtgccccatccctgatgcccccgttgtcaccaacgtgactgtgaaggcacgagtgtggaacagcaccttcatcgaggattacagagactttgaccgagtccgggtaaatggctgggctaccctattcctccgaaccagcatccccaccatcaacatggagaacaagaccacgtggttctctgtggacattgactcggagctggtggaggagctgccggccgaaatcgagctgtggctggtgctggtggccgtgggtgcagggctgctgctgctggggctgatcatcctcctgctgtggaagtgtgacttctttaagcggacccgctattatcagatcatgcccaagtaccacgcagtgcggatccgggaggaggagcgctacccacctccagggagcaccctgcccaccaagaagcactgggtgaccagctggcagactcgggaccaatactactgacgtcctccctgatcccaccccctcctcccccagtgtcccctttcttcctatttatcataagttatgcctctgacagtccacaggggccaccacctttggctggtagcagcaggctcaggcacatacacctcgtcaagagcatgcacatgctgtctggccctggggatcttcccacaggagggccagcgctgtggaccttacaacgccgagtgcactgcattcctgtgccctagatgcacgtggggcccactgctcgtggactgtgctggtgcatcacggatggtgcatgggctcgccgtgtctcagcctctgccagcgccagcgccaaaacaagccaaagagcctcccaccagagccgggaggaaaaggcccctgcaatgtggtgacacctcccctttcacacctggatccatcttgagagccacagtcactggattgactttgctgtcaaaactactgacagggagcagcccccgggccgctggctggtgggcccccaattgacacccatgccagagaggtggggatcctgcctaaggttgtctacgggggcacttggaggacctggcgtgctcagacccaacagcaaaggaactagaaagaaggacccagaaggcttgctttcctgcatctctgtgaagcctctctccttggccacagactgaactcgcagggagtgcagcaggaaggaacaaagacaggcaaacggcaacgtagcctgggctcactgtgctggggcatggcgggatcctccacagagaggaggggaccaattctggacagacagatgttgggaggatacagaggagatgccacttctcactcaccactaccagccagcctccagaaggccccagagagaccctgcaagaccacggagggagccgacacttgaatgtagtaataggcagggggccctgccaccccatccagccagaccccagctgaaccatgcgtcaggggcctagaggtggagttcttagctatccttggctttctgtgccagcctggctctgcccctcccccatgggctgtgtcctaaggcccatttgagaagctgaggctagttccaaaaacctctcctgacccctgcctgttggcagcccactccccagccccagccccttccatggtactgtagcaggggaattccctccccctccttgtgccttctttgtatataggcttctcaccgcgaccaataaacagctcccagtttgt

SEQ ID NO: 11772 - DNA, 2303 bp, Homo sapiens
cgcttcccgccgcccgagcttcggaaacttcccggccgcgacgcagggaaccggcgcggagaaccgagcagagcggagcgcccgtggtccagcgtgtagggagccgatcgcccatggagggtctgggccgctcgtgcctgtggctgcgtcgggagctgtcgcccccgcggccgcggctcctgctcctggactgccgcagccgcgagctgtacgagtcggcgcgcatcggtggggcgctgagcgtggccctgccggcgctcctgctgcgccgcctgcggaggggcagcctgtcggtgcgcgcgctcctgcctgggccgccgctgcagccgcccccgcctgcccccgtgctcctgtacgaccagggcgggggccggcgccggcgcggggaggccgaggccgaggccgaggagtgggaggccgagtcggtgctgggcaccctgctgcagaagctgcgagaggaaggctacctggcctactacctccagggaggcttcagcagattccaggccgagtgccctcacctgtgtgagaccagccttgctggccgtgccggctccagcatggcgccggtgcccggtccagtgcccgtggtggggttgggcagcctgtgcctgggctccgactgctctgatgcggaatccgaggctgaccgcgactccatgagctgtggcctggattcggagggtgccacacccccaccagtggggctgcgggcatccttccctgtccagatcctgcccaacctctatctgggcagtgcccgggattccgccaatttggagagcctggccaaactgggcatccgctacatcctcaatgtcacccccaacctcccaaacttcttcgagaagaatggtgactttcactacaagcagatccccatctccgaccactggagccagaacctgtcgcggttctttccggaggccattgagttcattgatgaggccttgtcccagaactgcggggtgctcgtccactgcttggcgggggtcagccgttctgtcaccgtcactgtggcctacctcatgcagaagctccacctctctctcaacgatgcctatgacctggtcaagaggaagaagtctaacatctcccccaacttcaacttcatggggcagttgctggactttgagcgcagcttgcggctggaggagcgccactcgcaggagcagggcagtggggggcaggcatctgcggcctccaacccgccctccttcttcaccacccccaccagtgatggcgccttcgagctggcccccacctagggccccgtggccggcaggccggcccctgccccacccccacccacgggtgtccctgcccactcgtgtggcaagggaggggagggcaggagggctcggcctgagcagggtgctggggggagagcgcaatacctcacgcgggctgccgtcctaatcaacgtgcctatggcgggaccacgctcggagcctgcctcttctgcgactgttactttttctttgcgggatgggggtgggggttccctctccaggtggttgtccaagcccaggtcccggccctgggtgctcagccagctcggctaggccctgcgcctccctgcgcttcccccttcaggaagggtgtgtgccacctcgttgcactggatcccagtggctgcttgggggagaggcgtttgccatcactggtgttgtcacctccctgtttctccaccaagggcttgggcctctcggggctggggcctcccaggggatggggacccagaggtgcagtggccgcccacatccatggcctaggagctactgggcaggttcccggccacacatctggtgggctgttttgtttttttttttcctcttcccccagatgtcttgacgggatcactggggctctttgtgagtgagggtggccaaactaccgccggaggagatggggtctcagagcgagagctgcggagggggaggggaagaagaaggcctcacttttgctgctgcggggcccacacagccgctgctactttggggggtggggaaggggccaagctgcagacacacacagtcattcatttctgtccacacccctgtgggtggcgggtgtgcgtgtgtgtgcttgtgtgtgcgcacgtgtcggcgctcacacacacatgctagcccactgatgcacccagcccagggctggcagtctttgcagcgtggggccgtctcaccctggagcctggagaggatctatgcttgtttgtttttgtaatccatatcatagttgctttctttaattgttccttctgaataaacagtttatttaagataaaaaaaaaaaaaaaaaaa

SEQ ID NO: 11773 - DNA, 2280 bp, Homo sapiens
gggtggatgaggaggctcgggcccttccacccacgcgtccattgggcggcgccgccatcactctcttctgggctacaccgccttctcttcctccgcggaacccggatcccctcctccaccaccctctccccgccccgtcacgatagcctctcattggacggaggcacggtcaatcctcctcgagttagggagccgactggacgcgaggcctttgggccgtccccagcctcgtcggattggcttcctgcgcgttggcgcaacggaagaggcggccggccgagggcgcgcctctgctctggctggactgccgcggaggaggcgagaaggaatccgacgctggggggcttgctcgggcggcagcgactgctgctgcggatgggagggggccggctcggcgcgcccatggagcgccacggcagggcttccgccacctccgtctcgtcggctggggagcaggcggccggggaccccgaagggcggcggcaggagccactgcggcgccgggcgagcagcgcgtcggtgcccgcggtcggggcctcggctgagggcacgaggcgggatcgactgggctcttacagcggccccacctcggtctcccgccagcgcgtcgaaagcctgaggaaaaagcggccgctttttccatggtttggactggatatcggtggaactctggtcaagctggtatattttgaacccaaagacatcactgctgaagaagaagaggaagaagtggaaagtcttaaaagcattcggaagtacctgacctccaatgtggcttatgggtctacaggcattcgggacgtgcacctcgagctgaaggacctgactctgtgtggacgcaaaggcaatctgcactttatacgctttcccactcatgacatgcctgcttttattcaaatgggcagagataaaaacttctcgagtctccacactgtcttttgtgccactggaggtggagcgtacaaatttgagcaggattttctcacaataggtgatcttcagctttgcaaactggatgaactagattgcttgatcaaaggaattttatacattgactcagtcggattcaatggacggtcacagtgctattactttgaaaaccctgctgattctgaaaagtgtcagaagttaccatttgatttgaaaaatccgtatcctctgcttctggtgaacattggctcaggggttagcatcttagcagtatattccaaagataattacaaacgggtcacaggtactagtcttggaggaggaactttttttggtctctgctgtcttcttactggctgtaccacttttgaagaagctcttgaaatggcatctcgtggagatagcaccaaagtggataaactagtacgagatatttatggaggggactatgagaggtttggactgccaggctgggctgtggcttcaagctttggaaacatgatgagcaaggagaagcgagaggctgtcagtaaagaggacctggccagagcgactttgatcaccatcaccaacaacattggctcaatagcaagaatgtgtgcccttaatgaaaacattaaccaggtggtatttgttggaaatttcttgagaattaatacgatcgccatgcggcttttggcatatgctttggattattggtccaaggggcagttgaaagcacttttttcggaacacgagggttattttggagctgttggagcactccttgagctgttgaagatcccgtgatcattacctggggaggggttcctgaaaccttccacaatgggatctgtggactttcatttttttaagagacttactcaatttcatgactgtactacctgaaacaaagtgagaaaggacaggtgtatttttctaagtcatcaagataaatccttaagaattcagtctaaattagcaaccaggaaggaaaaatatattaaaaacaacaaaaaagtggcacatgtccaggcagtgtgaggatttgctgtatataagttgcctgctttgtatttttgaaatctctgcatcactcattggaagtgcttctgaagagagctgctctgtgttcagttgactggttttgtgtcctgtttgaacttgctgaatgtaaggcaggctactatgcgttataatctaatcacaatttgtcaatatggtcttggcaatcatctgtgcattactctggtttgcattaagcctgtgtgtgaacttactgtaaaacatgttttatttcaaggttctgcaaaattaattgggcaggttaattgtgtacctgaaacttaacaagcagtttttggaagggca

SEQ ID NO: 11774 - DNA, 1712 bp, Homo sapiens
atgctgggggaggggctggcggcctcgacggcagctgcggaactaggccgagggacaaaggctaagtttttccatggtttggactggatatcggtggaactctggtcaagctggtatattttgaacccaaagacatcactgctgaagaagaagaggaagaagtggaaagtcttaaaagcattcggaagtacctgacctccaatgtggcttatgggtctacaggcattcgggacgtgcacctcgagctgaaggacctgactctgtgtggacgcaaaggcaatctgcactttatacgctttcccactcatgacatgcctgcttttattcaaatgggcagagataaaaacttctcgagtctccacactgtcttttgtgccactggaggtggagcgtacaaatttgagcaggattttctcacaataggtgatcttcagctttgcaaactggatgaactagattgcttgatcaaaggaattttatacattgactcagtcggattcaatggacggtcacagtgctattactttgaaaaccctgctgattctgaaaagtgtcagaagttaccatttgatttgaaaaatccgtatcctctgcttctggtgaacattggctcaggggttagcatcttagcagtatattccaaagataattacaaacgggtcacaggtactagtcttggaggaggaactttttttggtctctgctgtcttcttactggctgtaccacttttgaagaagctcttgaaatggcatctcgtggagatagcaccaaagtggataaactagtacgagatatttatggaggggactatgagaggtttggactgccaggctgggctgtggcttcaagctttggaaacatgatgagcaaggagaagcgagaggctgtcagtaaagaggacctggccagagcgactttgatcaccatcaccaacaacattggctcaatagcaagaatgtgtgcccttaatgaaaacattaaccaggtggtatttgttggaaatttcttgagaattaatacgatcgccatgcggcttttggcatatgctttggattattggtccaaggggcagttgaaagcacttttttcggaacacgagggttattttggagctgttggagcactccttgagctgttgaagatcccgtgatcattacctggggaggggttcctgaaaccttccacaatgggatctgtggactttcatttttttaagagacttactcaatttcatgactgtactacctgaaacaaagtgagaaaggacaggtgtatttttctaagtcatcaagataaatccttaagaattcagtctaaattagcaaccaggaaggaaaaatatattaaaaacaacaaaaaagtggcacatgtccaggcagtgtgaggatttgctgtatataagttgcctgctttgtatttttgaaatctctgcatcactcattggaagtgcttctgaagagagctgctctgtgttcagttgactggttttgtgtcctgtttgaacttgctgaatgtaaggcaggctactatgcgttataatctaatcacaatttgtcaatatggtcttggcaatcatctgtgcattactctggtttgcattaagcctgtgtgtgaacttactgtaaaacatgttttatttcaaggttctgcaaaattaattgggcaggttaattgtgtacctgaaacttaacaagcagtttttggaagggca

SEQ ID NO: 11775 - DNA, 1763 bp, Homo sapiens
ccgcgcgcggacactgtccccgcacggtggtccctcgttggtgcgtggcctgacatccggctggaggcctcgggtgctccgaaagcggtaccttcgggggcccccccgcacccattgtttttccatggtttggactggatatcggtggaactctggtcaagctggtatattttgaacccaaagacatcactgctgaagaagaagaggaagaagtggaaagtcttaaaagcattcggaagtacctgacctccaatgtggcttatgggtctacaggcattcgggacgtgcacctcgagctgaaggacctgactctgtgtggacgcaaaggcaatctgcactttatacgctttcccactcatgacatgcctgcttttattcaaatgggcagagataaaaacttctcgagtctccacactgtcttttgtgccactggaggtggagcgtacaaatttgagcaggattttctcacaataggtgatcttcagctttgcaaactggatgaactagattgcttgatcaaaggaattttatacattgactcagtcggattcaatggacggtcacagtgctattactttgaaaaccctgctgattctgaaaagtgtcagaagttaccatttgatttgaaaaatccgtatcctctgcttctggtgaacattggctcaggggttagcatcttagcagtatattccaaagataattacaaacgggtcacaggtactagtcttggaggaggaactttttttggtctctgctgtcttcttactggctgtaccacttttgaagaagctcttgaaatggcatctcgtggagatagcaccaaagtggataaactagtacgagatatttatggaggggactatgagaggtttggactgccaggctgggctgtggcttcaagctttggaaacatgatgagcaaggagaagcgagaggctgtcagtaaagaggacctggccagagcgactttgatcaccatcaccaacaacattggctcaatagcaagaatgtgtgcccttaatgaaaacattaaccaggtggtatttgttggaaatttcttgagaattaatacgatcgccatgcggcttttggcatatgctttggattattggtccaaggggcagttgaaagcacttttttcggaacacgagggttattttggagctgttggagcactccttgagctgttgaagatcccgtgatcattacctggggaggggttcctgaaaccttccacaatgggatctgtggactttcatttttttaagagacttactcaatttcatgactgtactacctgaaacaaagtgagaaaggacaggtgtatttttctaagtcatcaagataaatccttaagaattcagtctaaattagcaaccaggaaggaaaaatatattaaaaacaacaaaaaagtggcacatgtccaggcagtgtgaggatttgctgtatataagttgcctgctttgtatttttgaaatctctgcatcactcattggaagtgcttctgaagagagctgctctgtgttcagttgactggttttgtgtcctgtttgaacttgctgaatgtaaggcaggctactatgcgttataatctaatcacaatttgtcaatatggtcttggcaatcatctgtgcattactctggtttgcattaagcctgtgtgtgaacttactgtaaaacatgttttatttcaaggttctgcaaaattaattgggcaggttaattgtgtacctgaaacttaacaagcagtttttggaagggca

SEQ ID NO: 11776 - DNA, 7407 bp, Homo sapiens
gggcctctgattcatctttattccctccatcatctagacttgattttatttgtaccaaggagatgcgtgtctaatgtttttctttcttctatttctaggagggctgttggcctgctgctgtgctgctgaacagtatgcagtcctttcgggagcaaagcagttaccacggaaaccagcaaagctacccacaggaggtacacggctcatcccggctagaagagttcagccctcgtcaggcccagatgttccagaattttggaggtacaggtggcagtagtggcagcagtggcagtggcagtggtggtggacgacgaggagcagcagctgctgcggcagcgatggctagcgagacctctggccatcaaggttaccagggtttcaggaaagaggctggagatttttactacatggcaggcaacaaagaccccgtgactacaggaaccccacagcctcctcagcgaaggccttctgggcctgtgcagagctatggacccccccaggggagcagctttggcaatcagtatgggagtgagggtcatgtgggccagtttcaagcacagcactctggccttggcggtgtgtcacattatcagcaggattacactgggcctttctctccagggagtgctcagtaccaacagcaggcttccagccagcagcagcagcagcaagtccagcagttgagacaacagctttaccagtcccatcagcccctgccacaggccactggccaaccagcatccagctcatcccatctacagccaatgcagcggccctcaactctgccatcctctgctgctggttaccagttaagagtgggtcagtttggccaacactatcagtcttctgcttcctcctcctcctcctcctccttcccttcaccacagcgttttagccagtctggacagagctatgatggcagttacaatgtgaatgctggatctcagtatgaaggacacaatgtgggttctaatgcacaggcttatggaacacaatccaattacagctatcagcctcaatctatgaagaattttgaacaggcaaagattccacaagggacccaacaggggcagcagcagcagcaaccgcagcaacaacaacacccttctcagcatgtgatgcagtatactaacgctgccaccaagctgcccctgcaaagccaagtggggcagtacaaccagcctgaggttcctgtgaggtcccccatgcagtttcaccagaacttcagccccatttctaacccttctccagctgcctctgtggttcagtctccaagctgtagttctaccccatctcctctcatgcagactggggagaatctccagtgtgggcaaggcagtgtgcctatgggttccagaaacagaattttacagttaatgcctcaactcagtccaaccccatcaatgatgcccagtcctaattctcatgctgcaggcttcaaagggtttggactagaaggggtaccagaaaagcgactgacagatcctgggttgagtagtttgagtgctctgagtactcaagtggccaatcttcctaacactgtccagcacatgttactttctgatgccctgactcctcagaagaagacctccaagaggccctcatcttccaagaaagcagatagctgcacaaattctgaaggctcctcacaacctgaagaacagctgaagtcccctatggcagagtcattagatggaggctgctccagcagttcagaggatcaaggcgagagagtgcggcaactaagtggccagagcaccagctctgacaccacctacaagggtggagcctctgagaaagctggctcctcaccggcacaaggtgctcagaatgaaccccccagactcaatgctagtcctgccgcaagagaagaggccacctcaccaggcgctaaggacatgccattgtcatccgacgggaacccaaaggttaatgagaagactgttggggtgattgtctcccgggaagccatgacaggtcgggtagaaaagcctggtggacaagataaaggctcccaagaggatgatcctgcagccactcaaaggccacctagcaatggtggggcaaaggaaaccagtcatgcatcacttccccagccagagcctccaggaggaggagggagcaaaggaaacaagaatggcgataacaactccaaccataatggagaaggaaatggccagagtggccactctgcagcgggccctggttttacgagcagaactgagcctagcaaatctcctggaagtctgcgctatagttacaaagatagtttcgggtcagccgtgccacgaaatgtcagtggctttcctcagtatcctacagggcaagaaaagggagatttcactggccatggggaacgaaagggtagaaatgaaaaattcccaagcctcctgcaggaagtgcttcagggttaccaccaccaccctgacaggagatattctaggagtactcaagagcatcaggggatggctggtagcctagaaggaaccacaaggcccaatgtcttggttagtcaaaccaatgaattagctagcaggggccttctgaacaaaagcattgggtctctattagaaaatccccactggggcccctgggaaaggaaatcaagcagcacagctcctgaaatgaaacagatcaatttgactgactatccaattcccagaaagtttgaaatagagcctcagtcatcagcacatgagcctgggggttccctctctgaaagaagatcagtgatctgtgatatttctccactaagacagattgtcagggacccaggggctcactcactgggacacatgagtgccgacaccagaattgggaggaatgaccgtctcaatccaactttaagtcagtcggtcattcttcctggtggtttggtgtccatggaaaccaagctgaaatcccagagcgggcagataaaagaggaagactttgaacagtctaaatctcaagctagtttcaacaacaagaaatctggagaccactgccatcctcctagcatcaagcatgagtcttaccgcggcaatgccagccctggagcagcaacccatgattccctttcagactatggcccgcaagacagcagacccacgccaatgcggcgggtccctggcagagttggtggtcgggagggcatgaggggtcggtccccttctcaatatcatgactttgcagaaaaattgaaaatgtctcctgggcggagcagaggcccagggggagaccctcatcacatgaatccacacatgaccttttcagagagggctaaccggagttctttacacactcccttttctcccaactcagaaaccctggcctctgcttatcatgcaaatactcgggctcatgcttatggggaccctaacgcaggtttgaattctcagctgcattataagagacagatgtaccaacagcaaccagaggagtataaagactggagcagcggttctgctcagggagtaattgctgcagcacagcacaggcaggaggggccacggaagagtccaaggcagcagcagtttcttgacagagtacggagccctctgaaaaatgacaaagatggtatgatgtatggcccaccagtggggacttaccatgaccccagtgcccaggaggctgggcgctgcctaatgtctagtgatggtctgcctaacaagggcatggaattaaagcatggctcccagaagttacaagaatcctgttgggatctttctcggcaaacttctccagccaaaagcagcggtcctccaggaatgtccagtcaaaaaaggtatgggccgccccatgagactgatggacatggactagctgaggctacacagtcatccaaacctggtagtgttatgctgagacttccaggccaggaggatcattcttctcaaaaccccttaatcatgaggaggcgtgttcgttcttttatctctcccattcccagtaagagacagtcacaagatgtaaagaacagtagcactgaagataaaggtcgcctccttcactcatcaaaagaaggcgctgataaagcattcaattcctatgcccatctttctcacagtcaggatatcaagtctatccctaagagagattcctccaaggaccttccaagtccagatagtagaaactgccctgctgttaccctcacaagccctgctaagaccaaaatactgcccccacggaaaggacggggattgaaattggaagctatagttcagaagattacatccccaaatattaggaggagcgcatcttcgaacagtgcggaggctgggggagacacggttacgcttgatgatatactgtctttgaagagtggtcctcctgaaggtgggagtgttgctgttcaggatgctgacatagagaagagaaaaggtgaggtggcttcggacctagtcagtccagcaaaccaggagttgcacgtagagaaacctcttccaaggtcttcagaagagtggcgtggcagcgtggatgacaaagtgaagacagagacacatgcagaaacagttactgccggaaaggaaccccctggtgccatgacatccacaacctcacagaagcctggtagtaaccaagggagaccagatggttccctgggtggaacagcacctttaatctttccagactcaaagaatgtacctccagtgggcatattggcccctgaggcaaaccccaaggctgaagagaaggagaacgatacagtgacgatttcaccgaagcaagagggtttccctccaaagggatatttcccatcaggaaagaagaaggggagacccattggtagtgtgaataagcaaaagaaacagcagcagccaccgcctccaccccctcagcccccacagataccagaaggttctgcagatggagagccaaagccaaaaaaacagaggcaaaggagggagagaaggaagcctggggcccagccgaggaagcgaaaaaccaaacaagcagttcccattgtggaaccccaagaacctgagatcaaactaaaatatgccacccagccactggataaaactgatgccaagaacaagtctttttacccttacatccatgtagtaaataagtgtgaacttggagccgtttgtacaatcatcaatgctgaggaagaagaacagaccaaattagtgaggggcaggaagggtcagaggtcactgacccctccacctagcagcactgaaagcaaggcgctcccggcctcgtcctttatgctgcagggacctgttgtgacagagtcttcggttatggggcacctggtttgctgtctgtgtggcaagtgggccagttaccggaacatgggtgacctctttggacctttttatccccaagattatgcagccactctcccgaagaatccacctcctaagagggccacagaaatgcagagcaaagttaaggtacggcacaaaagtgcttctaatggctccaagacggacactgaggaggaggaagagcagcagcagcagcagaaggagcagagaagcctggccgcacaccccaggtttaagcggcgccaccgctcggaagactgtggtggaggccctcggtccctgtccagggggctcccttgtaaaaaagcagccactgagggcagcagtgaaaagactgttttggactcgaagccctccgtgcccaccacttcagaaggtggccctgagctggagttacaaatccctgaactacctcttgacagcaatgaattttgggtccatgagggttgtattctctgggccaatggaatctacctggtttgtggcaggctctatggcctgcaggaagcgctggaaatagccagagagatgaaatgttcccactgccaggaggcaggcgccaccttgggctgctacaacaaaggctgctccttccgataccattacccgtgtgccattgatgcagattgtttgctacatgaggagaacttctcggtgaggtgccctaagcacaagcctccccttccgtgccctctcccccccttgcagaacaagaccgcgaaaggcagcctcagcacagagcagtcggagcgggggtgaggggggcagtgtgctcgtgggaatggaaaggacagcaagcacaggtgagactgtggagatgagaaggtggtggacactcgtgatggaatggaaatcgtcctaccgtgcagccacaccctgccctgccccgccccgccccgcccgcgtgcctgcccatgccagcacttccttaagttctcacatcacactcaaaccagtgacaccacaggaaagaaagacccaagacgttggaatggctgtttccatggacacaatctccatagtgacaatgtggggggaggggggaggggtgggatgatggggaaagggtggggggaattaaaagggagggataaatatatatatataaatctatttttagtctggaaagactttgtttaaatgaaaggtgcgctatcccttttgattctgttttaaaattatctcgttaaagatctccaaatttgttccgatgacaagtgaaatttaaatgtgagattgaactgaacaaaccctcatctcatgaaggacggggtgtgtgtgtggcgttgatctttagcctgtctcacaccagttcagaaaacactagacccaggattgaaaaagcaaaccacagcagaaccatccttttgtcattaatttgtctcaaagtgggaaggttttgggggagggggaaatacagggatggtccatgttttcaagagtaggggaatgatgtttaaacacaaaaataaattttttttcatttccagaaacactatttatttatggttttttttttttaattttttctttttgggggtgaaattggcagatgcctgaggtcatagctgtgtcctgggtcactgtggctggtgaggacctcaaggaccccatcaagtgtacacagcagcagcaaaatcaagggatgaccctcctctggggccccctgtcctcagcacattccaggcagctgtgccctgacccacagggacccgtggggatgggaggaggtccaggcctgtgttgccagagctggcagtgtgagctgtaggcagggacggggagggactgtcgctgtgatcagagtgggttaagctgaccaggaacacccatttaacccctttttctttttgctttcatttttataaaggaaaagaggacctgtcagataggcagccccatgctacgtgattctttatgttgtgttgttttgttttgtaaattgtataatttttaaatatctgagttttaaaaaaagaaaaaagtacaaaaaaatcttgttatggccttaagaaggggttagtgcatctttcaggggtcactctgccatggggataaaatagctgtttcacaaacagttttatttaaaaaaacaaaaaacaaaaaaaatcaaaaaatcaaaaaaataataaacttcattttaaccttg

SEQ ID NO: 11777 - DNA, 7279 bp, Homo sapiens
gggcctctgattcatctttattccctccatcatctagacttgattttatttgtaccaaggagatgcgtgtctaatgtttttctttcttctatttctaggagggctgttggcctgctgctgtgctgctgaacagtatgcagtcctttcgggagcaaagcagttaccacggaaaccagcaaagctacccacaggaggtacacggctcatcccggctagaagagttcagccctcgtcaggcccagatgttccagaattttggaggtacaggtggcagtagtggcagcagtggcagtggcagtggtggtggacgacgaggagcagcagctgctgcggcagcgatggctagcgagacctctggccatcaaggttaccagggtttcaggaaagaggctggagatttttactacatggcaggcaacaaagaccccgtgactacaggaaccccacagcctcctcagcgaaggccttctgggcctgtgcagagctatggacccccccaggggagcagctttggcaatcagtatgggagtgagggtcatgtgggccagtttcaagcacagcactctggccttggcggtgtgtcacattatcagcaggattacactgggcctttctctccagggagtgctcagtaccaacagcaggcttccagccagcagcagcagcagcaagtccagcagttgagacaacagctttaccagtcccatcagcccctgccacaggccactggccaaccagcatccagctcatcccatctacagccaatgcagcggccctcaactctgccatcctctgctgctggttaccagttaagagtgggtcagtttggccaacactatcagtcttctgcttcctcctcctcctcctcctccttcccttcaccacagcgttttagccagtctggacagagctatgatggcagttacaatgtgaatgctggatctcagtatgaaggacacaatgtgggttctaatgcacaggcttatggaacacaatccaattacagctatcagcctcaatctatgaagaattttgaacaggcaaagattccacaagggacccaacaggggcagcagcagcagcaaccgcagcaacaacaacacccttctcagcatgtgatgcagtatactaacgctgccaccaagctgcccctgcaaagccaagtggggcagtacaaccagcctgaggttcctgtgaggtcccccatgcagtttcaccagaacttcagccccatttctaacccttctccagctgcctctgtggttcagtctccaagctgtagttctaccccatctcctctcatgcagactggggagaatctccagtgtgggcaaggcagtgtgcctatgggttccagaaacagaattttacagttaatgcctcaactcagtccaaccccatcaatgatgcccagtcctaattctcatgctgcaggcttcaaagggtttggactagaaggggtaccagaaaagcgactgacagatcctgggttgagtagtttgagtgctctgagtactcaagtggccaatcttcctaacactgtccagcacatgttactttctgatgccctgactcctcagaagaagacctccaagaggccctcatcttccaagaaagcagatagctgcacaaattctgaaggctcctcacaacctgaagaacagctgaagtcccctatggcagagtcattagatggaggctgctccagcagttcagaggatcaaggcgagagagtgcggcaactaagtggccagagcaccagctctgacaccacctacaagggtggagcctctgagaaagctggctcctcaccggcacaaggtgctcagaatgaaccccccagactcaatgctagtcctgccgcaagagaagaggccacctcaccaggcgctaaggacatgccattgtcatccgacgggaacccaaaggttaatgagaagactgttggggtgattgtctcccgggaagccatgacaggtcgggtagaaaagcctggtggacaagataaaggctcccaagaggatgatcctgcagccactcaaaggccacctagcaatggtggggcaaaggaaaccagtcatgcatcacttccccagccagagcctccaggaggaggagggagcaaaggaaacaagaatggcgataacaactccaaccataatggagaaggaaatggccagagtggccactctgcagcgggccctggttttacgagcagaactgagcctagcaaatctcctggaagtctgcgctatagttacaaagatagtttcgggtcagccgtgccacgaaatgtcagtggctttcctcagtatcctacagggcaagaaaagggagatttcactggccatggggaacgaaagggtagaaatgaaaaattcccaagcctcctgcaggaagtgcttcagggttaccaccaccaccctgacaggagatattctaggagtactcaagagcatcaggggatggctggtagcctagaaggaaccacaaggcccaatgtcttggttagtcaaaccaatgaattagctagcaggggccttctgaacaaaagcattgggtctctattagaaaatccccactggggcccctgggaaaggaaatcaagcagcacagctcctgaaatgaaacagatcaatttgactgactatccaattcccagaaagtttgaaatagagcctcagtcatcagcacatgagcctgggggttccctctctgaaagaagatcagtgatctgtgatatttctccactaagacagattgtcagggacccaggggctcactcactgggacacatgagtgccgacaccagaattgggaggaatgaccgtctcaatccaactttaagtcagtcggtcattcttcctggtggtttggtgtccatggaaaccaagctgaaatcccagagcgggcagataaaagaggaagactttgaacagtctaaatctcaagctagtttcaacaacaagaaatctggagaccactgccatcctcctagcatcaagcatgagtcttaccgcggcaatgccagccctggagcagcaacccatgattccctttcagactatggcccgcaagacagcagacccacgccaatgcggcgggtccctggcagagttggtggtcgggagggcatgaggggtcggtccccttctcaatatcatgactttgcagaaaaattgaaaatgtctcctgggcggagcagaggcccagggggagaccctcatcacatgaatccacacatgaccttttcagagagggctaaccggagttctttacacactcccttttctcccaactcagaaaccctggcctctgcttatcatgcaaatactcgggctcatgcttatggggaccctaacgcaggtttgaattctcagctgcattataagagacagatgtaccaacagcaaccagaggagtataaagactggagcagcggttctgctcagggagtaattgctgcagcacagcacaggcaggaggggccacggaagagtccaaggcagcagcagtttcttgacagagtacggagccctctgaaaaatgacaaagatggtatgatgtatggcccaccagtggggacttaccatgaccccagtgcccaggaggctgggcgctgcctaatgtctagtgatggtctgcctaacaagggcatggaattaaagcatggctcccagaagttacaagaatcctgttgggatctttctcggcaaacttctccagccaaaagcagcggtcctccaggaatgtccagtcaaaaaaggtatgggccgccccatgagactgatggacatggactagctgaggctacacagtcatccaaacctggtagtgttatgctgagacttccaggccaggaggatcattcttctcaaaaccccttaatcatgaggaggcgtgttcgttcttttatctctcccattcccagtaagagacagtcacaagatgtaaagaacagtagcactgaagataaaggtcgcctccttcactcatcaaaagaaggcgctgataaagcattcaattcctatgcccatctttctcacagtcaggatatcaagtctatccctaagagagattcctccaaggaccttccaagtccagatagtagaaactgccctgctgttaccctcacaagccctgctaagaccaaaatactgcccccacggaaaggacggggattgaaattggaagctatagttcagaagattacatccccaaatattaggaggagcgcatcttcgaacagtgcggaggctgggggagacacggttacgcttgatgatatactgtctttgaagagtggtcctcctgaaggtgggagtgttgctgttcaggatgctgacatagagaagagaaaaggtgaggtggcttcggacctagtcagtccagcaaaccaggagttgcacgtagagaaacctcttccaaggtcttcagaagagtggcgtggcagcgtggatgacaaagtgaagacagagacacatgcagaaacagttactgccggaaaggaaccccctggtgccatgacatccacaacctcacagaagcctggtagtaaccaagggagaccagatggttccctgggtggaacagcacctttaatctttccagactcaaagaatgtacctccagtgggcatattggcccctgaggcaaaccccaaggctgaagagaaggagaacgatacagtgacgatttcaccgaagcaagagggtttccctccaaagggatatttcccatcaggaaagaagaaggggagacccattggtagtgtgaataagcaaaagaaacagcagcagccaccgcctccaccccctcagcccccacagataccagaaggttctgcagatggagagccaaagccaaaaaaacagaggcaaaggagggagagaaggaagcctggggcccagccgaggaagcgaaaaaccaaacaagcagttcccattgtggaaccccaagaacctgagatcaaactaaaatatgccacccagccactggataaaactgatgccaagaacaagtctttttacccttacatccatgtagtaaataagtgtgaacttggagccgtttgtacaatcatcaatgctgaggaagaagaacagaccaaattagtgaggggcaggaagggtcagaggtcactgacccctccacctagcagcactgaaagcaaggcgctcccggcctcgtcctttatgctgcagggacctgttgtgacagagtcttcggttatggggcacctggtttgctgtctgtgtggcaagtgggccagttaccggaacatgggtgacctctttggacctttttatccccaagattatgcagccactctcccgaagaatccacctcctaagagggccacagaaatgcagagcaaagttaaggtacggcacaaaagtgcttctaatggctccaagacggacactgaggaggaggaagagcagcagcagcagcagaaggagcagagaagcctggccgcacaccccaggtttaagcggcgccaccgctcggaagactgtggtggaggccctcggtccctgtccagggggctcccttgtaaaaaagcagccactgagggcagcagtgaaaagactgttttggactcgaagccctccgtgcccaccacttcagaaggtggccctgagctggagttacaaatccctgaactacctcttgacagcaatgaattttgggtccatgagggttgtattctctgggccaatggaatctacctggtttgtggcaggctctatggcctgcaggaagcgctggaaatagccagagagatgaaatgttcccactgccaggaggcaggcgccaccttgggctgctacaacaaaggctgctccttccgataccattacccgtgtgccattgatgcagattgtttgctacatgaggagaacttctcggtgaggtgccctaagcacaaggtgagactgtggagatgagaaggtggtggacactcgtgatggaatggaaatcgtcctaccgtgcagccacaccctgccctgccccgccccgccccgcccgcgtgcctgcccatgccagcacttccttaagttctcacatcacactcaaaccagtgacaccacaggaaagaaagacccaagacgttggaatggctgtttccatggacacaatctccatagtgacaatgtggggggaggggggaggggtgggatgatggggaaagggtggggggaattaaaagggagggataaatatatatatataaatctatttttagtctggaaagactttgtttaaatgaaaggtgcgctatcccttttgattctgttttaaaattatctcgttaaagatctccaaatttgttccgatgacaagtgaaatttaaatgtgagattgaactgaacaaaccctcatctcatgaaggacggggtgtgtgtgtggcgttgatctttagcctgtctcacaccagttcagaaaacactagacccaggattgaaaaagcaaaccacagcagaaccatccttttgtcattaatttgtctcaaagtgggaaggttttgggggagggggaaatacagggatggtccatgttttcaagagtaggggaatgatgtttaaacacaaaaataaattttttttcatttccagaaacactatttatttatggttttttttttttaattttttctttttgggggtgaaattggcagatgcctgaggtcatagctgtgtcctgggtcactgtggctggtgaggacctcaaggaccccatcaagtgtacacagcagcagcaaaatcaagggatgaccctcctctggggccccctgtcctcagcacattccaggcagctgtgccctgacccacagggacccgtggggatgggaggaggtccaggcctgtgttgccagagctggcagtgtgagctgtaggcagggacggggagggactgtcgctgtgatcagagtgggttaagctgaccaggaacacccatttaacccctttttctttttgctttcatttttataaaggaaaagaggacctgtcagataggcagccccatgctacgtgattctttatgttgtgttgttttgttttgtaaattgtataatttttaaatatctgagttttaaaaaaagaaaaaagtacaaaaaaatcttgttatggccttaagaaggggttagtgcatctttcaggggtcactctgccatggggataaaatagctgtttcacaaacagttttatttaaaaaaacaaaaaacaaaaaaaatcaaaaaatcaaaaaaataataaacttcattttaaccttg

SEQ ID NO: 11778 - DNA, 1239 bp, Homo sapiens
ggtgcggggtcggggtccggcgcaggcaccggggcgggcgcggcgacgggggcaggggccatgccctgcaagagcgccgagtggctgcaggaggagctggaggcgcgcggcggcgcgtccttgctgctgctcgactgccggccgcacgagctcttcgagtcgtcgcacatcgagacggccatcaacctggccatcccgggcctcatgttgcgccgcctgcgcaagggcaacctgcccatccgctccatcatccccaaccacgccgacaaggagcgcttcgccacgcgctgcaaggcggccaccgtgctgctctacgacgaggccacggccgagtggcagcccgagcccggcgctcccgcctccgtgctcggcctgctcctacagaagctgcgcgacgacggctgccaggcctactacctccaaggtggtttcaacaagtttcaaacagagtactctgagcactgcgagaccaacgtggacagctcttcctcgccgagcagctcgccacccacctcagtgctgggcctggggggcctgcgcatcagctctgactgctccgacggcgagtcggaccgagagctgcccagcagtgccaccgagtcagacggcagccctgtgccatccagccaaccagccttccctgtccagatcctgccctacctctacctcggctgcgccaaggactccaccaacctggacgtgctcggcaagtatggcatcaagtatatcctcaatgtcacacccaacctacccaacgccttcgagcacggcggcgagttcacctacaagcagatccccatctctgaccactggagccagaacctctcccagttcttccctgaggccatcagcttcattgacgaagcccgctccaagaagtgtggtgtcctggtgcactgcctggcaggcatcagccgctcagtgacggtcactgtggcctatctgatgcagaagatgaacctgtcactcaacgacgcctacgactttgtcaagaggaaaaagtccaacatctcgcccaacttcaacttcatggggcagctgctggactttgagcggacgctggggctaagcagcccgtgcgacaaccacgcgtcgagtgagcagctctacttttccacgcccaccaaccacaacctgttcccactcaatacgctggagtccacgtgaggcctggtgcacggggggcatggcaccaggcccctgctcggctctccacagggctaggtgggagagcccaag

SEQ ID NO: 11779 - DNA, 2404 bp, Homo sapiens
gagacgctcgctgtttgtatccattgaggagctgcctcgcgcagggggtgtgcgaggctgagtccaagagatagcaaatcgagtcttaaataatccggggagaaagacgcccgggtagatttgaggtgcagccttggagggagggattagaagccgctagactttttttcctcccctctcagtagcacggagtccgaattaattggatttcattcactggggaggaacaaaaactatctgggcagcttcattgagagagattcattgacactaagagccagcggctgcagctgggtgcagagagaacctccggctttacttctgtctcgtctgccccaaccgctagcctcggcttgggtaaggcgaggcggaattaaaccccgctccgagagcggcagcttcgcgcgcggtgcgctcggcctatgcctgccccgaggggcgtctggtaggcaccccgccctctcccgcagctcgacccccatgatagatacgctcagacccgtgcccttcgcgtcggaaatggcgatcagcaagacggtggcgtggctcaacgagcagctggagctgggcaacgagcggctgctgctgatggactgccggccgcaggagctatacgagtcgtcgcacatcgagtcggccatcaacgtggccatcccgggcatcatgctgcggcgcctgcagaagggtaacctgccggtgcgcgcgctcttcacgcgcggcgaggaccgggaccgcttcacccggcgctgtggcaccgacacagtggtgctctacgacgagagcagcagcgactggaacgagaatacgggcggcgagtcggtgctcgggctgctgctcaagaagctcaaggacgagggctgccgggcgttctacctggaagatgaagcccggggcaagaactgtggtgtcttggtacattgcttggctggcattagccgctcagtcactgtgactgtggcttaccttatgcagaagctcaatctgtcgatgaacgatgcctatgacattgtcaaaatgaaaaaatccaacatatcccctaacttcaacttcatgggtcagctgctggacttcgagaggacgctgggactcagcagcccatgtgacaacagggttccagcacagcagctgtattttaccaccccttccaaccagaatgtataccaggtggactctctgcaatctacgtgaaagaccccacacccctccttgctggaatgtgtctggcccttcagcagtttctcttggcagcatcagctgggctgctttctttgtgtgtggccccaggtgtcaaaatgacaccagctgtctgtactagacaaggttaccaagtgcggaattggttaatactaacagagagatttgctccattctctttggaataacaggacatgctgtatagatacaggcagtaggtttgctctgtacccatgtgtacagcctacccatgcagggactgggattcgaggacttccaggcgcatagggtagaaccaaatgatagggtaggagcatgtgttctttagggccttgtaaggctgtttccttttgcatctggaactgactatataattgtcttcaatgaagactaattcaattttgcatatagaggagccaaagagagatttcagctctgtatttgtggtatcagtttggaaaaaaaaatctgatactccatttgattattgtaaatatttgatcttgaatcacttgacagtgtttgtttgaattgtgtttgttttttcctttgatgggcttaaaagaaattatccaaagggagaaagagcagtatgccacttcttaaaacagaacaaaacaaaaaaagaaaattgtgctcttttctaatccaaagggtatatttgcagcatgcttgactttaccaattctgatgacatctttacggacactattatcactaagaccttgttatggcgaagtctttagtctttttcatgtattttcctcatgattttttctctttatgtagtttgactatgccttacctttgtaaatatttttgcttgtgttgtcgcaaaggggataatctgggaaagacaccaaatcatgggctcactttaaaaaaagaaagaataaaaaaaccttcagctgtgctaaacagtatattacctctgtataaaattcttcagggagtgtcacctcaaatgcaatactttgggttggtttctttcctttaaaaaaatttgtataaaactggaagtgtgtgtgtgtgagcatgggtacccatttgataagagaaatgcatttgattgtgaagaagggagagttaaattctccattatgttcgtggtgtaaagtttagagctggaatttattataagaatgtaaaaccttaaattattaataaataactattttggctattgaaaaaaaaaaaaaaaaaaaaaaaa

SEQ ID NO: 11780 - DNA, 2842 bp, Homo sapiens
gagacgctcgctgtttgtatccattgaggagctgcctcgcgcagggggtgtgcgaggctgagtccaagagatagcaaatcgagtcttaaataatccggggagaaagacgcccgggtagatttgaggtgcagccttggagggagggattagaagccgctagactttttttcctcccctctcagtagcacggagtccgaattaattggatttcattcactggggaggaacaaaaactatctgggcagcttcattgagagagattcattgacactaagagccagcggctgcagctgggtgcagagagaacctccggctttacttctgtctcgtctgccccaaccgctagcctcggcttgggtaaggcgaggcggaattaaaccccgctccgagagcggcagcttcgcgcgcggtgcgctcggcctatgcctgccccgaggggcgtctggtaggcaccccgccctctcccgcagctcgacccccatgatagatacgctcagacccgtgcccttcgcgtcggaaatggcgatcagcaagacggtggcgtggctcaacgagcagctggagctgggcaacgagcggctgctgctgatggactgccggccgcaggagctatacgagtcgtcgcacatcgagtcggccatcaacgtggccatcccgggcatcatgctgcggcgcctgcagaagggtaacctgccggtgcgcgcgctcttcacgcgcggcgaggaccgggaccgcttcacccggcgctgtggcaccgacacagtggtgctctacgacgagagcagcagcgactggaacgagaatacgggcggcgagtcggtgctcgggctgctgctcaagaagctcaaggacgagggctgccgggcgttctacctggaaggtggcttcagtaagttccaagccgagttctccctgcattgcgagaccaatctagacggctcgtgtagcagcagctcgccgccgttgccagtgctggggctcgggggcctgcggatcagctctgactcttcctcggacatcgagtctgaccttgaccgagaccccaatagtgcaacagactcggatggtagtccgctgtccaacagccagccttccttcccagtggagatcttgcccttcctctacttgggctgtgccaaagactccaccaacttggacgtgttggaggaattcggcatcaagtacatcttgaacgtcacccccaatttgccgaatctctttgagaacgcaggagagtttaaatacaagcaaatccccatctcggatcactggagccaaaacctgtcccagtttttccctgaggccatttctttcatagatgaagcccggggcaagaactgtggtgtcttggtacattgcttggctggcattagccgctcagtcactgtgactgtggcttaccttatgcagaagctcaatctgtcgatgaacgatgcctatgacattgtcaaaatgaaaaaatccaacatatcccctaacttcaacttcatgggtcagctgctggacttcgagaggacgctgggactcagcagcccatgtgacaacagggttccagcacagcagctgtattttaccaccccttccaaccagaatgtataccaggtggactctctgcaatctacgtgaaagaccccacacccctccttgctggaatgtgtctggcccttcagcagtttctcttggcagcatcagctgggctgctttctttgtgtgtggccccaggtgtcaaaatgacaccagctgtctgtactagacaaggttaccaagtgcggaattggttaatactaacagagagatttgctccattctctttggaataacaggacatgctgtatagatacaggcagtaggtttgctctgtacccatgtgtacagcctacccatgcagggactgggattcgaggacttccaggcgcatagggtagaaccaaatgatagggtaggagcatgtgttctttagggccttgtaaggctgtttccttttgcatctggaactgactatataattgtcttcaatgaagactaattcaattttgcatatagaggagccaaagagagatttcagctctgtatttgtggtatcagtttggaaaaaaaaatctgatactccatttgattattgtaaatatttgatcttgaatcacttgacagtgtttgtttgaattgtgtttgttttttcctttgatgggcttaaaagaaattatccaaagggagaaagagcagtatgccacttcttaaaacagaacaaaacaaaaaaagaaaattgtgctcttttctaatccaaagggtatatttgcagcatgcttgactttaccaattctgatgacatctttacggacactattatcactaagaccttgttatggcgaagtctttagtctttttcatgtattttcctcatgattttttctctttatgtagtttgactatgccttacctttgtaaatatttttgcttgtgttgtcgcaaaggggataatctgggaaagacaccaaatcatgggctcactttaaaaaaagaaagaataaaaaaaccttcagctgtgctaaacagtatattacctctgtataaaattcttcagggagtgtcacctcaaatgcaatactttgggttggtttctttcctttaaaaaaatttgtataaaactggaagtgtgtgtgtgtgagcatgggtacccatttgataagagaaatgcatttgattgtgaagaagggagagttaaattctccattatgttcgtggtgtaaagtttagagctggaatttattataagaatgtaaaaccttaaattattaataaataactattttggctattgaaaaaaaaaaaaaaaaaaaaaaaa

SEQ ID NO: 11781 - DNA, 5984 bp, Homo sapiens
cgcgctgtgtgtgtgtgtgagtggagagtgagtgcgggacctgaggctgtgtgtgtgtgaactgtggccactggcggggtcgggggggggcagcggcggagccgcctcggacgataaggaaattgagatttggagaagttaaataaccaagacttcacaggcaaagccatgactacagtagtggtacatgtggactccaaagctgagctcactaccctgctggagcagtgggaaaaggaacatggcagtgggcaggacatggtacctatccttaccaggatgtctcaattgattgaaaaagaaactgaagagtatcgtaaaggggatccagacccatttgatgatcgacatcctggtcgagctgatccagagtgtatgctgggccacttgctgagaatactcttcaagaatgatgatttcatgaatgcactggtgaatgcatatgtgatgacaagccgagagccccctttaaacactgcagcttgcagactcctattagacatcatgccagggctggaaactgctgtcgtctttcaagaaaaggagggaattgtcgagaatcttttcaaatgggcccgagaggccgatcaaccattgaggacatattctactggactgttaggaggtgctatggaaaatcaagacattgctgccaactatagagatgaaaattcacagctggtggcaatagtgcttcgaagactgagggagctacagctacaggaagtggctttgcggcaggaaaacaagcgtcccagtccacggaagctctcttctgaaccccttttgcctctggatgaggaggctgtggatatggactatggtgacatggctgtagatgtagtggatggagaccaagaggaagcttctggagacatggagatctcctttcatcttgattcaggccacaagactagtagcagagtgaactcaacaaccaaacctgaggatggaggattaaagaaaaacaagtcagcaaaacagggtgacagagagaactttaggaaagccaagcaaaagttgggtttctcatcttctgatccagatcgcatgtttgttgagctgtctaatagcagttggtcagaaatgtctccctgggtgattggcaccaattataccctttatcctatgactcctgctatcgagcagcgactcattctccaatatttgacccctctaggagaatatcaggagctacttcccatattcatgcaacttggatcacgggagctgatgatgttctatattgacctgaagcaaactaatgatgtcctgcttacatttgaggcactaaagcacctagcatctctcctgctccataacaaatttgccacagaatttgttgcgcatggtggagtacagaaattactggaaatacctcgtccttctatggctgcaaccggtgtgtctatgtgtttgtattacctatcctacaatcaggatgccatggaaagagtttgcatgcatccccacaatgttctgtctgatgtggtgaactataccctgtggttaatggagtgttctcatgcttcaggatgctgccatgctaccatgtttttttcaatttgcttctcatttcgggccgtcttggagctctttgaccgctatgatggtcttcgtcgtctggtgaacttgatcagtactttggagattctaaatttggaagatcagggtgcacttctgagtgatgatgaaatatttgctagccgccaaactgggaaacatacctgcatggccttgcgcaaatactttgaggctcacctggccattaaattggaacaagtgaagcagtcacttcagaggactgagggtggcattcttgtccacccacaacccccgtacaaggcatgctcatatactcatgaacagattgtggaaatgatggaatttttgatagaatatggcccagcgcagctatattgggaaccagctgaagttttcctcaaactttcttgtgtgcaactcttgttgcagcttatttctattgcctgcaattggaagacctattatgcaaggaatgacactgtgcgctttgctttggatgtcctggctattcttactgtggtgccaaaaatccagctccagttggcagaatcagtggacgtgttggatgaggctggatctacagtctctactgtaggtatcagcattattttgggagtggctgagggtgagttcttcatccatgatgctgaaattcagaagtcagcacttcagattatcatcaattgtgtgtgtggcccagataaccgaatatccagtattggtaaatttatctctggtactcctcggagaaagctgcctcagaaccctaaaagcagtgagcacaccctggccaagatgtggaatgtggttcagtccaacaacggcatcaaggtgctcctgtccttactgtccattaagatgcccatcacagatgcagaccaaatccgggccctggcctgcaaagccctagtgggcctgtctcgcagtagcactgtccggcagatcatcagtaaactgccccttttcagcagctgccagatccagcagctgatgaaggagcctgtgctgcaggacaagcgcagtgaccatgtcaagttctgcaagtatgctgctgaactcattgaacgggtgtcaggaaaaccacttctcattggcactgatgtttccctagcacgactgcagaaagcagatgttgttgcccagtcaaggatctccttccctgagaaagagctgcttttgttgatacgaaaccatcttatttctaaagggcttggagaaacagcaaccgtgctgacaaaagaggctgacctgcccatgactgctgcctcccattcttctgcctttaccccagtcactgctgctgcttctcctgtctctctaccccgaacccctcgtatcgctaatggcattgcaactcgtctgggcagccatgctgctgtgggtgcctctgcgccttctgcccctactgctcatcctcagccacggcccccccagggtccgctagctctgcccggcccatcttatgcaggcaactcccctttgattggtagaatcagttttatcagagagaggccatcaccctgcaatggcaggaaaatcagagtgttgcggcagaagtcggaccatggtgcctacagccaaagcccagccataaaaaaacagctggacagacatcttccttccccacctacgctggacagtataatcacagagtatcttagagaacaacatgctcgctgcaagaatccagttgccacctgcccacctttctccctctttactcctcaccaatgtcctgagccaaaacagaggcggcaagcgccaataaactttacgtcaaggctaaaccgcagggcatcatttccaaagtatggaggggtggatggcggatgctttgataggcaccttatctttagcagattccgtcctatttcagtgttccgggaagccaatgaagatgagagtggcttcacctgctgtgcattctcagcacgggagcggttcctgatgcttggcacctgcacagggcagctgaagctctataatgtgtttagtggacaggaggaggccagctataactgtcacaactcagccatcacacatcttgaaccttccagggatgggtccttgctgctgacatctgctacttggagccagcctttgtctgcactttggggaatgaagtcagtatttgatatgaagcattccttcacagaagatcactatgttgagttcagtaagcactcccaggatcgggtcatcggcacaaaaggagacattgcccacatttatgatattcagactggcaacaagctgttgactctgtttaacccagatcttgccaacaactacaagaggaactgtgccacctttaatcctacagatgatcttgtcttaaatgatggcgtcctctgggatgtccgctctgcacaggccatccacaagtttgacaagttcaatatgaacatcagtggtgttttccatccaaatggactggaggtgatcattaatactgagatttgggaccttcgaacttttcatcttttgcatactgttcccgctctggatcagtgtcgcgtggtgttcaatcacacgggaacagtgatgtatggagctatgttgcaggcagatgatgaagatgacttaatggaagagaggatgaaaagcccctttgggtcatccttccgaacatttaatgcaactgactacaaacctatagcaaccattgatgtgaaacggaacatctttgacctgtgtacagacaccaaagactgctatcttgctgtcattgagaatcaaggcagcatggatgccctgaacatggacacagtatgcaggctgtatgaagtgggcaggcagcgtctggcagaggatgaggatgaagaggaggaccaggaagaggaagaacaggaggaagaagatgatgatgaagatgatgatgacaccgatgatttagatgagcttgacactgaccagttgctggaggcggagttggaggaggacgacaataatgagaacgcaggggaagatggggacaatgacttctctccctctgatgaggagctagcaaaccttctagaggagggagaggacggggaggatgaagactctgatgcagatgaggaggtggaactgatcctgggggacactgacagctctgacaactctgatttggaagatgacatcatcttatctctgaatgagtgaggagccatcactgcttggaagagattcttggcagagagaagaggggacaaatttggttgtgaagtaaacaagaaacacaagacggctaaaactctccaggggcaggtaaagccctgctgggctcagaagcactatagaatttgctgtacacactgaagtgggtctgtgtcacacaggtatttcttggtcctctggagagcagaggactcactcagctctttgcttcatgcctcgctttaatggtagtaaacacttaaccagtggaatagtctgactgctggtactgatggcatcagaagaaaacaggttaacaatcaagtagtgaaagcactatattctagtcattaactcaacggagccagtctcaactctgctgggagcacccacaggtctctgtgggggagacagggactataacagggaggcagaattcaggttggcttgacaacacaccttaggaacatgtgctaaggggctaaggaggcatcagctgtcttccttattctaccagggctgaaaatcggagtcacttaggaggcagcatgagaacagtggcacaccaccagtgaggcacatgttgcctttttgtctttaagcaacaccttagacagggcctgaaccctgggtgggggcactggatgcctgaagtaagtaagttttctcagtggggcagtctcataaaatcaccaggacattgaccacctgacctcccctaactagtgctggccaaggcctgagagttcacagaacctgctaggtcttaagagccaaaggaaggaagtggttgagggccaggaaagagaaggaatgtcatgccagggtgttactcctcaccaaaacttggcagttctttttggggccatgggacacctttctctgaagaggggttggataaggcaaaggttgaagtgtcttctctaggcacgttttctagcatgtttccttttacttggttctgtctcacaaagctgggaggtagatgattcttccgggtcctgagcacctgcttcatgaaggaagataggtagcccagagaagaagttttggacttaacaacataccaaggcagctctggcctgtgactcaggcgtttgttggagagctgcaggaaaaccactgcagtgtgcctgcaacaggacaagacccactcctgtttctggcggtaccagctaccctggaatggtggcgtgtcctgctgtacccaactgacttgcttaggtacctggcagctgtgaccacagctcaagtaaaaaaacaaaaacaggcaaataaataaacatgcttaacatgtc

SEQ ID NO: 11782 - DNA, 4980 bp, Homo sapiens
ggcggggctccgacgcccgcagcccggctgctactgccgcaccgcggcggccgtgaacctcctgctgggcgtcttccaggtcctgctgccctgctgtcgcccgggaggggctcagggacaagcgattgagccgttgccgaacgtggtggagctgtggcaggcagaagaaggggaactcctgctgcccactcagggtgattctgaagagggtctggaggagccttctcaagaacagagcttctcggacaaactatttagtggaaaaggcttacattttcagccatcagttttagattttggaatacagttcctgggacatcctgtagcaaagattctccatgcttacaaccctagtagggacagcgaggttgtggtgaattcagtgtttgcagctgctggacatttccatgtaccgccagttccctgcagggtaattccagcaatggggaaaacttccttcagaattattttcttacctactgaagaaggaagcattgaaagttccttatttattaatacctcttcgtatggagtcctttcctatcatgtatctggaattggcactcgtagaatctctacagaagggtctgcaaagcagctaccaaatgcttattttctgcttccaaaggtccagagcattcagctgtctcaaatgcaggcagaaaccactaatactagcctcttgcaggtgcaactggaatgcagtttacataataaagtgtgtcagcaattaaagggttgttatctggaatctgatgatgttttgcgtctacaaatgagcataatggtaacaatggaaaacttttcaaaagaatttgaagaaaacacacaacatttgttagatcatctctctattgtttacgtagctacagatgaatctgagacctcagatgattcagcagtaaatatgtatatattacattcaggaaacagccttatatggatacaggatatacgccatttctcacagagagatgctctgtctctgcagtttgaaccagtactactacctacttctacaacaaactttacaaaaattgcttcttttacctgcaaagcagctacatcatgtgacagtggaattatagaagatgtgaagaaaacaacacacactccaacactaaaagcatgcctcttctcttctgtggctcaggggtattttagaatggactcttctgcaacccagtttcacatagagactcatgagaacacatcaggactttggtcaatatggtaccgcaaccattttgaccgtagtgttgtattaaatgatgtgtttctttccaaggagaccaagcacatgttaaagattctgaatttcactggccctttatttctacctccaggctgttggaatatattttctttgaaacttgctgttaaagacattgccataaatctattcaccaatgtatttttgactacaaacataggtgccatttttgcaatacctctacagatttattcagcaccaaccaaggaagggagtctgggttttgaagtgatagcacattgtggcatgcattatttcatgggaaaatcaaaagcaggaaatcctaattggaatgggagcctttctctggatcaatctacctggaatgtggattctgaacttgcaaataaattgtatgaaagatggaagaaatataaaaatggtgacgtctgcaagaggaatgttttgggaacaactcgatttgctcacttgaagaaatccaaggagtcagagtcctttgttttctttttgcctcgtttgatcgcagagcctggcctcatgttaaacttcagcgcaactgcccttaggagcaggatgatcaagtactttgtggtgcagaacccgtcctcttggccggtctccttgcagctcctgcctctctccttgtaccctaaacccgaagccctagtgcacctgctccacagatggtttggcactgatatgcagatgattaatttcacaactggtgaattccagctcaccgaagcttgcccttacctgggtacgcattctgaggaatccaggtttggcatcctccacttacatctgcagcctttggaaatgaaaagggttggcgtagttttcacacctgctgactatggaaaagttacctcactcatactaatccggaataacttgactgttattgacatgattggcgtggaaggatttggagcaagagagttattaaaagtgggtggaagacttcctggtgcaggaggctcactccgatttaaggtgcccgagtccacgctgatggactgccgtagacaactgaaagacagtaagcaaattttatctattacaaagaactttaaagttgagaatattggacctcttcctataactgtttcgtctctgaaaattaatgggtataactgccaaggttatggattcgaggtgctggattgtcatcagttttccctggacccaaacacatcccgcgatatcagcattgtgttcactccagactttacctcctcctgggtaattcgggacctaagtcttgtaaccgcagcggacctagaatttcgcttcactctcaatgtgactctccctcatcacctgttgcccttgtgtgcagacgtggttccaggacccagctgggaggagtcattttggaggctcacggtcttctttgtcagtttgtccctgttgggtgtgattttaatagccttccaacaagcacagtacattctcatggaattcatgaaaacaagacagaggcaaaatgctagctcctcttcacagcaaaacaatggtcctatggatgtaatcagcccccattcttacaaaagcaattgcaagaactttctcgatacatatggcccctctgataaaggcagggggaagaactgccttccagtgaacactccccaaagcaggatccagaatgctgcaaagaggagcccagccacctatggtcattctcagaagaagcacaaatgctcagtgtattacagtaaacacaaaaccagcacagctgcggccagcagcaccagcacgactactgaggaaaaacagacttcacccctgggcagctcactgcctgctgctaaagaggacatttgcactgatgccatgcgtgagaactggatcagcctcagatatgcaagtggcataaatgtcaacctgcagaagaatttaacccttcccaaaaacttactgaataaagaagaaaacacactgaaaaacacaattgttttcagtaatccttcttcagaatgtagtatgaaggagggaatacagacatgtatgtttcctaaggaaactgacattaaaacttcagagaacacagccgagttcaaggaacgggagctctgtccactgaagacctccaagaaactacctgaaaaccatttaccaagaaactcacctcagtaccaccagccagacttgccagaaatttccaggaaaaataatgggaataaccagcaagtacctgtcaagaatgaagtagatcattgtgaaaatttgaagaaggtggacacaaagccttcttcagaaaagaagattcacaaaacatctagagaagacatgttttctgagaaacaggacatacctttcgtagagcaagaagatccttataggaagaaaaagcttcaggagaaaagagaaggaaatttacaaaatttaaattggagtaaaagtcgaacatgtagaaagaacaagaaaaggggtgttgctccagtctcaaggcctcctgaacagagtgatctaaagcttgtgtgcagtgactttgagaggtctgagctgagcagtgacatcaatgtaagaagctggtgtatacaggaaagcactagggaggtttgtaaagcagatgccgaaattgcaagcagtttacctgctgcccagagagaggcagaaggttactaccagaagcctgagaagaaatgtgtggacaagttctgctccgattccagctctgactgtgggagctcctctggcagcgtgcgtgccagccggggcagctgggggagctggagcagcaccagcagctccgacggggataagaagcccatggtggacgcccagcacttcctgccggccggagacagtgtttcacaaaatgattttccttctgaagctcccatctccttgaatctttctcataacatctgcaatcccatgaccgtgaatagtctcccacaatacgcagagccttcctgtcccagccttcctgccgggcccacaggtgttgaagaagataaaggtctttactcacctggagacctgtggcccactccgccagtgtgtgtgacaagcagcttaaactgcaccctggagaacggcgtgccttgtgtgattcaggagtcggccccggttcataatagtttcattgattggagtgcaacatgcgaaggccagttttccagcgcatactgtccattggaattgaacgattacaatgcctttccagaagaaaacatgaactatgccaatggcttcccctgtcctgcagatgttcagacagactttattgatcacaactctcagtctacctggaacaccccacccaacatgcctgctgcctggggacatgccagtttcatcagctctccgccctacctcacaagcacccgaagcttgtctccaatgtctggactttttggttccatctgggccccgcaaagcgatgtgtatgaaaattgctgccccatcaaccccaccacggaacattcgacccacatggaaaaccaagcggtcgtgtgcaaggaatactacccggggttcaacccgtttcgcgcctatatgaacctggacatatggactaccacagcgaataggaatgcaaatttcccactgtctagagactcgagttactgtgggaatgtgtgaaaataattggatttttaaacaatgtgaataaagaggcttgtgttttgattactagtgtaaactggttattgagatagattatgacattggtggatattttggcacttttatatgaaaataaattttttaatgaaaaaaaaaaaaaaaaa

SEQ ID NO: 11783 - DNA, 3239 bp, Homo sapiens
gggggtccgttccccaacttcctcggcgctccggactcccaagtctccgccggaccctcctttggatattcctcgtgtctccgattctgagacagagggggaagacggtggggcctccccacctgccccgcagaagatgcagttctttggccgcctggtcaataccttcagtggcgtcaccaacttgttctctaacccattccgggtgaaggaggtggctgtggccgactacacctcgagtgaccgagttcgggaggaagggcagctgattctgttccagaacactcccaaccgcacctgggactgcgtcctggtcaaccccaggaactcacagagtggattccgactcttccagctggagttggaggctgacgccctagtgaatttccatcagtattcttcccagctgctacccttctatgagagctcccctcaggtcctgcacactgaggtcctgcagcacctgaccgacctcatccgtaaccaccccagctggtcagtggcccacctggctgtggagctagggatccgcgagtgcttccatcacagccgtatcatcagctgtgccaattgcgcggagaacgaggagggctgcacacccctgcacctggcctgccgcaagggtgatggggagatcctggtggagctggtgcagtactgccacactcagatggatgtcaccgactacaagggagagaccgtcttccattatgctgtccagggtgacaattctcaggtgctgcagctccttggaaggaacgcagtggctggcctgaaccaggtgaataaccaagggctgaccccgctgcacctggcctgccagctggggaagcaggagatggtccgcgtgctgctgctgtgcaatgctcggtgcaacatcatgggccccaacggctaccccatccactcggccatgaagttctctcagaaggggtgtgcggagatgatcatcagcatggacagcagccagatccacagcaaagacccccgttacggagccagccccctccactgggccaagaacgcagagatggcccgcatgctgctgaaacggggctgcaacgtgaacagcaccagctccgcggggaacacggccctgcacgtggcggtgatgcgcaaccgcttcgactgtgccatagtgctgctgacccacggggccaacgcggatgcccgcggagagcacggcaacaccccgctgcacctggccatgtcgaaagacaacgtggagatgatcaaggccctcatcgtgttcggagcagaagtggacaccccgaatgactttggggagactcctacattcctagcctccaaaatcggcagacttgtcaccaggaaggcgatcttgactctgctgagaaccgtgggggccgaatactgcttcccacccatccacggggtccccgcggagcagggctctgcagcgccacatcatcccttctccctggaaagagctcagcccccaccgatcagcctaaacaacctagaactacaggatctcatgcacatctcacgggcccggaagccagcgttcatcctgggctccatgagggacgagaagcggacccacgaccacctgctgtgcctggatggaggaggagtgaaaggcctcatcatcatccagctcctcatcgccatcgagaaggcctcgggtgtggccaccaaggacctgtttgactgggtggcgggcaccagcactggaggcatcctggccctggccattctgcacagtaagtccatggcctacatgcgcggcatgtactttcgcatgaaggatgaggtgttccggggctccaggccctacgagtcggggcccctggaggagttcctgaagcgggagtttggggagcacaccaagatgacggacgtcaggaaacccaaggtgatgctgacagggacactgtctgaccggcagccggctgaactccacctcttccggaactacgatgctccagaaactgtccgggagcctcgtttcaaccagaacgttaacctcaggcctccagctcagccctcagaccagctggtgtggcgggcggcccgaagcagcggggcagctcctacttacttccgacccaatgggcgcttcctggacggtgggctgctggccaacaaccccacgctggatgccatgaccgagatccatgagtacaatcaggacctgatccgcaagggtcaggccaacaaggtgaagaaactctccatcgttgtctccctggggacagggaggtccccacaagtgcctgtgacctgtgtggatgtcttccgtcccagcaacccctgggagctggccaagactgtttttggggccaaggaactgggcaagatggtggtggactgttgcacggatccagacgggcgggctgtggaccgggcacgggcctggtgcgagatggtcggcatccagtacttcagattgaacccccagctggggacggacatcatgctggatgaggtcagtgacacagtgctggtcaacgccctctgggagaccgaggtctacatctatgagcaccgcgaggagttccagaagctcatccagctgctgctctcaccctgagggtccccagcctctcaccggccccagctgacctcgtccattcagcccctgccaggccaagcccagccactgccctcccgggcagatctgggcccaggcacctctgagtccatagaccaggcctgggagaatgccaagctgcctgcccgaggctggtcctgaaggcctgtctcccactaaccccgccttccagcactttctgtcattccaggctgggaaagtctagagccccctttggcccctttccctgactgtcaaggacaactgactcccccatcagctcaaacattaagggtacccgggcacaaccgtacccctgcccccagccccagcctccctgagggcctgccgggctgcctctgccccagcccccagcaagggcactcccaggcttcctggtgggtgcagcccactccctctgccctctgctccgttccctgggggctgggactaaagaaatgggtgtcccccaccccatcagctgggaaagcccaggccgcaggagtgggatgcccgttggactttgcccctcacactggcccagcccctcacactgccccaccccgagaaccctcagctctcaaaggtcactcctgggagtttcttcttcccaatggaagtggcttaagagccaaaactgaaataaatcatttggattcaagttcaaaaaaaaaaaaaaaaa

SEQ ID NO: 11784 - DNA, 1674 bp, Homo sapiens
gcggcagtatagagagtacctcacgaaggggacgtgggaaagtgttagcggggaacgctgggaaactcccggcctccgccaccatcttgctttcctttaatccggcagtgaccgtgtgtcagaacaatcttgaatcatgaagctactaaccagagccggctctttctcgagattttattccctcaaagttgcccccaaagttaaagccacagctgcgcctgcaggagcaccgccacaacctcaggaccttgagtttaccaagttaccaaatggcttggtgattgcttctttggaaaactattctcctgtatcaagaattggtttgttcattaaagcaggcagtagatatgaggacttcagcaatttaggaaccacccatttgctgcgtcttacatccagtctgacgacaaaaggagcttcatctttcaagataacccgtggaattgaagcagttggtggcaaattaagtgtgaccgcaacaagggaaaacatggcttatactgtggaatgcctgcggggtgatgttgatattctaatggagttcctgctcaatgtcaccacagcaccagaatttcgtcgttgggaagtagctgaccttcagcctcagctaaagattgacaaagctgtggcctttcagaatccgcagactcatgtcattgaaaatttgcatgcagcagcttaccggaatgccttggctaatcccttgtattgtcctgactataggattggaaaagtgacatcagaggagttacattacttcgttcagaaccatttcacaagtgcaagaatggctttgattggacttggtgtgagtcatcctgttctaaagcaagttgctgaacagtttctcaacatgaggggtgggcttggtttatctggtgcaaaggccaactaccgtggaggtgaaatccgagaacagaatggagacagtcttgtccatgctgcttttgtagcagaaagtgctgtcgcgggaagtgcagaggcaaatgcatttagtgttcttcagcatgtcctcggtgctgggccacatgtcaagaggggcagcaacaccaccagccatctgcaccaggctgttgccaaggcaactcagcagccatttgatgtttctgcatttaatgccagttactcagattctggactctttgggatttatactatctcccaggccacagctgctggagatgttatcaaggctgcctataatcaagtaaaaacaatagctcaaggaaacctttccaacacagatgtccaagctgccaagaacaagctgaaagctggatacctaatgtcagtggagtcttctgagtgtttcctggaagaagtcgggtcccaggctctagttgctggttcttacatgccaccatccacagtccttcagcagattgattcagtggctaatgctgatatcataaatgcggcaaagaagtttgtttctggccagaagtcaatggcagcaagtggaaatttgggacatacaccttttgttgatgagttgtaatactgatgcacacattacaggagagagctgaacgttctctcagcccagagcagcaaacacatgaaagtcagaagtctctaatatatcatttgtcttttttccagtgaggtaaaataaggcataaatgcaggtaattattcccagctgacctaaagtcaataaaacattctgtttaa

SEQ ID NO: 11785 - DNA, 13671 bp, Homo sapiens
atgaaagtagacaggactaaactgaagaagacacctactgaggctcctgcagactgcagagccttaatagacaaactcaaagtttgtaatgatgagcaacttctcttggaactgcagcagatcaaaacatggaacattggaaagtgcgagttatatcactgggtggacctgttggaccgcttcgatggaatactggcagatgctggacagacagtggagaatatgtcatggatgctcgtatgtgataggccagaaagagagcaactgaaaatgcttctcttggctgtgttgaacttcacagccttgctcattgagtacagcttttcccggcatctgtacagttccatagagcatttgacaactttattggcttcctctgatatgcaagtggtgctggcagtcctcaatctcctatatgtatttagcaaaagatcaaactacatcactcgtctgggatctgacaagaggaccccgctgctaactcggctacaacatttggcagagagctggggtggaaaggagaatggctttggacttgcagaatgttgcagagacttgcatatgatgaaatatccacccagtgcaactacactacactttgaattctatgcagatcctggggccgaggtcaaaattgagaaaaggacaactagtaacacactacattatattcacatagagcaacttgacaagatttcagaaagcccttctgaaatcatggaatctcttaccaaaatgtacagcattcctaaggataagcagatgctgttatttacacacatacgactggcccatggcttttctaatcacaggaagcgattgcaggcagttcaggccagactgcatgcaatatctatattagtgtattccaatgccttgcaggaatcagcaaacagtatcttgtataatggcttgatagaggagttggtagatgtccttcagataacggataagcagcttatggagattaaagcagcttctttacgaacattaacatcaattgtccacttggagagaactcccaaactcagcagtattattgactgtactggaactgcctcctaccatggatttttgccagtgcttgtaaggaactgtatccaggccatgattgatccttccatggatccataccctcaccagtttgccactgctctcttctcttttttataccatctggccagctacgatgctggtggtgaagccttggtctcctgtggaatgatggaagccttattgaaggtcataaagtttcttggcgatgaacaggaccagataacatttgtcaccagagccgtcagagtggttgaccttatcaccaacctggatatggcagcttttcaatcccatagtggactttctatcttcatttatagacttgagcatgaagtagatttgtgccgaaaagaatgtccgtttgtgatcaagccaaagatccagagacccaatactacacaagaaggagaggaaatggaaactgatatggatggagtccagtgtattccacaacgagcagcacttctgaaatccatgttgaatttcctcaagaaggccatccaagaccctgctttctcagatggcatacgacatgtgatggatggttctctgcctacctccctgaaacacatcatcagcaatgcagaatactatggcccatcactcttcctcctagctactgaagtggtgactgtgtttgtatttcaagaaccatcactgctctcctcactccaggacaatggattgacagatgtcatgctgcatgcactgcttatcaaagatgttcctgctacccgtgaagtccttggctccctcccaaatgtattcagtgcactctgtttgaatgcccgaggtcttcagtcttttgttcagtgtcagccttttgaacgcctcttcaaagttcttctgtctccagattacctcccagccatgcggaggaggagaagttctgatccccttggggatactgcatccaacctggggagtgctgtcgatgagctcatgagacatcagcccacccttaaaacagatgcaacgactgccatcatcaagttacttgaagaaatctgtaatcttggaagggaccccaaatacatctgtcagaagccatcaatccagaaggcagatggcactgccactgctcctcccccaaggtctaatcatgccgcagaagaagcctctagtgaggatgaggaggaagaggaagtacaggccatgcagagctttaattctacccagcaaaatgaaactgagcctaatcagcaggttgttggtacagaggaacgtattcctattcccctcatggattacatccttaatgtgatgaaatttgtggaatctattctgagcaacaatacaacagatgaccactgccaggaatttgtgaatcagaaaggactgttgcctttggttaccattttgggtcttcccaatctgcccattgactttcccacatctgctgcctgtcaggctgttgcaggtgtctgcaaatccatattgacactgtcacatgaacccaaagtccttcaagagggtctccttcagttggactccatcctctcctccctggagcccttacaccgccccattgaatcccctgggggctcagtgttgttgcgagaactggcttgcgcaggcaatgttgctgatgctaccctctcagcccaggccacacctctgctgcatgcactcactgctgcccatgcctacatcatgatgtttgttcatacttgcagagttggacagagtgaaattcgttccatctccgtaaaccagtggggctctcaattgggtctgagtgttttgagcaagctgagccagttatactgttccctggtgtgggaaagcactgtcctcctctctctgtgtaccccaaacagcctaccatctgggtgtgaatttggccaggcagatatgcagaaactggttccaaaggatgagaaggcaggtacgacccagggcggaaaaagatcagatggggaacaggatggagcagctggaagtatggatgcttctacccagggcttattagaaggcattgggctagatggtgacacattggctcccatggagacagatgaacctactgcttcagactctaagggcaaatctaaaatcacaccagcaatggctgccagaattaagcaaatcaagcctttgttatcagcttcctccagattaggccgagcacttgctgagctatttggacttcttgttaaactttgtgtgggatctcctgtccgccagagaaggagccatcatgctgccagcaccactacagcaccgacacctgccgcgcgatcaacagcctcagctctcactaagctcttgactaaggggttatcttggcagcccccaccatatacacctactccccgattcaggctgacattcttcatctgttcagttggtttcacatccccaatgctgtttgatgagaggaagtatccctaccacctcatgctgcaaaaatttctctgctccggaggccacaatgctctttttgaaactttcaactgggctctgtccatgggaggtaaagttcctgtttctgagggattggaacactcagacttgcctgatggcacaggagaattcctagatgcctggcttatgctggtggagaagatggtgaatcccaccacggtgcttgaatctccacattcgctgcctgccaaattgcctggaggtgtccagaactttccccagttcagtgcactgcgcttccttgtggtaactcagaaagcagcctttacttgcatcaaaaacttatggaaccggaaacccctgaaggtatatggtggacgaatggctgaatcgatgctggccattctatgccacatcctccgaggagaacctgtgattcgagagagactaagcaaggagaaggaggggtctcgaggagaagaggatacagggcaagaggaaggtggctcccgccgggaacctcaagtcaaccagcaacaactgcaacagctcatggacatgggcttcacaagggaacatgcaatggaggcactgttgaacaccagcaccatggagcaggccacagagtaccttttaacccaccctcctccaatcatgggaggagttgttcgggatctcagcatgtctgaagaggaccagatgatgagagcaattgctatgtctctgggacaggatattccaatggatcaaagggcagagtcacctgaggaagttgcttgccggaaggaggaagaggaacggaaagctcgggaaaagcaggaggaggaagaggctaaatgtctagagaagttccaggatgctgacccgttggaacaagatgagctccacactttcacagatactatgttgccaggctgcttccaccttcttgatgagctgccagacacagtataccgtgtgtgtgacctgatcatgacagcaatcaaacgtaatggagcagattatcgtgacatgattctgaagcaagtagtcaatcaggtgtgggaagctgctgatgtattgatcaaagctgctcttcccctgacaacaagtgacacaaaaaccgtgtcagagtggataagtcagatggccacactgccccaggcctccaatttggctactagaatcttgcttttaacgctactttttgaggagttgaagctaccttgtgcttgggtggttgaatcaagtggcatccttaatgtcctaatcaaactcttggaagtggttcagccctgcctccaggcagccaaggagcagaaggaagtccagaccccaaagtggatcacaccagtgttgctcctgattgatttctatgaaaagacagccatctcctcaaaaaggagagcccagatgactaagtacctgcaatccaacagcaacaactggcgctggtttgatgatcgctctgggcgttggtgtagttacagtgcaagcaacaatagcactattgattctgcctggaaatctggagagacaagcgtgcgattcactgcaggccgaagaagatacacggtccaattcactacaatggtgcaggttaatgaggaaacagggaaccgacgccctgtgatgctgactctcctcagggtacctcggctgaataaaaattcaaaaaacagcaatggacaggaactagagaagacgctggaagaaagcaaagaaatggatatcaaacgtaaagaaaataaaggcaatgatacccctttggccctagagagtacaaacactgaaaaggagacaagcctggaggaaacaaaaatcggggagatcctgatccagggcttgacagaagatatggtgactgttttaatccgggcctgcgtgagcatgctgggagtccctgtggacccagatactttgcatgccacccttcgtctctgtctgaggctcacccgggaccacaaatatgccatgatgtttgcagaactgaagagtacccgcatgatcttgaatttgacccagagctcaggcttcaatgggtttactcccctggtcacccttctcttaagacacatcattgaggacccctgtacccttcgtcataccatggaaaaggttgttcgctcagcagctacaagtggagctggtagcactacctctggtgttgtgtctggcagcctcggctctcgggagatcaactacatccttcgtgtccttgggccagccgcatgccgcaatccagacatattcacagaagtggccaactgctgtatccgcatcgcccttcctgcccctcgaggctcaggaactgcttcagatgatgaatttgagaatcttagaattaaaggccctaatgctgtacagctggtgaagaccacccctttgaagccctcacctctgcctgtcatccctgatactatcaaggaagtgatctatgatatgctgaatgctctggctgcataccatgctccagaggaagcagataaatctgatcctaaacctggggttatgacccaagaggttggccagctcctgcaagacatgggtgatgatgtataccagcagtaccggtcacttacgcgtcagagcagtgactttgatacgcagtcaggtttttccattaatagtcaggtctttgctgcagatggtgcctccactgagacttccgcatctgggacctcccaaggagaggcttcaactccagaggagtctcgagatgggaagaaagataaagaaggggaccgggcctctgaggaaggcaaacagaaaggcaagggcagcaaacctttaatgcctacctccactatccttcgtcttctggcagagttggtgaggtcctatgttggtattgctaccctgattgccaactacagctacactgtgggccagtctgaactgatcaaagaggactgcagtgtgctagcttttgttctggaccacctgctcccacatacccagaatgcagaagacaaggacacccctgccttggcccgcctgttcctcgcaagcctggctgctgcagggagtggcacagatgcccaggtggccctagtgaatgaagtaaaagcagcccttggacgggcactggctatggctgagagtacagagaaacatgccaggcttcaggcagtgatgtgtatcatcagtactatcatggagtcctgcccctccacctccagcttctacagcagtgccacagcgaagacccagcacaatggcatgaacaacatcattcggcttttcctgaagaagggactggttaatgacctggccagagtacctcacagcttagacctgtccagtcccaacatggccaacacagtcaatgctgctctgaagcctttggaaacactttcccggattgtgaaccagcccagtagcctttttggcagcaagagtgcttctagcaagaacaagtctgagcaggatgcccaaggagcctctcaagattccagtagcaaccagcaggacccaggcgagcctggggaagcagaagtgcaggaggaggatcatgatgtcactcagacagaggtggcagatggggatatcatggatggggaggctgaaaccgactcagtggtgattgctgggcagcctgaggtgctcagttcacaagagatgcaggttgagaatgagctggaggacctgatagatgagttgcttgagagggatggcggatctgggaacagtacaattatagtgagcagaagtggagaggatgaatcacaagaggacgtgctgatggatgaagctccttccaacctcagccaagcttccaccttgcaggccaaccgagaagattccatgaatatcctggaccctgaggatgaggaggagcacactcaggaagaggacagcagtggcagtaacgaggatgaggatgatagtcaggatgaagaggaggaggaggaggaagatgaggaagatgatcaggaggatgatgaaggtgaagagggagatgaagacgatgacgacgatggctctgagatggaattggatgaggattatcctgatatgaacgcttctcccttggtccgatttgagcgctttgaccgggaggatgatctcatcattgagtttgacaacatgttctccagtgctacagacatccccccatccccaggaaatatccctaccacccatccactgatggtgcgccatgcagaccacagttctctgacactgggcagtggctcttcaacaactcgtctcacccagggcatcgggcgcagtcagaggaccctaaggcagctgacggccaatactggccacaccattcatgttcactaccctgggaatcgccagcccaaccctcctcttatactgcagaggttgcttggtccctcagctgctgctgacatccttcagctgagcagcagccttcccctacaaagccggggtcgggcccgcctcctggtaggcaacgatgacgtccacatcatcgcccgttctgatgatgagctgctggatgactttttccatgatcagagcacagctaccagccaagcaggaaccctgtccagcatccccacagccctgacccgctggacagaagaatgcaaagttctcgatgctgagagcatgcatgactgtgtttcagtggttaaagtgtccattgtcaatcacctggaattcctgagggatgaggagctggaagaaaggcgagagaagcgcaggaaacaactggctgaggaagaaacaaagataactgataaaggcaaagaagataaggagaacagggatcagagtgcacagtgtactgcatctaagtcaaatgactccactgaacagaatctctcagatgggacgcctatgcctgacagctacccaacaaccccatcttcaactgatgcagctacatctgagtccaaggagacccttggcactctgcaatcctcacaacagcaaccaacactcccaaccccaccagctttgggagaggttcctcaggagctgcagtctccagctggagaagggggcagctctacacagctattgatgcctgtagagccagaggaattgggtcccacaaggccaagtggggaagcagaaacaactcagatggagttatccccagctcccactataacctcactttccccagagagagctgaggattctgatgcactgacggctgtcagcagtcagctagaaggctctcctatggatacaagcagcctggcttcctgtaccttagaggaggctgtgggtgacacttcagcagctggcagttctgagcagcccagagcaggcagctccactcctggggatgccccaccagctgtggcggaagtgcaaggcaggagtgatgggtcaggggaatctgcccagccacctgaggacagctccccacctgcatcctctgagagctcttccaccagagattctgccgtggccatttctggagcagattcccgaggaatcctagaagagccgttgccttcaacaagcagtgaagaagaagatccccttgcgggtatcagtctccctgaaggtgtggacccctcttttctggctgccctgcctgatgacatccgtcgggaagttctacagaaccagctaggcattcgtccaccaacccggactgccccctccacaaatagctcagcgcctgcagtggtggggaatcctggtgtgactgaagtgagccctgagtttctggctgccctgcctccagccattcaggaggaagtactggcacagcagagagctgagcagcagcgacgagaactagcacagaatgccagctcagacacccctatggaccctgtgaccttcatccagactctgccctcagacctgcgccgtagtgtcctagaggatatggaggacagtgtgttagctgtgatgccacctgacattgcagctgaggctcaagccctgagacgagagcaagaagcccggcagcgacagctcatgcatgagcgtctgtttgggcacagtagcacctccgcactctctgctattctccgaagcccggctttcaccagtcgcttaagtggcaaccgtggggtccagtatactcgccttgctgtgcagagaggtggcaccttccagatggggggtagcagcagccataacaggccttctggcagtaatgtagatactctcctccgcctccgaggacggctccttctggaccacgaagccctttcttgtctcttggtcctactttttgtggatgagccaaagctcaatactagccgtctacaccgagtactgagaaatctctgctaccatgcccagacccgccactgggtcatccgcagtctgctctccatcttgcagcgcagcagtgagagtgagctatgcattgaaacacccaaactcactacaagtgaggaaaagggcaaaaagtcgagcaagagctgtgggtcaagtagccatgagaaccgtcccctggacctgctacacaagatggagtcaaagagctccaaccagctttcctggctctcagtatccatggatgcagccctaggctgcaggactaatatatttcagatccagcgttcaggggggcgtaaacataccgagaagcatgcaagcggtggctccaccgtccacatccatccccaagctgctcctgttgtctgcagacacgttttggatacactcattcaattggccaaggtatttcccagccacttcacacagcagcggaccaaagaaacaaactgtgagagtgatcgggaaaggggcaataaggcctgtagcccatgctcctcacagtcctccagcagtggcatttgcacagacttctgggacttattggtaaaactggacaacatgaatgtcagccggaaaggcaagaactccgtgaagtcagtgccagtgagcgctggcggtgagggggaaacctctccatacagcctcgaggcctctccactggggcagctcatgaacatgttgtcacacccagtcatccgccggagctctctcttaactgagaaactcctcagactcctttctctcatctcaattgctctcccagaaaacaaggtgtcagaagcacaggctaattctggcagcggtgcttcctccaccaccactgccacctcaaccacatctaccaccaccaccactgccgcctccaccacgcccacaccccctactgcacccacccctgtcacttctgctccagccctggttgctgccacggctatttccaccattgtcgtagctgcttcgaccacagtgactacccccacgactgctaccactactgtttcaatttctcccactactaagggcagcaaatctccagcgaaggtgagtgatgggggcagcagcagtacagactttaagatggtgtcctctggcctcactgaaaaccagctacagctctctgtagaggtgttgacatcccactcttgttctgaggaaggcttagaggatgcagccaacgtactactgcagctctcccggggggactctgggacccgggacactgttctcaagctgctactgaatggagcccgccatctgggttataccctttgtaaacaaataggtaccctgctggccgagctgcgggaatacaacctcgagcagcagcggcgagcccaatgtgaaaccctctctcctgatggcctgcctgaggagcagccacagaccaccaagctgaagggcaaaatgcagagcaggtttgacatggctgagaatgtggtaattgtggcatctcagaagcgacctttgggtggccgggagctccagctgccttctatgtccatgttgacatccaagacatctacccagaagttcttcttgagggtactacaggtcatcatccagctccgggacgacacgcgccgggctaacaagaaagccaagcagacaggcaggctaggttcctccggtttaggctcagctagcagcatccaggcagctgttcggcagctggaggctgaggctgatgccattatacaaatggtacgtgagggtcaaagggcgcggagacagcaacaagcagcaacgtcggagtctagccagtcagaggcgtctgtccggagggaggaatcacccatggatgtggaccagccatctcccagtgctcaagatactcaatccattgcctccgatggaaccccacagggggagaaggaaaaggaagaaagaccacctgagttacccctgctcagcgagcagctgagtttggacgagctgtgggacatgcttggggagtgtctaaaggaactagaggaatcccatgaccagcatgcggtgctagtgctacagcctgctgtcgaggccttctttctggtccatgccacagagcgggagagcaagcctcctgtccgagacacccgtgagagccagctggcacacatcaaggacgagcctcctccactctcccctgcccccttaaccccagccacgccttcctcccttgacccattcttctcccgggagccctcatctatgcacatctcctcaagcctgccccctgacacacagaagttccttcgctttgcagagactcaccgcactgtgttaaaccagatcctacggcagtccacgacccaccttgctgatgggccttttgctgtcctggtagactacattcgtgtcctcgactttgatgtcaagcgcaaatatttccgccaagagctggagcgtttagatgaggggctccggaaagaagacatggctgtgcatgtccgtcgtgaccatgtgtttgaagactcctatcgtgagctgcatcgcaaatcccccgaagaaatgaagaatcgattgtatatagtatttgaaggagaagaagggcaggatgctggcgggctcctgcgggagtggtatatgatcatctctcgagagatgtttaaccctatgtatgccttgttccgtacctcacctggtgatcgagtcacctacaccatcaatccatcttcccactgcaaccccaaccacctcagctacttcaagtttgtcggacgcattgtggccaaagctgtatatgacaaccgtcttctggagtgctactttactcgatccttttacaaacacatcttgggcaagtcagtcagatatacagatatggagagtgaagattaccacttctaccaaggtctggtttatctgctggaaaatgatgtctccacactaggctatgacctcaccttcagcactgaggtccaagagtttggagtttgtgaagttcgtgacctcaaacccaatggggccaacatcttggtaacagaggagaataagaaggagtatgtacacctggtatgccagatgagaatgacaggagccatccgcaagcagttggcggctttcttagaaggcttctatgagatcattccaaagcgcctcatttccatcttcactgagcaggagttagagctgcttatatcaggactgcccaccattgacatcgatgatctgaaatccaacactgaataccacaagtaccagtccaactctattcagatccagtggttctggagagcattgcgttctttcgatcaagctgaccgtgccaagttcctccagtttgtcacgggtacttccaaggtacccctgcaaggctttgctgccctcgaaggcatgaatggcattcagaagtttcagatccatcgagatgacaggtccacagatcgcctgccttcagctcacacatgttttaatcagctggatctgcctgcctatgagagctttgagaagctccgccacatgctactgttggctatccaggagtgctctgaaggctttgggctggcctaataaggccctgcccaactccgtggggttttttttaccattgttggacctggggaggggggagttaaaaaaagaaccagaaagaaattgtcaaaaaccaataaatgaaatccaccaactcaccgtgtgtgtcccagctgccccatcttccccagcgcatacctgttcctcttctcattctctccccgccgcctgtttcctcaccttctctcccctttccatgccgtccatgatccccaccccatgtgttttaaaaaggcagtagcctttgcagggacctgtctgtcccaactgtttgaacagtgtgctcctcagattctgtgttcagaaggatttgctgcattgagacttgaaacctttggataggggaaaaaattatatatatatatatttttttgttctgtttgcatttcttaatttgtgcttggaatgtgttgatgtgcacagctaatgattcaatgcgagacaagattggcgtctgtgttgtggaggtttcaaataaagagcactcttcataactcaaaaaaaaaaaaaaaaaaaaaaaaaaaa

SEQ ID NO: 11786 - DNA, 4493 bp, Homo sapiens
atcgtctgccgctttggtgacttctgacagctctctccatggaaggaggcggcggccgcgatgagccttcagcctgccgggcaggggacgtgaacatggatgaccctaagaaggaagacattcttcttttggccgatgaaaaatttgacttcgatctttcattgtcttcttcgagtgcaaatgaagatgatgaagtcttcttcggaccctttggacataaagaaagatgtattgctgccagcttggaattaaataatccggttcccgaacagcctccgttgcccacatctgagagtccctttgcctggagccctctggccggggagaagttcgtggaggtgtacaaagaagctcacttactggctttacacattgagagcagcagccggaaccaggcagcccaagctgccaagcctgaagaccctcggagccagggcgtggaaagattcatacaggagtcaaaattaaaaataaacctctttgagaaagaaaaggaaatgaagaaaagccccacgtctcttaaaagggagacatactacctgtcagacagccccttgctggggccccctgtgggtgagcctcggctcttggcctcctccccggccctgcccagctctggtgcccaggcccgcctcacccgggcgccggggcctccgcactctgctcatgctttgcccagggaatcatgcactgctcatgctgcaagtcaggcagcgactcagaggaagcccgggaccaaattgctgctgcctcgagcggcctctgttagaggaagaagcatccctggggctgcggagaagcccaagaaagagattccagctagtccttccaggacaaaaatcccagctgagaaggaatcccaccgggatgttctccctgacaaacctgccccgggtgctgtcaatgtgccggccgccggaagccacttgggccagggcaagcgggcgatccctgttccaaacaagttggggctgaagaagaccctgttaaaagcacccggctctaccagcaatctcgcaaggaagtcctcctcggggcctgtttggagcggggcatccagtgcgtgcacatccccagcagtgggcaaagctaaatcaagtgaatttgcaagtattcctgcaaatagctcccggcctctgtcaaacatcagcaagtcaggcagaatgggacccgccatgctgcggccagctctgcctgcaggccctgtgggggcatcctcctggcaggccaagcgggtcgatgtttctgagctggcagcggagcagctcacggcacccccctcagcatcccccacccaaccccagactccggaaggtggcggccagtggctgaactccagttgcgcttggtcagaatcttctcaattgaataagactagaagtatcagacggcgagattcctgtctaaattccaagacaaaggttatgcctactcctacaaatcaatttaaaattcctaagttttctattggtgactccccggacagctcaacaccaaagctttcgcgggcacagcggccgcagtcgtgcacgtcagttggcagggtcactgtccacagcaccccggttagacgctcatctgggccagcaccacaaagcctgctgagcgcacggcgtgtgtcagccttgcccacacccgccagccggcgctgctctggccttccaccgatgacccccaaaacgatgcccagggccgtgggctctcccctgtgtgtgccagctcggagacgttcctctgagccccgcaagaactctgcaatgagaactgaaccaacaagggagagcaacagaaagacagattccaggctggtggatgtgtcccctgacaggggttctcctccttcccgtgtgcctcaggcacttaacttttctccagaggaaagcgattctactttctccaaaagtactgccacagaagtagctcgggaggaagccaagccgggtggagatgcagcccctagtgaggctcttcttgtagatatcaaactggaaccactcgcggtcactccagatgctgcaagccagcccctcattgaccttcctctcatcgacttctgcgataccccagaagcacacgtggctgtaggatctgaaagcaggcctctgatcgacctcatgacaaacactccagacatgaataaaaatgtggccaaaccttcaccggtggtgggacagctcatagacctgagctcccctctgatccagctgagccctgaggctgacaaggagaacgtggattccccactcctcaagttctaagccgaaccaaatcctttgccttgaaagaacagccctaaagtggttttcaaccctcagaaacaagctttaggctggtcgcagtggcttacacttgtaaccctagaacttgggaggctgaggtgggcggattacttgagcccaggagttcgggaccagcctgggaaatatagtgaaactcctgtccctacaaaaaatacaaaaattagccgggtgtggtagtgcatgcctgtagtcccagctacttgggaggctgaagtgggaggatggcctgagctcaaggagatgcaggctgcagtgggctgtgattgtgccactgcactccagcctgggcaccaatgtgagaacctgtcttggaaaaaaaaaaaaagaaacatgttttagtagaagttttatttgaaaaagaaaaataagcataaatatattcccagtgctggagagggtgggctgagggactggggccagcacggaccacccaaggcctctgcttcccgccgccaccctcctcgctgccattctctgggctggaatgtgaagcctcagtcactctaaatgaagaattttcttttgaatgttttgtatgtaaaatagcaagtggctatttttaaagttaagtttgtataaatagttagatattctagatttacattaaattgtaaaataaatggacttattgaagcatatcttgatttttaagcttatcttgattttcaaacatgcatagctatttttatcactctaatcagtaaggctactatctagactcgaatgctttcatacaagtgattttcaaaaattagtcaataaaaattgatgtcagtgcaggcccaggcccgcccccagatacactagtttctaggtctggggccagcctagtaattgttactaggcacacaggtgatgctgactcgatggcctgagacacaccccttgagaagaagctgctctggggagacgagggtatgagtggaaagaggatgggcgaggaggccgggcttacctggacactaaggtgatggacggcgtctgctgggcaggcctcggggaggacccctcagctttgctctcagcaggggcccgacaagctcagtgggcagtggcaggaactgagtgccactggaaagcccattccctttatttagaaaacgagctccaggaagccgctactttgtgtccatttctcttgaggaaacttaccaccttggttgagcggcttcatggcagacagcagcgagccagcggccggactctgtatttcggaccccactccagtgctccctgggtcataccaggatctgcctctgtccacaaagatgagggaaaatgatgactgtgctgtgctctctacttcctgcggttactgcgtgattctaaagctgccactcggaacagcgagtcctctgccgtcgagagcagggaggggtagggtggacaggcgatgccgtggaaagacgtctcggtggaaactgccatggtggaaaggtggcgcgcttctcacggctgagttgctgcgcctgcagacggaagctccccacaggcagagctgcttggatgtgtgagtcatgaagccagagaagccccgctccatgagcagtgactccccaggccctgtgacctccctcctgtcttgcagctcctcctggcaccagtccccagggctctcctgttggtagttcctgcttttcttcttggaaattcctcgtggacctcgagatctttaccctaaaatagttctgttgaatttcaccctggcaatgtaaattgatagcttatcttcacagatgccagacaatggacaactcaccatcagtcctctgctcacctgagacaaatgcatgtctgattgcttcctctgccctattgtttatgtgaaaatgcagattcactgagccagactaaggcatcagtgactgttcctctacctgcctctcacatggagattgtgtattcagtgaaaggctgatcaaagacccaaaggaatgcaacagtttatctcttatctacctatgacctgcgagctgcccaccacccccagttgttgcgcctttccagacagaaccagtgtacatcttacacgtattaattgatgtcctgtgtctccctaatatgtatcaaagcaagctgtgcctcgaccaccttgggcacatatcctcaggacatcatcctgaggctgtgtcactggcatgtccttaaccttggcaaaataaactttctaaattgaaaaaaaaaaaaaaaaaa

SEQ ID NO: 11787 - DNA, 1535 bp, Homo sapiens
gaggtggtaaccgtgatagtagcagctccggcggcagcaacagcgactacgagggatggcggcggctgcagcaggaactgcaacatcccagaggtttttccagagcttctcggatgccctaatcgacgaggacccccaggcggcgttagaggagctgactaaggctttggaacagaaaccagatgatgcacagtattattgtcaaagagcttattgtcacattcttcttgggaattactgtgttgctgttgctgatgcaaagaagtctctagaactcaatccaaataattccactgctatgctgagaaaaggaatatgtgaataccatgaaaaaaactatgctgctgccctagaaacttttacagaaggacaaaaattagatagtgcagatgctaatttcagtgtctggattaaaaggtgtcaagaagctcagaatggctcagaatctgaggtgtggactcatcagtcaaaaatcaagtatgactggtatcaaacagaatctcaagtagtcattacacttatgatcaagaatgttcagaagaatgatgtaaatgtggaattttcagaaaaagagttgtctgctttggttaaacttccttctggagaggattacaatttgaaactggaacttcttcatcctataataccagaacagagcacgtttaaagtactttcaacaaagattgaaattaaactgaaaaagccagaggctgtgagatgggaaaagctagaggggcaaggagatgtgcctacgccaaaacaattcgtagcagatgtaaagaacctatatccatcatcatctccttatacaagaaattgggataaattggttggtgagatcaaagaagaagaaaagaatgaaaagttggagggagatgcagctttaaacagattatttcagcagatctattcagatggttctgatgaagtgaaacgtgccatgaacaaatcctttatggagtcgggtggtacagttttgagtaccaactggtctgatgtaggtaaaaggaaagttgaaatcaatcctcctgatgatatggaatggaaaaagtactaaataaattaatttgctctcatcgtattgtgtatattcacctaatgcccattgtgtattgatattgcattcttgaattttgaacactgaatatctttttgaaagattatacttctttacctctttgtgctttagaaattattttccttcaagtgttcaagtctaatgaagaatgaagataacattttatcacttctgtccttaaagatttcagacatggtgaaactgaataaagcatgtcatttgctcctagatagattcattctatctagttgtggggatggagaaatctttaatggtatattttcggttattgccttatttttgatacagtattctgtcagtaatttattagacctggcagctttgggtgagcttagatttttcaccttcagtgttacattgtgtttgcttttaaaaactgcttttgaatggagttgtaaatacaatttttctatgaagatgtaaaaaaaaaaaaaaa

SEQ ID NO: 11788 - DNA, 6043 bp, Homo sapiens
tgaggaggagtcgtgactgccggccgccgggaccgaagcggaggtcggcggggggctgctgggaggcgcggcggtgtgcgcgggaactctgcgccgtggcgttccgctccatgactgtcgcgcggccgcgccggcggtgagggagccggagttcgcgccgccctctcacccctcccttcccccaccccacccccgggcgcctggcgctcgctccgggccgcggggcctagtgctgcgccgcggggccggccccagcagccgccagtcccaccgccgccgccgcgatggcgccgctcctgggccgcaagcccttcccgctggtgaagccgttgcccggagaggagccgctcttcaccatcccgcacactcaggaggccttccgcacccgggaagagtatgaagcccgcttggaaaggtacagtgagcgcatttggacgtgcaagagtactggaagcagtcagctaacacacaaggaagcctgggaggaagaacaggaagttgctgagcttttgaaggaggagtttcctgcctggtatgagaagcttgttctggaaatggttcaccataacacagcctccttagagaagttagtagatactgcttggttggagatcatgaccaaatatgctgtgggagaagagtgtgacttcgaggttgggaaggagaaaatgctcaaggtgaagattgtgaagattcatcctttggagaaagtggatgaagaggccactgagaagaaatctgatggtgcctgtgattctccatcaagtgacaaagagaactccagtcagattgctcaggaccatcagaagaaggagacagttgtgaaagaggatgaaggaaggagagagagtattaatgacagagcacgtagatcgccacgaaaacttcctacttcattaaaaaaaggagaaaggaaatgggctcctccaaaatttctgcctcacaaatatgatgtgaaactacaaaatgaagataagatcatcagtaacgtgccagcagacagcttgattcgtacagagcgcccaccaaataaggagatagttcgatactttatacggcataatgcattacgagctggtactggtgaaaatgcaccttgggtcgtagaagatgaattggtgaagaaatactctctgcccagcaagttcagtgactttttacttgatccatacaagtatatgactctcaacccttctactaagaggaagaatactggatccccagacaggaagccctcaaagaaatccaagacagacaactcttctcttagttcaccactaaatcctaagttatggtgtcacgtacacttgaagaagtcattgagtggctcgccactcaaagtgaagaactcaaagaattccaaatctcctgaagaacatctagaagaaatgatgaagatgatgtcgcccaataagctgcacactaactttcacattcctaaaaaaggcccacctgccaagaaaccagggaagcacagtgacaagcctttgaaggcaaagggcagaagcaaaggcatcctgaatggacagaaatccacagggaattccaaatctcccaaaaaaggactgaagactcctaaaaccaaaatgaagcagatgactttgttggatatggccaaaggcacgcagaagatgacacgagccccacggaattctgggggtacacctaggacctctagtaaacctcataaacatctgcctcctgcagccctacacctcattgcatactacaaagaaaacaaagacagggaggacaagaggagcgccctgtcctgtgttatctccaaaacagctcgtcttctctctagtgaagatagagctcgtctcccagaagaattgcgaagtcttgttcaaaaacgctatgaacttctagagcacaaaaagaggtgggcttctatgtctgaagaacaacggaaagaatatttgaaaaagaaacgggaggagctgaaaaagaagttgaaggaaaaagccaaagaacgaagagagaaagaaatgcttgagagattagaaaaacagaagcggtatgaggaccaagagttaactggcaaaaaccttccagcattcagattggtggatacccctgaagggctgcccaacacgctgtttggggatgtggccatggtggtggaattcttgagctgttattctgggctacttttaccagatgctcagtatcctattactgctgtgtcccttatggaagccttgagtgcagataagggtggctttttataccttaacagggtgttggtcatcctcttacagaccctcctacaagatgagatagcagaagactatggtgaattgggaatgaagctgtcggaaatccccttgactctgcattctgtttcagagctggtgcggctctgcttgcgcagatctgatgttcaggaggaaagcgagggctcagacacagatgacaataaagattcagctgcatttgaggataatgaggtacaagatgagttcctagaaaagctggagacctctgaattttttgagctgacgtcagaggagaagctacagatcttgacagcactgtgccaccggatcctcatgacatactcagtgcaagaccacatggagaccagacagcagatgtctgcagagttgtggaaggaacggcttgctgtgttgaaggaagaaaatgataagaagagagcagagaaacagaaacggaaagaaatggaagccaaaaataaagaaaatggaaaagttgagaatgggttaggcaaaactgataggaaaaaagaaattgtgaagtttgagccccaagtagatacagaagctgaagacatgattagtgctgtgaagagcagaaggttgcttgccattcaagctaagaaggaacgggaaatccaggaaagagaaatgaaagtgaaactggaacgccaagctgaagaagaacgaatacggaagcacaaagcagctgctgagaaagctttccaggaagggattgccaaggccaaactagtcatgcgcaggactcctattggcacagatcgaaaccataatagatactggctcttctcagatgaagttccaggattattcattgaaaaaggctgggtacatgacagcattgactaccgattcaaccatcactgcaaagaccacacagtctctggtgatgaggattactgtcctcgcagtaagaaagcaaacttaggtaaaaatgcaagcatgaacacacaacatggaacagcaacagaagttgctgtagagacaaccacacccaaacaaggacagaacctatggtttttatgtgatagtcaaaaggagctggatgagttgctaaactgtcttcaccctcagggaataagagaaagtcaacttaaagagagactagagaagaggtaccaggacattattcactctattcatctagcacggaagccaaatttgggtctaaaatcttgtgatggcaaccaggagcttttaaacttccttcgtagtgatctcattgaagttgcaacaaggttacaaaaaggaggacttggatatgtggaagaaacatcagaatttgaagcccgggtcatttcattagagaaattgaaggattttggtgagtgtgtgattgcccttcaggccagtgtcataaagaaatttctccaaggcttcatggctcccaagcaaaagagaagaaaactccaaagtgaagattcagcaaaaactgaggaagtggatgaagagaagaaaatggtagaggaagcaaaggttgcatctgcactggagaaatggaagacagcaatccgggaagctcagactttctccaggatgcacgtgctgcttgggatgcttgatgcctgtatcaagtgggatatgtccgcagaaaatgctaggtgcaaagtttgtcgaaagaaaggtgaggatgacaaattgatcttatgtgatgagtgtaataaagccttccacctgttttgtctgaggccggccctctatgaagtaccagatggtgagtggcagtgcccagcttgccagcccgctactgccaggcgcaactcccgtggcaggaactatactgaagagtctgcttctgaggacagtgaagatgatgagagtgatgaagaggaggaggaggaagaagaggaggaggaggaagaagattatgaggtggctggtttgcgattgagacctcgaaagaccatccggggcaagcacagcgtcatcccccctgcagcaaggtcaggccggcgcccgggtaagaagccacactctaccaggaggtctcagcccaaggcaccacctgtggatgatgctgaggtggatgagctggtgcttcagaccaagcggagctcccggaggcaaagcctggagctgcagaagtgtgaagagatcctccacaagatcgtgaagtaccgcttcagctggcccttcagggagcctgtgaccagagatgaggccgaggactactatgatgtgatcacgcaccccatggactttcagacagtgcagaacaaatgttcctgtgggagctaccgctctgtgcaggagtttcttactgacatgaagcaagtgtttaccaatgctgaggtttacaactgccgtggcagccatgtgctaagctgcatggtgaagacagaacagtgtctagtggctctgttgcataaacaccttcctggccacccatatgtccgcaggaagcgcaagaagtttcctgataggcttgctgaagatgaaggggacagtgagccagaggccgttggacagtccaggggacgaagacagaagaagtagagaggcagggccgtggtgacagtatcagtgagtgccatacagaattgtgtattcaccagcatcataaaacagttgtggtcttttgagttgatcttggcagagtaaagggacgtgtcctggagccattcctgaatctccccttctttgtgacagctcctcccacccccccaaaaaataaaaaaaccacaaaaaacaaaaaaacaaaactaaggcacttcacttagagactggagtcctgcttataatcatgcatataacctttactttgatggatctggccagaggggtgttggagcccagcccacccacataccagtcaagctcttaggggagcagaagaaaagcaggaagaatttaaatgtttaattttttttttaaattgacttttctagttattaaaagttgcttgtttcagcagtgatattgtataaagaacatcttgtaagatactcctgacatcttgctttagcacatgtacagtacagtttctatgataatgtgtttgctctaacttccctggcttctccttcagcccatccactctcctctagagcagttgggttggaggctcattgaggcaagcagcaacattggagggggagcagggcagtgctgtgtctgctgcctcccatgcccgttctgacctcagccttggaactcctcaagaacctgaagattccagtggtcagtgtcggtggggggtgggaggagagagcggcagagaagctctgagagccccttcccccacaacaaatctagctctagttgttatatttaggcaaaactttgtagtcttctttcccttttatgatggattttgataaaagtacaaaacagggtttttcttttttatcacctttgaatttggaaattttgagcacccaagctcttctgtacctatttaaagtccaccaaggggactgcagctcctagaacatgagaatcaagcctcttaattttaaactgcggaatgtggcctctgcttcctccgtcctcctgcccaaggacgacgaggattgctccagggctgctgggtagtttaccgtcccttctataggcatggagttggcactgacatcacagcttcataaccccaccaccgccagcttcccctgcctcctacatccagtctgttcttgttcatagtgagaatcctgtgttcccacttcagtgacacctgaattgtttgttgttgttttttttttttattgtcttcaaagaggaagggccccattaaagggtgaacttgtaataaattggaatttcaaataaacctcatgtacttgtgtttataaagaagaaaccaa

SEQ ID NO: 11789 - DNA, 6932 bp, Homo sapiens
ggcgatgagttcctgctgctgttcaccatggcctccaaccacccggccttcagcttccaccagaagcaggtgctgcgccaggagctcacgcagatccagagcagcctgaacggcggcgggggccacggcggcaagggcgcgcccgggccgggcggcgcgctgcccacttgcccagcctgccacaagatcactccaagaactgaggcccctgtcagcagtgtcagtaatagtttggagaatgccctgcacacatcagcacattccacggaggagtcgctgcccaagaggcccttaggaaaacacagcaaagtgagtgttgaaaagatagacctgaagggattatcacacacaaaaaatgacagaaatgttgaatgttcctttgaggtcttgtggtctgattcttcaataacatcagtaaccaaatcttcctctgaagtgacggaatttatttcaaagctatgtcagctctatcctgaagagaacttggagaaactcattccttgcttagctggtccggacgcattttatgtggagcgaaaccacgtggatctggactcaggcctgaggtacctggcctcattaccttctcacgtgttgaaaaatgaccatgtcaggaggtttctcagcacttcctctcccccacagcagcttcagagtccaagtcctggcaatccctccctttctaaagtaggtaccgtgatgggcgtgtctggaaggcctgtgtgtggagtggctggtatcccgtcctcgcagagcggagcccagcaccacgggcagcacccggccggctccgccgcccccttgcctcactgctcccatgcgggcagcgcgggctcagccctggcctaccggacccagatggacacatcacctgccatcctcatgccttccagtctgcagacccctcagacccaggagcagaatgggattctagactggcttaggaaactgcgtttgcacaagtattaccccgtctttaagcagctctccatggagaagtttttgagccttactgaagaagatctgaataaatttgagtctcttaccatgggggcaaagaagaagctcaagacccagctggagctggaaaaggagaagtcagagagacggtgcctgaacccctcggccccgccgctggtcaccagcagtggtgtggctcgagtgccccccaccagccacgtcgggcccgtgcagtcggggcggggcagccatgcagcagagctgcgggtggaagtggagcagccccatcaccagctgccccgggaaggcagttcctcggagtactccagctcctcctccagccccatgggggtacaggcccgggaagagagctccgacagcgctgaggagaatgacagacgtgtggagattcacttggagagctctgacaaggagaagccggtgatgctgctgaatcacttcacttccagttccgccagacccacggcccaggttctccctgtgcagaatgaggccagctccaatccatcaggccaccaccccctgcccccgcagatgctgagcgcagcctcacacatcacacccatccgcatgctgaattccgtgcacaagccggaaagagggagcgcggacatgaagctcctctcgtcttctgtgcactcacttttgtctctagaagaaaggaataaaggatctggaccaagaagcagcatgaaagtggacaagagctttggcagcgccatgatggacgtgctgcccgcgtccgcaccccaccagcctgtgcaggtcctctctgggctttcggagagcagctccatgtcacccacagtctcctttggtccccggaccaaagtcgtgcatgcatccacgctggacagggtgctgaagacagcacagcaaccggccctggtcgtggagaccagcacggccgccacggggacgcccagcacagtcctccacgccgcccgtccgcccatcaaactgctgctgtcgtcatctgttcctgctgattctgccatttctgggcaaacttcctgtcctaataatgtgcaaataagtgtgccccctgcaataataaacccccggactgctctgtacacagccaacaccaaagttgccttttctgcaatgagcagtatgccagtgggccccctgcagggtggcttctgtgcaaacagcaacactgcctctcccagcagccacccctccacgtcctttgccaacatggccacgttgcccagctgcccagcccccagctccagcccggcgctgtcctccgtccctgaaagcagtttctatagcagcagtggcggtggcggctccacaggaaacattcctgcctcgaatccgaaccaccaccaccaccaccaccatcagcagcccccggcacccccgcagcccgccccacccccgccaggctgcattgtgtgcacgtcctgtggctgcagcggcagctgcggctcgagtggcctgactgtcagctacgccaactacttccagcacccgttctccggtccgtccgtgttcaccttccccttcttgcccttcagtcccatgtgcagcagcggctacgtcagcgcccagcagtacggcggcggctccaccttccccgtcgtgcacgccccttacagcagcagcgggaccccagaccctgtcctgagtgggcagtccacgtttgccgtgccacccatgcagaacttcatggcagggacagcaggggtgtaccagacccaaggactggtgggcagtagcaatggttccagtcacaaaaagagcgggaacctatcttgttacaactgcggggccactggtcaccgcgcccaggactgcaaacagccgtccatggacttcaaccggccaggtacttttaggttgaaatacgcccctccagcagaaagtctggactccacagattgatatttttctctggcaacagaacgttattaagccatggagacataaggaaaattaaatacaaaactgagaagtctagttgctgttgagcttaatctttttaatccaaaggtgctttacttttcctagactggatagaaaatctagcgtagaagtgcatcaaactcgatttattgccaaaaccctagattggagcttggtgtcagaactcgcctagtgggcatctctgtggctggtgagatcggccacctccacttttggttgcagtgcagagacgccatgtctcccgaagagcattgccatcactggccctcctaggctcacacgtcaattccagggcagctacacgtggtctgaatcgagaaccgagcttggagttctccaagtggagttccacccgccggactcctgacacccctgggctagggaaaatgtcgactttgttttgttctgttcctaaagtgattagcactaatctctgggatttttaaggattgcactacagaagaatgtaccctgatgtaaatctctgcggttctgggagccaaactcctctgagaacagtcagtgcaagagactccaataatccatattgaaagagtcagcaccagcagaggctactcgacttaggacgcaacagaggttttagtatttccttccctcctccaagcacttgtagcagtttcaggtttttaatttttttctgcaaataaatctaaactacgttattaaatagaaatagtttactcgcaacaacttaatttctaagggtccaagtcccagagaatccatagtcgtcaaagctttgagagtatctttcttcccagccagtcagtggctttgagccctatcttccactacaaatgacctctcgaggggggacggcgacagcgcggctctgtgagtggctgtgaggatgctgcacgtcctcagcagagtttgcaagttgctttatctcccacgggctccccaagaacctccaaccccgaggcttatcgctagcggattcacacctgagacagacatttcaacaatgatacagtcctgtcatttatcagcaaaagattgggaattttctcctgtcaacttcttttgtattaggctgtgtattgatagttaattccgttaaaaattacttggaaaacagtgggaagtggtaggactctggaagaggccacacacccgagagctgcgagatctgtgcaagtctggttttggttaggtagtaataaaagtcctcactgtagatctctaaatttcaacccacggaaatgaaagccttttgtctgaaatttacggacttaaatcttcaaggttaaagggaattttctgctcaaataatactcttatcgaaaatgctaaagtcttcaatgttaaaatactgattggtaaaatcttgcagttgggattttgcagttggatatttattttaaaaaaaattataatattcagactattcttaaaatgggacaatcagcctcatgaaaaattgatgtaaatcagaagaataccctagaatgaggccttgtgatgtgagcgttcaatttgaagagcagttcctaacttcatagaaactaaagcagaaagttgttacattttttttatgacaggcttttagtagaattttttagttttattttagttgaattttatttctatgcaatgcagaattaacagacctcttctcctcatggtacacagtattacagtgttgaagtaatggtgatgcttattacaacagctatttaggggaatgttacgttgatctcttaaattgtaaacactacaaaatgtcaaaataatgagaactgacacaactttgccttaaagagtactagactggaccttctcatattacgtttaaggaagacttagagtgttcattgatgtttacgattttaatatttctgaaggccattacagtggcctggatatgtgctgaaagccaaacttttaaattttttggtttttttaagcaaagaaatattttaaataaatcctatttcaacactgaaattgttgaaaaccgtctcataacaaaaggaaaaaacattggaatttttgttttagtggtcagtataggggaatgaaagcgtctgttgttacccacgtaactattttgataagtattagaggttaaccttaaatccagcaaaacattaaaacagaaacttttcaacttggagcctgccattcagcgttgaggtagatgagttccgacactgtcacggctgtgttcccagcagcgaaggcctctgcggagctgccagtcgtcttgaacgtgcatgggcggcgtgtgacatctccagggaggccgtccgaagtcgagaatcgtcagctgtaagtaggagctacacagcgcagagaaaatggaaccacccatccgtgaggcctctttccggagggagccgcacacttggacttgagagtttgccagcagcgagctcggatgcatctctccaaaagccaccaaggtcggcgcgtctgaagagcgttttgcggtcatcagacttcctcatctgaaaacacagaacatactgaccctttcaagtacttagtcattttcctgaaagtgtggtctgtttcagaatgctgtggcaaccaggtaggtgtggcactggccatgtgccacgtctttgccctttgtagtctgtcagatattaaagtttctaaccctgtttttttaatctccaagaatggggaaagtggaatgtagagatggaagcagaacgtgatgtttggatacaacagctatttaatccttttttattttttaagcaaaacactcagttttctaccttattttctaatgttgatttcatggtaatactgacagttggaagtgtttaacataaaaactcattgctaaagagcactgaggaaatgggagctagcgcacttgtaataaaaataaagacaaaatattttcttgaatgcatatatgtgattgggtattttaaaaaccagtatcatctgtcatctccaaaagattacaggagtcagcttgttaatacagtagtgttagtaggttctgtatttttaattcagtacttagaattctaggtcctttattgcccaaagtcagcacagttagtttataccacagactctgtcttggggcacagtagtggggcggggtagtgactttgcctaaacatcacccagctggaacagaggctgagcggggctttaggcacttgccagatgggaactgggttgcaccctccttgctccctgtcattttcttgtcactcttcctgcttcccagtgttttattttatgccttgctcgttgtacatcatgatgactgatggtcttcaaggttgtgaggaaagccgtctccctgcttgactcgactgctgtcccagaggagagtcctgtgcgacctgagcgggggtggctgccatttccagcatgcaggtgacttccaaagaatgagtcaggtggcactgaaagccatgggttctgaagaggcgaatttgttgaaaagtcccaagggtctgaatgaaagcatctttaatcaacactcaacactcgcaatattctagaaaaccatatactgtgctggttgaggccaaaggttaacattgctccactgttcaccaaggaagggggcagtggccatccgccgcggcctcacgtgcgttgtaacaagccctcatcacatgtgtgagtcttacgtgcacaaaaagagaaggctttggtactgaaactggacaccttgtgtactcgataccttcacagcttctattggacatattttctttttaggaatgaaggaaaattctcccatttttgagccattcttttgtcaattctacaaaattgcatgtaactttataaatatttttaaaagatatagttttgtaaatatttaatattccgctaatttgattttgaattgtaaatgtcaagtattctgtttttggggtttttatgttttattatactttgttaaaaaggacaaattgtacatttttagaatgtttttatgagtaaatttaatgtactgaaaataaaaattttaaaaaaggctgaaaaaaaaaaaaaaaaaaaaa

SEQ ID NO: 11790 - DNA, 6628 bp, Homo sapiens
gcccaatgaataacagggtcgacccagagtggcggccgcgtccaccaattcgcggacggcgagggcggagcgtccgcaacgagcctctgacgccgggcggcgtgtgacgcagtcgggccctctgcgcgctgcgcccgaagcggcggtcggtggcaggggtggtagcggcggcggcgacggtttcgtgggggccgcgcgctgctctgtgagcggcgggtggcagcaggggactcctgacacttccccttccccaccgaaccgcgctttctgaaacaaagactcattttgaagatgtttaacaaatcatttggaacaccctttgggggtggcacaggtggctttggcacaacttcaacatttggacagaatactggctttggcactactagtggaggggcatttggaacatctgcatttggttctagcaacaatactggaggcctctttggaaattcacagactaaaccaggaggattgtttggaaccagttcatttagccagccagctacctccacaagcactggctttgggtttggtacgtcaacaggaacagcaaataccttgtttggaactgcaagcacagggaccagtctcttctcatcccaaaacaatgcctttgcacaaaataaaccaactggctttggcaattttggaaccagtactagcagtggaggactctttggaaccacaaataccacctctaatccttttggcagcacatctggctccctctttgggccaagtagttttacagctgctcctactgggactactattaaatttaaccctccaactggtacagatactatggtcaaagctggagttagcactaacataagtaccaagcaccagtgtattactgctatgaaagaatatgaaagcaagtcactagaggaacttcgtttagaggattatcaggctaacaggaagggcccacagaaccaggtgggagcaggtaccacaactggcttgtttgggtcttctccagccacttccagcgcaacaggactcttcagctcctccaccactaattcaggctttgcatatggtcagaacaaaactgcctttggaactagtacaactggatttggaacaaatccaggtggtctctttggccaacagaatcagcagactaccagcctcttcagcaaaccatttggccaggctacaaccacccagaacactggcttttcctttggtaataccagcaccataggacagccaagcaccaacaccatgggattatttggagtaacccaagcctcacagcctggaggtctttttgggacagctacaaacaccagcactgggacagcatttggaacaggaacaggtctctttgggcagaccaatactggatttggtgctgttggttcgaccctgtttggcaataacaagcttactacatttggaagcagcacaaccagtgcaccttcatttggtacaaccagtggcgggctctttggttttggcacaaataccagtgggaatagtatttttggaagtaaaccagcacctgggactcttggaactgggcttggtgcaggatttggaacagctcttggtgctggacaggcatctttgtttgggaacaaccaacctaagattggagggcctcttggtacaggagcctttggggcccctggatttaatactacgacagccactttgggctttggagccccccaggccccagtagctttgacagatccaaatgcttctgctgcccagcaggctgttctccagcagcacatcaatagtctaacatactcaccttttggagactctcctctcttccggaatccgatgtcagaccctaagaagaaggaagagagattgaaaccaacaaatccagcagcccagaaggctcttactacacctactcattataaactgacaccccgccctgccactagagtccggccaaaggctttacaaacaacaggcacagccaagtcacatctctttgatgggctggatgacgatgaaccatccctagccaatggagcattcatgcccaagaagagcattaagaagttggttttgaagaaccttaataatagcaatctcttttctcctgttaatcgtgattcagaaaatctagcttcaccatctgaatatccagaaaatggagagagatttagtttcctaagcaaacctgttgatgagaatcaccagcaggatggagatgaagattcccttgtttcacatttttatactaaccctattgccaaacctattcctcaaaccccagaaagtgctggaaataaacacagcaacagcaacagtgtggatgataccattgttgcattaaacatgcgtgctgctttgcgaaatgggctggaaggaagcagtgaagaaacgtcttttcatgatgagtcacttcaggatgaccgagaagaaatagaaaataattcttaccatatgcacccagcaggtattattctcactaaggttggttactatactattccatctatggatgaccttgctaaaattaccaatgaaaaaggagagtgcattgtctctgatttcactattggtcggaaaggttatggttcaatctattttgaaggagatgtgaatttgacaaatctaaatttggatgatattgtgcatatccggaggaaagaagtagttgtctacttagatgataaccaaaaaccacctgtgggtgaagggctaaataggaaggctgaagttacattggatggagtttggccaacagataaaacatctcgttgtttaataaagagcccagatcgccttgctgatatcaactatgaaggaagattggaagcagtttcaaggaaacagggagctcaattcaaagaataccggcctgaaactggttcttgggtgtttaaggtctcccatttttctaagtatggccttcaggattctgatgaagaggaggaggagcatccgtctaaaactagtacaaagaagttgaagactgctcctttgcctcctgcaagccagactacgcccttgcagatggctcttaatggcaaacctgcacctccacctcagagccagagcccagaggtggagcagttagggagggttgtggaactggacagtgacatggtagatatcacccaggagccagttttggataccatgttagaagagagcatgcctgaggatcaggaacctgtgtctgcctcaacacatattgcatcttcactgggaattaatccacatgtcttacagatcatgaaagcatcattgcttactgatgaagaagatgtagatatggcactggatcaacgcttcagtcgcctgccttccaaagcagatacttctcaagaaatctgttctcccagactccccatttcagcatcccactcgtcgaaaactcgttcactagttggtgggttactacaatcaaaatttacaagtggagcttttctttcaccaagtgtctctgtgcaagaatgtcgtactcccagagcagcatctttaatgaatatcccatccacatcctcttggtctgtccctccacccctgacttctgtgttcacaatgcccagcccagcccctgaggttccgttgaaaacagtgggtacacgtaggcaactaggcctagtccctcgtgaaaagtctgtcacctatggcaagggaaaactcttgatggacatggccctattcatgggacgctcatttcgtgttggttggggccccaactggactcttgctaatagtggagaacagctgaatggctctcatgaactagaaaatcatcagattgccgattccatggagtttggattcctgcccaatccagtagctgttaaacccctaactgagtccccattcaaagttcacttagaaaaactcagtttgagacaaagaaagccagatgaagacatgaaattatatcagacacctctggagctcaaattaaaacacagcactgtccatgtggatgaactgtgtcctctcattgtccccaatctgggagttgctgtcattcatgactatgcagattgggttaaagaagcatcaggagacttaccagaagcacaaattgtgaagcactggagcctgacatggacactatgtgaagccctatggggccacctgaaggagcttgacagccagctaaatgaaccccgtgaatacattcaaattctggagcgaagaagagctttctcccgctggctatcctgtactgccacacctcagattgaagaggaagtctccttaacccaaaaaaacagccctgtggaggctgtattcagctacctcacaggcaaaaggatcagtgaggcctgctctctggcccagcagtcaggggatcatcgtcttgctcttcttttatctcagtttgtgggtagccagtcagtccgggagctgctcaccatgcagttggtggactggcatcagctccaagcagactccttcatccaggatgagagactgcgcatctttgctctgttggctggaaaaccggtgtggcagctctcagaaaagaagcaaataaacgtgtgctcccagttggattggaaacgctccctggctatccatctttggtatttgcttccaccaacagcctccatttctagggcgctcagcatgtatgaagaagcatttcagaatacctctgacagtgacagatatgcctgctccccacttccttcgtatctggagggttctggctgtgtgatagcggaggagcaaaactcacagacaccacttcgagatgtctgctttcaccttctaaaactctacagtgacagcatacgtgagaaggctgttcgagagctgcttacccggcactgccagctgttggagacccctgaatcttgggctaaagagactttccttacccagaagctccgtgtacctgccaaatggatccacgaggccaaagctgtgcgagcacacatggaatctgacaagcacttagaggccctttgcttatttaaggctgagcactggaaccgctgccacaagctcatcatccgacacttagcttctgatgccatcattaatgagaactatgactacctgaaggggttcttggaagacctggcacctccagagcgcagcagcctaattcaggattgggaaacatctgggcttgtttacctggactatattagagtcattgaaatgctccgccatatacagcaggtggattgctcaggtaatgacctggagcagttacacatcaaagtgacttcactgtgcagtcggatagagcagattcagtgttacagtgctaaagatcgcctggctcagtcagacatggccaaacgtgtagccaacctgctgcgcgtggtgctgagtctgcatcatcctcctgatagaacctccgactcaacaccagaccctcagcgagtccctttgcgcctcttggctccccacattggccggcttcccatgcctgaggactatgccatggacgaactgcgcagccttacccagtcctatctgcgagaactggctgttgggagcctgtgagccccaggcactttgcatcacagtcacatgcccattcacaccacacagaggttccctgccttgtttggattggcactgtttgccattctctgggttggctgtggcatctaccctccctccctgctgccagaagcagcatcctccacttgttcagggcttttcttaatactgaacgtagcataagggcttctggaacccagaagaggagacagtttaccatcctcaagatcattcagtgtttttcctttaaaaaaatggtcaataaagctcctttggcagaatcccccaaagaaccagggtattctttttccatccctagccattctggatcttgtgaccctccatgccaaccagcttccctactcctaccctggcccttttatactaggactccttaggaggagtgagacaggtgataatggatccttaacagatgaactatccacagaaggaagagggatccgtctcttaagtaattggttagttaacactgaattttggaggcaaaggagggttggcctgagttaggaaacaaaatgggatctttctgacacacttagggcagaagtgaatgcctgtcacggagggattgatcttcagggctgtttttgttcctgcctttagagttccatgaacaccatacctttgctactactatgtgcaggaacccttggtcacatgtgacatgtctgtgggaagctcccagagtttggtttggtccctggttttcagtcttgctgagactctgtctggatttgcctgcagagtttggataaaaaatggcaggttgggtaaccctccctgttcatcccatgttagctccaaagcatttcccaccctccatctaccccttccagaagcaaaaacaaaccatgactgaggcaggcatggagttgggcgttaggggcaggcagagggcctttgctacactgctgacagctatagggagccccaggtaatggcatgagatagctggtgttagggctatctcaggcaatatggccacacctgggtctttatgcatgaagataatgtaaaggtttttattaaaaaatatatatatgtataaataaatgatctagatattttcctctttttctgaagctactttcttaaaaaataaataaaatgtttatagcattcctggtaaaaaaaa

SEQ ID NO: 11791 - DNA, 3829 bp, Homo sapiens
gcccaatgaataacagggtcgacccagagtggcggccgcgtccaccaattcgcggacggcgagggcggagcgtccgcaacgagcctctgacgccgggcggcgtgtgacgcagtcgggccctctgcgcgctgcgcccgaagcggcggtcggtggcaggggtggtagcggcggcggcgacggtttcgtgggggccgcgcgctgctctgtgagcggcgggtggcagcaggggactcctgacacttccccttccccaccgaaccgcgctttctgaaacaaagactcattttgaagatgtttaacaaatcatttggaacaccctttgggggtggcacaggtggctttggcacaacttcaacatttggacagaatactggctttggcactactagtggaggggcatttggaacatctgcatttggttctagcaacaatactggaggcctctttggaaattcacagactaaaccaggaggattgtttggaaccagttcatttagccagccagctacctccacaagcactggctttgggtttggtacgtcaacaggaacagcaaataccttgtttggaactgcaagcacagggaccagtctcttctcatcccaaaacaatgcctttgcacaaaataaaccaactggctttggcaattttggaaccagtactagcagtggaggactctttggaaccacaaataccacctctaatccttttggcagcacatctggctccctctttgggccaagtagttttacagctgctcctactgggactactattaaatttaaccctccaactggtacagatactatggtcaaagctggagttagcactaacataagtaccaagcaccagtgtattactgctatgaaagaatatgaaagcaagtcactagaggaacttcgtttagaggattatcaggctaacaggaagggcccacagaaccaggtgggagcaggtaccacaactggcttgtttgggtcttctccagccacttccagcgcaacaggactcttcagctcctccaccactaattcaggctttgcatatggtcagaacaaaactgcctttggaactagtacaactggatttggaacaaatccaggtggtctctttggccaacagaatcagcagactaccagcctcttcagcaaaccatttggccaggctacaaccacccagaacactggcttttcctttggtaataccagcaccataggacagccaagcaccaacaccatgggattatttggagtaacccaagcctcacagcctggaggtctttttgggacagctacaaacaccagcactgggacagcatttggaacaggaacaggtctctttgggcagaccaatactggatttggtgctgttggttcgaccctgtttggcaataacaagcttactacatttggaagcagcacaaccagtgcaccttcatttggtacaaccagtggcgggctctttggtaacaaaccaaccctgactttaggaaccaatacaaacacttctaattttggttttggcacaaataccagtgggaatagtatttttggaagtaaaccagcacctgggactcttggaactgggcttggtgcaggatttggaacagctcttggtgctggacaggcatctttgtttgggaacaaccaacctaagattggagggcctcttggtacaggagcctttggggcccctggatttaatactacgacagccactttgggctttggagccccccaggccccagtagctttgacagatccaaatgcttctgctgcccagcaggctgttctccagcagcacatcaatagtctaacatactcaccttttggagactctcctctcttccggaatccgatgtcagaccctaagaagaaggaagagagattgaaaccaacaaatccagcagcccagaaggctcttactacacctactcattataaactgacaccccgccctgccactagagtccggccaaaggctttacaaacaacaggcacagccaagtcacatctctttgatgggctggatgacgatgaaccatccctagccaatggagcattcatgcccaagaagagcattaagaagttggttttgaagaaccttaataatagcaatctcttttctcctgttaatcgtgattcagaaaatctagcttcaccatctgaatatccagaaaatggagagagatttagtttcctaagcaaacctgttgatgagaatcaccagcaggatggagatgaagattcccttgtttcacatttttatactaaccctattgccaaacctattcctcaaaccccagaaagtgctggaaataaacacagcaacagcaacagtgtggatgataccattgttgcattaaacatgcgtgctgctttgcgaaatgggctggaaggaagcagtgaagaaacgtcttttcatgatgagtcacttcaggatgaccgagaagaaatagaaaataattcttaccatatgcacccagcaggtattattctcactaaggttggttactatactattccatctatggatgaccttgctaaaattaccaatgaaaaaggagagtgcattgtctctgatttcactattggtcggaaaggttatggttcaatctattttgaaggagatgtgaatttgacaaatctaaatttggatgatattgtgcatatccggaggaaagaagtagttgtctacttagatgataaccaaaaaccacctgtgggtgaagggctaaataggaaggctgaagttacattggatggagtttggccaacagataaaacatctcgttgtttaataaagagcccagatcgccttgctgatatcaactatgaaggaagattggaagcagtttcaaggaaacagggagctcaattcaaagaataccggcctgaaactggttcttgggtgtttaaggtctcccatttttctaagtatggccttcaggattctgatgaagaggaggaggagcatccgtctaaaactagtacaaagaagttgaagactgctcctttgcctcctgcaagccagactacgcccttgcagatggctcttaatggcaaacctgcacctccacctcaggtagagaaaaaaggacagtgaatttgaatggaatccgtgataccgaagttgaaagcaagtcattcagctaatacaaagctgttttatgacccttggaactttgaagagtacaaacattggcaatcacgttgaaacaagtgcaagggagggcgtgaggtcttgcaggcatctgtctttttactggagagatttaaagaattctcttgctgtttggattattcctctacagattgtcatttttaaaccctttgttctctctcatttggacttgctgaattctctgctcagtgattaacttaagatttgctcatgtgggttcatgcacagtaaattctgcctttattgactacctgatgtgcagtttaatctttttctttacctccatggttttttaaaagttaaattagctttctgaaagggtttttaatctccatttttttaaagttgtttgcttatacttcgggtaaccttgatatttgtattttaatagtacataatctttatgaaaaatagtttgggaatgtaaatgaattattatttggcttggggagattagggcctacattgtttatcgcaattacttgtatcattgatacgggatttctttgtaaagcatcctctacctctcagctgctgaaagctagacctttggtattttccatgctataattcttatggctgctgaaatgtgtggtttttatgatttattaaataatctcttaggaggcatttctgaaaaaaaaaa

SEQ ID NO: 11792 - DNA, 3778 bp, Homo sapiens
gcccaatgaataacagggtcgacccagagtggcggccgcgtccaccaattcgcggacggcgagggcggagcgtccgcaacgagcctctgacgccgggcggcgtgtgacgcagtcgggccctctgcgcgctgcgcccgaagcggcggtcggtggcaggggtggtagcggcggcggcgacggtttcgtgggggccgcgcgctgctctgtgagcggcgggtggcagcaggggactcctgacacttccccttccccaccgaaccgcgctttctgaaacaaagactcattttgaagatgtttaacaaatcatttggaacaccctttgggggtggcacaggtggctttggcacaacttcaacatttggacagaatactggctttggcactactagtggaggggcatttggaacatctgcatttggttctagcaacaatactggaggcctctttggaaattcacagactaaaccaggaggattgtttggaaccagttcatttagccagccagctacctccacaagcactggctttgggtttggtacgtcaacaggaacagcaaataccttgtttggaactgcaagcacagggaccagtctcttctcatcccaaaacaatgcctttgcacaaaataaaccaactggctttggcaattttggaaccagtactagcagtggaggactctttggaaccacaaataccacctctaatccttttggcagcacatctggctccctctttgggccaagtagttttacagctgctcctactgggactactattaaatttaaccctccaactggtacagatactatggtcaaagctggagttagcactaacataagtaccaagcaccagtgtattactgctatgaaagaatatgaaagcaagtcactagaggaacttcgtttagaggattatcaggctaacaggaagggcccacagaaccaggtgggagcaggtaccacaactggcttgtttgggtcttctccagccacttccagcgcaacaggactcttcagctcctccaccactaattcaggctttgcatatggtcagaacaaaactgcctttggaactagtacaactggatttggaacaaatccaggtggtctctttggccaacagaatcagcagactaccagcctcttcagcaaaccatttggccaggctacaaccacccagaacactggcttttcctttggtaataccagcaccataggacagccaagcaccaacaccatgggattatttggagtaacccaagcctcacagcctggaggtctttttgggacagctacaaacaccagcactgggacagcatttggaacaggaacaggtctctttgggcagaccaatactggatttggtgctgttggttcgaccctgtttggcaataacaagcttactacatttggaagcagcacaaccagtgcaccttcatttggtacaaccagtggcgggctctttggttttggcacaaataccagtgggaatagtatttttggaagtaaaccagcacctgggactcttggaactgggcttggtgcaggatttggaacagctcttggtgctggacaggcatctttgtttgggaacaaccaacctaagattggagggcctcttggtacaggagcctttggggcccctggatttaatactacgacagccactttgggctttggagccccccaggccccagtagctttgacagatccaaatgcttctgctgcccagcaggctgttctccagcagcacatcaatagtctaacatactcaccttttggagactctcctctcttccggaatccgatgtcagaccctaagaagaaggaagagagattgaaaccaacaaatccagcagcccagaaggctcttactacacctactcattataaactgacaccccgccctgccactagagtccggccaaaggctttacaaacaacaggcacagccaagtcacatctctttgatgggctggatgacgatgaaccatccctagccaatggagcattcatgcccaagaagagcattaagaagttggttttgaagaaccttaataatagcaatctcttttctcctgttaatcgtgattcagaaaatctagcttcaccatctgaatatccagaaaatggagagagatttagtttcctaagcaaacctgttgatgagaatcaccagcaggatggagatgaagattcccttgtttcacatttttatactaaccctattgccaaacctattcctcaaaccccagaaagtgctggaaataaacacagcaacagcaacagtgtggatgataccattgttgcattaaacatgcgtgctgctttgcgaaatgggctggaaggaagcagtgaagaaacgtcttttcatgatgagtcacttcaggatgaccgagaagaaatagaaaataattcttaccatatgcacccagcaggtattattctcactaaggttggttactatactattccatctatggatgaccttgctaaaattaccaatgaaaaaggagagtgcattgtctctgatttcactattggtcggaaaggttatggttcaatctattttgaaggagatgtgaatttgacaaatctaaatttggatgatattgtgcatatccggaggaaagaagtagttgtctacttagatgataaccaaaaaccacctgtgggtgaagggctaaataggaaggctgaagttacattggatggagtttggccaacagataaaacatctcgttgtttaataaagagcccagatcgccttgctgatatcaactatgaaggaagattggaagcagtttcaaggaaacagggagctcaattcaaagaataccggcctgaaactggttcttgggtgtttaaggtctcccatttttctaagtatggccttcaggattctgatgaagaggaggaggagcatccgtctaaaactagtacaaagaagttgaagactgctcctttgcctcctgcaagccagactacgcccttgcagatggctcttaatggcaaacctgcacctccacctcaggtagagaaaaaaggacagtgaatttgaatggaatccgtgataccgaagttgaaagcaagtcattcagctaatacaaagctgttttatgacccttggaactttgaagagtacaaacattggcaatcacgttgaaacaagtgcaagggagggcgtgaggtcttgcaggcatctgtctttttactggagagatttaaagaattctcttgctgtttggattattcctctacagattgtcatttttaaaccctttgttctctctcatttggacttgctgaattctctgctcagtgattaacttaagatttgctcatgtgggttcatgcacagtaaattctgcctttattgactacctgatgtgcagtttaatctttttctttacctccatggttttttaaaagttaaattagctttctgaaagggtttttaatctccatttttttaaagttgtttgcttatacttcgggtaaccttgatatttgtattttaatagtacataatctttatgaaaaatagtttgggaatgtaaatgaattattatttggcttggggagattagggcctacattgtttatcgcaattacttgtatcattgatacgggatttctttgtaaagcatcctctacctctcagctgctgaaagctagacctttggtattttccatgctataattcttatggctgctgaaatgtgtggtttttatgatttattaaataatctcttaggaggcatttctgaaaaaaaaaa

SEQ ID NO: 11793 - DNA, 6850 bp, Homo sapiens
gcccaatgaataacagggtcgacccagagtggcggccgcgtccaccaattcgcggacggcgagggcggagcgtccgcaacgagcctctgacgccgggcggcgtgtgacgcagtcgggccctctgcgcgctgcgcccgaagcggcggtcggtggcaggggtggtagcggcggcggcgacggtttcgtgggggccgcgcgctgctctgtgagcggcgggtggcagcaggggactcctgacacttccccttccccaccgaaccgcgctttctgaaacaaagactcattttgaagatgtttaacaaatcatttggaacaccctttgggggtggcacaggtggctttggcacaacttcaacatttggacagaatactggctttggcactactagtggaggggcatttggaacatctgcatttggttctagcaacaatactggaggcctctttggaaattcacagactaaaccaggaggattgtttggaaccagttcatttagccagccagctacctccacaagcactggctttgggtttggtacgtcaacaggaacagcaaataccttgtttggaactgcaagcacagggaccagtctcttctcatcccaaaacaatgcctttgcacaaaataaaccaactggctttggcaattttggaaccagtactagcagtggaggactctttggaaccacaaataccacctctaatccttttggcagcacatctggctccctctttgggccaagtagttttacagctgctcctactgggactactattaaatttaaccctccaactggtacagatactatggtcaaagctggagttagcactaacataagtaccaagcaccagtgtattactgctatgaaagaatatgaaagcaagtcactagaggaacttcgtttagaggattatcaggctaacaggaagggcccacagaaccaggtgggagcaggtaccacaactggcttgtttgggtcttctccagccacttccagcgcaacaggactcttcagctcctccaccactaattcaggctttgcatatggtcagaacaaaactgcctttggaactagtacaactggatttggaacaaatccaggtggtctctttggccaacagaatcagcagactaccagcctcttcagcaaaccatttggccaggctacaaccacccagaacactggcttttcctttggtaataccagcaccataggacagccaagcaccaacaccatgggattatttggagtaacccaagcctcacagcctggaggtctttttgggacagctacaaacaccagcactgggacagcatttggaacaggaacaggtctctttgggcagaccaatactggatttggtgctgttggttcgaccctgtttggcaataacaagcttactacatttggaagcagcacaaccagtgcaccttcatttggtacaaccagtggcgggctctttggttttggcacaaataccagtgggaatagtatttttggaagtaaaccagcacctgggactcttggaactgggcttggtgcaggatttggaacagctcttggtgctggacaggcatctttgtttgggaacaaccaacctaagattggagggcctcttggtacaggagcctttggggcccctggatttaatactacgacagccactttgggctttggagccccccaggccccagtagctttgacagatccaaatgcttctgctgcccagcaggctgttctccagcagcacatcaatagtctaacatactcaccttttggagactctcctctcttccggaatccgatgtcagaccctaagaagaaggaagagagattgaaaccaacaaatccagcagcccagaaggctcttactacacctactcattataaactgacaccccgccctgccactagagtccggccaaaggctttacaaacaacaggcacagccaagtcacatctctttgatgggctggatgacgatgaaccatccctagccaatggagcattcatgcccaagaagagcattaagaagttggttttgaagaaccttaataatagcaatctcttttctcctgttaatcgtgattcagaaaatctagcttcaccatctgaatatccagaaaatggagagagatttagtttcctaagcaaacctgttgatgagaatcaccagcaggatggagatgaagattcccttgtttcacatttttatactaaccctattgccaaacctattcctcaaaccccagaaagtgctggaaataaacacagcaacagcaacagtgtggatgataccattgttgcattaaacatgcgtgctgctttgcgaaatgggctggaaggaagcagtgaagaaacgtcttttcatgatgagtcacttcaggatgaccgagaagaaatagaaaataattcttaccatatgcacccagcaggtattattctcactaaggttggttactatactattccatctatggatgaccttgctaaaattaccaatgaaaaaggagagtgcattgtctctgatttcactattggtcggaaaggttatggttcaatctattttgaaggagatgtgaatttgacaaatctaaatttggatgatattgtgcatatccggaggaaagaagtagttgtctacttagatgataaccaaaaaccacctgtgggtgaagggctaaataggaaggctgaagttacattggatggagtttggccaacagataaaacatctcgttgtttaataaagagcccagatcgccttgctgatatcaactatgaaggaagattggaagcagtttcaaggaaacagggagctcaattcaaagaataccggcctgaaactggttcttgggtgtttaaggtctcccatttttctaagtatggccttcaggattctgatgaagaggaggaggagcatccgtctaaaactagtacaaagaagttgaagactgctcctttgcctcctgcaagccagactacgcccttgcagatggctcttaatggcaaacctgcacctccacctcagagccagagcccagaggtggagcagttagggagggttgtggaactggacagtgacatggtagatatcacccaggagccagttttggataccatgttagaagagagcatgcctgaggatcaggaacctgtgtctgcctcaacacatattgcatcttcactgggaattaatccacatgtcttacagatcatgaaagcatcattgcttactgatgaagaagatgtagatatggcactggatcaacgcttcagtcgcctgccttccaaagcagatacttctcaagaaatctgttctcccagactccccatttcagcatcccactcgtcgaaaactcgttcactagttggtgggttactacaatcaaaatttacaagtggagcttttctttcaccaagtgtctctgtgcaagaatgtcgtactcccagagcagcatctttaatgaatatcccatccacatcctcttggtctgtccctccacccctgacttctgtgttcacaatgcccagcccagcccctgaggttccgttgaaaacagtgggtacacgtaggcaactaggcctagtccctcgtgaaaagtctgtcacctatggcaagggaaaactcttgatggacatggccctattcatgggacgctcatttcgtgttggttggggccccaactggactcttgctaatagtggagaacagctgaatggctctcatgaactagaaaatcatcagattgccgattccatggagtttggattcctgcccaatccagtagctgttaaacccctaactgagtccccattcaaagttcacttagaaaaactcagtttgagacaaagaaagccagatgaagacatgaaattatatcagacacctctggagctcaaattaaaacacagcactgtccatgtggatgaactgtgtcctctcattgtccccaatctgggagttgctgtcattcatgactatgcagattgggttaaagaagcatcaggagacttaccagaagcacaaattgtgaagcactggagcctgacatggacactatgtgaagccctatggggccacctgaaggagcttgacagccagctaaatgaaccccgtgaatacattcaaattctggagcgaagaagagctttctcccgctggctatcctgtactgccacacctcagattgaagaggaagtctccttaacccaaaaaaacagccctgtggaggctgtattcagctacctcacaggcaaaaggatcagtgaggcctgctctctggcccagcagtcaggggatcatcgtcttgctcttcttttatctcagtttgtgggtagccagtcagtccgggagctgctcaccatgcagttggtggactggcatcagctccaagcagactccttcatccaggatgagagactgcgcatctttgctctgttggctggaaaaccggtgtggcagctctcagaaaagaagcaaataaacgtgtgctcccagttggattggaaacgctccctggctatccatctttggtatttgcttccaccaacagcctccatttctagggcgctcagcatgtatgaagaagcatttcagaatacctctgacagtgacagatatgcctgctccccacttccttcgtatctggagggttctggctgtgtgatagcggaggagcaaaactcacagacaccacttcgagatgtctgctttcaccttctaaaactctacagtgacagacattatgatctcaaccagctgctggagcctcgaagcataacagcagatcctttggactaccgcctaagctggcacttgtgggaagtgctgagggctcttaactacacccatctctcagcgcagtgtgaaggtgtgctacaggccagttacgctggccagcttgaaagtgaggggctctgggagtgggccatctttgtcctcctgcacattgacaactcaggcatacgtgagaaggctgttcgagagctgcttacccggcactgccagctgttggagacccctgaatcttgggctaaagagactttccttacccagaagctccgtgtacctgccaaatggatccacgaggccaaagctgtgcgagcacacatggaatctgacaagcacttagaggccctttgcttatttaaggctgagcactggaaccgctgccacaagctcatcatccgacacttagcttctgatgccatcattaatgagaactatgactacctgaaggggttcttggaagacctggcacctccagagcgcagcagcctaattcaggattgggaaacatctgggcttgtttacctggactatattagagtcattgaaatgctccgccatatacagcaggtggattgctcaggtaatgacctggagcagttacacatcaaagtgacttcactgtgcagtcggatagagcagattcagtgttacagtgctaaagatcgcctggctcagtcagacatggccaaacgtgtagccaacctgctgcgcgtggtgctgagtctgcatcatcctcctgatagaacctccgactcaacaccagaccctcagcgagtccctttgcgcctcttggctccccacattggccggcttcccatgcctgaggactatgccatggacgaactgcgcagccttacccagtcctatctgcgagaactggctgttgggagcctgtgagccccaggcactttgcatcacagtcacatgcccattcacaccacacagaggttccctgccttgtttggattggcactgtttgccattctctgggttggctgtggcatctaccctccctccctgctgccagaagcagcatcctccacttgttcagggcttttcttaatactgaacgtagcataagggcttctggaacccagaagaggagacagtttaccatcctcaagatcattcagtgtttttcctttaaaaaaatggtcaataaagctcctttggcagaatcccccaaagaaccagggtattctttttccatccctagccattctggatcttgtgaccctccatgccaaccagcttccctactcctaccctggcccttttatactaggactccttaggaggagtgagacaggtgataatggatccttaacagatgaactatccacagaaggaagagggatccgtctcttaagtaattggttagttaacactgaattttggaggcaaaggagggttggcctgagttaggaaacaaaatgggatctttctgacacacttagggcagaagtgaatgcctgtcacggagggattgatcttcagggctgtttttgttcctgcctttagagttccatgaacaccatacctttgctactactatgtgcaggaacccttggtcacatgtgacatgtctgtgggaagctcccagagtttggtttggtccctggttttcagtcttgctgagactctgtctggatttgcctgcagagtttggataaaaaatggcaggttgggtaaccctccctgttcatcccatgttagctccaaagcatttcccaccctccatctaccccttccagaagcaaaaacaaaccatgactgaggcaggcatggagttgggcgttaggggcaggcagagggcctttgctacactgctgacagctatagggagccccaggtaatggcatgagatagctggtgttagggctatctcaggcaatatggccacacctgggtctttatgcatgaagataatgtaaaggtttttattaaaaaatatatatatgtataaataaatgatctagatattttcctctttttctgaagctactttcttaaaaaataaataaaatgtttatagcattcctggtaaaaaaaa

SEQ ID NO: 11794 - DNA, 6830 bp, Homo sapiens
ccacggtaaggggatgacgtagctttgccaaagacttagaagctaagcagaaaatgagcttaacatcctggtttttggtgagcagtggaggcactcgccacaggctgccacgagaaatgatttttgttggaagagatgactgtgagctcatgttgcagtctcgtagtgtggataagcaacacgctgtcatcaactatgatgcgtctacggatgagcatttagtgaaggatttgggcagcctcaatgggacttttgtgaatgatgtaaggattccggaacagacttatatcaccttgaaacttgaagataagctgagatttggatatgatacaaatcttttcactgtagtacaaggagaaatgagggtccctgaagaagctcttaagcatgagaagtttaccattcagcttcagttgtcccaaaaatcttcagaatcagaattatccaaatctgcaagtgccaaaagcatagattcaaaggtagcagacgctgctactgaagtgcagcacaaaactactgaagcactgaaatccgaggaaaaagccatggatatttctgctatgccccgtggtactccattatatgggcagccgtcatggtggggggatgatgaggtggatgaaaaaagagctttcaagacaaatggcaaacctgaagaaaaaaaccatgaagctggaacatcagggtgcagcatagatgccaagcaagttgaggaacaatctgcagctgcaaatgaagaagtactttttcctttctgtagggaaccaagttattttgaaatccctacaaaagaattccagcaaccatcacaaataacagaaagcactattcatgaaatcccaacaaaagacacgccaagttcccatataacaggtgcagggcatgcttcatttaccattgaatttgatgacagtaccccagggaaggtaactattagagaccatgtgacaaagtttacttctgatcagcgccacaagtccaagaagtcttctcctggaactcaagacttgctggggattcaaacaggaatgatggcacccgaaaacaaagttgctgactggctagcacaaaacaaccctcctcaaatgctatgggaaagaacagaagaggattctaaaagcattaaaagtgatgttccagtgtacttgaaaaggttgaaaggaaataaacatgatgatggtacgcaaagtgattcagagaacgctggggctcacaggcgctgtagcaaacgtgcaactcttgaggaacacttaagacgccaccattcagaacacaaaaagctacagaaggtccaggctactgaaaagcatcaagaccaagctgttactagctctgcgcatcacagaggggggcatggtgttccacatgggaaattgttaaaacagaaatcagaggagccatcggtgtcaatacccttcctacaaactgcattattaagaagttcagggagtcttgggcacagaccaagccaggagatggataaaatgttaaaaaatcaagcaacttctgctacttctgaaaaggataatgatgatgaccaaagtgacaagggtacttataccattgagttagagaatcccaacagtgaggaagtggaagcaagaaaaatgattgacaaggtgtttggagtagatgacaatcaggattataataggcctgttatcaacgaaaaacataaagatctaataaaagattgggctctcagttctgctgcagcagtaatggaagaaagaaaaccactgactacatctggatttcaccactcagaggaaggcacatcttcatctggaagcaaacgttgggtttcacagtgggctagtttggctgccaatcatacaaggcatgatcaagaagaaaggataatggaattttctgcacctcttcctttagagaatgagacagagatcagtgagtctggcatgacagtgagaagtactggctctgcaacttccttggctagccagggagagagaaggagacgaactcttccccagcttccaaatgaagaaaagtctcttgagagccacagagcaaaggttgtaacacagaggtcagagataggagaaaaacaagacacagaacttcaggagaaagaaacacctacacaggtataccagaaagataaacaagatgctgacagacccttgagtaaaatgaacagggcagtaaatggagagactctcaaaactggtggagataataaaaccctacttcacttaggcagctctgctcctggaaaagagaaaagtgaaactgataaggaaacttctttggtaaagcaaacattagcaaaacttcaacaacaagaacaaagggaggaggctcagtggacacctactaaattgtcttccaaaaatgtttcaggtcagacagataaatgtagggaggaaacttttaaacaagaatcacaacctccagaaaaaaattcaggacattctacaagcaaaggagacagagtggcacaaagtgagagcaagagaagaaaagctgaggaaattctgaaaagtcagactccaaagggaggagacaagaaggaatcctccaagtcattagtgcgacaagggagcttcactatagaaaaacccagcccaaacatacccatagaacttattccccatataaataaacagacttcctctactccttcttctttagcattaacatctgcaagtagaatacgagaaagaagtgagtctttggatcctgattctagtatggacacaacccttattctaaaagacacagaagcagtaatggcttttctagaagctaaactacgtgaagataataaaactgatgaaggaccagatactcccagttataatagagacaattctatttcaccagaatctgatgtagatacagctagtacaatcagtctggttactggagaaactgaaagaaagtcaacccaaaagcgaaagagtttcactagcctctataaagataggtgttccacaggttctccttccaaagatgttacaaaatcatcatcttcaggtgctagggaaaaaatggaaaagaaaacaaaaagtcgttccacagatgtgggttcaagagcagatggtcgtaaatttgttcagtccagtgggagaataagacagccctcagtagacttaacagatgatgaccaaacctctagtgtacctcattctgccatctctgatattatgtcatctgatcaagaaacttactcttgtaaacctcatggacggactccacttacctcagctgatgagcatgtacattccaaactggaaggaagtaaagtaacgaaatctaagacttctccggtggtatctggttcatctagtaaatcaaccacccttccaaggccacgacctaccaggacttccctcttgcgcagagcacgacttggtgaagcttcagacagtgaacttgctgatgctgacaaagcatctgttgcttctgaagtatccacaacaagttctacatcaaaacctcccacaggaaggcgtaacatctctcggattgatttattggctcagcctcgtagaacacgacttggctcactgtcagctcgtagtgactctgaagcaacaatttctagaagtagtgcctcttcgaggaccgcagaagccatcattagaagtggagccagactagtaccatcagataaattttctcctagaattagagctaacagtatctctcgactctcagactccaaggtcaaaagtatgacctcagctcatggctctgcttcagtaaattcaagatggaggcgctttcctactgattatgcttccacctcagaagatgaatttggatcaaaccgtaattcccctaaacatacccgtctacgtacttctccagccctgaaaaccactcgcttgcagagcgctggatcagcaatgcctactagttcttcattcaaacaccggattaaagagcaggaagactacatccgagattggactgctcatcgagaagagatagccaggatcagccaagatcttgctctcattgctcgggagatcaacgatgtagcaggagagatagattcagtgacttcatcaggcactgcccctagtaccacagtaagcactgctgccaccacccctggctctgccatagacactagagaagagttggttgatcgtgtttttgatgaaagcctcaacttccgaaagattcctccattagttcattccaaaacaccagaaggaaacaacggtcgatctggtgatccaagacctcaagcagcagagcctcccgatcacttaacaattacaaggcggagaacctggagcagggatgaagtcatgggagataatctgctgctgtcatccgtctttcagttctctaagaagataagacaatctatagataagacagctggaaagatcagaatattatttaaagacaaagatcggaattgggatgacatagaaagcaaattaagagccgaaagtgaagtccctattgtgaaaacctcaagcatggagatttcttctatcttacaggaactgaaaagagtagaaaagcagctgcaagcaatcaatgctatgattgatcctgatggaactttggaggctctgaacaacatgggatttcccagtgctatgttgccatctccaccgaaacagaagtccagccctgtgaataaccaccacagcccgggtcagacaccaacacttggccaaccagaagctagggctcttcatcctgctgctgtttcagccgcagctgaatttgagaatgctgaatctgaggctgatttcagtatacatttcaatagattcaaccccgatggggaagaggaagatgttacagtacaagaatgactttctcttgattgttgaaaaatcattacctgtggaatggctaggaatattggaagcagcatagtgttgatgtacgcaaaacaagacagcttggtcagctacaatcttggaatccctgtcttcttaattttatttatttatttttgacgtataatgtagtatatcaatcctttcaaactatttagataaccacttgatgcacaaataggaaaaagcagattgtggcagtgtcgccttttgtggttttatgattttcaaattgaatttaatgattacaccctttcccttcatagatcttttttcttttttttaagccatgctgtgacctacaagcaaactaaatagccaacatttctgaacccctaagtctcctgtgccaagctgctccctgaaatggacttcttcatctgtacagatttgttaaaccattctatttgcttcttaataataggatttatattagtactcattaccattggacacaatgacataagtactctccacagtaaagcagacctttcacaacagtcactctgtgtcctaaaattttccaacatagatgtgatttatataactttgttgatacgtaaattgtcttggggtttacggaaattaactattatgtttgcactaagatttgctgggagtggtaggtggacatatctatatatcaataaggactaaccgtcttttttgtacataggggattgataatactgtatttgttttaagcccacagtgtttttactccactttcaaaaagtcaatttgggcactttttttcatttttttttaatgggaataagatttggtctctcattttaggttaaatgataactagaaagattaaactagacagatagtttaggtggagtatatttttaaaactcagaacatgtatattggtcctgtgttaccaagtttatatgtgacagttgaaaaagaaattcccttgaaatgatcatgaggttaaaattttcttcattaggggacttggagaaccagtagtcgtaagattagttgatagtttcactcccaagcaatgaattgcttctgtgtgtttccctgtaggactcaatagtaaatgctgtctgtcttacacatttataaggaccctgcaagacgacgacaaaggcctttggcctgtgctactaaacaagaagcctatgaaaaatttcttctttaaacttgttttttctctttccagtaagttcacatttggataattttaaaaagaaaagtaattacctttgtgtttccagaacactataattggggtgtatcttaattcagttaaatattattagtagacctggattttcccccttgaccccatcagtctataaaggttaaactgcaacttttatgaaatggtctttaatatttccacaataatcctgtgctatatttgttttaagaaacaaagtaactctatacacttcaagactttacaggattttttaaatcctgtattgttggatcaattaataaagatgcaaaaaaactttatagagatgtaaaaacaaaactataatggatctcctatttttctttaaatacaaaaaaaaaaaggtaaatgaactattctccttgtaaagctaaattccccattctgtctaataaaggaagactgaaaaaaggttttaaagaacataaatggaaagatacaaatgctttgaaggaataaacgaaatgttaaaacagggtcaatccatttgaagaaaaagttggacaaaataatcagcattgctccctcttttatttaatatttgggtactgattatatccacatggaagtagaaggtaaggagtttaggaaaatactagaatctactctgcttacattcttgtttaagtgtttacacagtttggttcaattataaacatttggccttttactatgttatttttattttgtatgaatacattatcctccttatttatttttgttacatttattacttatgttattttgttatgcatttacaactccatttttaaataaagtgtttctggaacttt

SEQ ID NO: 11795 - DNA, 3486 bp, Homo sapiens
agcaatcatctggggggctaaatgtgacaaaccgagaagatggccaagatcaacacccaatactcccacccctccaggacccacctcaaggtaaagacctcagaccgagatctcaatcgcgctgaaaatggcctcagcagagcccactcgtcaagtgaggagacatcgtcagtgctgcagccggggatcgccatggagaccagaggactggctgactccgggcagggctccttcaccggccaggggatcgccaggctgtcgcgcctcatcttcttgctgcgcaggtgggctgccaggcatgtgcaccaccaggaccagggaccggactcttttcctgatcgtttccgtggagccgagcttaaggaggtgtccagccaagaaagcaatgcccaggcaaatgtgggcagccaggagccagcagacagagggagaagcgcctggcccctggccaaatgcaacactaacaccagcaacaacacggaggaggagaagaagacgaaaaagaaggatgcgatcgtggtggacccgtccagcaacctgtactaccgctggctgaccgccatcgccctgcctgtcttctataactggtatctgcttatttgcagggcctgtttcgatgagctgcagtccgagtacctgatgctgtggctggtcctggactactcggcagatgtcctgtatgtcttggatgtgcttgtacgagctcggacaggttttctcgagcaaggcttaatggtcagtgataccaacaggctgtggcagcattacaagacgaccacgcagttcaagctggatgtgttgtccctggtccccaccgacctggcttacttaaaggtgggcacaaactacccagaagtgaggttcaaccgcctactgaagttttcccggctctttgaattctttgaccgcacagagacaaggaccaactaccccaatatgttcaggattgggaacttggtcttgtacattctcatcatcatccactggaatgcctgcatctactttgccatttccaagttcattggttttgggacagactcctgggtctacccaaacatctcaatcccagagcatgggcgcctctccaggaagtacatttacagtctctactggtccaccttgacccttaccaccattggtgagaccccaccccccgtgaaagatgaggagtatctctttgtggtcgtagacttcttggtgggtgttctgatttttgccaccattgtgggcaatgtgggctccatgatctcgaatatgaatgcctcacgggcagagttccaggccaagattgattccatcaagcagtacatgcagttccgcaaggtcaccaaggacttggagacgcgggttatccggtggtttgactacctgtgggccaacaagaagacggtggatgagaaggaggtgctcaagagcctcccagacaagctgaaggctgagatcgccatcaacgtgcacctggacacgctgaagaaggttcgcatcttccaggactgtgaggcagggctgctggtggagctggtgctgaagctgcgacccactgtgttcagccctggggattatatctgcaagaagggagatattgggaaggagatgtacatcatcaacgagggcaagctggccgtggtggctgatgatggggtcacccagttcgtggtcctcagcgatggcagctacttcggggagatcagcattctgaacatcaaggggagcaagtcggggaaccgcaggacggccaacatccgcagcattggctactcagacctgttctgcctctcaaaggacgatctcatggaggccctcaccgagtaccccgaagccaagaaggccctggaggagaaaggacggcagatcctgatgaaagacaacctgatcgatgaggagctggccagggcgggcgcggaccccaaggaccttgaggagaaagtggagcagctggggtcctccctggacaccctgcagaccaggtttgcacgcctcctggctgagtacaacgccacccagatgaagatgaagcagcgtctcagccaactggaaagccaggtgaagggtggtggggacaagcccctggctgatggggaagttcccggggatgctacaaaaacagaggacaaacaacagtgaaaatgcagcatctgtctcctgcttcacagggtcgactgtcagggtgaccgtatgtggccgcagctgtgtggcatggaacttggtcagggttgaattccagctctactcaccctttgaaagctgtgtgactgcctgagagaacctgtttcttcacctaaaaaatgggactttttgtctcagtcccagtgaagtgccaggtttgattgtgaagtccgcatgaaacactgcaccaggcagggctttgcaaagtgcaaggtatccccagtccaagtatatgaaaacgtgcacacaggactctcattacttttttatggaatctgcaaggtgtttttaggctttttaatctgattttcttataaatgaaagattatttagtcacctttctcctgtccaacttcaccaccacctgataatgggtatataacaggaagctgaaggtacaacatagtgactaaaattcagacttacacaagacagtttgaggcatatttcttaatctggtatcacctcgtgtgttctttggggccctagaaaccctggcttttgggagtgctatggcaagtagaagttctgccggatggaaagaggctgccccatttgaggtcatttaaaatctgtgaagcaaatccagactccttgccgttcagccactgtgaaaccagaatctgcttcacagaaaaaagcatctcagttaggagaagagacatcccctccttctcacttgccaaagagattcaaagacagcccctatcctccattcttgagtcagggccctaggtgacctattctaactcaaggaggagagctatgtacagggagagcattttagattgaaggttggaatggtgtactaaaccaaaaaagctgacaactgagagttttagaagattagaccattaggaacgtatctttgcaaactgcccattcacccatgaagaggaagcctcaagatcccttggaattgcatcccaaggcaaagcttttggctcaccgaaagctcacagattgcagaaattagcttttttaaaaaacaaaccccagtaaatataatttcattaacattttataacagatttatatttttgagttccgtgattgcaaattatgacctcaaattccatccttcacttatgtaacatgttgcaaattacccaaagatgagtctttcttctttctttcctttttcctttcttcttcctttccttttttctttcttcttccttctttcttcctttttctctctcctcttttcctcctcaaaatgtatatattttaaaagccttaactgttagttatgcctgcattcatatttgcacaggaaaaataaagacctggatttaaaaataaaaaaaaaaaaaaaaa

SEQ ID NO: 11796 - DNA, 2145 bp, Homo sapiens
cagcatcaccatgtctgttcgatacagctcaagcaagcactactcttcctcccgcagtggaggaggaggaggaggaggaggatgtggaggaggaggaggagtgtcatccctaagaatttctagcagcaaaggctcccttggtggaggatttagctcaggggggttcagtggtggctcttttagccgtgggagctctggtgggggctgctttgggggctcatcaggtggctatggaggattaggaggttttggtggaggtagctttcgtggaagctatggaagtagcagctttggtgggagttatggaggcagctttggagggggcagtttcggaggtggcagctttggtgggggcagctttggtggaggcggctttggtggaggcggctttggaggaggctttggtggtggatttggaggagatggtggccttctctctggaaatgaaaaagtaaccatgcagaatctgaatgaccgcctggcttcctacttggacaaagttcgggctctggaagaatcaaactatgagctggaaggcaaaatcaaggagtggtatgaaaagcatggcaactcacatcagggggagcctcgtgactacagcaaatactacaaaaccatcgatgaccttaaaaatcagattctcaacctaacaactgataatgccaacatcctgcttcagatcgacaatgccaggctggcagctgatgacttcaggctgaagtatgagaatgaggtagctctgcgccagagcgtggaggctgacatcaacggcctgcgtagggtgctggatgagctgaccctgaccaaggctgacctggagatgcaaattgagagcctgactgaagagctggcctatctgaagaagaaccacgaggaggaaatgaaagaccttcgaaatgtgtccactggtgatgtgaatgtggaaatgaatgctgccccgggtgttgatctgactcaacttctgaataacatgagaagccaatatgaacaacttgctgaacaaaaccgcaaagatgctgaagcctggttcaatgaaaagagcaaggaactgactacagaaattgataataacattgaacagatatccagctataaatctgagattactgaattgagacgtaatgtacaagctctggagatagaactacagtcccaactggccttgaaacaatccctggaagcctccttggcagaaacagaaggtcgctactgtgtgcagctctcacagattcaggcccagatatccgctctggaagaacagttgcaacagattcgagctgaaaccgagtgccagaatactgaataccaacaactcctggatattaagatccgactggagaatgaaattcaaacctaccgcagcctgctagaaggagagggaagttccggaggcggcggacgcggcggcggaagtttcggcggcggctacggcggcggaagctccggcggcggaagctccggcggcggctacggcggcggccacggcggcagttccggcggcggctacggaggcggaagctccggcggcggaagctccggcggcggctacgggggcggaagctccagcggcggccacggcggcagttccagcggcggctacggtggtggcagttccggcggcggcggcggcggctacgggggcggcagctccggcggcggcagcagctccggcggcggatacggcggcggcagctccagcggaggccacaagtcctcctcttccgggtccgtgggcgagtcttcatctaagggaccaagatactaacaaaaccagagtaatcaagacaattattgaagaggtggcgcccgacggtagagttctttcatctatggttgaatcagaaaccaagaaacactactattaaactgcatcaagaggaaagagtctcccttcacacagaccattatttacagatgcatggaaaacaaagtctccaagaaaacacttctgtcttgatggtctatggaaatagaccttgaaaataaggtgtctacaaggtgttttgtggtttctgtatttcttcttttcactttaccagaaagtgttctttaatggaaagaaaaacaactttctgttctcatttactaatgaatttcaataaactttcttactgatgcaaactaaaaaaaaaaaaaaaaaaaaaa

SEQ ID NO: 11797 - DNA, 3278 bp, Homo sapiens
agttcagtttagaaactgccagtcttggtatagaacaacctaggcttatctgtttaagtcccataggtagtattattagagaataacccaggctttgggaactgtataactctgagatcgtttgaaattttcgttttgtttttcttttggctccaaccaggcctctgttgttagactaatggggtttcccctgcagagattggtcagccctgcagtctatcatcccggaaggtgttaaatacacatgaaagccagcctcggcgggcagaacctagcccgccgaaagggcgggcattgctaaagtgttttcaaaaggtcttcccaatcctctgctttagacagctcggaccttagatagaagaacacaacggatcctccagtgactgacgacccaaaggacggatgatgtcacagtcatctggatcaggagatgggaatgatgatgaggctactacctctaaagacggtggtttttcttcccccagtccctcagctgctgctgctgctcaggaggtcagatctgccactgatggtaataccagcaccactccgcccacctctgccaagaagagaaagttaaacagcagcagcagtagcagcagtaacagtagtaacgagagagaagactttgattccacctcttcctcctcttccactcctcctttacaacccagggattcggcatccccttcaacctcgtccttctgcctgggggtttcagtggctgcttccagccacgtaccgatacagaagaagctgcgttttgaagacaccctggagtttgtagggtttgatgcgaagatggctgaggaatcctcctcctcctcctcctcatcttcaccaactgctgcaacatctcagcagcagcaacttaaaaataagagtatattaatctcttctgtggcttcggtgcatcatgcaaacggcctagccaaatcttctaccaccgtctctagctttgctaacagcaaacctggctctgctaagaagttagtgatcaagaactttaaagataagcctaaattaccagaaaactacacagatgaaacctggcaaaaactgaaagaagcagtggaagctattcagaatagtacttcaattaagtacaatttagaagaactctaccaggctgtagaaaatctctgttcttacaagatttctgcaaacttgtacaaacagctgagacagatctgcgaagatcacatcaaagcacagattcatcaattcagagaggattcattggatagcgttctttttttaaagaagattgatagatgctggcaaaaccattgcagacaaatgatcatgatcaggagcatttttttgtttctggatagaacttacgttcttcagaattcaatgctaccctccatttgggacatgggactggagttatttagggctcatattataagtgatcagaaagtgcagaataagacaattgatggcattcttctcttgattgagagggaaaggaatggtgaagcaattgatagaagtttacttcgaagccttttaagcatgctgtctgatttgcaaatttatcaagattcttttgaacaacgatttttggaagaaactaaccggctctatgcagctgaaggccaaaaattaatgcaagaaagagaggttcctgaatatctacatcatgttaacaaacgtctagaagaagaagcagacagacttattacttacttagatcagaccacccagaagtcattaattgctactgtagaaaaacaacttctaggtgaacacttaacagcaattcttcagaaaggtttaaataacctccttgatgaaaaccgaattcaagatttgtctcttctgtatcagctcttcagtagagttcgaggtggagttcaggttcttttgcagcagtggatcgaatatatcaaggcatttggcagcactattgtaattaatcctgaaaaagataaaaccatggttcaagaattgctggattttaaagataaggttgaccatataattgatatctgctttctgaagaatgagaaatttatcaatgccatgaaagaagcatttgaaacgttcattaacaaaagaccaaataaaccagctgaacttatagctaagtatgtagattcaaaacttcgtgcaggcaacaaagaagctacagatgaagaacttgagaaaatgttggataaaattatgatcatatttagatttatctatggcaaggatgtttttgaggccttctataagaaagatttagccaagcgcctgttagtcggaaagagtgcatctgtagatgctgaaaaatcaatgctgtccaaacttaaacatgaatgcggagctgctttcaccagcaaacttgaaggaatgtttaaagacatggaactttctaaagacatcatgattcagttcaaacagtatatgcagaatcagaatgttccgggaaatattgagttaactgtgaatatcctgacaatgggctattggccgacatatgtgcctatggaagttcatttaccaccagagatggtaaaacttcaggagattttcaagacattttacctaggcaaacatagtggcaggaaacttcagtggcagtcaaccataggacactgtgtgttaaaagcagaatttaaagagggtaaaaaggaactccaggtctctctttttcaaacactggtgctgctaatgtttaatgagggagaggagttcagtttagaagagatcaagcaggcaactggaatagaggatggagagttaaggagaacactgcagtcattagcctgtggcaaagctagagttctggcgaaaaatccaaagggcaaagacattgaagatggtgacaagttcatttgtaatgatgatttcaaacataaacttttcaggataaagatcaatcaaatccagatgaaagaaacggttgaagaacaagcaagcactacagaaagagtatttcaagacagacagtatcaaattgatgctgcaattgttcgaattatgaagatgagaaagacacttagccacaatctccttgtttcagaagtgtacaaccagttgaaatttccagtaaagcctgctgatcttaagaagagaatagaatctttaattgaccgggactacatggaaagagataaagaaaatccaaaccagtacaactatattgcatagaatgttggccttgcagcatttggtgtcatatgcagtagccagtggataaactaacctgttgattcaatattatttgactccttttttactaccgatgaccaaatgaagcagtgtaattaaaaaaaaaaaaaaaa

SEQ ID NO: 11798 - DNA, 19271 bp, Homo sapiens
ggctctgattcagttttctttttcttctcttttccttttttttttttttttttttttttttttaggaatgcagagcagttgctggggtgattgacctaggcacagtggagatatttcccatcttcaaagccatgcaaaagggcctccttgaccaagacacaggcctagtgcttctggaatctcaggttatcatgtctggcctcattgcccctgagacgggtgaaaacctctctttggaggagggcatagccagaaacctcattaatccccagatgtaccagcagctccgggagctacaggatgccctggccttaataagcaggcttactgagagcagaggccctctttctgtggtggaagcaattgaaaagagaataatcagtgagacagttggactgaaaatcttagaagctcacctggcaactggaggtttcagtctttcccctagtgagaactgtattaacctggaagaggcttttcatcaaggcctcatttctgcatggcttcattcagtattagagtcttatcttagaacatccaagaatttgatagaccctaacacagctgagaaaattggtttgctggatctgatgcagcgatgtattgtccaccaggaatcaggattcaaattactgcctgtcaaacaattggcaggggggatggtgagcttgaaatcaggccggaaggttagcattttccgtgcagttcaggaagggctaatagataggcaggtcactgtccggttgctggaagctcagctttttgctggtggcatagtagatccaagaacaggacacagacttacagtggaagaggctgtaagacataatctgattgaccaagatatggcctgtgctatcctcataaggcagcttcagacaggaggcatcatagacactgtcacggggcaaaggctaacaatagatgaagcagtgagcaatgatctagtagctgctaagatcgcccttgtgattctggagtccctctggtcattcatggggttgctgtggcctgaatctggagagatcctcccaattacagatgccctagaacaaggtattgtgtctactgaactagcacataaaatccttagtaaccgacagcatattaaggctctgtttctaccagcaaccacagagattttgtcctggaagaaagcaatagaaagtggtatcctggatagagatcttgccaataacttaaaatcgatttgtatacctgatgtgatgccccacatgcaactagcagactctgcagaacaaaatattaatcctggagcagcagttctaccgtgcagcaagagccaccctaaggccacagcaagccagagtgagaatctgttgttccagctgatgactcacagctatattaatgtgcaaaatggacagaggctgcttctgttagataaagagctgatggagacactaacatccagagatgagtatcaaacaagtcctccaaaagtggttgaaattgggcatcaaaggcaaaaaactcctgagggattgcaagaatcagctaatgtgaaaatctcaggaactttcagcagtgggtggactgtgaggctgcctgagttccagttttcttctcagaacaaagaatatcccgatcgggaagattgcactacagaaaaaggcaaaaagaccactgtagaaacagaagattcttctgtagagaaccctgaacaggatctgtttgtagaacaaaaagagagaaatccaaacattgatgctttgaaggtaataaataaagtcaaattagaggtacaaaggcagttgataggtacccaaagggaagaccaaacagcagtgtctgtcagagaaaatgccagcaggggacacctcctgaccatacctcctgctgaggcggaaggtgtgccgttggtggttgacaaagatgttttttctgttgaaacaccaaagaaagaacatcaacctctaagaaacacttcctttacatgtcagaatgaacaagcacacactcttgagactgaatatattcatgatgaaactggaggatctcacataaaaccccaaagcaaaaagttacaagttcaggtaaagaaaactctaggtataaagttagaactaaagtctgaaactgatgggaatgttcatcctctggacaaaaaggaaatgttaaagaaaacatttctggctaaggatgaccataaagaaagtcaagaagcacagaacatcgcaggtggtagtatgatgatgtcagaaaagaccgatgaggaagatagtggcagggaaatttttctgtcatgcagtcatccattagaattgcttgaagaagctaccttaaatgtattatctgcacagttactagatggtggtatctttcatgaacaaacaggtcaaaagctcttactaaatgaagcaatatcccgaggcattgtgccaagtcacactgccgtgaagcttatggagaagctgaacatgtttcaggggttctttgactctcagacttgtgagtctttgacaactgaagaagtcattaatgaaggtctgatggatgagaaattattacataatgtcctcatggcagacaaagctataagtggtgtcttagacccccgtacccagacactgtgctctgtaaaggatgcagttacagttggacttcttgacaaggaaacagccaccagaattttagagaggcaggtggtgactggtggaattattgatctgaaacgaggcaaaaaagtttcagtaactttggcctcaactcttggcttggtggacgttgctgaccagccagaacttataaatctggagaaagcttccaaaggtagagatgctgaaaaaacagttagggagagattaattagtttacaaatggaaacaacaggacttatagaccctgatagtaaagcacctttaacagttgtgcagtccattgacagaggtcttttggagagagaggaggccgttcgtttgttgactaagcaagtggtagatggaggtatcattcaccatatatctgggatgagactttctgttgataatgccttcagacatggcttaattggtgaagatttagccgagaaactcaaaagagttgagaacttaaacatccatcagatttttaatcctgaaacgaaggaaaatatttccctccctaaagccataaaattagatcttattacctcagacctgaaaagagaaatccaggaggttcaggcctttactggaaactttgtggatctcatttctggtcagagattgaccttggcagaagctaaaaaagaaggactgttaactaatgaagcagtattgtctccaggaatgatgcatggcattgtagatcccgagaactgcagaattgtcccctactcagaattagtcaagaaatgtaagattgatattgaatctggacagagatatctagaagtaattcccttctcagacattaaagatggggtgagcgacaaagtgcttacattgtctcaagcaattcagcttggaaaagtagactttgcatctacgctgaaggttctagaagcccaggcaaatactggtggaatcatagatactgctactggaaaaagactgacattggcatcagctttggaagagaaactggtggatgaaaacatggtcagaattattgcatctcatcaggtgttaaatggaggaattgttgacatatttagtgatcagagagtgactttagtagaagctattgagaaaagactgatcagccctgaactggcaaatatgatccaaatagatagttcagagttcagcgatcacagggctcagattgaaaagcaagaagggattgaagtgtgtgcattacaaaatgaatttctaggaaaggatatgttaattgcttgtaatcagactgctgaaatgagttgtaataaagtagaagagagtgagagattatttcaagttgaaaatcagtctgcacaagaaaaggttaaagtgagagtttctgatggggagcaggcaaaaaagagcagggaaatttccttaaaggaatttgggtgcaaggatcaacgtaagccaagaatgtcttcagatgctaaagaatttatcagtatcataaatcctcataatcttaaaggtaaatccttgggccaagtgtcattgacacacccttactctgaatgtgattttaaacttaaagaagtggctagaaataacatgggaaatgatacaaatgaagagcaggaaaaagcagtgacaaaaatagaaattatttctcatatgaagcagtctacctcatgtctagattctgaagaaataagagaaaatcaaggggaagtgattttggaagtacaagaaacatattgtgaaacgtcaggcaaattgccgagtgagcaggttttgcagcaaccaatgaatgctcgggtgaaaagtaagagagagaagagggaggtgattgtagaagaaagtatcagaacatgcaaaccagcatttctttctgaagaaaagttgtatcaggaaactgccattagagatgagcatgactcccatataaagagccaacctagggaaatgacctcaagtgaaaaagggaaagaagctgatacagaaatgggattttctattacttttaaaattgaagagtcctcttcccaagtggtacctcaaggaatttctgtaaaacatttagatgctttaacactcttcagctctaaacaggccaatgaaggaaaagtaaacaatttaagtctctgcttgactttaaaaccagaagaaaacttatctcgagaaattgcctgtggggcccagagtgaaccattcccttgtatgaccccaagacctgaaggattgcactaccaggaatcagatggaaaagcccaagtgacaggcccatcccaaatttccaaaacagacaagtctttccaaggaaccaccagacaggagaccaactatcaagattcctgggttacttcgaaaactaaggaaaccaaacatcaaatttcctcatctaatgaatgtaaagaaaagtcataccaagaagtatcttttgacccagcaagaggtcttaaattggaagaaatcacagtttctagaccagattcaaaagaagtcaggtatctagaattctcagacagaaaagaccttcatcatcagggcagcaaaagtgatgataaactttgtggaactctcaaatctgaaatagcaacacaggaactaactggagagaaatttctagaaatggcaaaccctaatgttgcaggtctagaagcaggatccattgaggacatagtgactcagagaggttccagagtcttgggatcctttcttccagagaaactgttcaaaggagtgtctcaaaaagagaatacagggcaacagaatgccatcattagtcctactgttctagagaccagtgaagaaaagacagtgtccctaacagtatgctctgcagtgaagacagagaagacaccacaggaaaagctcagagaaagccctggcagtgaacaaactcccttcatgactgcacctgaaggaaagggaaatggaggtgtaaacccagagcccttcagagcaactcagaatgtatttacccggcaactctgtttagaacatgatgaaaagctagtatcctatctgtctctgttacggaacattgaaatgaggaccaaacagattcaacctttggagctaaacctggcagaactacaggatctgctgtgtcaggccaaggtattagaaagggagttaaaggatctgaccaccttggtcagtcaggagctggagtgtgtgaatcagattatcatcagccagcctcaagaagttcctgctcaactgttgaaggctctagagaaagatgccaagaatcttcagaagtctctcagctctgtgagtgacacttggaattccaggctactccacttccagaatgctgtggaaatagaaaagactaaagtgttaaatcagcacacacagctagaaggccgacttcaagatctgagagcctgggttggcaataaaaatcttattctgaacagcaagggatctaacagtgaaatagatgttgacagcctgaacctctgcctccaacagtatgaggatttgaaacagcccatggctgaaaggaaagctcagctggatgctcttgcttttgatattcagttctttatctcagaacatgcccaggacttgtcccctcagcagaatcgacagatgctgaggcttctgaatgaactgcagaggtccttccaggacattttggaacagactgccgctcaggtggatgccttgcagggccatcttcaacaaatggagcaggaagccctggtgaagaccctgcagaaacaacaaaatacctgtcaccagcaactggaggatctttgcagttgggtaggacaggcagaaagagcactggcaggccaccaaggcagaaccacccagcaggatctctctgctttgcagaagaaccaaagtgacttgaaggatttacaggatgacattcagaatcgtgccacctcatttgccactgttgtcaaggacattgaggggttcatggaagagaatcagaccaagctgagcccacgtgagttgacagctcttcgggaaaagcttcatcaggctaaggagcaatatgaggcgctccaggaagagacacgtgtggcccagaaggaactggaggaagcagtgacctccgccttacagcaggagactgaaaagagtaaagcagcaaaggaactggcagagaacaagaagaagatcgatgctctcctggattgggtaacttcagtaggatcatctggtggacagctgctgaccaaccttccaggaatggagcagctctcgggagctagcttggagaaaggagccttggacaccactgatggttacatgggggtgaatcaagccccagagaaactggacaagcaatgtgagatgatgaaggcccgtcaccaagaattgctgtcccagcagcaaaatttcattctggccacccagtcagctcaggccttcttggatcagcatggccacaatctcacacctgaggagcaacagatgctgcaacagaagctgggagagctaaaggaacaatactctacttccctggcccaatcagaggcagaactgaagcaggtgcagacacttcaggatgagttgcagaaatttctgcaggatcataaagagtttgaaagctggttggaacgatccgagaaagagctggagaacatgcataagggaggcagcagccccgagacccttccctccctgctaaagcggcaaggaagcttctcagaggatgtcatttcccacaaaggagacttgagatttgtgactatctcaggacagaaagtcttggacatggaaaacagttttaaggaaggcaaagaaccatcagaaattggaaacttagtaaaggacaagttgaaggatgcaacagaaagatacactgctctccactcaaagtgtacacgattaggatctcacctgaatatgctgttaggccagtatcatcaattccaaaacagtgctgacagcctgcaggcctggatgcaggcttgtgaggccaacgtggagaagctcctctcagatactgttgcctctgaccctggagttctccaggagcagcttgcaacaacaaagcagttgcaggaggaattggctgagcaccaagtacctgtggaaaaactccaaaaagtagctcgtgacataatggaaattgaaggggagccagccccagaccacaggcatgttcaagaaactacagattccatactcagccacttccaaagcctctcctatagcctggctgagcgatcttctctgctgcagaaagcaattgcccaatctcagagtgtccaggaaagcctggagagcctgttgcagtctattggggaagttgaacaaaacctggaagggaagcaggtgtcatcactctcatcaggagtcatccaggaagccttagccacaaatatgaaattgaagcaggacattgctcggcaaaagagcagcttggaggccacccgtgagatggtgacccgattcatggagacagcagacagtactacagcagcagtgctgcagggcaaactggcagaggtgagccagcggttcgaacagctctgtctacagcagcaagaaaaggagagctccctaaagaagcttctaccccaggcagagatgtttgaacacctctctggtaagctgcagcagttcatggaaaacaaaagtcggatgctggcctctggaaatcagccagatcaagatattacacatttcttccaacagatccaggagctcaatttggaaatggaagaccaacaggagaacctagatactcttgagcacctggtcactgaactgagctcttgtggctttgcgctggacttgtgccagcatcaggacagggtacagaatctaagaaaagacttcacagagctacagaagacagttaaagagagagagaaagatgcatcatcttgccaggaacagttggatgaattccggaagctggtcaggaccttccagaaatggttgaaagaaactgaagggagtattccacctacggaaacttctatgagtgctaaagagttagaaaagcagattgaacacctgaagagtctactagatgactgggcaagtaagggaactctggtggaagaaatcaattgcaaaggtacttctttagaaaatctcatcatggaaatcacagcacctgattcccaaggcaagacaggttccatactgccctctgtaggaagctctgtaggcagtgtaaacggataccacacctgcaaagatctgacggagatccagtgtgacatgtcagatgtaaacttgaagtatgagaaactagggggagtacttcatgaacgccaggaaagccttcaggctatcctcaacagaatggaggaggttcacaaggaggcaaactctgtgctgcagtggctggaatcaaaagaggaagtcctgaaatccatggatgccatgtcatctccaaccaagacagaaacagtgaaagcccaagctgaatctaacaaggccttcctggctgagttggaacagaattctccaaaaattcaaaaagtaaaggaagccctggctggattactggtgacatatcccaactcacaggaagcagaaaattggaagaaaattcaggaagaactcaattcccgatgggaaagggccactgaggttactgtggctcggcaaaggcagctagaggaatctgcaagtcatctggcctgcttccaggctgcagaatcccagctccggccgtggctgatggagaaagaactgatgatgggagtgctggggcccctgtctattgaccccaacatgttgaatgcacaaaagcaacaggtccagtttatgctaaaggaatttgaagcacgcaggcaacagcatgagcaactgaatgaggcagctcagggcatcctaacaggccctggagatgtctctctgtccaccagccaagtacagaaagaactccagagcatcaatcagaaatgggttgagctgactgacaaactcaactcccgttccagccaaattgaccaagctattgttaagagcacccagtaccaggaactgctccaggacttatcagagaaggtgagggcagttggacaacggctgagtgtccagtcagctatcagcacccaaccagaggctgtaaagcagcaattggaagagaccagtgaaattcgatctgacttggagcagttagaccacgaggttaaggaggctcagacactgtgcgatgaactctcagtgctcattggtgagcagtacctcaaggatgaactgaagaagcgtttggagacagttgccctgcctctccaaggtttagaagaccttgcagccgatcgcattaacagactccaggcagctcttgccagcacccagcagttccagcaaatgtttgatgagttgaggacctggttggatgataaacaaagccagcaagcaaaaaactgcccaatttctgcaaaattggagcggctacagtctcagctacaggagaatgaagagtttcagaaaagtcttaatcaacacagtggctcctatgaggtgattgtggctgaaggggaatctctacttctttctgtacctcctggagaagagaaaaggactctacaaaaccagttggttgagctcaaaaaccattgggaagagcttagtaaaaaaactgcagacagacaatccaggctcaaggattgtatgcagaaagctcagaaatatcagtggcatgtggaagaccttgtgccatggatagaagattgtaaagctaagatgtctgagttgcgagtcactctggatccagtgcagctagagtccagtctcctaagatcaaaggctatgctgaatgaggtggagaagcgccgctccctgctggaaatattgaatagtgctgctgacattctgatcaattcttcagaagcagatgaggatggaatccgggatgagaaggctgggatcaaccagaacatggatgctgttacagaagagctgcaggccaaaacagggtcactcgaagaaatgactcagaggctcagggagttccaggaaagctttaagaatattgaaaagaaggttgaaggagccaaacaccaacttgagatctttgatgctctgggttctcaagcctgtagcaacaagaacctggagaagctaagagctcaacaggaagtgctgcaggccctagagcctcaggtagactatctgaggaactttactcagggtctggtagaagatgccccagatggatctgatgcttctcaacttctccaccaagctgaggtcgcccagcaagagttcctcgaagttaagcaaagagtgaacagtggttgtgtgatgatggaaaacaagctggaggggattggccagtttcactgccgggtccgagagatgttctctcaattggcagacctggatgatgagctagatggcatgggtgctattggcagagacactgatagcctccagtcccaaatcgaggatgtccggctattccttaacaaaattcacgtcctcaaattagacatagaggcctctgaagcagagtgtcgacatatgctagaagaagaggggactctggatttgttaggtctcaaaagggagctagaagccctgaacaaacagtgtggcaaactgacagagagggggaaagctcgtcaggaacagctggaactgacactaggccgtgtagaggacttctacaggaaattgaaaggactcaatgacgcgaccacagcagcagaggaggcagaggccctccagtgggtagtggggaccgaagtggaaatcatcaaccaacaattagcagattttaaaatgtttcagaaagaacaagtggatcctcttcagatgaaattgcagcaggtgaatggacttggccagggattaattcagagtgcaggaaaagactgtgatgtacagggtttagaacatgacatggaagagatcaatgctcgatggaatacattgaataaaaaggtcgcacaaagaattgcacagctacaggaagctttgttgcattgtgggaagtttcaagatgccttggagccattgctcagctggttggcagataccgaggagctcatagccaatcagaaacctccatctgctgagtataaagtggtgaaagcacagatccaagaacagaagttgctccagcggctcctagatgatcgaaaggccacagtagacatgcttcaagcagaaggaggcagaatagcccagtcagcagagctggctgatagagagaaaatcactggacagctggagagtcttgaaagtagatggactgaactactcagtaaggcagcagccaggcaaaaacagctggaagacatcctggttctggccaaacagttccatgagacagctgagcctatttctgacttcttatctgtcacagagaaaaagcttgctaactcagaacctgttggcactcagactgccaaaatacagcagcagatcattcggcacaaggctctggaagaagacatagaaaaccatgcaacagatgtgcaccaggcagtcaaaattgggcagtccctctcctccctgacatctcctgcagaacagggtgtgctgtcagaaaagatagactcattgcaggcccgatacagtgaaattcaagaccgctgttgtcggaaggcagccctacttgaccaagctctgtctaatgctaggctgtttggggaggatgaggtggaggtgctcaactggctggctgaggttgaggacaagctcagttcagtgttcgtaaaggatttcaaacaggatgtcctgcacaggcagcatgctgaccacctggctttaaatgaagaaattgttaatagaaagaagaatgtagatcaagctattaaaaatggtcaggctcttctaaaacaaaccacaggtgaggaggtgttacttatccaggaaaaactagatggtataaagactcgttacgcagacatcacagttactagctccaaggccctcagaactttagagcaagcccggcagctggccaccaagttccagtctacttatgaggaactgaccgggtggctgagggaggtggaggaggagctggcaaccagtggaggacagtctcccacaggggaacagataccccagtttcagcagagacagaaggaattaaagaaggaggtcatggagcacaggctggtgttggacacagtgaatgaggtgagccgtgctctcttagagctggtgccctggagagccagagaagggctggataaacttgtgtccgatgctaacgagcagtacaaactagtcagtgacactattggacaaagggtggatgaaattgatgctgctattcagagatcacaacagtatgagcaagctgccgatgcagaactagcttgggttgctgaaacaaaacggaaactgatggctctgggtccaattcgcctggaacaggaccagaccacagctcagcttcaggtacagaaggctttctccattgacattattcgacacaaagattcaatggatgaactcttcagtcaccgtagtgaaatctttggcacatgtggggaggagcaaaaaactgtattacaggaaaagacagagtctctaatacagcaatatgaagccattagcctactcaattcagagcgttatgcccgcctagagcgggcccaggtcttagtaaaccagttttgggaaacttatgaagagctcagcccctggattgaggaaactcgggcactaatagcacagttaccctctccagccattgatcatgagcagctcaggcagcaacaagaggaaatgaggcaattaagggaatctattgctgaacacaaacctcatattgacaaactactaaagataggcccacaactaaaggaattaaaccctgaggaaggggaaatggtggaagaaaaataccagaaagcagaaaacatgtatgcccaaataaaggaggaggtgcgccagcgagccctggctctggatgaagccgtgtcccagtccacacagattacagagtttcatgataaaattgagcctatgttggagacactggagaatctttcctctcgcctgcgtatgccaccactgatccctgctgaagtagacaagatcagagagtgcatcagtgacaataagagtgccaccgtggagctagaaaaactgcagccatcctttgaggccttgaagcgccgtggagaggagcttattggacgatctcagggagcagacaaggatctggctgcaaaagaaatccaggataaattggatcaaatggtattcttctgggaggacatcaaagctcgggctgaagaacgagaaatcaaatttcttgatgtccttgaattagcagagaagttctggtatgacatggcagctctcctgaccaccatcaaagacacccaggatattgtccatgacttggaaagcccaggcattgatccttccatcatcaaacaacaggttgaagctgctgagactattaaggaagagacagatggtctgcatgaagagctggagtttattcggatccttggagcagatttgatttttgcctgtggagaaactgagaagcctgaagtgaggaagagcattgatgagatgaataatgcttgggagaacttaaacaaaacatggaaagagaggctagaaaaacttgaggatgctatgcaagctgctgtgcagtatcaggacactcttcaggctatgtttgactggctagataacactgtgattaaactctgcaccatgccccctgttggcactgacctcaatactgttaaagatcagttaaatgaaatgaaggagttcaaagtagaagtttaccaacagcaaattgagatggagaagcttaatcaccagggtgaactgatgttaaagaaagctactgatgagacggacagagacattatacgagaaccactgacagaactcaaacacctctgggagaacctgggtgagaaaattgcccaccgacagcacaaactagaaggggctctgttggcccttggtcagttccagcatgccttagaggaactaatgagttggctgactcataccgaagagttgttagatgctcagagaccaataagtggagacccaaaagtcattgaagttgagctcgcaaagcaccatgtcctaaaaaatgatgttttggctcatcaagccacagtggaaacagtcaacaaagctggcaatgagcttcttgaatccagtgctggagatgatgccagcagcttaaggagccgtttggaagccatgaaccaatgctgggagtcagtgttacagaaaacagaggagagggagcagcagcttcagtcaactctgcagcaggcccagggcttccacagtgaaattgaagatttcctcttggaacttactagaatggagagccagctttctgcatctaagcccacaggaggacttcctgaaactgctagggaacagcttgatacacatatggaactctattcccagctgaaagccaaggaagagacttataatcaactacttgacaagggcagactcatgcttctaagccgtgacgactctgggtctggctccaagacagaacagagtgtagcacttttggagcagaagtggcatgtggtcagcagtaagatggaagaaagaaagtcaaagctggaagaggccctcaacttggcaacagaattccagaattccctacaagaatttatcaactggctcactctagcagagcagagtttaaacatcgcttctccaccaagcctgattctaaatactgtcctttcccagatagaagagcacaaggtttttgctaatgaagtaaatgctcatcgagaccagatcattgagctggatcaaactgggaatcaattaaagttccttagccaaaagcaggatgttgttctgatcaagaatttgttggtgagcgtgcagtctcgatgggagaaggttgtccagcgatctattgaaagagggcgatcactagatgatgccaggaagcgggcaaaacaattccatgaagcttggaaaaaactgattgactggctagaagatgcagagagtcacctggactcagaactagagatatccaatgacccagacaaaattaaacttcagctttctaagcataaggagtttcagaagactcttggtggcaagcagcctgtgtatgataccacaattagaactggcagagcactgaaagaaaagactttgcttcccgaagatagtcagaaacttgacaatttcctaggagaagtcagagacaaatgggatactgtttgtggcaagtctgtggagcggcagcacaagttggaggaagccctgctcttttcgggtcagttcatggatgctttgcaggcattggttgactggttatacaaggtggagccacagctggctgaggaccagcccgtgcacggggaccttgacctcgtcatgaacctcatggatgcacacaaggttttccagaaggaactgggaaagcgaacaggaaccgttcaggtcctgaagcggtcaggccgagagctgattgagaatagtcgagatgacaccacttgggtaaaaggacagctccaggaactgagcactcgctgggacactgtctgtaaactctctgtttccaaacaaagccggcttgagcaggccttaaaacaagcggaagtgtttcgagacacagtccacatgctgttggagtggctttctgaagcagagcaaacgcttcgctttcggggagcacttcctgatgacacagaggccctgcagtctctcattgacacccataaggaattcatgaagaaagtagaagaaaagcgagtggacgttaactcagcagtagccatgggagaagtcatcctggctgtctgccaccccgattgcatcacaaccatcaaacactggatcaccatcatccgagctcgcttcgaggaggtcctgacatgggctaagcagcaccagcagcgtcttgaaacggccttgtcagaactggtggctaatgctgagctcctggaagaacttctggcatggatccagtgggctgagaccaccctcattcagcgggatcaggagccaatcccgcagaacattgaccgagttaaagcccttatcgctgagcatcagacatttatggaggagatgactcgcaaacagcctgacgtggaccgggtcaccaagacatacaaaaggaaaaacatagagcctactcacgcgcctttcatagagaaatcccgcagcggaggcaggaaatccctaagtcagccaacccctcctcccatgccaatcctttcacagtctgaagcaaaaaacccacggatcaaccagctttctgcccgctggcagcaggtgtggctgttagcactggagcggcaaaggaaactgaatgatgccttggatcggctggaggagttgaaagaatttgccaactttgactttgatgtctggaggaaaaagtatatgcgttggatgaatcacaaaaagtctcgagtgatggatttcttccggcgcattgataaggaccaggatgggaagataacacgtcaggagtttatcgatggcattttagcatccaagttccccaccaccaagttagagatgactgctgtggctgacattttcgaccgagatggggatggttacattgattattatgaatttgtggctgctcttcatcccaacaaggatgcgtatcgaccaacaaccgatgcagataaaatcgaagatgaggttacaagacaagtggctcagtgcaaatgtgcaaaaaggtttcaggtggagcagatcggagagaataaataccggttcttcctcggcaatcagtttggggattctcagcagttgcggctggtccgtattctgcgcagcaccgtgatggttcgcgttggtggaggatggatggccttggatgaatttttagtgaaaaatgatccctgccgagcacgaggtagaactaacattgaacttagagagaaattcatcctaccagagggagcatcccagggaatgacccccttccgctcacggggtcgaaggtccaaaccatcttcccgggcagcttcccctactcgttccagctccagtgctagtcagagtaaccacagctgtacatccatgccatcttctccagccaccccagccagtggaaccaaggttatcccatcatcaggtagcaagttgaaacgaccaacaccaacttttcattctagtcggacatcccttgctggtgataccagcaatagttcttccccggcctccacaggtgccaaaactaatcgggcagaccctaaaaagtctgccagtcgccctgggagtcgggctgggagtcgagccgggagtcgagccagcagccggcgaggaagtgacgcttctgactttgacctcttagagacgcagtctgcttgttccgacacttcagaaagcagcgctgcagggggccaaggcaactccaggagagggctaaacaaaccttccaaaatcccaaccatgtctaagaagaccaccactgcctcccccaggactccaggtcccaagcgataacactgtctaagcacccccaagccactatccactttgaatcctgctccatacattgggtgtatatttattctgaacgggagaagttatattgttaaaagtgtaaaagaataattgtgttatgaagctgccttattttttttctttttgtaagttactattttcatgtgaatatttatgtagataaaatttgcctcctggtaaccctgtaatggatggggcccagaaatgaaatatttgagaaaaacaagtgaaaaggtcaagatacaaatgtgtattaaaaaaaaaaaagcctattaatagggtttctgcgcggtgcagggttgtaaacctgctttatcttttaggattattcctaaatgcatcttctttataaacttgacttgctatctcagcaagataaattatattaaaaaaataagaatcctgcagtgtttaaggaactctttttttgtaaatcacggacacctcaattagcaagaactgaggggagggctttttccattgtttaatgttttgtgatttttagctaaagagagggaacctcatctaagtaacatttgcacatgatacagcaaaaggagttcattgcaatactgtctttggatattgtttcagtactgggtgtttaaaggacaaatagctgctagaattcaggggtaaatgtaagtgttcagaaaacgtcagaacatttggggttttaaactgatttgttgctccctatccagcctagacaccagtaactcttgtgttcaccaggacccagacccttggcaagggataggctcgttggtgacattgtgaatttcagatttgttttatccactttttttgctatttatttaaatggtcgatcaacttcccacaaactgaggaatgaattccacgagcctgttctgaaaatgtggacgtaagacaaacacgtgctcgtcctttaatggagttcaccagcacacttgttaaccagtcctgtttgctttcgtctttttttgtgcgtaataaagtcaactgaccaagtgaccatgaaaaggggctgtctggggctcctgttttttagctgctgttcttcagctccgaccatgttgctgtgtgattatctcaattggttttaattgaggcagaaactgaagctctaccaatgaactgtttagaaacaagacacacttttgtattaaaattgcttgcagtaacaaatattttgtatttcctgattttcttttcaactattaccttatctataaatgttaccctggggtataatcatgttgtaggtacttaaatgcattccgcaaatcaaaatatcttgatggataaattatagagctt

SEQ ID NO: 11799 - DNA, 17821 bp, Homo sapiens
cacgctcccctcgactgcgctccagcctggggcgcgcccggccgccgccgccttcgctgccgccacgggcccgtcttcttcctccttcggctcccaggatgaagaaactgagtctcagagaggtgaagtgacttgcccaagatcacagcaattatcacttctccctgggctcccaggccctcctgcagcagcccccgcctgggccatgtcttcctcagatgaagagacgctcagtgagcggtcatgtcggagtgagcggtcttgtcggagtgagcgatcttacaggagcgagcggtcggggagcctgtctccctgtcccccaggggacaccttgccctggaacctgccactgcatgagcagaaaaagcggaaaagccaggattcggtgctggaccctgcagagcgtgctgtggtcagagtcgctgatgaacgggaccgggttcagaagaaaacgttcaccaagtgggtcaacaagcacttaatgaaggtccgcaagcacatcaatgatctttatgaagatctgcgggatggccataacctgatctctctgttggaggtcctctcaggcatcaaactgccccgggagaagggcaggatgcgttttcataggctgcagaatgtgcagattgccctggacttcctaaagcagcgacaggtgaaactagtgaatattcgcaatgatgacatcacagatggcaaccccaagttgaccctgggtctgatctggaccattattttgcatttccagatctctgacatctacattagtggagaatcaggggatatgtcagccaaggagaaactactcctgtggacccagaaggtgacagctggttacacaggaatcaaatgcaccaacttttcctcctgctggagtgatgggaagatgttcaatgcactcattcaccgataccgacccgatctagtagacatggagagggtgcaaatccaaagtaaccgagagaatctggaacaggcttttgaagtggcagaaagactgggggtcactcgcctgctggatgcagaagatgtggatgtgccatctccagatgaaaagtctgtaatcacttatgtgtcttcgatttatgatgccttccctaaagttcctgagggtggagaagggatcagtgctacggaagtggactccaggtggcaagaataccaaagccgagtggactccctcattccctggatcaaacagcatacaatactgatgtcagataaaacttttccccaaaaccctgttgaactaaaggcactttataaccaatatatacacttcaaagaaacagaaattctggccaaggagagagaaaaaggaagaattgaggaattatataaattactagaggtgtggattgaatttggccgaattaaactgcctcaaggttatcaccctaatgatgtggaagaagagtggggaaagctcatcatagagatgctggaacgagagaaatcacttcggccggctgtggagaggctggaattgctgctacagattgcaaacaaaatccagaatggtgctttgaactgtgaagaaaaactgacactagctaagaatacactgcaggctgatgctgctcacctggaatcaggacaaccggtacaatgtgagtcagatgtcattatgtacattcaggagtgtgaaggtctcatcaggcagctgcaggtggatctccagatcctgcgggatgagaattactaccagctagaagagctggcttttagggtcatgcgtcttcaggatgagctggtcaccttgcgtctagagtgtacaaacctgtaccggaagggtcatttcacttcacttgaattggttccaccctctactttaaccaccactcatctgaaagcagaacccttaaccaaggcaacccattcttcttctacctcctggttccgaaagcctatgactcgggctgaacttgtggccatcagctcctctgaagatgaaggcaatctccgatttgtgtatgaactactgtcttgggtagaagagatgcagatgaaactggagcgagcagagtggggcaatgacctgcctagtgtggagttgcagctagaaacacagcagcacatccatacgagtgtagaagagctgggctcaagtgtcaaggaggccaggttgtatgagggaaagatgtcccagaatttccataccagctatgctgaaactcttggaaagctggagacacagtattgtaaattgaaggaaacttctagcttccggatgaggcaccttcagagcctgcataaatttgtttccagagctacagctgagttgatctggttgaatgagaaggaggaggaggaactagcatatgactggagtgacaacaattccaatatctcagccaagagaaattacttctctgagttgacaatggaactggaggagaaacaggatgtgtttcgttctctacaagatacagcagaactactttcacttgagaaccacccagccaagcagacagtggaggcttacagtgctgctgtccagtcccagttgcagtggatgaagcagctgtgcctgtgtgttgagcagcatgtgaaagagaatactgcttattttcagttcttcagtgatgcacgagagctggagtcattcttgaggaacctccaagattccattaaacgaaaatattcctgtgaccacaacaccagcttatcccgccttgaagacctgctccaggactccatggatgaaaaggagcagcttatacagtccaagagttccgttgccagtctcgttgggagatcaaaaaccatcgttcagctaaaaccacgcagtccagaccatgtgttaaagaacaccatttctgtcaaggctgtctgtgactacaggcagatcgagattactatttgcaaaaatgatgaatgtgtgctagaagataattctcagcggaccaaatggaaagtgatcagccccacagggaacgaggcaatggtgccgtcagtctgcttcctcatccccccacccaataaggatgccattgagatggccagcagggtcgaacaatcttatcagaaggttatggccctttggcatcagctgcatgttaacaccaaaagccttatctcttggaactatctgcgtaaagaccttgaccttgtacagacctggaacctagaaaagcttcgatcctcagcaccaggggagtgccatcagattatgaagaaccttcaggcccactatgaagactttctgcaggatagtcgtgactctgtgctgttctcagtggctgatcgcttgcgcttggaagaggaggtggaagcttgtaaagcccgcttccagcacctgatgaagtccatggagaatgaggacaaagaggagactgtggccaagatgtacatttcagagttgaagaacatccggctacgcctggaggagtatgaacagagggtggtcaaacgaattcagtctctagccagctctaggactgacagagatgcctggcaggacaatgcattaaggattgcagagcaagagcacacccaggaggatttacagcaattgaggtcagacttggatgcagtttctatgaaatgtgacagctttctccatcagtctccatctagttcaagtgtcccaactctgcgctcagaactgaatctgctggtggagaagatggaccatgtctatggtctctctactgtatatctgaataagttaaagacagttgatgttatagtacgtagcatacaggatgctgaactcttggtcaaaggttatgagattaagctgagtcaagaagaagtagtactggcagatctctcagctctggaggcccattggtcgacattacggcactggcttagtgatgtgaaggacaagaattcagtgttttcagtcctggatgaggaaattgccaaggccaaggtagtggcagagcagatgagtcgtctgacaccagagcgaaatctggatttggagcgctatcaggaaaaaggctcccagctgcaggagcgttggcaccgagtcattgcccagctcgagattcgccaatctgagctagaaagtatccaggaagttctgggagattaccgagcctgccatggaactctcatcaagtggattgaggaaaccactgcccagcaggaaatgatgaagccaggccaggcagaggatagcagagtgctttcggagcagctcagccagcagacggccctatttgcagaaattgagagaaatcagacaaaactggatcaatgtcaaaaattttcccagcagtactctactattgtaaaggactatgaattgcaactgatgacatacaaggcctttgtggaatcgcagcagaaatcccctggcaagcgccgtcgcatgctttcctcttcagatgccatcactcaagagttcatggacttaaggactcgctacacggcattggtgactttaacaactcagcacgtgaaatacatcagtgatgcactccggcgtctggaggaggaggagaaagtggtagaagaggagaaacaagaacatgtggagaaggttaaagaacttttgggctgggtgtctaccctagcgaggaatacacaaggaaaagctacctcatccgagaccaaagaatcaacagacattgaaaaagctattttggaacagcaggttctgtcagaagagctgacaacaaagaaagaacaagtctctgaagctattaaaacatcacagatcttcttggccaagcatggtcataagctctcagaaaaagagaagaaacaaatatctgagcaattgaatgccctaaacaaggcttaccatgacctttgtgatggttctgcaaatcagcttcagcagcttcagagccagttggctcaccagacagaacaaaagaccctgcagaaacaacaaaatacctgtcaccagcaactggaggatctttgcagttgggtaggacaggcagaaagagcactggcaggccaccaaggcagaaccacccagcaggatctctctgctttgcagaagaaccaaagtgacttgaaggatttacaggatgacattcagaatcgtgccacctcatttgccactgttgtcaaggacattgaggggttcatggaagagaatcagaccaagctgagcccacgtgagttgacagctcttcgggaaaagcttcatcaggctaaggagcaatatgaggcgctccaggaagagacacgtgtggcccagaaggaactggaggaagcagtgacctccgccttacagcaggagactgaaaagagtaaagcagcaaaggaactggcagagaacaagaagaagatcgatgctctcctggattgggtaacttcagtaggatcatctggtggacagctgctgaccaaccttccaggaatggagcagctctcgggagctagcttggagaaaggagccttggacaccactgatggttacatgggggtgaatcaagccccagagaaactggacaagcaatgtgagatgatgaaggcccgtcaccaagaattgctgtcccagcagcaaaatttcattctggccacccagtcagctcaggccttcttggatcagcatggccacaatctcacacctgaggagcaacagatgctgcaacagaagctgggagagctaaaggaacaatactctacttccctggcccaatcagaggcagaactgaagcaggtgcagacacttcaggatgagttgcagaaatttctgcaggatcataaagagtttgaaagctggttggaacgatccgagaaagagctggagaacatgcataagggaggcagcagccccgagacccttccctccctgctaaagcggcaaggaagcttctcagaggatgtcatttcccacaaaggagacttgagatttgtgactatctcaggacagaaagtcttggacatggaaaacagttttaaggaaggcaaagaaccatcagaaattggaaacttagtaaaggacaagttgaaggatgcaacagaaagatacactgctctccactcaaagtgtacacgattaggatctcacctgaatatgctgttaggccagtatcatcaattccaaaacagtgctgacagcctgcaggcctggatgcaggcttgtgaggccaacgtggagaagctcctctcagatactgttgcctctgaccctggagttctccaggagcagcttgcaacaacaaagcagttgcaggaggaattggctgagcaccaagtacctgtggaaaaactccaaaaagtagctcgtgacataatggaaattgaaggggagccagccccagaccacaggcatgttcaagaaactacagattccatactcagccacttccaaagcctctcctatagcctggctgagcgatcttctctgctgcagaaagcaattgcccaatctcagagtgtccaggaaagcctggagagcctgttgcagtctattggggaagttgaacaaaacctggaagggaagcaggtgtcatcactctcatcaggagtcatccaggaagccttagccacaaatatgaaattgaagcaggacattgctcggcaaaagagcagcttggaggccacccgtgagatggtgacccgattcatggagacagcagacagtactacagcagcagtgctgcagggcaaactggcagaggtgagccagcggttcgaacagctctgtctacagcagcaagaaaaggagagctccctaaagaagcttctaccccaggcagagatgtttgaacacctctctggtaagctgcagcagttcatggaaaacaaaagtcggatgctggcctctggaaatcagccagatcaagatattacacatttcttccaacagatccaggagctcaatttggaaatggaagaccaacaggagaacctagatactcttgagcacctggtcactgaactgagctcttgtggctttgcgctggacttgtgccagcatcaggacagggtacagaatctaagaaaagacttcacagagctacagaagacagttaaagagagagagaaagatgcatcatcttgccaggaacagttggatgaattccggaagctggtcaggaccttccagaaatggttgaaagaaactgaagggagtattccacctacggaaacttctatgagtgctaaagagttagaaaagcagattgaacacctgaagagtctactagatgactgggcaagtaagggaactctggtggaagaaatcaattgcaaaggtacttctttagaaaatctcatcatggaaatcacagcacctgattcccaaggcaagacaggttccatactgccctctgtaggaagctctgtaggcagtgtaaacggataccacacctgcaaagatctgacggagatccagtgtgacatgtcagatgtaaacttgaagtatgagaaactagggggagtacttcatgaacgccaggaaagccttcaggctatcctcaacagaatggaggaggttcacaaggaggcaaactctgtgctgcagtggctggaatcaaaagaggaagtcctgaaatccatggatgccatgtcatctccaaccaagacagaaacagtgaaagcccaagctgaatctaacaaggccttcctggctgagttggaacagaattctccaaaaattcaaaaagtaaaggaagccctggctggattactggtgacatatcccaactcacaggaagcagaaaattggaagaaaattcaggaagaactcaattcccgatgggaaagggccactgaggttactgtggctcggcaaaggcagctagaggaatctgcaagtcatctggcctgcttccaggctgcagaatcccagctccggccgtggctgatggagaaagaactgatgatgggagtgctggggcccctgtctattgaccccaacatgttgaatgcacaaaagcaacaggtccagtttatgctaaaggaatttgaagcacgcaggcaacagcatgagcaactgaatgaggcagctcagggcatcctaacaggccctggagatgtctctctgtccaccagccaagtacagaaagaactccagagcatcaatcagaaatgggttgagctgactgacaaactcaactcccgttccagccaaattgaccaagctattgttaagagcacccagtaccaggaactgctccaggacttatcagagaaggtgagggcagttggacaacggctgagtgtccagtcagctatcagcacccaaccagaggctgtaaagcagcaattggaagagaccagtgaaattcgatctgacttggagcagttagaccacgaggttaaggaggctcagacactgtgcgatgaactctcagtgctcattggtgagcagtacctcaaggatgaactgaagaagcgtttggagacagttgccctgcctctccaaggtttagaagaccttgcagccgatcgcattaacagactccaggcagctcttgccagcacccagcagttccagcaaatgtttgatgagttgaggacctggttggatgataaacaaagccagcaagcaaaaaactgcccaatttctgcaaaattggagcggctacagtctcagctacaggagaatgaagagtttcagaaaagtcttaatcaacacagtggctcctatgaggtgattgtggctgaaggggaatctctacttctttctgtacctcctggagaagagaaaaggactctacaaaaccagttggttgagctcaaaaaccattgggaagagcttagtaaaaaaactgcagacagacaatccaggctcaaggattgtatgcagaaagctcagaaatatcagtggcatgtggaagaccttgtgccatggatagaagattgtaaagctaagatgtctgagttgcgagtcactctggatccagtgcagctagagtccagtctcctaagatcaaaggctatgctgaatgaggtggagaagcgccgctccctgctggaaatattgaatagtgctgctgacattctgatcaattcttcagaagcagatgaggatggaatccgggatgagaaggctgggatcaaccagaacatggatgctgttacagaagagctgcaggccaaaacagggtcactcgaagaaatgactcagaggctcagggagttccaggaaagctttaagaatattgaaaagaaggttgaaggagccaaacaccaacttgagatctttgatgctctgggttctcaagcctgtagcaacaagaacctggagaagctaagagctcaacaggaagtgctgcaggccctagagcctcaggtagactatctgaggaactttactcagggtctggtagaagatgccccagatggatctgatgcttctcaacttctccaccaagctgaggtcgcccagcaagagttcctcgaagttaagcaaagagtgaacagtggttgtgtgatgatggaaaacaagctggaggggattggccagtttcactgccgggtccgagagatgttctctcaattggcagacctggatgatgagctagatggcatgggtgctattggcagagacactgatagcctccagtcccaaatcgaggatgtccggctattccttaacaaaattcacgtcctcaaattagacatagaggcctctgaagcagagtgtcgacatatgctagaagaagaggggactctggatttgttaggtctcaaaagggagctagaagccctgaacaaacagtgtggcaaactgacagagagggggaaagctcgtcaggaacagctggaactgacactaggccgtgtagaggacttctacaggaaattgaaaggactcaatgacgcgaccacagcagcagaggaggcagaggccctccagtgggtagtggggaccgaagtggaaatcatcaaccaacaattagcagattttaaaatgtttcagaaagaacaagtggatcctcttcagatgaaattgcagcaggtgaatggacttggccagggattaattcagagtgcaggaaaagactgtgatgtacagggtttagaacatgacatggaagagatcaatgctcgatggaatacattgaataaaaaggtcgcacaaagaattgcacagctacaggaagctttgttgcattgtgggaagtttcaagatgccttggagccattgctcagctggttggcagataccgaggagctcatagccaatcagaaacctccatctgctgagtataaagtggtgaaagcacagatccaagaacagaagttgctccagcggctcctagatgatcgaaaggccacagtagacatgcttcaagcagaaggaggcagaatagcccagtcagcagagctggctgatagagagaaaatcactggacagctggagagtcttgaaagtagatggactgaactactcagtaaggcagcagccaggcaaaaacagctggaagacatcctggttctggccaaacagttccatgagacagctgagcctatttctgacttcttatctgtcacagagaaaaagcttgctaactcagaacctgttggcactcagactgccaaaatacagcagcagatcattcggcacaaggctctggaagaagacatagaaaaccatgcaacagatgtgcaccaggcagtcaaaattgggcagtccctctcctccctgacatctcctgcagaacagggtgtgctgtcagaaaagatagactcattgcaggcccgatacagtgaaattcaagaccgctgttgtcggaaggcagccctacttgaccaagctctgtctaatgctaggctgtttggggaggatgaggtggaggtgctcaactggctggctgaggttgaggacaagctcagttcagtgttcgtaaaggatttcaaacaggatgtcctgcacaggcagcatgctgaccacctggctttaaatgaagaaattgttaatagaaagaagaatgtagatcaagctattaaaaatggtcaggctcttctaaaacaaaccacaggtgaggaggtgttacttatccaggaaaaactagatggtataaagactcgttacgcagacatcacagttactagctccaaggccctcagaactttagagcaagcccggcagctggccaccaagttccagtctacttatgaggaactgaccgggtggctgagggaggtggaggaggagctggcaaccagtggaggacagtctcccacaggggaacagataccccagtttcagcagagacagaaggaattaaagaaggaggtcatggagcacaggctggtgttggacacagtgaatgaggtgagccgtgctctcttagagctggtgccctggagagccagagaagggctggataaacttgtgtccgatgctaacgagcagtacaaactagtcagtgacactattggacaaagggtggatgaaattgatgctgctattcagagatcacaacagtatgagcaagctgccgatgcagaactagcttgggttgctgaaacaaaacggaaactgatggctctgggtccaattcgcctggaacaggaccagaccacagctcagcttcaggtacagaaggctttctccattgacattattcgacacaaagattcaatggatgaactcttcagtcaccgtagtgaaatctttggcacatgtggggaggagcaaaaaactgtattacaggaaaagacagagtctctaatacagcaatatgaagccattagcctactcaattcagagcgttatgcccgcctagagcgggcccaggtcttagtaaaccagttttgggaaacttatgaagagctcagcccctggattgaggaaactcgggcactaatagcacagttaccctctccagccattgatcatgagcagctcaggcagcaacaagaggaaatgaggcaattaagggaatctattgctgaacacaaacctcatattgacaaactactaaagataggcccacaactaaaggaattaaaccctgaggaaggggaaatggtggaagaaaaataccagaaagcagaaaacatgtatgcccaaataaaggaggaggtgcgccagcgagccctggctctggatgaagccgtgtcccagtccacacagattacagagtttcatgataaaattgagcctatgttggagacactggagaatctttcctctcgcctgcgtatgccaccactgatccctgctgaagtagacaagatcagagagtgcatcagtgacaataagagtgccaccgtggagctagaaaaactgcagccatcctttgaggccttgaagcgccgtggagaggagcttattggacgatctcagggagcagacaaggatctggctgcaaaagaaatccaggataaattggatcaaatggtattcttctgggaggacatcaaagctcgggctgaagaacgagaaatcaaatttcttgatgtccttgaattagcagagaagttctggtatgacatggcagctctcctgaccaccatcaaagacacccaggatattgtccatgacttggaaagcccaggcattgatccttccatcatcaaacaacaggttgaagctgctgagactattaaggaagagacagatggtctgcatgaagagctggagtttattcggatccttggagcagatttgatttttgcctgtggagaaactgagaagcctgaagtgaggaagagcattgatgagatgaataatgcttgggagaacttaaacaaaacatggaaagagaggctagaaaaacttgaggatgctatgcaagctgctgtgcagtatcaggacactcttcaggctatgtttgactggctagataacactgtgattaaactctgcaccatgccccctgttggcactgacctcaatactgttaaagatcagttaaatgaaatgaaggagttcaaagtagaagtttaccaacagcaaattgagatggagaagcttaatcaccagggtgaactgatgttaaagaaagctactgatgagacggacagagacattatacgagaaccactgacagaactcaaacacctctgggagaacctgggtgagaaaattgcccaccgacagcacaaactagaaggggctctgttggcccttggtcagttccagcatgccttagaggaactaatgagttggctgactcataccgaagagttgttagatgctcagagaccaataagtggagacccaaaagtcattgaagttgagctcgcaaagcaccatgtcctaaaaaatgatgttttggctcatcaagccacagtggaaacagtcaacaaagctggcaatgagcttcttgaatccagtgctggagatgatgccagcagcttaaggagccgtttggaagccatgaaccaatgctgggagtcagtgttacagaaaacagaggagagggagcagcagcttcagtcaactctgcagcaggcccagggcttccacagtgaaattgaagatttcctcttggaacttactagaatggagagccagctttctgcatctaagcccacaggaggacttcctgaaactgctagggaacagcttgatacacatatggaactctattcccagctgaaagccaaggaagagacttataatcaactacttgacaagggcagactcatgcttctaagccgtgacgactctgggtctggctccaagacagaacagagtgtagcacttttggagcagaagtggcatgtggtcagcagtaagatggaagaaagaaagtcaaagctggaagaggccctcaacttggcaacagaattccagaattccctacaagaatttatcaactggctcactctagcagagcagagtttaaacatcgcttctccaccaagcctgattctaaatactgtcctttcccagatagaagagcacaaggtttttgctaatgaagtaaatgctcatcgagaccagatcattgagctggatcaaactgggaatcaattaaagttccttagccaaaagcaggatgttgttctgatcaagaatttgttggtgagcgtgcagtctcgatgggagaaggttgtccagcgatctattgaaagagggcgatcactagatgatgccaggaagcgggcaaaacaattccatgaagcttggaaaaaactgattgactggctagaagatgcagagagtcacctggactcagaactagagatatccaatgacccagacaaaattaaacttcagctttctaagcataaggagtttcagaagactcttggtggcaagcagcctgtgtatgataccacaattagaactggcagagcactgaaagaaaagactttgcttcccgaagatagtcagaaacttgacaatttcctaggagaagtcagagacaaatgggatactgtttgtggcaagtctgtggagcggcagcacaagttggaggaagccctgctcttttcgggtcagttcatggatgctttgcaggcattggttgactggttatacaaggtggagccacagctggctgaggaccagcccgtgcacggggaccttgacctcgtcatgaacctcatggatgcacacaaggttttccagaaggaactgggaaagcgaacaggaaccgttcaggtcctgaagcggtcaggccgagagctgattgagaatagtcgagatgacaccacttgggtaaaaggacagctccaggaactgagcactcgctgggacactgtctgtaaactctctgtttccaaacaaagccggcttgagcaggccttaaaacaagcggaagtgtttcgagacacagtccacatgctgttggagtggctttctgaagcagagcaaacgcttcgctttcggggagcacttcctgatgacacagaggccctgcagtctctcattgacacccataaggaattcatgaagaaagtagaagaaaagcgagtggacgttaactcagcagtagccatgggagaagtcatcctggctgtctgccaccccgattgcatcacaaccatcaaacactggatcaccatcatccgagctcgcttcgaggaggtcctgacatgggctaagcagcaccagcagcgtcttgaaacggccttgtcagaactggtggctaatgctgagctcctggaagaacttctggcatggatccagtgggctgagaccaccctcattcagcgggatcaggagccaatcccgcagaacattgaccgagttaaagcccttatcgctgagcatcagacatttatggaggagatgactcgcaaacagcctgacgtggaccgggtcaccaagacatacaaaaggaaaaacatagagcctactcacgcgcctttcatagagaaatcccgcagcggaggcaggaaatccctaagtcagccaacccctcctcccatgccaatcctttcacagtctgaagcaaaaaacccacggatcaaccagctttctgcccgctggcagcaggtgtggctgttagcactggagcggcaaaggaaactgaatgatgccttggatcggctggaggagttgaaagaatttgccaactttgactttgatgtctggaggaaaaagtatatgcgttggatgaatcacaaaaagtctcgagtgatggatttcttccggcgcattgataaggaccaggatgggaagataacacgtcaggagtttatcgatggcattttagcatccaagttccccaccaccaagttagagatgactgctgtggctgacattttcgaccgagatggggatggttacattgattattatgaatttgtggctgctcttcatcccaacaaggatgcgtatcgaccaacaaccgatgcagataaaatcgaagatgaggttacaagacaagtggctcagtgcaaatgtgcaaaaaggtttcaggtggagcagatcggagagaataaataccggtttggggattctcagcagttgcggctggtccgtattctgcgcagcaccgtgatggttcgcgttggtggaggatggatggccttggatgaatttttagtgaaaaatgatccctgccgagcacgaggtagaactaacattgaacttagagagaaattcatcctaccagagggagcatcccagggaatgacccccttccgctcacggggtcgaaggtccaaaccatcttcccgggcagcttcccctactcgttccagctccagtgctagtcagagtaaccacagctgtacatccatgccatcttctccagccaccccagccagtggaaccaaggttatcccatcatcaggtagcaagttgaaacgaccaacaccaacttttcattctagtcggacatcccttgctggtgataccagcaatagttcttccccggcctccacaggtgccaaaactaatcgggcagaccctaaaaagtctgccagtcgccctgggagtcgggctgggagtcgagccgggagtcgagccagcagccggcgaggaagtgacgcttctgactttgacctcttagagacgcagtctgcttgttccgacacttcagaaagcagcgctgcagggggccaaggcaactccaggagagggctaaacaaaccttccaaaatcccaaccatgtctaagaagaccaccactgcctcccccaggactccaggtcccaagcgataacactgtctaagcacccccaagccactatccactttgaatcctgctccatacattgggtgtatatttattctgaacgggagaagttatattgttaaaagtgtaaaagaataattgtgttatgaagctgccttattttttttctttttgtaagttactattttcatgtgaatatttatgtagataaaatttgcctcctggtaaccctgtaatggatggggcccagaaatgaaatatttgagaaaaacaagtgaaaaggtcaagatacaaatgtgtattaaaaaaaaaaaagcctattaatagggtttctgcgcggtgcagggttgtaaacctgctttatcttttaggattattcctaaatgcatcttctttataaacttgacttgctatctcagcaagataaattatattaaaaaaataagaatcctgcagtgtttaaggaactctttttttgtaaatcacggacacctcaattagcaagaactgaggggagggctttttccattgtttaatgttttgtgatttttagctaaagagagggaacctcatctaagtaacatttgcacatgatacagcaaaaggagttcattgcaatactgtctttggatattgtttcagtactgggtgtttaaaggacaaatagctgctagaattcaggggtaaatgtaagtgttcagaaaacgtcagaacatttggggttttaaactgatttgttgctccctatccagcctagacaccagtaactcttgtgttcaccaggacccagacccttggcaagggataggctcgttggtgacattgtgaatttcagatttgttttatccactttttttgctatttatttaaatggtcgatcaacttcccacaaactgaggaatgaattccacgagcctgttctgaaaatgtggacgtaagacaaacacgtgctcgtcctttaatggagttcaccagcacacttgttaaccagtcctgtttgctttcgtctttttttgtgcgtaataaagtcaactgaccaagtgaccatgaaaaggggctgtctggggctcctgttttttagctgctgttcttcagctccgaccatgttgctgtgtgattatctcaattggttttaattgaggcagaaactgaagctctaccaatgaactgtttagaaacaagacacacttttgtattaaaattgcttgcagtaacaaatattttgtatttcctgattttcttttcaactattaccttatctataaatgttaccctggggtataatcatgttgtaggtacttaaatgcattccgcaaatcaaaatatcttgatggataaattatagagctt

SEQ ID NO: 11800 - DNA, 4667 bp, Homo sapiens
cagggcctgggcacgaccatggtgggacgtcgcccgcggcttcggggaccgctgcggcagcagaggcggctggccaggaacgcgggccgaggctggaccctttgggcagctagcccgtgatctctgccgtcaccgatcgcgattcctaccccctcgccttcccccggcgccgacggccacaccgccggacgatgcgcgcccgcggccgcccgggaggctgagcccagcttcccgctccgccttccccgcgcagctgcccccatggctttgcggggcgccgcgggagcgaccgacaccccggtgtcctcggccgggggagcccccggcggctcagcgtcctcgtcgtccacctcctcgggcggctcggcctcggcgggcgcggggctgtgggccgcgctctatgactacgaggctcgcggcgaggacgagctgagcctgcggcgcggccagctggtggaggtgttgtcgcaggacgccgccgtgtcgggcgacgagggctggtgggcaggccaggtgcagcggcgcctcggcatcttccccgccaactacgtggctccctgccgcccggccgccagccccgcgccgccgccctcgcggcccagctccccggtacacgtcgccttcgagcggctggagctgaaggagctcatcggcgctgggggcttcgggcaggtgtaccgcgccacctggcagggccaggaggtggccgtgaaggcggcgcgccaggacccggagcaggacgcggcggcggctgccgagagcgtgcggcgcgaggctcggctcttcgccatgctgcggcaccccaacatcatcgagctgcgcggcgtgtgcctgcagcagccgcacctctgcctggtgctggagttcgcccgcggcggagcgctcaaccgagcgctggccgctgccaacgccgccccggacccgcgcgcgcccggcccccgccgcgcgcgccgcatccctccgcacgtgctggtcaactgggccgtgcagatagcgcggggcatgctctacctgcatgaggaggccttcgtgcccatcctgcaccgggacctcaagtccagcaacattttgctacttgaagagatagaacatgatgacatctgcaataaaactttgaagattacagattttgggttggcgagggaatggcacaggaccaccaaaatgagcacagcaggcacctatgcctggatggcccccgaagtgatcaagtcttccttgttttctaagggaagcgacatctggagctgtggagtgctgctgtgggaactgctcaccggagaagtcccctatcggggcattgatggcctcgccgtggcttatggggtagcagtcaataaactcactttgcccattccatccacctgccctgagccgtttgccaagctcatgaaagaatgctggcaacaagaccctcatattcgtccatcgtttgccttaattctcgaacagttgactgctattgagggggcagtgatgactgagatgcctcaagaatcttttcattccatgcaagatgactggaaactagaaattcaacaaatgtttgatgagttgagaacaaaggaaaaggagctgcgatcccgggaagaggagctgactcgggcggctctgcagcagaagtctcaggaggagctgctaaagcggcgtgagcagcagctggcagagcgcgagatcgacgtgctggagcgggaacttaacattctgatattccagctaaaccaggagaagcccaaggtaaagaagaggaagggcaagtttaagagaagtcgtttaaagctcaaagatggacatcgaatcagtttaccttcagatttccagcacaagataaccgtgcaggcctctcccaacttggacaaacggcggagcctgaacagcagcagttccagtcccccgagcagccccacaatgatgccccgactccgagccatacagttgacttcagatgaaagcaataaaacttggggaaggaacacagtctttcgacaagaagaatttgaggatgtaaaaaggaattttaagaaaaaaggttgtacctggggaccaaattccattcaaatgaaagatagaacagattgcaaagaaaggataagacctctctccgatggcaacagtccttggtcaactatcttaataaaaaatcagaaaaccatgcccttggcttcattgtttgtggaccagccagggtcctgtgaagagccaaaactttcccctgatggattagaacacagaaaaccaaaacaaataaaattgcctagtcaggcctacattgatctacctcttgggaaagatgctcagagagagaatcctgcagaagctggaagctgggaggaggcagcctctgcgaatgctgccacagtcaccattgagatggctcctacgaatagtctgagtagatccccccagagaaagaaaacggagtcagctctgtatgggtgcaccgtccttctggcatcggtggctctgggactggacctcagagagcttcataaagcacaggctgctgaagaaccgttgcccaaggaagagaagaagaaacgagagggaatcttccagcgggcttccaagtcccgcagaagcgccagtcctcccacaagcctgtcatccacctgtggggaggccagcagcccaccctccctgccactgtcaagtgccctgggcatcctctccacaccttctttctccacaaagtgcctgctgcagatggacagtgaagatccactggtggacagtgcacctgtcacttgtgactctgagatgctcactccggatttttgtcccactgccccaggaagtggtcgtgagccagccctcatgccaagacttgacactgattgtagtgtatcaagaaacttgccgtcttccttcctacagcggacatgtgggaatgtaccttactgtgcttcttcaaaacatagaccatcacatcacagacggaccatgtctgatggaaatccgaccccaactggtgcaactattatctcagccactggagcctctgcactgccactctgcccctcacctgctcctcacagtcatctgccaagggaggtctcacccaagaagcacagcactgtccacatcgtgcctcagcgtcgccctgcctccctgagaagccgctcagatctgcctcaggcttacccacagacagcagtgtctcagctggcacagactgcctgtgtagtgggtcgcccaggaccacatcccacccaattcctcgctgccaaggagagaactaaatcccatgtgccttcattactggatgttgacgtggaaggtcagagcagggactacactgtgccactgggtagaatgaggagcaaaaccagccggccatctatatatgaactggagaaagaattcctgtcttaaactaagtgccttactgttgtttaagcatttttttaaggtgaacaaatgaacacaatgtgtctacctttgaactgtttcatgctgctgtgttttcaaaagctgtggccatgttcctaaattagtaagatatatccagcttctcaaaaaatgtatatgattgctgttagccatgtctattgtttttcctctggattcttttcttataacttggaatacacaaaagtataaaacaagagatgtgcaccaatgaaaactatgctgggtcgaattaccttcagcacaatgttaatgttttcgttctcatttatgcctttgtccatttgcacacaacagaaattgtaatgagcttcactatttttgtttctttccttccttttttttcttttttcctttctttcctttttcttgtcttgtttcttgtttttttctcttgtagtttcttttcttaattgtcatttttgcaacaaaaagccaagaaagagctttagtttcttggcaagaataatgtgatattagtaagtaaaggttcttaaaagtctgatgactggaatagatataaagtcctgtttaaactacctaaccttggctgtgggccgataatgcatatgtccagttctcacttaaattatgcaatgatatttctctctgaggaaattatacggaatgtaacttataaaagctttactgaatataagttataagcattttattcattagaactccaaaatagatgttcaaagttcagtccttgccatttgactgagaccacatggtgtgccccttgagtgaggctaatctttaggtttttcctatagaaaacgttcttcctccatcagtagccctttatttgatattcagaagtggaaagctttttcattctccagtagaacttttaaaaattgttacagatacctagctcttcacagatatcatgtattgtaaacagtcatgtgtcttaattttattttctctatttgagtgcataattatcctaataatcccaaagacactgacaactcaaggaacagcagtacagtactattagaagttaagtatgttgttgttatttcacatttcatttaattgtggataaatgttagacatctgttgaaataagctcatatggtggaaacgacaactatattatgaattattttcagaaatggatctttgaatagcagatcaggatttaaataataaaattatctatgaatcacttttatggtcatacatatatgatacaaatccagagttattggtgcagaaatggctacccgagagcttggtaaatttgc

SEQ ID NO: 11801 - DNA, 1993 bp, Homo sapiens
ccgctctgtctgcttcgccaccttctccccgagcactgcccggccggccgccatggctaacgtggctgacacgaagctgtacgacatcctgggcgtcccgcccggcgccagcgagaacgagctgaagaaggcatacagaaagttagccaaggaatatcatcctgataagaatccaaatgcaggagacaaatttaaagaaataagttttgcatatgaagtactatcaaatcctgagaagcgtgagttatatgacagatacggagagcaaggtcttcgggaaggcagcggcggaggtggtggcatggatgatattttctctcacatttttggtgggggattgttcggcttcatgggcaatcagagtagaagtcgaaatggcagaagaagaggagaggacatgatgcatccactcaaagtatctttagaagatctgtataatggcaagacaaccaaactacaacttagcaagaatgtgctctgtagtgcatgcagtggccaaggcggaaagtctggagctgtccaaaagtgtagtgcttgtcgaggtcgaggtgtgcgcatcatgatcagacagctggctccagggatggtacaacagatgcagtctgtgtgctctgattgtaatggagaaggagaggtaattaatgaaaaagaccgctgtaaaaaatgtgaagggaagaaggtgattaaagaagtcaagattcttgaagtccacgtagacaaaggcatgaaacatggacagagaattacattcactggggaagcagaccaggccccaggagtggaacccggagacattgttcttttgctacaggagaaagaacatgaggtatttcagagagatgggaatgatttgcacatgacatataaaataggacttgttgaagctctatgtggatttcagttcacatttaagcaccttgatggacgtcagattgtggtgaaatacccccctggcaaagtaattgaaccagggtgtgttcgtgtagttcgaggtgaagggatgccgcagtatcgtaatccctttgaaaaaggtgatctttacataaagtttgatgtgcagtttcctgaaaacaactggatcaacccagacaagctttctgaactagaagatcttctgccatctagaccggaagttcctaacataattggagaaacagaggaggtagagcttcaggaatttgatagcactcgaggctcaggaggtggtcagaggcgtgaagcctataatgatagctctgatgaagaaagcagcagccatcatggacctggagtgcagtgtgcccatcagtaaactctgcaaacaaattgcacaggtggattttctttccacatttgcctgatttgttctcagcaatccagctggagtgtcttatcaatcccagatgaactgagggacatctgttggtctatgtataacttttaaaattggtatagtatctacagagtgtataatttaaactaaccacaaagctttacatcttcattttgactgttccatagcaaaataaagcacttgaaaggaaacaaaactccctttcacacatggattattataagtttcaatcctggtatctgtgcttgatttttatcagttttgtgtaaatttttatgtttcatattttaaatttaaatcccacattgtaaagtttgtacaatttgtcctgaagctttgtgtttggctgcacctgcataagctgctacaaataaaataaaaaatttcatagcctgtatctatcatttaaatgcatggaaaaaaatgggctttgcacacaatgggtttggagctgactgggaacaatggaaaaaattacattagctgtggttgtaaagtttttttgtttttgggttttgttttttttttgttttttttttttttttttttaccattttgtgaaaggtttttgaaaatcgataataaaaagcggttggtgtaaatttaaaaaaaaaaaaaaaaaaaaaaaaaaaaaaaaaaaaaaaaaaaaaaaaaaaaaaa

SEQ ID NO: 11802 - DNA, 3002 bp, Homo sapiens
gccagtcaccttcagtttctggagctggccgtcaacatgtcctttcctaaggcgcccttgaaacgattcaatgacccttctggttgtgcaccatctccaggtgcttatgatgttaaaactttagaagtattgaaaggaccagtatcctttcagaaatcacaaagatttaaacaacaaaaagaatctaaacaaaatcttaatgttgacaaagatactaccttgcctgcttcagctagaaaagttaagtcttcggaatcaaaggaatctcaaaagaatgataaagatttgaagatattagagaaagagattcgtgttcttctacaggaacgtggtgcccaggacagccggatccaggatctggaaactgagttggaaaagatggaagcaaggctaaatgctgcactaagggaaaaaacatctctctctgcaaataatgctacactggaaaaacaacttattgaattgaccaggactaatgaactactaaaatctaagttttctgaaaatggtaaccagaagaatttgagaattctaagcttggagttgatgaaacttagaaacaaaagagaaacaaagatgaggggtatgatggctaagcaagaaggcatggagatgaagctgcaggtcacccaaaggagtctcgaagagtctcaagggaaaatagcccaactggagggaaaacttgtttcaatagagaaagaaaagattgatgaaaaatctgaaacagaaaaactcttggaatacatcgaagaaattagttgtgcttcagatcaagtggaaaaatacaagctagatattgcccagttagaagaaaatttgaaagagaagaatgatgaaattttaagccttaagcagtctcttgaggagaatattgttatattatctaaacaagtagaagatctaaatgtgaaatgtcagctgcttgaaaaagaaaaagaagaccatgtcaacaggaatagagaacacaacgaaaatctaaatgcagagatgcaaaacttaaaacagaagtttattcttgaacaacaggaacgtgaaaagcttcaacaaaaagaattacaaattgattcacttctgcaacaagagaaagaattatcttcgagtcttcatcagaagctctgttcttttcaagaggaaatggttaaagagaagaatctgtttgaggaagaattaaagcaaacactggatgagcttgataaattacagcaaaaggaggaacaagctgaaaggctggtcaagcaattggaagaggaagcaaaatctagagctgaagaattaaaactcctagaagaaaagctgaaagggaaggaggctgaactggagaaaagtagtgctgctcatacccaggccaccctgcttttgcaggaaaagtatgacagtatggtgcaaagccttgaagatgttactgctcaatttgaaagctataaagcgttaacagccagtgagatagaagatcttaagctggagaactcatcattacaggaaaaagcggccaaggctgggaaaaatgcagaggatgttcagcatcagattttggcaactgagagctcaaatcaagaatatgtaaggatgcttctagatctgcagaccaagtcagcactaaaggaaacagaaattaaagaaatcacagtttcttttcttcaaaaaataactgatttgcagaaccaactcaagcaacaggaggaagactttagaaaacagctggaagatgaagaaggaagaaaagctgaaaaagaaaatacaacagcagaattaactgaagaaattaacaagtggcgtctcctctatgaagaactatataataaaacaaaaccttttcagctacaactagatgcttttgaagtagaaaaacaggcattgttgaatgaacatggtgcagctcaggaacagctaaataaaataagagattcatatgctaaattattgggtcatcagaatttgaaacaaaaaatcaagcatgttgtgaagttgaaagatgaaaatagccaactcaaatcggaagtatcaaaactccgctgtcagcttgctaaaaaaaaacaaagtgagacaaaacttcaagaggaattgaataaagttctaggtatcaaacactttgatccttcaaaggcttttcatcatgaaagtaaagaaaattttgccctgaagaccccattaaaagaaggcaatacaaactgttaccgagctcctatggagtgtcaagaatcatggaagtaaacatctgagaaacctgttgaagattatttcattcgtcttgttgttattgatgttgctgttattatatttgacatgggtattttataatgttgtatttaattttaactgccaatccttaaatatgtgaaaggaacattttttaccaaagtgtcttttgacattttattttttcttgcaaatacctcctccctaatgctcacctttatcacctcattctgaaccctttcgctggctttccagcttagaatgcatctcatcaacttaaaagtcagtatcatattattatcctcctgttctgaaaccttagtttcaagagtctaaaccccagattcttcagcttgatcctggaggtcttttctagtctgagcttctttagctaggctaaaacaccttggcttgttattgcctctactttgattctgataatgctcacttggtcctacctattatccttctacttgtccagttcaaataagaaataaggacaagcctaacttcatagaaacctctctatttttaatcagttgtttaataatttacaggttcttaggctccatcctgtttgtatgaaattataatctgtggattggcctttaagcctgcattcttaacaaactcttcagttaattcttagatacactaaaaatctgagaaactctacatgtaactatttcttcagagtttgtcatatactgcttgtcatctgcatgtctactcagcatttgattaacatttgtgtaatatgaaataaaattacacagtaagtcatttaaccaaaaaaaaaaaaaaaa

SEQ ID NO: 11803 - DNA, 2957 bp, Homo sapiens
gccagtcaccttcagtttctggagctggccgtcaacatgtcctttcctaaggcgcccttgaaacgattcaatgacccttctggttgtgcaccatctccaggtgcttatgatgttaaaactttagaagtattgaaaggaccagtatcctttcagaaatcacaaagatttaaacaacaaaaagaatctaaacaaaatcttaatgttgacaaagatactaccttgcctgcttcagctagaaaagttaagtcttcggaatcaaagattcgtgttcttctacaggaacgtggtgcccaggacagccggatccaggatctggaaactgagttggaaaagatggaagcaaggctaaatgctgcactaagggaaaaaacatctctctctgcaaataatgctacactggaaaaacaacttattgaattgaccaggactaatgaactactaaaatctaagttttctgaaaatggtaaccagaagaatttgagaattctaagcttggagttgatgaaacttagaaacaaaagagaaacaaagatgaggggtatgatggctaagcaagaaggcatggagatgaagctgcaggtcacccaaaggagtctcgaagagtctcaagggaaaatagcccaactggagggaaaacttgtttcaatagagaaagaaaagattgatgaaaaatctgaaacagaaaaactcttggaatacatcgaagaaattagttgtgcttcagatcaagtggaaaaatacaagctagatattgcccagttagaagaaaatttgaaagagaagaatgatgaaattttaagccttaagcagtctcttgaggagaatattgttatattatctaaacaagtagaagatctaaatgtgaaatgtcagctgcttgaaaaagaaaaagaagaccatgtcaacaggaatagagaacacaacgaaaatctaaatgcagagatgcaaaacttaaaacagaagtttattcttgaacaacaggaacgtgaaaagcttcaacaaaaagaattacaaattgattcacttctgcaacaagagaaagaattatcttcgagtcttcatcagaagctctgttcttttcaagaggaaatggttaaagagaagaatctgtttgaggaagaattaaagcaaacactggatgagcttgataaattacagcaaaaggaggaacaagctgaaaggctggtcaagcaattggaagaggaagcaaaatctagagctgaagaattaaaactcctagaagaaaagctgaaagggaaggaggctgaactggagaaaagtagtgctgctcatacccaggccaccctgcttttgcaggaaaagtatgacagtatggtgcaaagccttgaagatgttactgctcaatttgaaagctataaagcgttaacagccagtgagatagaagatcttaagctggagaactcatcattacaggaaaaagcggccaaggctgggaaaaatgcagaggatgttcagcatcagattttggcaactgagagctcaaatcaagaatatgtaaggatgcttctagatctgcagaccaagtcagcactaaaggaaacagaaattaaagaaatcacagtttcttttcttcaaaaaataactgatttgcagaaccaactcaagcaacaggaggaagactttagaaaacagctggaagatgaagaaggaagaaaagctgaaaaagaaaatacaacagcagaattaactgaagaaattaacaagtggcgtctcctctatgaagaactatataataaaacaaaaccttttcagctacaactagatgcttttgaagtagaaaaacaggcattgttgaatgaacatggtgcagctcaggaacagctaaataaaataagagattcatatgctaaattattgggtcatcagaatttgaaacaaaaaatcaagcatgttgtgaagttgaaagatgaaaatagccaactcaaatcggaagtatcaaaactccgctgtcagcttgctaaaaaaaaacaaagtgagacaaaacttcaagaggaattgaataaagttctaggtatcaaacactttgatccttcaaaggcttttcatcatgaaagtaaagaaaattttgccctgaagaccccattaaaagaaggcaatacaaactgttaccgagctcctatggagtgtcaagaatcatggaagtaaacatctgagaaacctgttgaagattatttcattcgtcttgttgttattgatgttgctgttattatatttgacatgggtattttataatgttgtatttaattttaactgccaatccttaaatatgtgaaaggaacattttttaccaaagtgtcttttgacattttattttttcttgcaaatacctcctccctaatgctcacctttatcacctcattctgaaccctttcgctggctttccagcttagaatgcatctcatcaacttaaaagtcagtatcatattattatcctcctgttctgaaaccttagtttcaagagtctaaaccccagattcttcagcttgatcctggaggtcttttctagtctgagcttctttagctaggctaaaacaccttggcttgttattgcctctactttgattctgataatgctcacttggtcctacctattatccttctacttgtccagttcaaataagaaataaggacaagcctaacttcatagaaacctctctatttttaatcagttgtttaataatttacaggttcttaggctccatcctgtttgtatgaaattataatctgtggattggcctttaagcctgcattcttaacaaactcttcagttaattcttagatacactaaaaatctgagaaactctacatgtaactatttcttcagagtttgtcatatactgcttgtcatctgcatgtctactcagcatttgattaacatttgtgtaatatgaaataaaattacacagtaagtcatttaaccaaaaaaaaaaaaaaaa

SEQ ID NO: 11804 - DNA, 3522 bp, Homo sapiens
acttcctgccgggctgcgggcgcctgagcggctcttcagcgtttgcgccggcggctgccgcgtctctctcggctcccgcttcctttgaccgcctcccccccccggcccggcggcgcccgcctcctccacggccactccgcctcttccctcccttcgtcccttcttcctctcccttttttccttcttccttcccctcctcgccgccaccgcccaggaccgccggccgggggacgagctcggagcagcagccaggtggagttttgctcttgtcgcccaggctggagtgcagtggcgtgatctcggctcactgcaacctccacctcccaggttcaagcgattttcccacttcagcctcccgataagctgagattacagagtttattaaccacttaacctctcagaactgaacaaagacaacattgttcctggaacgccctctttttaaaaaagaaagcataacccctactgtagaactaaatgcactgtgcatgaaacttggaaaaaaaccaatgtataagcctgttgacccttactctcggatgcagtccacctataactacaacatgagaggaggtgcttatcccccgaggtacttttacccatttccagttccacctttactttatcaagtggaactttctgtgggaggacagcaatttaatggcaaaggaaagacaagacaggctgcgaaacacgatgctgctgccaaagcgttgaggatcctgcagaatgagcccctgccagagaggctggaggtgaatggaagagaatccgaagaagaaaatctcaataaatctgaaataagtcaagtgtttgagattgcacttaaacggaacttgcctgtgaatttcgaggtggcccgggagagtggcccaccccacatgaagaactttgtgaccaaggtttcggttggggagtttgtgggggaaggtgaagggaaaagcaagaagatttcaaagaaaaatgccgccatagctgttcttgaggagctgaagaagttaccgcccctgcctgcagttgaacgagtaaagcctagaatcaaaaagaaaacaaaacccatagtcaagccacagacaagcccagaatatggccaggggatcaatccgattagccgactggcccagatccagcaggcaaaaaaggagaaggagccagagtacacgctcctcacagagcgaggcctcccgcgccgcagggagtttgtgatgcaggtgaaggttggaaaccacactgcagaaggaacgggcaccaacaagaaggtggccaagcgcaatgcagccgagaacatgctggagatccttggtttcaaagtcccgcaggcgcagcccaccaaacccgcactcaagtcagaggagaagacacccataaagaaaccaggggatggaagaaaagtaaccttttttgaacctggctctggggatgaaaatgggactagtaataaagaggatgagttcaggatgccttatctaagtcatcagcagctgcctgctggaattcttcccatggtgcccgaggtcgcccaggctgtaggagttagtcaaggacatcacaccaaagattttaccagggcagctccgaatcctgccaaggccacggtaactgccatgatagcccgagagttgttgtatgggggcacctcgcccacagccgagaccattttaaagaataacatctcttcaggccacgtaccccatggacctctcacgagaccctctgagcaactggactatctttccagagtccagggattccaggttgaatacaaagacttccccaaaaacaacaagaacgaatttgtatctcttatcaattgctcctctcagccacctctgatcagccatggtatcggcaaggatgtggagtcctgccatgatatggctgcgctgaacatcttaaagttgctgtctgagttggaccaacaaagtacagagatgccaagaacaggaaacggaccaatgtctgtgtgtgggaggtgctgaaccttttctggccatgaaccattataaaatcccaacatatatactgaaaatactgaaactgctttgaaaatttggaatttctgatacctccagtgggccgagagacacggtgggtaaaggatgtgggcagcagcagggaagacaacagaaacacaaggaggcggctgtggccgggctggactgtgctggggtttgttgtgatggccactcggtgacctggcggtccctacgcaatagcagctgcctgtggggaagaagggctgcccagccagctggttctcccgggacaccagcagatccacaccctgggcacctccgtgtttggtcttttttttcccctgtgtgaaagaagaaacggcacgaccccttctcaagctggctcactcagacacattgggacaaaccctggacagccatgccagagagaggcctttgaccggccccagagctaaaagcaccagagaaaatcaaatgcttcctactcagcgtgacccaacttttctagtgtgccacggccccaccacctcctgcagtacccacaccatcaccactgctttctcttccaacagtgatctgtattcttagtttcattattttcttttgattgatatgacactatataaaattttcatttgagaatttctcaattgtatctagttaaatagcacagtttggaaacttgtctgagactgactttatcaataatctaaccgacaaagatcatatccatgtgtatgtggttagacatttttatttcattgactaacccaggacagtttcagtgatgcaaattgtgtgccctctggttcagctgaaacagtcctggactttcaaaaaccttgaataagtctcccacagttgtataaattggacaatttaggaattttaaactttagatgatcatttggttccatttttatttcatttttatttttgttaatgcaaacaggacttaaatgaactttgatctctgttttaaagattattaaaaaacattgtgtatctatacatatggctcttgaggacttagctttcactacactacaggatatgatctccatgtagtccatataaacctgcagagtgattttccagagtgctcgatactgttaattacatctccattagggctgaaaagaatgacctacgtttctgtatacagctgtgttgcttttgatgttgtgttactgtacacagaagtgtgtgcactgaggctctgcgtgtggtccgtatggaaagcctggtagccctgcgagttaagtactgcttccattcattgtttacgctggaatttttctccccatggaatgtaagtaaaacttaagtgtttgtcatcaataaatggtaatactaaatttttttgttaatttattctcaaatgccactactgctaggttggtcccctcccaacttgcccctatcctttttttatttttaagaaaaaaactttgtaatgcttgtgattccatctgggcaaaagtctgaagatctgaaataactttatatcaaaccattgatcaataaacagctactaatgaaaaaa

SEQ ID NO: 11805 - DNA, 3399 bp, Homo sapiens
acttcctgccgggctgcgggcgcctgagcggctcttcagcgtttgcgccggcggctgccgcgtctctctcggctcccgcttcctttgaccgcctcccccccccggcccggcggcgcccgcctcctccacggccactccgcctcttccctcccttcgtcccttcttcctctcccttttttccttcttccttcccctcctcgccgccaccgcccaggaccgccggccgggggacgagctcggagcagcagccagagtttattaaccacttaacctctcagaactgaacaaagacaacattgttcctggaacgccctctttttaaaaaagaaagcataacccctactgtagaactaaatgcactgtgcatgaaacttggaaaaaaaccaatgtataagcctgttgacccttactctcggatgcagtccacctataactacaacatgagaggaggtgcttatcccccgaggtacttttacccatttccagttccacctttactttatcaagtggaactttctgtgggaggacagcaatttaatggcaaaggaaagacaagacaggctgcgaaacacgatgctgctgccaaagcgttgaggatcctgcagaatgagcccctgccagagaggctggaggtgaatggaagagaatccgaagaagaaaatctcaataaatctgaaataagtcaagtgtttgagattgcacttaaacggaacttgcctgtgaatttcgaggtggcccgggagagtggcccaccccacatgaagaactttgtgaccaaggtttcggttggggagtttgtgggggaaggtgaagggaaaagcaagaagatttcaaagaaaaatgccgccatagctgttcttgaggagctgaagaagttaccgcccctgcctgcagttgaacgagtaaagcctagaatcaaaaagaaaacaaaacccatagtcaagccacagacaagcccagaatatggccaggggatcaatccgattagccgactggcccagatccagcaggcaaaaaaggagaaggagccagagtacacgctcctcacagagcgaggcctcccgcgccgcagggagtttgtgatgcaggtgaaggttggaaaccacactgcagaaggaacgggcaccaacaagaaggtggccaagcgcaatgcagccgagaacatgctggagatccttggtttcaaagtcccgcaggcgcagcccaccaaacccgcactcaagtcagaggagaagacacccataaagaaaccaggggatggaagaaaagtaaccttttttgaacctggctctggggatgaaaatgggactagtaataaagaggatgagttcaggatgccttatctaagtcatcagcagctgcctgctggaattcttcccatggtgcccgaggtcgcccaggctgtaggagttagtcaaggacatcacaccaaagattttaccagggcagctccgaatcctgccaaggccacggtaactgccatgatagcccgagagttgttgtatgggggcacctcgcccacagccgagaccattttaaagaataacatctcttcaggccacgtaccccatggacctctcacgagaccctctgagcaactggactatctttccagagtccagggattccaggttgaatacaaagacttccccaaaaacaacaagaacgaatttgtatctcttatcaattgctcctctcagccacctctgatcagccatggtatcggcaaggatgtggagtcctgccatgatatggctgcgctgaacatcttaaagttgctgtctgagttggaccaacaaagtacagagatgccaagaacaggaaacggaccaatgtctgtgtgtgggaggtgctgaaccttttctggccatgaaccattataaaatcccaacatatatactgaaaatactgaaactgctttgaaaatttggaatttctgatacctccagtgggccgagagacacggtgggtaaaggatgtgggcagcagcagggaagacaacagaaacacaaggaggcggctgtggccgggctggactgtgctggggtttgttgtgatggccactcggtgacctggcggtccctacgcaatagcagctgcctgtggggaagaagggctgcccagccagctggttctcccgggacaccagcagatccacaccctgggcacctccgtgtttggtcttttttttcccctgtgtgaaagaagaaacggcacgaccccttctcaagctggctcactcagacacattgggacaaaccctggacagccatgccagagagaggcctttgaccggccccagagctaaaagcaccagagaaaatcaaatgcttcctactcagcgtgacccaacttttctagtgtgccacggccccaccacctcctgcagtacccacaccatcaccactgctttctcttccaacagtgatctgtattcttagtttcattattttcttttgattgatatgacactatataaaattttcatttgagaatttctcaattgtatctagttaaatagcacagtttggaaacttgtctgagactgactttatcaataatctaaccgacaaagatcatatccatgtgtatgtggttagacatttttatttcattgactaacccaggacagtttcagtgatgcaaattgtgtgccctctggttcagctgaaacagtcctggactttcaaaaaccttgaataagtctcccacagttgtataaattggacaatttaggaattttaaactttagatgatcatttggttccatttttatttcatttttatttttgttaatgcaaacaggacttaaatgaactttgatctctgttttaaagattattaaaaaacattgtgtatctatacatatggctcttgaggacttagctttcactacactacaggatatgatctccatgtagtccatataaacctgcagagtgattttccagagtgctcgatactgttaattacatctccattagggctgaaaagaatgacctacgtttctgtatacagctgtgttgcttttgatgttgtgttactgtacacagaagtgtgtgcactgaggctctgcgtgtggtccgtatggaaagcctggtagccctgcgagttaagtactgcttccattcattgtttacgctggaatttttctccccatggaatgtaagtaaaacttaagtgtttgtcatcaataaatggtaatactaaatttttttgttaatttattctcaaatgccactactgctaggttggtcccctcccaacttgcccctatcctttttttatttttaagaaaaaaactttgtaatgcttgtgattccatctgggcaaaagtctgaagatctgaaataactttatatcaaaccattgatcaataaacagctactaatgaaaaaa

SEQ ID NO: 11806 - DNA, 3324 bp, Homo sapiens
acttcctgccgggctgcgggcgcctgagcggctcttcagcgtttgcgccggcggctgccgcgtctctctcggctcccgcttcctttgaccgcctcccccccccggcccggcggcgcccgcctcctccacggccactccgcctcttccctcccttcgtcccttcttcctctcccttttttccttcttccttcccctcctcgccgccaccgcccaggaccgccggccgggggacgagctcggagcagcagccagaaagcataacccctactgtagaactaaatgcactgtgcatgaaacttggaaaaaaaccaatgtataagcctgttgacccttactctcggatgcagtccacctataactacaacatgagaggaggtgcttatcccccgaggtacttttacccatttccagttccacctttactttatcaagtggaactttctgtgggaggacagcaatttaatggcaaaggaaagacaagacaggctgcgaaacacgatgctgctgccaaagcgttgaggatcctgcagaatgagcccctgccagagaggctggaggtgaatggaagagaatccgaagaagaaaatctcaataaatctgaaataagtcaagtgtttgagattgcacttaaacggaacttgcctgtgaatttcgaggtggcccgggagagtggcccaccccacatgaagaactttgtgaccaaggtttcggttggggagtttgtgggggaaggtgaagggaaaagcaagaagatttcaaagaaaaatgccgccatagctgttcttgaggagctgaagaagttaccgcccctgcctgcagttgaacgagtaaagcctagaatcaaaaagaaaacaaaacccatagtcaagccacagacaagcccagaatatggccaggggatcaatccgattagccgactggcccagatccagcaggcaaaaaaggagaaggagccagagtacacgctcctcacagagcgaggcctcccgcgccgcagggagtttgtgatgcaggtgaaggttggaaaccacactgcagaaggaacgggcaccaacaagaaggtggccaagcgcaatgcagccgagaacatgctggagatccttggtttcaaagtcccgcaggcgcagcccaccaaacccgcactcaagtcagaggagaagacacccataaagaaaccaggggatggaagaaaagtaaccttttttgaacctggctctggggatgaaaatgggactagtaataaagaggatgagttcaggatgccttatctaagtcatcagcagctgcctgctggaattcttcccatggtgcccgaggtcgcccaggctgtaggagttagtcaaggacatcacaccaaagattttaccagggcagctccgaatcctgccaaggccacggtaactgccatgatagcccgagagttgttgtatgggggcacctcgcccacagccgagaccattttaaagaataacatctcttcaggccacgtaccccatggacctctcacgagaccctctgagcaactggactatctttccagagtccagggattccaggttgaatacaaagacttccccaaaaacaacaagaacgaatttgtatctcttatcaattgctcctctcagccacctctgatcagccatggtatcggcaaggatgtggagtcctgccatgatatggctgcgctgaacatcttaaagttgctgtctgagttggaccaacaaagtacagagatgccaagaacaggaaacggaccaatgtctgtgtgtgggaggtgctgaaccttttctggccatgaaccattataaaatcccaacatatatactgaaaatactgaaactgctttgaaaatttggaatttctgatacctccagtgggccgagagacacggtgggtaaaggatgtgggcagcagcagggaagacaacagaaacacaaggaggcggctgtggccgggctggactgtgctggggtttgttgtgatggccactcggtgacctggcggtccctacgcaatagcagctgcctgtggggaagaagggctgcccagccagctggttctcccgggacaccagcagatccacaccctgggcacctccgtgtttggtcttttttttcccctgtgtgaaagaagaaacggcacgaccccttctcaagctggctcactcagacacattgggacaaaccctggacagccatgccagagagaggcctttgaccggccccagagctaaaagcaccagagaaaatcaaatgcttcctactcagcgtgacccaacttttctagtgtgccacggccccaccacctcctgcagtacccacaccatcaccactgctttctcttccaacagtgatctgtattcttagtttcattattttcttttgattgatatgacactatataaaattttcatttgagaatttctcaattgtatctagttaaatagcacagtttggaaacttgtctgagactgactttatcaataatctaaccgacaaagatcatatccatgtgtatgtggttagacatttttatttcattgactaacccaggacagtttcagtgatgcaaattgtgtgccctctggttcagctgaaacagtcctggactttcaaaaaccttgaataagtctcccacagttgtataaattggacaatttaggaattttaaactttagatgatcatttggttccatttttatttcatttttatttttgttaatgcaaacaggacttaaatgaactttgatctctgttttaaagattattaaaaaacattgtgtatctatacatatggctcttgaggacttagctttcactacactacaggatatgatctccatgtagtccatataaacctgcagagtgattttccagagtgctcgatactgttaattacatctccattagggctgaaaagaatgacctacgtttctgtatacagctgtgttgcttttgatgttgtgttactgtacacagaagtgtgtgcactgaggctctgcgtgtggtccgtatggaaagcctggtagccctgcgagttaagtactgcttccattcattgtttacgctggaatttttctccccatggaatgtaagtaaaacttaagtgtttgtcatcaataaatggtaatactaaatttttttgttaatttattctcaaatgccactactgctaggttggtcccctcccaacttgcccctatcctttttttatttttaagaaaaaaactttgtaatgcttgtgattccatctgggcaaaagtctgaagatctgaaataactttatatcaaaccattgatcaataaacagctactaatgaaaaaa

SEQ ID NO: 11807 - DNA, 3688 bp, Homo sapiens
acttcctgccgggctgcgggcgcctgagcggctcttcagcgtttgcgccggcggctgccgcgtctctctcggctcccgcttcctttgaccgcctcccccccccggcccggcggcgcccgcctcctccacggccactccgcctcttccctcccttcgtcccttcttcctctcccttttttccttcttccttcccctcctcgccgccaccgcccaggaccgccggccgggggacgagctcggagcagcagccagagtttattaaccacttaacctctcagaactgaacaaagacaacattgttcctggaacgccctctttttaaaaaaggtagaactttagacttcatagcactgaattaacctgcactgaaagctgtttacctgcatttgttcacttttgttgaaagtgaccatgtctcaagttcaagtgcaagttcagaacccatctgctgctctctcagggagccaaatactgaacaagaaccagtctcttctctcacagcctttgatgagtattccttctactactagctctctgccctctgaaaatgcaggtagacccattcaaaactctgctttaccctctgcatctattacatccaccagtgcagctgcagaaagcataacccctactgtagaactaaatgcactgtgcatgaaacttggaaaaaaaccaatgtataagcctgttgacccttactctcggatgcagtccacctataactacaacatgagaggaggtgcttatcccccgaggtacttttacccatttccagttccacctttactttatcaagtggaactttctgtgggaggacagcaatttaatggcaaaggaaagacaagacaggctgcgaaacacgatgctgctgccaaagcgttgaggatcctgcagaatgagcccctgccagagaggctggaggtgaatggaagagaatccgaagaagaaaatctcaataaatctgaaataagtcaagtgtttgagattgcacttaaacggaacttgcctgtgaatttcgaggtggcccgggagagtggcccaccccacatgaagaactttgtgaccaaggtttcggttggggagtttgtgggggaaggtgaagggaaaagcaagaagatttcaaagaaaaatgccgccatagctgttcttgaggagctgaagaagttaccgcccctgcctgcagttgaacgagtaaagcctagaatcaaaaagaaaacaaaacccatagtcaagccacagacaagcccagaatatggccaggggatcaatccgattagccgactggcccagatccagcaggcaaaaaaggagaaggagccagagtacacgctcctcacagagcgaggcctcccgcgccgcagggagtttgtgatgcaggtgaaggttggaaaccacactgcagaaggaacgggcaccaacaagaaggtggccaagcgcaatgcagccgagaacatgctggagatccttggtttcaaagtcccgcaggcgcagcccaccaaacccgcactcaagtcagaggagaagacacccataaagaaaccaggggatggaagaaaagtaaccttttttgaacctggctctggggatgaaaatgggactagtaataaagaggatgagttcaggatgccttatctaagtcatcagcagctgcctgctggaattcttcccatggtgcccgaggtcgcccaggctgtaggagttagtcaaggacatcacaccaaagattttaccagggcagctccgaatcctgccaaggccacggtaactgccatgatagcccgagagttgttgtatgggggcacctcgcccacagccgagaccattttaaagaataacatctcttcaggccacgtaccccatggacctctcacgagaccctctgagcaactggactatctttccagagtccagggattccaggttgaatacaaagacttccccaaaaacaacaagaacgaatttgtatctcttatcaattgctcctctcagccacctctgatcagccatggtatcggcaaggatgtggagtcctgccatgatatggctgcgctgaacatcttaaagttgctgtctgagttggaccaacaaagtacagagatgccaagaacaggaaacggaccaatgtctgtgtgtgggaggtgctgaaccttttctggccatgaaccattataaaatcccaacatatatactgaaaatactgaaactgctttgaaaatttggaatttctgatacctccagtgggccgagagacacggtgggtaaaggatgtgggcagcagcagggaagacaacagaaacacaaggaggcggctgtggccgggctggactgtgctggggtttgttgtgatggccactcggtgacctggcggtccctacgcaatagcagctgcctgtggggaagaagggctgcccagccagctggttctcccgggacaccagcagatccacaccctgggcacctccgtgtttggtcttttttttcccctgtgtgaaagaagaaacggcacgaccccttctcaagctggctcactcagacacattgggacaaaccctggacagccatgccagagagaggcctttgaccggccccagagctaaaagcaccagagaaaatcaaatgcttcctactcagcgtgacccaacttttctagtgtgccacggccccaccacctcctgcagtacccacaccatcaccactgctttctcttccaacagtgatctgtattcttagtttcattattttcttttgattgatatgacactatataaaattttcatttgagaatttctcaattgtatctagttaaatagcacagtttggaaacttgtctgagactgactttatcaataatctaaccgacaaagatcatatccatgtgtatgtggttagacatttttatttcattgactaacccaggacagtttcagtgatgcaaattgtgtgccctctggttcagctgaaacagtcctggactttcaaaaaccttgaataagtctcccacagttgtataaattggacaatttaggaattttaaactttagatgatcatttggttccatttttatttcatttttatttttgttaatgcaaacaggacttaaatgaactttgatctctgttttaaagattattaaaaaacattgtgtatctatacatatggctcttgaggacttagctttcactacactacaggatatgatctccatgtagtccatataaacctgcagagtgattttccagagtgctcgatactgttaattacatctccattagggctgaaaagaatgacctacgtttctgtatacagctgtgttgcttttgatgttgtgttactgtacacagaagtgtgtgcactgaggctctgcgtgtggtccgtatggaaagcctggtagccctgcgagttaagtactgcttccattcattgtttacgctggaatttttctccccatggaatgtaagtaaaacttaagtgtttgtcatcaataaatggtaatactaaatttttttgttaatttattctcaaatgccactactgctaggttggtcccctcccaacttgcccctatcctttttttatttttaagaaaaaaactttgtaatgcttgtgattccatctgggcaaaagtctgaagatctgaaataactttatatcaaaccattgatcaataaacagctactaatgaaaaaa

SEQ ID NO: 11808 - DNA, 2788 bp, Homo sapiens
aagaacgcccccaaaatctgtttctaattttacagaaatcttttgaaacttggcacggtattcaaaagtccgtggaaagaaaaaaaccttgtcctggcttcagcttccaactacaaagacagacttggtccttttcaacggttttcacagatccagtgacccacgctctgaagacagaattagctaactttcaaaaacatctggaaaaatgaagacttgggtaaaaatcgtatttggagttgccacctctgctgtgcttgccttattggtgatgtgcattgtcttacgcccttcaagagttcataactctgaagaaaatacaatgagagcactcacactgaaggatattttaaatggaacattttcttataaaacattttttccaaactggatttcaggacaagaatatcttcatcaatctgcagataacaatatagtactttataatattgaaacaggacaatcatataccattttgagtaatagaaccatgaaaagtgtgaatgcttcaaattacggcttatcacctgatcggcaatttgtatatctagaaagtgattattcaaagctttggagatactcttacacagcaacatattacatctatgaccttagcaatggagaatttgtaagaggaaatgagcttcctcgtccaattcagtatttatgctggtcgcctgttgggagtaaattagcatatgtctatcaaaacaatatctatttgaaacaaagaccaggagatccaccttttcaaataacatttaatggaagagaaaataaaatatttaatggaatcccagactgggtttatgaagaggaaatgcttgctacaaaatatgctctctggtggtctcctaatggaaaatttttggcatatgcggaatttaatgatacggatataccagttattgcctattcctattatggcgatgaacaatatcctagaacaataaatattccatacccaaaggctggagctaagaatcccgttgttcggatatttattatcgataccacttaccctgcgtatgtaggtccccaggaagtgcctgttccagcaatgatagcctcaagtgattattatttcagttggctcacgtgggttactgatgaacgagtatgtttgcagtggctaaaaagagtccagaatgtttcggtcctgtctatatgtgacttcagggaagactggcagacatgggattgtccaaagacccaggagcatatagaagaaagcagaactggatgggctggtggattctttgtttcaacaccagttttcagctatgatgccatttcgtactacaaaatatttagtgacaaggatggctacaaacatattcactatatcaaagacactgtggaaaatgctattcaaattacaagtggcaagtgggaggccataaatatattcagagtaacacaggattcactgttttattctagcaatgaatttgaagaataccctggaagaagaaacatctacagaattagcattggaagctatcctccaagcaagaagtgtgttacttgccatctaaggaaagaaaggtgccaatattacacagcaagtttcagcgactacgccaagtactatgcacttgtctgctacggcccaggcatccccatttccacccttcatgatggacgcactgatcaagaaattaaaatcctggaagaaaacaaggaattggaaaatgctttgaaaaatatccagctgcctaaagaggaaattaagaaacttgaagtagatgaaattactttatggtacaagatgattcttcctcctcaatttgacagatcaaagaagtatcccttgctaattcaagtgtatggtggtccctgcagtcagagtgtaaggtctgtatttgctgttaattggatatcttatcttgcaagtaaggaagggatggtcattgccttggtggatggtcgaggaacagctttccaaggtgacaaactcctctatgcagtgtatcgaaagctgggtgtttatgaagttgaagaccagattacagctgtcagaaaattcatagaaatgggtttcattgatgaaaaaagaatagccatatggggctggtcctatggaggatacgtttcatcactggcccttgcatctggaactggtcttttcaaatgtggtatagcagtggctccagtctccagctgggaatattacgcgtctgtctacacagagagattcatgggtctcccaacaaaggatgataatcttgagcactataagaattcaactgtgatggcaagagcagaatatttcagaaatgtagactatcttctcatccacggaacagcagatgataatgtgcactttcaaaactcagcacagattgctaaagctctggttaatgcacaagtggatttccaggcaatgtggtactctgaccagaaccacggcttatccggcctgtccacgaaccacttatacacccacatgacccacttcctaaagcagtgtttctctttgtcagactaaaaacgatgcagatgcaagcctgtatcagaatctgaaaaccttatataaacccctcagacagtttgcttattttattttttatgttgtaaaatgctagtataaacaaacaaattaatgttgttctaaaggctgttaaaaaaaagatgaggactcagaagttcaagctaaatattgtttacattttctggtactctgtgaaagaagagaaaagggagtcatgcattttgctttggacacagtgttttatcacctgttcatttgaagaaaaataataaagtcagaagttcaaaaaaaaaa

SEQ ID NO: 11809 - DNA, 2730 bp, Homo sapiens
agaatgcctatgagacacaggaagaaggcagcagacaagaatcttccctgccgtcctttagtatgtgcagtactggacctgatggtagagtttattgtaacacacatgatgaaggagtttcctatggatctctatatacgctgcatccaggtagtacacaaactgctctgctaccagaagaagtgtcgggtacgcctgcattacacctggcgggagctctggtcagccttgataaatttgctgaagttccttatgtcaaatgagactgtacttttggccaaacacaacatttttacattagcccttatgattgtgaacctatttaatatgtttatcacatatggcgacacatttctgccaacccccagcagctatgatgaactttactatgagattatccgcatgcaccagagctttgacaacctctactccatggtcctgaggctttctaccaatgcaggccagtggaaggaagcagctagcaaggtgacccatgcattggttaatatcagagccatcatcaaccactttaaccccaaaattgagtcctacgctgctgtgaatcacatatcccaactgtcagaggagcaggtgctggaggtggtgagagccaactatgacacgctcacgctgaagctgcaggatggcctggaccagtatgagcgctactcagagcagcacaaggaagctgccttcttcaaagagctggttcgatccattagcaccaacgtccggagaaacctggtcttccacacactcagccaagaagtcctgctcaaggagttctccactatctcctgaggccacgcctacctgagcagcctctgactgcccttacccatgaggatcatgggctggagggggagcgaggggagagggggctgcccccgaggttggagagaaacacagataccaagttctcttggtgaagaccgcacttcaatggagcttgggcagcaggggcaggagggtcaagccagggataatcttatttggggaggaatgggtgggcacagtggggagaggcctccaggaatgtggggacttccagagtgggctccctaaacagcccctcacatttccaatcttgaggttacaagctgtagctactgactaattttcgggagctggtgaggcaagcctcagggtaatgccagcaccctgaaagtcagtggctctgctcggcttctgaaaacagatcaactctcagatatagctggagctacatcctgcttcctttgggcctggggctgtgcttggcttgaaatctgtgtcccctgcctgcactggcactttgtccagtcatcgggacctttggctcagatttagggtaagataggaatagggtacctttttccttttttttctgagacggagtctcactctgtcgcccaggctggaatgcagtggcgtgatctcggctttactgcagcctccgcttcctgggttcaagcgattctcctgcctcagcctcccgagtagctgggactacaggagcgtgtgccacgcccggctaattttttgtatttttagtagagatggagtttcaccatgttacccaggatggtctcaatatcctgagttcatgatccacccaccttggcctcccaaagtgctgggattacaggcgtgagccaccacacccagccagttttcctattttctgaattcagaattgacttctctgggaaaactggagatgagaatctgcccagtgctctgctgtccagtcaccgccttttgaattttagttttggcaccaggagtaccgttagctttccccttcttctggcccatttgactcatcagcacaatagggtcaccaccttaacttttaatttctaatctgctttactgtctttagggtgtgtatgaaataaacattgacaggctttctggagccctcaaggtgcctactttgctggttccctttccagcagctcccccacctcccttagccccccctcctctggcagcctctcctgcctctgctgagctcccctccacgtgttccacccccttaccctgctgttgtttacatccaacctgcctgagaatttcctctggggaggaatctattcctgtcatggtctagtgcctgggagggagagaacttcctgggggtagggtgccctccatctgaaacaggccaggtgagcatcatgcataaggcctccattctgtccgctcagattctgggtggggccacaggcaaatctcctgacttatggggagttggcttgtggttcctcccttggatagcctccatggaaccactataggctttcccaacagctgcctctgaaatagctgctgcttcgagatcctccctttttaaagcactttctaaagccctcaggatggcgggagcaaacagcactggtatattctaggagtaagtgcaggaattcagcagtgagagcatgtctgggaccacctggactgccatccatttaacctcaaatctctttgggatactcgccctccctgggaaccagagttctggctctaacattgagcagctatgcactagttccagagaagccactaacaggctgccatgtgtagatgtaggttcttaagagatcacaggctgggtcatctgatcactggatggatagctcagcctggggcatttagtgttttccctggtgataaatccccaaggcagctggatttggagctggtggcaagttgaaattattaaaaattgatttgtgtgggactgtc

SEQ ID NO: 11810 - DNA, 3279 bp, Homo sapiens
gacgtcgcgcgggctcccgggcggggcgggtccggccgcctccgagcccggccggcagcccccggccttaaagcgcgggctgtccggaggggtcggctttcccaccgaggatttggcactctggtgagggaaaagggcgaaagagaaaagcgagcagccgtcctttcacagcctcagaaagtgctcgcttcccttcgggggctttcgcgaatcccgaggcaatctcggaggcggtatttgacctgtccaaagacgacttgatacctctataatgtaacagaaaaggtcagaaaatattaagcaagtagaagtgtggagcatattaagcaagatgaacatctcgggaagcagctgtggaagccctaactctgcagatacatctagtgactttaaggacctttggacaaaactaaaagaatgtcatgatagagaagtacaaggtttacaagtaaaagtaaccaagctaaaacaggaacgaatcttagatgcacaaagactagaagaattcttcaccaaaaatcaacagctgagggaacagcagaaagtccttcatgaaaccattaaagttttagaagatcggttaagagcaggcttatgtgatcgctgtgcagtaactgaagaacatatgcggaaaaaacagcaagagtttgaaaatatccggcagcagaatcttaaacttattacagaacttatgaatgaaaggaatactctacaggaagaaaataaaaagctttctgaacaactccagcagaaaattgagaatgatcaacagcatcaagcagctgagcttgaatgtgaggaagacgttattccagattcaccgataacagccttctcattttctggcgttaaccggctacgaagaaaggagaacccccatgtccgatacatagaacaaacacatactaaattggagcactctgtgtgtgcaaatgaaatgagaaaagtttccaagtcttcaactcatccacaacataatcctaatgaaaatgaaattctagtagctgacacttatgaccaaagtcaatctccaatggccaaagcacatggaacaagcagctatacccctgataagtcatcttttaatttagctacagttgttgctgaaacacttggacttggtgttcaagaagaatctgaaactcaaggtcccatgagcccccttggtgatgagctctaccactgtctggaaggaaatcacaagaaacagccttttgaggaatctacaagaaatactgaagatagtttaagattttcagattctacttcaaagactcctcctcaagaagaattacctactcgagtgtcatctcctgtatttggagctacctctagtatcaaaagtggtttagatttgaatacaagtttgtccccttctcttttacagcctgggaaaaaaaaacatctgaaaacactcccttttagcaacacttgtatatctagattagaaaaaactagatcaaaatctgaagatagtgcccttttcacacatcacagtcttgggtctgaagtgaacaagatcattatccagtcatctaataaacagatacttataaataaaaatataagtgaatccctaggtgaacagaataggactgagtacggtaaagattctaacactgataaacatttggagcccctgaaatcattgggaggccgaacatccaaaaggaagaaaactgaggaagaaagtgaacatgaagtaagctgcccccaagcttcttttgataaagaaaatgctttcccttttccaatggataatcagttttccatgaatggagactgtgtgatggataaacctctggatctgtctgatcgattttcagctattcagcgtcaagagaaaagccaaggaagtgagacttctaaaaacaaatttaggcaagtgactctttatgaggctttgaagaccattccaaagggcttttcctcaagccgtaaggcctcagatggcaactgcacgttgcccaaagattccccaggggagccctgttcacaggaatgcatcatccttcagcccttgaataaatgctctccagacaataaaccatcattacaaataaaagaagaaaatgctgtctttaaaattcctctacgtccacgtgaaagtttggagactgagaatgttttagatgacataaagagtgctggttctcatgagccaataaaaatacaaaccaggtcagaccatggaggatgtgaacttgcatcagttcttcagttaaatccatgtagaactggtaaaataaagtctctacaaaacaaccaagatgtatcctttgaaaatatccagtggagtatagatccgggagcagacctttctcagtataaaatggatgttactgtaatagatacaaaggatggcagtcagtcaaaattaggaggagagacagtggacatggactgtacattggttagtgaaaccgttctcttaaaaatgaagaagcaagagcagaagggagaaaaaagttcaaatgaagaaagaaaaatgaatgatagcttggaagatatgtttgatcggacaacacatgaagagtatgaatcctgtttggcagacagtttctcccaagcagcagatgaagaggaggaattgtctactgccacaaagaaactacacactcatggtgataaacaagacaaagtcaagcagaaagcgtttgtggagccgtattttaaaggtgatgaaagagagactagcttgcaaaattttcctcatattgaggtggttcggaaaaaagaggagagaagaaaactgcttgggcacacgtgtaaggaatgtgaaatttattatgcagatatgccagcagaagaaagagaaaagaaattggcttcctgctcaagacaccgattccgctacattccacccaacacaccagagaatttttgggaagttggttttccttccactcagacttgtatggaaagaggttatattaaggaagatcttgatccttgtcctcgtccaaaaagacgtcagccttacaacgcaatattttctccaaaaggcaaggagcagaagacatagacgttgaaacagaaacagaaggatgaaggacagttttttccttcttagttatttatagttaaagttggtactaaacattgatttttttgatcttctgtaaatggatttataaatcagttttctattgaaaatgtttgtgatattttgcttttgcacctttaaaacaataaggcgctttcattttgcactctaacttaagagtttttactttatgtagtgatacctaatacaattttgaaaatacaaaaaaaaaa

SEQ ID NO: 11811 - DNA, 2616 bp, Homo sapiens
agaggagcctgagaagaggcagaggaaggcgaaacatggctgctctaggagtccagagtatcaactggcagacggccttcaaccgacaagcgcatcacacagacaagttctccagccaggagctcatcttgcggagaggccaaaacttccaggtcttaatgatcatgaacaaaggccttggctctaacgaaagactggagttcattgtctccacagggccttacccctcagagtcggccatgacgaaggctgtgtttccactctccaatggcagtagtggtggctggagtgcggtgcttcaggccagcaatggcaatactctgactatcagcatctccagtcctgccagcgcacccataggacggtacacaatggccctccagatcttctcccagggcggcatctcctctgtgaaacttgggacgttcatactgctttttaacccctggctgaatgtggatagcgtctttatgggtaaccacgctgagagagaagagtatgttcaggaagatgccggcatcatctttgtgggaagcacaaaccgaattggcatgattggctggaactttggacagtttgaagaagacattctcagcatctgcctctcaatcttggataggagtctgaatttccgccgtgacgctgctactgatgtggccagcagaaatgaccccaaatacgttggccgggtgctgagtgccatgatcaatagcaatgatgacaatggtgtgcttgctgggaattggagcggcacttacaccggtggccgggacccaaggagctggaacggcagcgtggagatcctcaaaaattggaaaaaatctggcttcagcccagtccgatatggccagtgctgggtctttgctgggaccctcaacacagcgctgcggtctttggggattccttcccgggtgatcaccaacttcaactcagctcatgacacagaccgaaatctcagtgtggatgtgtactacgaccccatgggaaaccccctggacaagggtagtgatagcgtatggaatttccatgtctggaatgaaggctggtttgtgaggtctgacctgggcccctcgtacggtggatggcaggtgttggatgctaccccgcaggaaagaagccaaggggtgttccagtgcggccccgcttcggtcattggtgttcgagagggtgatgtgcagctgaacttcgacatgccctttatcttcgcggaggttaatgccgaccgcatcacctggctgtacgacaacaccactggcaaacagtggaagaattccgtgaacagtcacaccattggcaggtacatcagcaccaaggcggtgggcagcaatgctcgcatggacgtcacggacaagtacaagtacccagaaggctctgaccaggaaagacaagtgttccaaaaggctttggggaaacttaaacccaacacgccatttgccgcgacgtcttcaatgggtttggaaacagaggaacaggagcccagcatcatcgggaagctgaaggtcgctggcatgctggcagtaggcaaagaagtcaacctggtcctactgctcaaaaacctgagcagggatacgaagacagtgacagtgaacatgacagcctggaccatcatctacaacggcacgcttgtacatgaagtgtggaaggactctgccacaatgtccctggaccctgaggaagaggcagaacatcccataaagatctcgtacgctcagtatgagaagtacctgaagtcagacaacatgatccggatcacagcggtgtgcaaggtcccagatgagtctgaggtggtggtggagcgggacatcatcctggacaaccccaccttgaccctggaggtgctgaacgaggctcgtgtgcggaagcctgtgaacgtgcagatgctcttctccaatccactggatgagccggtgagggactgcgtgctgatggtggagggaagcggcctgctgttgggtaacctgaagatcgacgtgccgaccctagggcccaaggagcggtcccgggtccgttttgatatcctgccctcccggagtggcaccaagcaactgctcgccgacttctcctgcaacaagttccctgcaatcaaggccatgttgtccatcgatgtagccgaatgaagggcgctggtggcctcccgtacaaacttggacaacacggagcagggagagctcaccatggaatgaaccccccgcccatgctgtccggcctgggaaaccctctccatctcccaaggctgccagacatggactccgggctccagcacatccccctctcctctcccccaggttggggctgggtccaccctgtcctatgacttgatcacttttgcacattccctggccgcttctccccagagctgcctgctctgtgagccccacagccctgctcattcctcacgcccttcaatgctgcaggatggactggcccctgacccagggactctccaaacgggatacaggagagaagctggtctagactgtttgctgatccccaacctgcacggggcattcctgcttctctctcaggccaccacagagggcaggggatggttagtcacctgccccagcactcacaccctaactcaaaataaatgttaaataagtgcgatcacacaaa

SEQ ID NO: 11812 - DNA, 8959 bp, Homo sapiens
ccccagcctccttgccaacgccccctttccctctccccctcccgctcggcgctgaccccccatccccacccccgtgggaacactgggagcctgcactccacagaccctctccttgcctcttccctcacctcagcctccgctccccgccctcttcccggcccagggcgccggcccacccttccctccgccgccccccggccgcggggaggacatggccgcgcacaggccggtggaatgggtccaggccgtggtcagccgcttcgacgagcagcttccaataaaaacaggacagcagaacacacataccaaagtcagtactgagcacaacaaggaatgtctaatcaatatttccaaatacaagttttctttggttataagcggcctcactactattttaaagaatgttaacaatatgagaatatttggagaagctgctgaaaaaaatttatatctctctcagttgattatattggatacactggaaaaatgtcttgctgggcaaccaaaggacacaatgagattagatgaaacgatgctggtcaaacagttgctgccagaaatctgccattttcttcacacctgtcgtgaaggaaaccagcatgcagctgaacttcggaattctgcctctggggttttattttctctcagctgcaacaacttcaatgcagtctttagtcgcatttctaccaggttacaggaattaactgtttgttcagaagacaatgttgatgttcatgatatagaattgttacagtatatcaatgtggattgtgcaaaattaaaacgactcctgaaggaaacagcatttaaatttaaagccctaaagaaggttgcgcagttagcagttataaatagcctggaaaaggcattttggaactgggtagaaaattatccagatgaatttacaaaactgtaccagatcccacagactgatatggctgaatgtgcagaaaagctatttgacttggtggatggttttgctgaaagcaccaaacgtaaagcagcagtttggccactacaaatcattctccttatcttgtgtccagaaataatccaggatatatccaaagacgtggttgatgaaaacaacatgaataagaagttatttctggacagtctacgaaaagctcttgctggccatggaggaagtaggcagctgacagaaagtgctgcaattgcctgtgtcaaactgtgtaaagcaagtacttacatcaattgggaagataactctgtcattttcctacttgttcagtccatggtggttgatcttaagaacctgctttttaatccaagtaagccattctcaagaggcagtcagcctgcagatgtggatctaatgattgactgccttgtttcttgctttcgtataagccctcacaacaaccaacactttaagatctgcctggctcagaattcaccttctacatttcactatgtgctggtaaattcactccatcgaatcatcaccaattccgcattggattggtggcctaagattgatgctgtgtattgtcactcggttgaacttcgaaatatgtttggtgaaacacttcataaagcagtgcaaggttgtggagcacacccagcaatacgaatggcaccgagtcttacatttaaagaaaaagtaacaagccttaaatttaaagaaaaacctacagacctggagacaagaagctataagtatcttctcttgtccatggtgaaactaattcatgcagatccaaagctcttgctttgtaatccaagaaaacaggggcccgaaacccaaggcagtacagcagaattaattacagggctcgtccaactggtccctcagtcacacatgccagagattgctcaggaagcaatggaggctctgctggttcttcatcagttagatagcattgatttgtggaatcctgatgctcctgtagaaacattttgggagattagctcacaaatgcttttttacatctgcaagaaattaactagtcatcaaatgcttagtagcacagaaattctcaagtggttgcgggaaatattgatctgcaggaataaatttcttcttaaaaataagcaggcagatagaagttcctgtcactttctccttttttacggggtaggatgtgatattccttctagtggaaataccagtcaaatgtccatggatcatgaagaattactacgtactcctggagcctctctccggaagggaaaagggaactcctctatggatagtgcagcaggatgcagcggaacccccccaatttgccgacaagcccagaccaaactagaagtggccctgtacatgtttctgtggaaccctgacactgaagctgttctggttgccatgtcctgtttccgccacctctgtgaggaagcagatatccggtgtggggtggatgaagtgtcagtgcataacctcttgcccaactataacacattcatggagtttgcctctgtcagcaatatgatgtcaacaggaagagcagcacttcagaaaagagtgatggcactgctgaggcgcattgagcatcccactgcaggaaacactgaggcttgggaagatacacatgcaaaatgggaacaagcaacaaagctaatccttaactatccaaaagccaaaatggaagatggccaggctgctgaaagccttcacaagaccattgttaagaggcgaatgtcccatgtgagtggaggaggatccatagatttgtctgacacagactccctacaggaatggatcaacatgactggcttcctttgtgcccttggaggagtgtgcctccagcagagaagcaattctggcctggcaacctatagcccacccatgggtccagtcagtgaacgtaagggttctatgatttcagtgatgtcttcagagggaaacgcagatacacctgtcagcaaatttatggatcggctgttgtccttaatggtgtgtaaccatgagaaagtgggacttcaaatacggaccaatgttaaggatctggtgggtctagaattgagtcctgctctgtatccaatgctatttaacaaattgaagaataccatcagcaagttttttgactcccaaggacaggttttattgactgataccaatactcaatttgtagaacaaaccatagctataatgaagaacttgctagataatcatactgaaggcagctctgaacatctagggcaagctagcattgaaacaatgatgttaaatctggtcaggtatgttcgtgtgcttgggaatatggtccatgcaattcaaataaaaacgaaactgtgtcaattagttgaagtaatgatggcaaggagagatgacctctcattttgccaagagatgaaatttaggaataagatggtagaatacctgacagactgggttatgggaacatcaaaccaagcagcagatgatgatgtaaaatgtcttacaagagatttggaccaggcaagcatggaagcagtagtttcacttctagctggtctccctctgcagcctgaagaaggagatggtgtggaattgatggaagccaaatcacagttatttcttaaatacttcacattatttatgaaccttttgaatgactgcagtgaagttgaagatgaaagtgcgcaaacaggtggcaggaaacgtggcatgtctcggaggctggcatcactgaggcactgtacggtccttgcaatgtcaaacttactcaatgccaacgtagacagtggtctcatgcactccataggcttaggttaccacaaggatctccagacaagagctacatttatggaagttctgacaaaaatccttcaacaaggcacagaatttgacacacttgcagaaacagtattggctgatcggtttgagagattggtggaactggtcacaatgatgggtgatcaaggagaactccctatagcgatggctctggccaatgtggttccttgttctcagtgggatgaactagctcgagttctggttactctgtttgattctcggcatttactctaccaactgctctggaacatgttttctaaagaagtagaattggcagactccatgcagactctcttccgaggcaacagcttggccagtaaaataatgacattctgtttcaaggtatatggtgctacctatctacaaaaactcctggatcctttattacgaattgtgatcacatcctctgattggcaacatgttagctttgaagtggatcctaccaggttagaaccatcagagagccttgaggaaaaccagcggaacctccttcagatgactgaaaagttcttccatgccatcatcagttcctcctcagaattcccccctcaacttcgaagtgtgtgccactgtttataccaggtggttagccagcgtttccctcagaacagcatcggtgcagtaggaagtgccatgttcctcagatttatcaatcctgccattgtctcaccgtatgaagcagggattttagataaaaagccaccacctagaatcgaaaggggcttgaagttaatgtcaaagatacttcagagtattgccaatcatgttctcttcacaaaagaagaacatatgcggcctttcaatgattttgtgaaaagcaactttgatgcagcacgcaggtttttccttgatatagcatctgattgtcctacaagtgatgcagtaaatcatagtctttccttcataagtgacggcaatgtgcttgctttacatcgtctactctggaacaatcaggagaaaattgggcagtatctttccagcaacagggatcataaagctgttggaagacgaccttttgataagatggcaacacttcttgcatacctgggtcctccagagcacaaacctgtggcagatacacactggtccagccttaaccttaccagttcaaagtttgaggaatttatgactaggcatcaggtacatgaaaaagaagaattcaaggctttgaaaacgttaagtattttctaccaagctgggacttccaaagctgggaatcctattttttattatgttgcacggaggttcaaaactggtcaaatcaatggtgatttgctgatataccatgtcttactgactttaaagccatattatgcaaagccatatgaaattgtagtggaccttacccataccgggcctagcaatcgctttaaaacagactttctctctaagtggtttgttgtttttcctggctttgcttacgacaacgtctccgcagtctatatctataactgtaactcctgggtcagggagtacaccaagtatcatgagcggctgctgactggcctcaaaggtagcaaaaggcttgttttcatagactgtcctgggaaactggctgagcacatagagcatgaacaacagaaactacctgctgccaccttggctttagaagaggacctgaaggtattccacaatgctctcaagctagctcacaaagacaccaaagtttctattaaagttggttctactgctgtccaagtaacttcagcagagcgaacaaaagtcctagggcaatcagtctttctaaatgacatttattatgcttcggaaattgaagaaatctgcctagtagatgagaaccagttcaccttaaccattgcaaaccagggcacgccgctcaccttcatgcaccaggagtgtgaagccattgtccagtctatcattcatatccggacccgctgggaactgtcacagcccgactctatcccccaacacaccaagattcggccaaaagatgtccctgggacactgctcaatatcgcattacttaatttaggcagttctgacccgagtttacggtcagctgcctataatcttctgtgtgccttaacttgtacctttaatttaaaaatcgagggccagttactagagacatcaggtttatgtatccctgccaacaacaccctctttattgtctctattagtaagacactggcagccaatgagccacacctcacgttagaatttttggaagagtgtatttctggatttagcaaatctagtattgaattgaaacacctttgtttggaatacatgactccatggctgtcaaatctagttcgtttttgcaagcataatgatgatgccaaacgacaaagagttactgctattcttgacaagctgataacaatgaccatcaatgaaaaacagatgtacccatctattcaagcaaaaatatggggaagccttgggcagattacagatctgcttgatgttgtactagacagtttcatcaaaaccagtgcaacaggtggcttgggatcaataaaagctgaggtgatggcagatactgctgtagctttggcttctggaaatgtgaaattggtttcaagcaaggttattggaaggatgtgcaaaataattgacaagacatgcttatctccaactcctactttagaacaacatcttatgtgggatgatattgctattttagcacgctacatgctgatgctgtccttcaacaattcccttgatgtggcagctcatcttccctacctcttccacgttgttactttcttagtagccacaggtccgctctcccttagagcttccacacatggactggtcattaatatcattcactctctgtgtacttgttcacagcttcattttagtgaagagaccaagcaagttttgagactcagtctgacagagttctcattacccaaattttacttgctgtttggcattagcaaagtcaagtcagctgctgtcattgccttccgttccagttaccgggacaggtcattctctcctggctcctatgagagagagacttttgctttgacatccttggaaacagtcacagaagctttgttggagatcatggaggcatgcatgagagatattccaacgtgcaagtggctggaccagtggacagaactagctcaaagatttgcattccaatataatccatccctgcaaccaagagctcttgttgtctttgggtgtattagcaaacgagtgtctcatgggcagataaagcagataatccgtattcttagcaaggcacttgagagttgcttaaaaggacctgacacttacaacagtcaagttctgatagaagctacagtaatagcactaaccaaattacagccacttcttaataaggactcgcctctgcacaaagccctcttttgggtagctgtggctgtgctgcagcttgatgaggtcaacttgtattcagcaggtaccgcacttcttgaacaaaacctgcatactttagatagtctccgtatattcaatgacaagagtccagaggaagtatttatggcaatccggaatcctctggagtggcactgcaagcaaatggatcattttgttggactcaatttcaactctaactttaactttgcattggttggacaccttttaaaagggtacaggcatccttcacctgctattgttgcaagaacagtcagaattttacatacactactaactctggttaacaaacacagaaattgtgacaaatttgaagtgaatacacagagcgtggcctacttagcagctttacttacagtgtctgaagaagttcgaagtcgctgcagcctaaaacatagaaagtcacttcttcttactgatatttcaatggaaaatgttcctatggatacatatcccattcatcatggtgacccttcctataggacactaaaggagactcagccatggtcctctcccaaaggttctgaaggataccttgcagccacctatccaactgtcggccagaccagtccccgagccaggaaatccatgagcctggacatggggcaaccttctcaggccaacactaagaagttgcttggaacaaggaaaagttttgatcacttgatatcagacacaaaggctcctaaaaggcaagaaatggaatcagggatcacaacaccccccaaaatgaggagagtagcagaaactgattatgaaatggaaactcagaggatttcctcatcacaacagcacccacatttacgtaaagtttcagtgtctgaatcaaatgttctcttggatgaagaagtacttactgatccgaagatccaggcgctgcttcttactgttctagctacactggtaaaatataccacagatgagtttgatcaacgaattctttatgaatacttagcagaggccagtgttgtgtttcccaaagtctttcctgttgtgcataatttgttggactctaagatcaacaccctgttatcattgtgccaagatccaaatttgttaaatccaatccatggaattgtgcagagtgtggtgtaccatgaagaatccccaccacaataccaaacatcttacctgcaaagttttggttttaatggcttgtggcggtttgcaggaccgttttcaaagcaaacacaaattccagactatgctgagcttattgttaagtttcttgatgccttgattgacacgtacctgcctggaattgatgaagaaaccagtgaagaatccctcctgactcccacatctccttaccctcctgcactgcagagccagcttagtatcactgccaaccttaacctttctaattccatgacctcacttgcaacttcccagcattccccaggaatcgacaaggagaacgttgaactctcccctaccactggccactgtaacagtggacgaactcgccacggatccgcaagccaagtgcagaagcaaagaagcgctggcagtttcaaacgtaatagcattaagaagatcgtgtgaagcttgcttgctttcttttttaaaatcaacttaacatgggctcttcactagtgaccccttccctgtccttgccctttccccccatgttgtaatgctgcacttcctgttttataatgaacccatccggtttgccatgttgccagatgatcaactcttcgaagccttgcctaaatttaatgctgccttttctttaactttttttcttctacttttggcgtgtatctggtatatgtaagtgttcagaacaactgcaaagaaagtgggaggtcaggaaacttttaactgagaaat

SEQ ID NO: 11813 - DNA, 1677 bp, Homo sapiens
tagagatggggtctcactatgtcgcccagggtagtctcaaactcctcggtcttggcctcccaaagtgttgggattacaaacgtgagaaccgtattttcaaatgtattcaataacactacagcgtttccaattttaagaggaagcaattgccacaaaatcactgcccctggtctgggcaaggggcagttggtgaacttgctgcctccagagaaccttccctggtgtggaggcagccagggacccaggatgctccggacctgttacgtgctctgttcccaagctggtcccccctccaggggctggcagtccctgagctttgatggcggggccttccaccttaagggcacaggagagctgacacgggccttgctggttctccggctgtgtgcctggcccccactcgtcactcacgggctgttgctccaggcctggtctcggcgactcctgggctcccggctctcaggcgcatttctccgagcatccgtctatgggcagtttgtggctggtgagacagcagaggaggtgaagggctgcgtgcagcagctgcggaccctcagcctccgaccactgctggcagtgcccactgaggaggagccggactctgctgccaagagtggtgaggcgtggtatgaggggaacctcggtgctatgctgcggtgtgtggacctgtcacggggcctcctggagccccccagcctggctgaggccagcctcatgcagctgaaggtgacggcgctgaccagtactcggctctgtaaggagctagcctcgtgggtcagaaggccaggagcctccttggagctgagccccgagaggctggctgaagctatggactctgggcagaacctccaggtctcctgcctcaatgctgagcagaaccagcacctccgggcctccctcagccgcctgcatcgggtggcacagtatgcccgggcccagcacgtgcggctcctggtggatgcggagtacacctcactgaaccctgcgctctcgctgctggtggctgccctggctgtgcgctggaacagcccgggtgaaggcgggccctgggtgtggaacacctaccaggcctgtctaaaggacacattcgagcggctggggagggatgcagaggctgcgcacagggccggcctggccttcggagtgaagctggtacgaggtgcatatctggacaaggagagagcggtggcccagctccatgggatggaagaccccactcagcctgactatgaggccaccagtcagagttacagccgctgcctggaactgatgctgacgcacgtggcccgccatggccccatgtgccacctcatggtggcttcccacaatgaggaatctgttcgccaggcaaccaagcgcatgtgggagctgggcattcctctggatgggactgtctgtttcggacaacttctgggcatgtgtgaccacgtctctctagcactggggcaggccggctatgtagtgtataagtccattccctatggctccttggaggaggtaatcccctacctgatccggagggcccaggagaaccggagcgtgcttcagggtgcccgcagggaacaggagctgctcagccaagaactgtggcggcggctgctgccaggatgccgaaggataccccactagcacccctgagggggtcatgtggtcaataaaagtccttaggtgctgcct

SEQ ID NO: 11814 - DNA, 6639 bp, Homo sapiens
ggcagtgagtccacccgcccgccgaggtccgcccgcccgccgagacccgcccgccgccgctgccatggccgaagtgcgcaaattcaccaaacggctcagcaagcctggcacggcggctgagctccggcagagcgtgtctgaggccgtgcggggctccgtggtgctggaaaaggccaaagttgttgagcccctggactatgagaatgttattgcccaaagaaaaacccagatttacagcgaccccctccgagatctgcttatgttcccaatggaagatatatctatctcggtgataggtcgtcaacgcagaacggtgcagtctactgtaccagaagatgctgaaaagagggcccagagtttatttgttaaagagtgtattaaaacctatagcacagattggcacgtggtaaactacaagtatgaggacttctctggggactttcgaatgttgccatgtaaatctttgagaccagaaaagattcctaatcatgtatttgagatagatgaagactgtgagaaagatgaggactcatcttctttatgttctcagaagggtggtgtgataaaacaaggctggttgcataaagcaaatgtaaatagtaccatcacagtaaccatgaaggtattcaagagacgatatttttacttgacccaacttcctgacggttcatatattctcaattcctataaagatgagaaaaattcaaaagaatcgaaaggttgcatctacttggacgcctgcattgatgttgttcagtgccccaaaatgcgccgtcatgcttttgaactcaagatgttagataaatatagccattatctggctgctgaaactgagcaggaaatggaggaatggttgataactttgaaaaagattattcagatcaacaccgacagtttagttcaagaaaaaaaggagacggtagaaacagcacaagatgatgaaactagcagccaaggaaaagccgagaacatcatggcaagtttggaaaggagcatgcatccggaactgatgaagtatggaagagaaactgaacaactaaacaaactcagtagaggagatggaagacagaatctcttttcttttgattcagaagttcagaggttggacttttcaggaattgaacctgatataaagccatttgaagaaaaatgcaataaacgtttcctggtgaattgccatgatttaactttcaatatcttgggccaaattggagacaatgcaaaaggaccacccacaaatgttgagcccttttttatcaatcttgccttatttgatgtaaagaacaattgtaagatttcagcagactttcatgtagacctgaatcccccatctgtccgtgaaatgctgtggggctcttcaacccaactggccagtgacggtagcccaaagggctcttcacccgaatcttacattcatggaattgccgaatctcagttacgctacatacaacagggaattttctcagtgacgaatccacatcctgaaatttttctagttgccagaattgaaaaggtactacagggaaacattacacactgtgcagaaccctatatcaaaaattctgatccagtaaagacggcccagaaggtgcacaggacagctaaacaagtgtgtagccgccttggacaatacagaatgcccttcgcttgggctgccagacccattttcaaagatactcaaggctctcttgatctggatgggagattttctcctctgtataaacaagacagtagcaagctttcaagtgaagacattctcaagttgctctcagaatataagaagccagaaaagaccaaactgcagattattcctgggcagctaaacatcacagtagaatgtgttcctgtggatttatcaaattgtattacttcttcatatgtgcccttgaagccttttgaaaagaattgccaaaatattactgtggaggttgaagagtttgttccagaaatgacaaaatattgttatccatttactatttacaaaaaccatctgtatgtatatcccctgcaattaaaatacgatagccagaaaacatttgccaaggcaaggaacattgcagtctgtgtggaattccgggattcagatgaaagtgacgctagtgccctaaagtgtatttatggaaaacctgcagggtctgtttttaccacaaatgcttatgctgttgtctcgcatcacaaccaaaatccagagttctatgatgagattaaaattgagcttcccattcacctacatcaaaaacatcgtttgcttttcactttttatcatgtaagttgtgaaattaacacaaagggaacaaccaaaaagcaagacacagttgaaactccagttgggtttgcctgggtacctttgctgaaagatggtagaatcatcacatttgagcagcagctgccagtttccgccaatcttcccccaggctacttgaatctgaatgatgcagaatcaagaaggcaatgtaacgtggatattaaatgggtagatggtgcaaagcctttgttgaagattaaaagccacttagaatctaccatttacactcaagatctgcatgtgcacaaattcttccatcattgccagctgattcagtcaggctcgaaagaagttccaggggagctcattaaatatttaaagtgtttgcatgccatggagatccaagtcatgatacagtttctacctgtaattcttatgcaactcttccgagttctcacaaatatgacccatgaagatgacgttcctatcaactgcaccatggttctcttacatattgtatcaaagtgccatgaagaaggcttggatagttatctaagatcattcataaagtatagcttccgacctgaaaaaccgagtgctcctcaggcccagctgatacatgaaaccctggctactacgatgatagcaatattgaaacagtctgcagattttttatcaataaacaaattgctaaagtactcatggtttttctttgaaataattgcaaagtcaatggccacatacttgttggaagagaataagattaagcttccccgaggccagagatttcccgagacatatcatcatgtcttacattcactgcttcttgcaataattccccatgtgactattcggtatgcggagattcccgatgagtccagaaatgtgaactatagtttggctagcttcctgaagcgctgtttgacactaatggatagaggatttattttcaatttaataaatgactatatatctggattcagccccaaagatcctaaggttctggctgaatacaagtttgaatttctgcaaacaatttgcaatcacgaacattacattcctctgaacttgccaatggcatttgcaaaacctaaactgcagcgggttcaagattcaaatcttgaatacagtttatcagatgagtattgcaagcatcacttcttggttggtctacttctgagggaaacttccattgctcttcaggacaattatgagatcagatatacagctatctctgttataaagaatcttttgataaaacatgcatttgacacaagataccagcacaagaaccaacaagccaaaatagcacaattgtacctcccctttgttggactacttttggaaaatatacagcgattagcaggtcgagataccttgtattcttgtgcagccatgcctaattctgcatccagagatgagtttccatgtggctttacttcacctgccaatagagggagtctgagcactgacaaagacaccgcttatgggtcttttcaaaatggacatggaattaagagagaagattcaagaggttccctcatcccagaaggagcaacaggatttccagatcagggcaacactggtgaaaatacccgacagagttctacaaggagtagtgtatcccagtataaccgcctggatcagtatgaaatcagaagcctcctgatgtgctacctgtatatagtaaaaatgatttcagaagatactctcttaacttactggaataaagtatcacctcaggagctcataaacattcttatacttttagaagtatgcttgtttcactttagatatatggggaaaagaaacatagcaagggtgcatgatgcctggctgtcaaaacacttcggaatagaccgaaaatcgcaaaccatgcctgctcttcgaaacagatcaggagtaatgcaggcccggcttcagcatcttagtagcctagaaagttcatttacacttaatcacagttctacaacaactgaagcagacattttccaccaggcacttcttgaaggcaatacagctactgaagtttccctaacagtactagacaccatatcatttttcactcagtgcttcaagacccaacttttaaataatgatggccataacccattaatgaaaaaagtgtttgatatacatcttgcttttcttaaaaatggacaatctgaagtgtcgctgaaacatgtatttgcctcactgagagctttcatcagtaagtttccttcagcatttttcaaaggaagagtaaacatgtgtgctgcattttgctatgaggttttaaagtgctgcacatcgaagattagctcaaccaggaatgaagcatctgcacttttgtatcttttgatgagaaacaactttgagtataccaaaaggaaaacctttttgaggacacatctacagataataattgctgtaagccaactgatagctgatgtagcactaagcggaggatcaagatttcaggagtctttattcattatcaataattttgcaaatagtgacagacctatgaaggcaactgcctttcccgcagaagtcaaagacttgaccaagagaatccgcactgttcttatggccactgcccaaatgaaggagcatgagaaagaccctgaaatgctaattgatctccagtatagcttagccaagtcctatgcaagcaccccagagctcaggaaaacctggcttgatagcatggccaagattcatgtaaaaaatggagatttttcagaggctgcgatgtgttatgtccatgtagcagctctagttgcagagtttcttcatcgaaaaaaattatttcctaacggatgttcagcgttcaagaaaattactcccaatatagatgaagaaggagcaatgaaagaagatgctgggatgatggatgtccattatagtgaagaggtcttgctggagttgctagaacaatgtgtggatggcttatggaaggcagaacgttatgaaataatttctgagatttccaagttgatcgttccaatttatgagaaacgtcgtgagtttgagaaacttactcaagtttatagaactcttcatggagcttacacaaaaattctggaagttatgcatacaaaaaagagacttttaggcactttcttcagagttgccttttatggccaatctttttttgaagaagaagatggaaaggagtacatctataaagaaccaaagctcactggcctctcagaaatttccttgagacttgttaaactttatggtgaaaagtttggtacggagaatgtcaaaataattcaggattcagacaaggtaaatgccaaagagcttgatccaaaatatgctcatatacaagttacttatgtgaagccttactttgatgacaaagaactcacagaaaggaagaccgagtttgaaagaaatcataatatcagcagatttgtttttgaggccccttacactttatcaggcaaaaaacagggctgtatagaagaacagtgcaaacgccgtacaatcttgacaacttcaaactcgtttccttacgtgaagaagaggattcctattaactgtgaacagcagattaatttaaaaccaattgatgttgccactgatgaaataaaagataaaactgcagagctgcaaaagctttgctcctctactgacgtggacatgattcagctccaacttaaattgcagggctgtgtttctgtgcaggtcaatgctggtccattagcatatgcaagagctttcttaaatgacagccaagctagcaagtatccacctaagaaagtgagtgagttgaaagacatgtttaggaaatttatacaagcatgcagcattgcacttgaactaaatgagcggctaattaaagaagatcaagttgagtaccatgaagggctaaagtcaaatttcagagacatggtaaaagaattatctgacattatccatgagcagatattacaagaagacacaatgcattctccctggatgagcaacacattacatgtattttgtgcaattagtggtacatcaagtgaccgaggttatggttccccaagatacgctgaagtgtgaggaaatgcagatgtacgtgacaatgagactgacctttctcaggaatatttggagctgtgcaaatgttaaaatttaaagatttgatatacatggagtgtttcttctcgacaccaaaattttcatgtgttccaacagggtgcttacatatttgtaaataagcaacttgaaagtgcctggaaaattgcaccactgtgcttggtttgtacttttttaggtaaatctatatgctgaaaagtagagctcaaaaacagtagttcaatttgcttaattattgcttaaaataatggtactatgtaaaattgtataatggaatacaataaaaggtaaaacttatttgtaaaaaaaaaaaaaaa

SEQ ID NO: 11815 - DNA, 1804 bp, Homo sapiens
ggggccgggcggggccagcggcgcattagcgccttgtcaattcggctgctcagacttgctccggcctccgcgtccgcgcccagcgcgcccagcgacgtgcgggcggcctggcccgcgccctcccgcgcccggcctgcgtcccgcgccctgcgccaccgccgccgagccgcagcccgccgcgcgcccccggcagcgccggccccatgcccgccggccgccggggccccgccgcccaatccgcgcggcggccgccgccgttgctgcccctgctgctgctgctctgcgtcctcggggcgccgcgagccggatcaggagcccacacagctgtgatcagtccccaggatcccacgcttctcatcggctcctccctgctggccacctgctcagtgcacggagacccaccaggagccaccgccgagggcctctactggaccctcaacgggcgccgcctgccccctgagctctcccgtgtactcaacgcctccaccttggctctggccctggccaacctcaatgggtccaggcagcggtcgggggacaacctcgtgtgccacgcccgtgacggcagcatcctggctggctcctgcctctatgttggcctgcccccagagaaacccgtcaacatcagctgctggtccaagaacatgaaggacttgacctgccgctggacgccaggggcccacggggagaccttcctccacaccaactactccctcaagtacaagcttaggtggtatggccaggacaacacatgtgaggagtaccacacagtggggccccactcctgccacatccccaaggacctggctctctttacgccctatgagatctgggtggaggccaccaaccgcctgggctctgcccgctccgatgtactcacgctggatatcctggatgtggtgaccacggaccccccgcccgacgtgcacgtgagccgcgtcgggggcctggaggaccagctgagcgtgcgctgggtgtcgccacccgccctcaaggatttcctctttcaagccaaataccagatccgctaccgagtggaggacagtgtggactggaaggtggtggacgatgtgagcaaccagacctcctgccgcctggccggcctgaaacccggcaccgtgtacttcgtgcaagtgcgctgcaacccctttggcatctatggctccaagaaagccgggatctggagtgagtggagccaccccacagccgcctccactccccgcagtgagcgcccgggcccgggcggcggggcgtgcgaaccgcggggcggagagccgagctcggggccggtgcggcgcgagctcaagcagttcctgggctggctcaagaagcacgcgtactgctccaacctcagcttccgcctctacgaccagtggcgagcctggatgcagaagtcgcacaagacccgcaaccaggacgaggggatcctgccctcgggcagacggggcacggcgagaggtcctgccagataagctgtaggggctcaggccaccctccctgccacgtggagacgcagaggccgaacccaaactggggccacctctgtaccctcacttcagggcacctgagccaccctcagcaggagctggggtggcccctgagctccaacggccataacagctctgactcccacgtgaggccacctttgggtgcaccccagtgggtgtgtgtgtgtgtgtgagggttggttgagttgcctagaacccctgccagggctgggggtgagaaggggagtcattactccccattacctagggcccctccaaaagagtccttttaaataaatgagctatttaggtgcaaa

SEQ ID NO: 11816 - DNA, 4416 bp, Homo sapiens
ccagtgtaagagttccgctattcggtctcacacctacagtggactacccgatttttcgcttctcttcagggatgagtcatgtggtggtgaaaaatgaccctgaactggaccagcagcttgctaatctggacctgaactctgaaaaacagagtggaggagcaagtacagcgagcaaagggcgctatatacctcctcacttaaggaacagagaagcatctaaaggattccatgataaagacagttcaggttggagttgcagcaaagataaggatgcatatagcagttttgggtctcgagattctagaggaaagcctggttatttcagtgaacgtggaagtggatcaaggggaagatttgatgatcgtggacggagtgactatgatggtattggcaatcgtgaaagacctggctttggcagatttgaacggagtggacatagtcgttggtgtgacaagtcagttgaagatgattggtcaaaaccacttccaccaagtgaacgcttggagcaagaactgttttctggaggaaacacggggattaactttgagaaatatgatgatataccagtagaggcaaccggcagtaactgtcctccacatattgagaattttagcgatattgacatgggagaaattatcatggggaacattgaacttactcgctatactcgtcctactccagtgcaaaaacatgccattcctattattaagggaaaaagagacttaatggcttgtgcccaaacaggatctgggaaaactgcagcatttcttttacccatactgagtcagatatatacagatggtccaggagaagctttgaaggctgtgaaggaaaatggaaggtatgggcgccgcaaacaatatccaatatccttggttttagccccaacaagagaattggctgtacagatctatgaggaagccagaaaattttcctaccgatctagagttcgtccttgtgtagtttatggtggtgctgatattggtcagcagattcgggacttagaacgtggatgccacttgttagtagccactccaggacgtctagtggatatgatggaaagaggaaagattggattagacttctgcaagtacttagtgttggatgaagctgataggatgctggatatgggatttgaacctcagatacgtcgtatagttgaacaagatactatgccaccaaagggcgttcgtcacaccatgatgtttagtgctacttttcctaaggaaatacagatgcttgctcgtgactttttggatgaatatatctttttggctgtaggcagagtaggctctacctctgagaacatcacacagaaagtagtttgggtggaagacttagataaacggtcatttctactggacattttaggtgcaacagggagtgattcacttactttagtgtttgtggagaccaaaaagggagcagattccctggaggatttcttataccatgaaggatatgcttgtactagtattcatggagaccggtcacagagagatcgagaggaggcccttcaccagtttcgctcaggaaaaagcccaattctagtggctacagctgtggcagcacgaggactagacatttcaaatgtgagacatgttatcaattttgatttgccaagtgatattgaagaatatgtgcatcgtattggccgtacaggacgtgtaggaaacctgggccttgccacctcattctttaatgaaaaaaatatgaatattacaaaggatttgttggatcttcttgtagaagctaaacaagaagtgccttcttggttggaaaatatggcttatgaacaccactacaagggtggcagtcgtggacgatctaaaagtaatagattcagtggaggatttggtgccagagactatcgacaaagtagtggttccagcagttctggctttggtgctagtcgcggaagcagcagccgcagtggtggaggtggttacggcaacagcagaggatttggtggaggtggctatggaggcttctacaatagtgatggatatggaggaaattataactcccagggggttgactggtggggcaactgaatctgctttgcagcaaagtcacccttacaaagaagctaatatggaaaccacatgtaacttagccagactatattgtgtagcttcaagaacttgcagtacattaccagctgtgattctcctgataattcaagggagctcaaagtcacaagaagaaaaatgaaaggaaaaaacagcagccctattcagaaattggtttgaagatgtaattgctctagtttggattaaactcttcccctcctgctttagtgccaccccaaactgcatttataattttgtgactgaggatcgtttgtttgttaacgtactgtgactttaactttagacaacttactactttgatgtcctgttggctcagtaatgctcacgataccaattgttttgacaaaataaatttactaaacttggcctaaaatcaaaccttggcacagaggtatgatacaactttaacaggagtcatcaattcatccataaatataaaaagggaaaaaaacttaaggcagtagtctgcattaggactgtttgagttttgcagacttggggttgggagaacatcttaaagcattaaagcatagttttttgtatggccaaccttactaaattaagttctgacttgctcactctatcctggataggcacttgggaacttacactctttaagccattccagtcatgatgaggtggaatgtatcagtataccaattaatatttttgaaagagttcttttaggttaatttaagtacagcaatttctcatgtaatgtttagggagtttattctaacctaggcaaacggcatgctatcacaagaaaggtttaaagctttgataaaatgggggagatttaatcagtttttttaatgcctgctataaaaatttgaaatattagaatggccgaccatggcagtgaccaggcctcactacaggcctggttggattctggtctttaatgcatgctagtgttgatgttttttggtcaagaacggtttaaacaggaaggattgtgcagcaggctttaatttaatgtagattcatactgctctgttaaagctgcattgaaatgttaaaatggcttacacttgcagactttgcaaatcttaagactaacaaatccttgaaatcacacagcttgcaaatacgtactaaactgcacaaggtgtgtgttctatatgtgcagttttagcgtattttagttgcataggtttccatggtatttatagtctcttgtgctaaatttggccaaagatgattgtccaccactaaaaatgcctctcccacttggaattctgtactgattttgtggccagatgcaatgatctttaaaaacaaatcttttcaatggcataagaagttgacaaaaatttcttaaagtgcaatagattttcaagttattgtgccttgttctaaaattttaagtagggcacttgacagtattgaggtcatttgttaaggtgctatttcaattagtgtaggtttagactcttgtacatttctcccataactttttacaaagtattttgttgcacattcagagaattttatatatatatgtcttgtgtgggtgtcctcgaccttccaatcttatttcgtctcttggagattgttgaatgcagccagtgaagaagtagattcctaaattttattggggaccatggaatggtagttgagaagaaaactatttgcacacaacagattttagatactttttgctgctagttgtgtaatatttattgaacattttgacaaatatttatttttgtaagcctaaaaatgattctttgaaagtttaaagaaacttgaccaaaagacagtacaaaaaacactggcacttgaatgttgaatgtcaccgtatgtgaaataatatattttggggtagtgtgagcttttaatgttaagtctgttaaacttgagtcaaattaagcagacccggcattggcaatgtagctgtaattttctgacaaaatttaagacaaaattgtcaacttgaaactaaaacatgccaaggttttgatatacttgtcttaagatattaatgaaacaattttgaacactgataggaaggtccacatccacaaagtttctcttgagttttgttatgtgttttgctgtgtttgattttcagtgattgtctggtatatttacagtcctcaaacatggttatttctgtcagtgacttaacattcggttttaccagccagcagtattcttcagtaaataaagaatggaattgctgaatgtaatcattgaacctcgagtcactgtaaaagttcagtaattgcttattgtattagttttagatgctggcaccgcatgtgctctgtttattctgattttactaaaataaaaagttcaaaagtcaaaaaaaaaa

SEQ ID NO: 11817 - DNA, 7492 bp, Homo sapiens
ggcgctgagcgagctcggagcccgcgctgtgcgcctgcggccggggcgccccgccgagcgccggtgccccggctcccgggccgccttcgccgcgcgggaaggattcttcaaaattaacagaaaccaatttgggccagctgaagagaaaaaataaaggtggctcccggctgcctctgctgcagttcagagcaacttcaggagcttcccagccgagagcttcaggacgcctttcctgtcccactggcccagttgccacaacaaacaacagagaagacggtgaccatgggggatgtgaagctggttgcctcgtcacacatttccaaaacctccctcagtgtggatccctcaagagttgactccatgcccctgacagaggcccctgctttcattttgccccctcggaacctctgcatcaaagaaggagccaccgccaagttcgaagggcgggtccggggttacccagagccccaggtgacatggcacagaaacgggcaacccatcaccagcgggggccgcttcctgctggattgcggcatccgggggactttcagccttgtgattcatgctgtccatgaggaggacaggggaaagtatacctgtgaagccaccaatggcagtggtgctcgccaggtgacagtggagttgacagtagaaggaagttttgcgaagcagcttggtcagcctgttgtttccaaaaccttaggggatagattttcagcttcagcagtggagacccgtcctagcatctggggggagtgcccaccaaagtttgctaccaagctgggccgagttgtggtcaaagaaggacagatgggacgattctcctgcaagatcactggccggccccaaccgcaggtcacctggctcaagggaaatgttccactgcagccgagtgcccgtgtgtctgtgtctgagaagaacggcatgcaggttctggaaatccatggagtcaaccaagatgacgtgggagtgtacacgtgcctggtggtgaacgggtcggggaaggcctcgatgtcagctgaactttccatccaaggtttggacagtgccaataggtcatttgtgagagaaacaaaagccaccaattcagatgtcaggaaagaggtgaccaatgtaatctcaaaggagtcgaagctggacagtctggaggctgcagccaaaagcaagaactgctccagcccccagagaggtggctccccaccctgggctgcaaacagccagcctcagcccccaagggagtccaagctggagtcatgcaaggactcgcccagaacggccccgcagaccccggtccttcagaagacttccagctccatcaccctgcaggccgcaagagttcagccggaaccaagagcaccaggcctgggggtcctatcaccttctggagaagagaggaagaggccagctcctccccgtccagccaccttccccaccaggcagcctggcctggggagccaagatgttgtgagcaaggctgctaacaggagaatccccatggagggccagagggattcagcattccccaaatttgagagcaagccccaaagccaggaggtcaaggaaaatcaaactgtcaagttcagatgtgaagggcttgccgtgatggaggtggccccctccttctccagtgtcctgaaggactgcgctgttattgagggccaggattttgtgctgcagtgctccgtacgggggaccccagtgccccggatcacttggctgctgaatgggcagcccatccagtacgctcgctccacctgcgaggccggcgtggctgagctccacatccaggatgccctgccggaggaccatggcacctacacctgcctagctgagaatgccttggggcaggtgtcctgcagcgcctgggtcaccgtccatgaaaagaagagtagcaggaagagtgagtaccttctgcctgtggctcccagcaagcccactgcacccatcttcctgcagggcctctctgatctcaaagtcatggatggaagccaggtcactatgactgtccaagtgtcagggaatccaccccctgaagtcatctggctgcacaatgggaatgagatccaagagtcagaggacttccactttgaacagagaggaactcagcacagcctttgtatccaggaagtgttcccggaggacacgggcacgtacacctgcgaggcctggaacagcgctggagaggtccgcacccaggccgtgctcacggtacaagagcctcacgatggcacccagccctggttcatcagtaagcctcgctcagtgacagcctccctgggccagagtgtcctcatctcctgcgccatagctggtgacccctttcctaccgtgcactggctcagagatggcaaagccctctgcaaagacactggccacttcgaggtgcttcagaatgaggacgtgttcaccctggttctaaagaaggtgcagccctggcatgccggccagtatgagatcctgctcaagaaccgggttggcgaatgcagttgccaggtgtcactgatgctacagaacagctctgccagagcccttccacgggggagggagcctgccagctgcgaggacctctgtggtggaggagttggtgctgatggtggtggtagtgaccgctatgggtccctgaggcctggctggccagcaagagggcagggttggctagaggaggaagacggcgaggacgtgcgaggggtgctgaagaggcgcgtggagacgaggcagcacactgaggaggcgatccgccagcaggaggtggagcagctggacttccgagacctcctggggaagaaggtgagtacaaagaccctatcggaagacgacctgaaggagatcccagccgagcagatggatttccgtgccaacctgcagcggcaagtgaagccaaagactgtgtctgaggaagagaggaaggtgcacagcccccagcaggtcgattttcgctctgtcctggccaagaaggggacttccaagacccccgtgcctgagaaggtgccaccgccaaaacctgccaccccggattttcgctcagtgctgggtggcaagaagaaattaccagcagagaatggcagcagcagtgccgagaccctgaatgccaaggcagtggagagttccaagcccctgagcaatgcacagccttcagggcccttgaaacccgtgggcaacgccaagcctgctgagaccctgaagccaatgggcaacgccaagcctgccgagaccctgaagcccatgggcaatgccaagcctgatgagaacctgaaatccgctagcaaagaagaactcaagaaagacgttaagaatgatgtgaactgcaagagaggccatgcagggaccacagataatgaaaagagatcagagagccaggggacagccccagccttcaagcagaagctgcaagatgttcatgtggcagagggcaagaagctgctgctccagtgccaggtgtcttctgaccccccagccaccatcatctggacgctgaacggaaagaccctcaagaccaccaagttcatcatcctctcccaggaaggctcactctgctccgtctccatcgagaaggcactgcctgaggacagaggcttatacaagtgtgtagccaagaatgacgctggccaggcggagtgctcctgccaagtcaccgtggatgatgctccagccagtgagaacaccaaggccccagagatgaaatcccggaggcccaagagctctcttcctcccgtgctaggaactgagagtgatgcgactgtgaaaaagaaacctgcccccaagacacctccgaaggcagcaatgccccctcagatcatccagttccctgaggaccagaaggtacgcgcaggagagtcagtggagctgtttggcaaagtgacaggcactcagcccatcacctgtacctggatgaagttccgaaagcagatccaggaaagcgagcacatgaaggtggagaacagcgagaatggcagcaagctcaccatcctggccgcgcgccaggagcactgcggctgctacacactgctggtggagaacaagctgggcagcaggcaggcccaggtcaacctcactgtcgtggataagccagaccccccagctggcacaccttgtgcctctgacattcggagctcctcactgaccctgtcctggtatggctcctcatatgatgggggcagtgctgtacagtcctacagcatcgagatctgggactcagccaacaagacgtggaaggaactagccacatgccgcagcacctctttcaacgtccaggacctgctgcctgaccacgaatataagttccgtgtacgtgcaatcaacgtgtatggaaccagtgagccaagccaggagtctgaactcacaacggtaggagagaaacctgaagagccgaaggatgaagtggaggtgtcagatgatgatgagaaggagcccgaggttgattaccggacagtgacaatcaatactgaacaaaaagtatctgacttctacgacattgaggagagattaggatctgggaaatttggacaggtctttcgacttgtagaaaagaaaactcgaaaagtctgggcagggaagttcttcaaggcatattcagcaaaagagaaagagaatatccggcaggagattagcatcatgaactgcctccaccaccctaagctggtccagtgtgtggatgcctttgaagaaaaggccaacatcgtcatggtcctggagatcgtgtcaggaggggagctgtttgagcgcatcattgacgaggactttgagctgacggagcgtgagtgcatcaagtacatgcggcagatctcggagggagtggagtacatccacaagcagggcatcgtgcacctggacctcaagccggagaacatcatgtgtgtcaacaagacgggcaccaggatcaagctcatcgactttggtctggccaggaggctggagaatgcggggtctctgaaggtcctctttggcaccccagaatttgtggctcctgaagtgatcaactatgagcccatcggctacgccacagacatgtggagcatcggggtcatctgctacatcctaaaccgcctggactgcacgcagtgccttcagcatccatggctaatgaaagataccaagaacatggaggccaagaaactctccaaggaccggatgaagaagtacatggcaagaaggaaatggcagaaaacgggcaatgctgtgagagccattggaagactgtcctctatggcaatgatctcagggctcagtggcaggaaatcctcaacagggtcaccaaccagcccgctcaatgcagaaaaactagaatctgaagaagatgtgtcccaagctttccttgaggctgttgctgaggaaaagcctcatgtaaaaccctatttctctaagaccattcgcgatttagaagttgtggagggaagtgctgctagatttgactgcaagattgaaggatacccagaccccgaggttgtctggttcaaagatgaccagtcaatcagggagtcccgccacttccagatagactacgatgaggacgggaactgctctttaattattagtgatgtttgcggggatgacgatgccaagtacacctgcaaggctgtcaacagtcttggagaagccacctgcacagcagagctcattgtggaaacgatggaggaaggtgaaggggaaggggaagaggaagaagagtgaaacaaagccagagaaaagcagtttctaagtcatattaaaaggactatttctctaaaactcaaaaaaaaaaaaaaaactcaagatagtaaaagcacctagtgtgatagattatcggttaggtcatttgtgggttgattcttcagaaacagcagttgatacctagcagcgttattgatgggcattaatctatgttagttggcaccttaagatactagtgcagctagatttcatttagggaaatcaccagtaacttgactgaccaattgattttagagagaaagtaaccaaaccaaatatttatctgggcaaagtcataaattctccacttgaatgcgctcatgaaaaataaggccaaaacaagagttctgggccacagctcagcccagagggttcctggggatgggaggcctctctctccccaccccctgactctagagaactgggttttctcccagtactccagcaattcatttctgaaagcagttgagccactttattccaaagtacactgcagatgttcaaactctccatttctctttccccttccacctgccagttttgctgactctcaacttgtcatgagtgtaagcattaaggacattatgcttcttcgattctgaagacaggtccctgctcatggatgactctggcttccttaggaaaatatttttcttccaaaatcagtaggaaatctaaacttatcccctctttgcagatgtctagcagcttcagacatttggttaagaacccatgggaaaaaaaaaatccttgctaatgtggtttcctttgtaaaccaggattcttatttgtgctgttatagaatatcagctctgaacgtgtggtaaagatttttgtgtttgaatataggagaaatcagtttgctgaaaagttagtcttaattatctattggccacgatgaaacagatttcaactgataaagagctggagaactccatgtactttggaatctcctccaagatagccagagtttaatacatcttcattctcaacactctccaaagaacttgacctaccttatgggttccatatttttcttcttaaatgtgcatcaatcatgccttgcccccaacctttaaatatattcttagacctggtaaatgcactcagacttgcgtctttaggaatttttaactttctttcactacattggcacttaaattttttctttataaagctttttgaaggtcataaacaaagaccataattgatgatagacctaatacatttcctctgtgtgtgtgtgtaacattccaaatactttttttttcttttccactgtttgtaaggtgcaacaatttaatatttttaagggactttttaagagttccttaagaaccaatttaaaattacttcagtgcaatcctacacagtatcaacattagaattttgatattagtcttatgttatcttccattctatttttatctgctttttgctgctagtttcaaactgccagtatttttccttttgcttttaaaatagttacaatatttttcatgatagccacagtattgccacagtttattataataaagggtttttatttgatttagcgcattcaaagcttttttctatcacttttgtgttcagaatataacctttgtgtgcgtgtatgttgtgtgtgtgcatgtgtggcgtatatgtgtgttacaggttaatgccttcttggaattgtgttaatgttctcttggtttattatgccatcagaatggtaaatgagaacactacaactgtagtcagctcacaatttttaaataaaggataccacagtgcatgctgtttgttcaaaaaaaaaaaaaaaaaa

SEQ ID NO: 11818 - DNA, 7852 bp, Homo sapiens
ggcgctgagcgagctcggagcccgcgctgtgcgcctgcggccggggcgccccgccgagcgccggtgccccggctcccgggccgccttcgccgcgcgggaaggattcttcaaaattaacagaaaccaatttgggccagctgaagagaaaaaataaaggtggctcccggctgcctctgctgcagttcagagcaacttcaggagcttcccagccgagagcttcaggacgcctttcctgtcccactggcccagttgccacaacaaacaacagagaagacggtgaccatgggggatgtgaagctggttgcctcgtcacacatttccaaaacctccctcagtgtggatccctcaagagttgactccatgcccctgacagaggcccctgctttcattttgccccctcggaacctctgcatcaaagaaggagccaccgccaagttcgaagggcgggtccggggttacccagagccccaggtgacatggcacagaaacgggcaacccatcaccagcgggggccgcttcctgctggattgcggcatccgggggactttcagccttgtgattcatgctgtccatgaggaggacaggggaaagtatacctgtgaagccaccaatggcagtggtgctcgccaggtgacagtggagttgacagtagaaggaagttttgcgaagcagcttggtcagcctgttgtttccaaaaccttaggggatagattttcagcttcagcagtggagacccgtcctagcatctggggggagtgcccaccaaagtttgctaccaagctgggccgagttgtggtcaaagaaggacagatgggacgattctcctgcaagatcactggccggccccaaccgcaggtcacctggctcaagggaaatgttccactgcagccgagtgcccgtgtgtctgtgtctgagaagaacggcatgcaggttctggaaatccatggagtcaaccaagatgacgtgggagtgtacacgtgcctggtggtgaacgggtcggggaaggcctcgatgtcagctgaactttccatccaaggtttggacagtgccaataggtcatttgtgagagaaacaaaagccaccaattcagatgtcaggaaagaggtgaccaatgtaatctcaaaggagtcgaagctggacagtctggaggctgcagccaaaagcaagaactgctccagcccccagagaggtggctccccaccctgggctgcaaacagccagcctcagcccccaagggagtccaagctggagtcatgcaaggactcgcccagaacggccccgcagaccccggtccttcagaagacttccagctccatcaccctgcaggccgcaagagttcagccggaaccaagagcaccaggcctgggggtcctatcaccttctggagaagagaggaagaggccagctcctccccgtccagccaccttccccaccaggcagcctggcctggggagccaagatgttgtgagcaaggctgctaacaggagaatccccatggagggccagagggattcagcattccccaaatttgagagcaagccccaaagccaggaggtcaaggaaaatcaaactgtcaagttcagatgtgaagtttccgggattccaaagcctgaagtggcctggttcctggaaggcacccccgtgaggagacaggaaggcagcattgaggtttatgaagatgctggctcccattacctctgcctgctgaaagcccggaccagggacagtgggacatacagctgcactgcttccaacgcccaaggccaggtgtcctgtagctggaccctccaagtggaaaggcttgccgtgatggaggtggccccctccttctccagtgtcctgaaggactgcgctgttattgagggccaggattttgtgctgcagtgctccgtacgggggaccccagtgccccggatcacttggctgctgaatgggcagcccatccagtacgctcgctccacctgcgaggccggcgtggctgagctccacatccaggatgccctgccggaggaccatggcacctacacctgcctagctgagaatgccttggggcaggtgtcctgcagcgcctgggtcaccgtccatgaaaagaagagtagcaggaagagtgagtaccttctgcctgtggctcccagcaagcccactgcacccatcttcctgcagggcctctctgatctcaaagtcatggatggaagccaggtcactatgactgtccaagtgtcagggaatccaccccctgaagtcatctggctgcacaatgggaatgagatccaagagtcagaggacttccactttgaacagagaggaactcagcacagcctttgtatccaggaagtgttcccggaggacacgggcacgtacacctgcgaggcctggaacagcgctggagaggtccgcacccaggccgtgctcacggtacaagagcctcacgatggcacccagccctggttcatcagtaagcctcgctcagtgacagcctccctgggccagagtgtcctcatctcctgcgccatagctggtgacccctttcctaccgtgcactggctcagagatggcaaagccctctgcaaagacactggccacttcgaggtgcttcagaatgaggacgtgttcaccctggttctaaagaaggtgcagccctggcatgccggccagtatgagatcctgctcaagaaccgggttggcgaatgcagttgccaggtgtcactgatgctacagaacagctctgccagagcccttccacgggggagggagcctgccagctgcgaggacctctgtggtggaggagttggtgctgatggtggtggtagtgaccgctatgggtccctgaggcctggctggccagcaagagggcagggttggctagaggaggaagacggcgaggacgtgcgaggggtgctgaagaggcgcgtggagacgaggcagcacactgaggaggcgatccgccagcaggaggtggagcagctggacttccgagacctcctggggaagaaggtgagtacaaagaccctatcggaagacgacctgaaggagatcccagccgagcagatggatttccgtgccaacctgcagcggcaagtgaagccaaagactgtgtctgaggaagagaggaaggtgcacagcccccagcaggtcgattttcgctctgtcctggccaagaaggggacttccaagacccccgtgcctgagaaggtgccaccgccaaaacctgccaccccggattttcgctcagtgctgggtggcaagaagaaattaccagcagagaatggcagcagcagtgccgagaccctgaatgccaaggcagtggagagttccaagcccctgagcaatgcacagccttcagggcccttgaaacccgtgggcaacgccaagcctgctgagaccctgaagccaatgggcaacgccaagcctgccgagaccctgaagcccatgggcaatgccaagcctgatgagaacctgaaatccgctagcaaagaagaactcaagaaagacgttaagaatgatgtgaactgcaagagaggccatgcagggaccacagataatgaaaagagatcagagagccaggggacagccccagccttcaagcagaagctgcaagatgttcatgtggcagagggcaagaagctgctgctccagtgccaggtgtcttctgaccccccagccaccatcatctggacgctgaacggaaagaccctcaagaccaccaagttcatcatcctctcccaggaaggctcactctgctccgtctccatcgagaaggcactgcctgaggacagaggcttatacaagtgtgtagccaagaatgacgctggccaggcggagtgctcctgccaagtcaccgtggatgatgctccagccagtgagaacaccaaggccccagagatgaaatcccggaggcccaagagctctcttcctcccgtgctaggaactgagagtgatgcgactgtgaaaaagaaacctgcccccaagacacctccgaaggcagcaatgccccctcagatcatccagttccctgaggaccagaaggtacgcgcaggagagtcagtggagctgtttggcaaagtgacaggcactcagcccatcacctgtacctggatgaagttccgaaagcagatccaggaaagcgagcacatgaaggtggagaacagcgagaatggcagcaagctcaccatcctggccgcgcgccaggagcactgcggctgctacacactgctggtggagaacaagctgggcagcaggcaggcccaggtcaacctcactgtcgtggataagccagaccccccagctggcacaccttgtgcctctgacattcggagctcctcactgaccctgtcctggtatggctcctcatatgatgggggcagtgctgtacagtcctacagcatcgagatctgggactcagccaacaagacgtggaaggaactagccacatgccgcagcacctctttcaacgtccaggacctgctgcctgaccacgaatataagttccgtgtacgtgcaatcaacgtgtatggaaccagtgagccaagccaggagtctgaactcacaacggtaggagagaaacctgaagagccgaaggatgaagtggaggtgtcagatgatgatgagaaggagcccgaggttgattaccggacagtgacaatcaatactgaacaaaaagtatctgacttctacgacattgaggagagattaggatctgggaaatttggacaggtctttcgacttgtagaaaagaaaactcgaaaagtctgggcagggaagttcttcaaggcatattcagcaaaagagaaagagaatatccggcaggagattagcatcatgaactgcctccaccaccctaagctggtccagtgtgtggatgcctttgaagaaaaggccaacatcgtcatggtcctggagatcgtgtcaggaggggagctgtttgagcgcatcattgacgaggactttgagctgacggagcgtgagtgcatcaagtacatgcggcagatctcggagggagtggagtacatccacaagcagggcatcgtgcacctggacctcaagccggagaacatcatgtgtgtcaacaagacgggcaccaggatcaagctcatcgactttggtctggccaggaggctggagaatgcggggtctctgaaggtcctctttggcaccccagaatttgtggctcctgaagtgatcaactatgagcccatcggctacgccacagacatgtggagcatcggggtcatctgctacatcctagtcagtggcctttcccccttcatgggagacaacgataacgaaaccttggccaacgttacctcagccacctgggacttcgacgacgaggcattcgatgagatctccgacgatgccaaggatttcatcagcaatctgctgaagaaagatatgaaaaaccgcctggactgcacgcagtgccttcagcatccatggctaatgaaagataccaagaacatggaggccaagaaactctccaaggaccggatgaagaagtacatggcaagaaggaaatggcagaaaacgggcaatgctgtgagagccattggaagactgtcctctatggcaatgatctcagggctcagtggcaggaaatcctcaacagggtcaccaaccagcccgctcaatgcagaaaaactagaatctgaagaagatgtgtcccaagctttccttgaggctgttgctgaggaaaagcctcatgtaaaaccctatttctctaagaccattcgcgatttagaagttgtggagggaagtgctgctagatttgactgcaagattgaaggatacccagaccccgaggttgtctggttcaaagatgaccagtcaatcagggagtcccgccacttccagatagactacgatgaggacgggaactgctctttaattattagtgatgtttgcggggatgacgatgccaagtacacctgcaaggctgtcaacagtcttggagaagccacctgcacagcagagctcattgtggaaacgatggaggaaggtgaaggggaaggggaagaggaagaagagtgaaacaaagccagagaaaagcagtttctaagtcatattaaaaggactatttctctaaaactcaaaaaaaaaaaaaaaactcaagatagtaaaagcacctagtgtgatagattatcggttaggtcatttgtgggttgattcttcagaaacagcagttgatacctagcagcgttattgatgggcattaatctatgttagttggcaccttaagatactagtgcagctagatttcatttagggaaatcaccagtaacttgactgaccaattgattttagagagaaagtaaccaaaccaaatatttatctgggcaaagtcataaattctccacttgaatgcgctcatgaaaaataaggccaaaacaagagttctgggccacagctcagcccagagggttcctggggatgggaggcctctctctccccaccccctgactctagagaactgggttttctcccagtactccagcaattcatttctgaaagcagttgagccactttattccaaagtacactgcagatgttcaaactctccatttctctttccccttccacctgccagttttgctgactctcaacttgtcatgagtgtaagcattaaggacattatgcttcttcgattctgaagacaggtccctgctcatggatgactctggcttccttaggaaaatatttttcttccaaaatcagtaggaaatctaaacttatcccctctttgcagatgtctagcagcttcagacatttggttaagaacccatgggaaaaaaaaaatccttgctaatgtggtttcctttgtaaaccaggattcttatttgtgctgttatagaatatcagctctgaacgtgtggtaaagatttttgtgtttgaatataggagaaatcagtttgctgaaaagttagtcttaattatctattggccacgatgaaacagatttcaactgataaagagctggagaactccatgtactttggaatctcctccaagatagccagagtttaatacatcttcattctcaacactctccaaagaacttgacctaccttatgggttccatatttttcttcttaaatgtgcatcaatcatgccttgcccccaacctttaaatatattcttagacctggtaaatgcactcagacttgcgtctttaggaatttttaactttctttcactacattggcacttaaattttttctttataaagctttttgaaggtcataaacaaagaccataattgatgatagacctaatacatttcctctgtgtgtgtgtgtaacattccaaatactttttttttcttttccactgtttgtaaggtgcaacaatttaatatttttaagggactttttaagagttccttaagaaccaatttaaaattacttcagtgcaatcctacacagtatcaacattagaattttgatattagtcttatgttatcttccattctatttttatctgctttttgctgctagtttcaaactgccagtatttttccttttgcttttaaaatagttacaatatttttcatgatagccacagtattgccacagtttattataataaagggtttttatttgatttagcgcattcaaagcttttttctatcacttttgtgttcagaatataacctttgtgtgcgtgtatgttgtgtgtgtgcatgtgtggcgtatatgtgtgttacaggttaatgccttcttggaattgtgttaatgttctcttggtttattatgccatcagaatggtaaatgagaacactacaactgtagtcagctcacaatttttaaataaaggataccacagtgcatgctgtttgttcaaaaaaaaaaaaaaaaaa

SEQ ID NO: 11819 - DNA, 7632 bp, Homo sapiens
ggcgctgagcgagctcggagcccgcgctgtgcgcctgcggccggggcgccccgccgagcgccggtgccccggctcccgggccgccttcgccgcgcgggaaggattcttcaaaattaacagaaaccaatttgggccagctgaagagaaaaaataaaggtggctcccggctgcctctgctgcagttcagagcaacttcaggagcttcccagccgagagcttcaggacgcctttcctgtcccactggcccagttgccacaacaaacaacagagaagacggtgaccatgggggatgtgaagctggttgcctcgtcacacatttccaaaacctccctcagtgtggatccctcaagagttgactccatgcccctgacagaggcccctgctttcattttgccccctcggaacctctgcatcaaagaaggagccaccgccaagttcgaagggcgggtccggggttacccagagccccaggtgacatggcacagaaacgggcaacccatcaccagcgggggccgcttcctgctggattgcggcatccgggggactttcagccttgtgattcatgctgtccatgaggaggacaggggaaagtatacctgtgaagccaccaatggcagtggtgctcgccaggtgacagtggagttgacagtagaaggaagttttgcgaagcagcttggtcagcctgttgtttccaaaaccttaggggatagattttcagcttcagcagtggagacccgtcctagcatctggggggagtgcccaccaaagtttgctaccaagctgggccgagttgtggtcaaagaaggacagatgggacgattctcctgcaagatcactggccggccccaaccgcaggtcacctggctcaagggaaatgttccactgcagccgagtgcccgtgtgtctgtgtctgagaagaacggcatgcaggttctggaaatccatggagtcaaccaagatgacgtgggagtgtacacgtgcctggtggtgaacgggtcggggaaggcctcgatgtcagctgaactttccatccaaggtttggacagtgccaataggtcatttgtgagagaaacaaaagccaccaattcagatgtcaggaaagaggtgaccaatgtaatctcaaaggagtcgaagctggacagtctggaggctgcagccaaaagcaagaactgctccagcccccagagaggtggctccccaccctgggctgcaaacagccagcctcagcccccaagggagtccaagctggagtcatgcaaggactcgcccagaacggccccgcagaccccggtccttcagaagacttccagctccatcaccctgcaggccgcaagagttcagccggaaccaagagcaccaggcctgggggtcctatcaccttctggagaagagaggaagaggccagctcctccccgtccagccaccttccccaccaggcagcctggcctggggagccaagatgttgtgagcaaggctgctaacaggagaatccccatggagggccagagggattcagcattccccaaatttgagagcaagccccaaagccaggaggtcaaggaaaatcaaactgtcaagttcagatgtgaagtttccgggattccaaagcctgaagtggcctggttcctggaaggcacccccgtgaggagacaggaaggcagcattgaggtttatgaagatgctggctcccattacctctgcctgctgaaagcccggaccagggacagtgggacatacagctgcactgcttccaacgcccaaggccaggtgtcctgtagctggaccctccaagtggaaaggcttgccgtgatggaggtggccccctccttctccagtgtcctgaaggactgcgctgttattgagggccaggattttgtgctgcagtgctccgtacgggggaccccagtgccccggatcacttggctgctgaatgggcagcccatccagtacgctcgctccacctgcgaggccggcgtggctgagctccacatccaggatgccctgccggaggaccatggcacctacacctgcctagctgagaatgccttggggcaggtgtcctgcagcgcctgggtcaccgtccatgaaaagaagagtagcaggaagagtgagtaccttctgcctgtggctcccagcaagcccactgcacccatcttcctgcagggcctctctgatctcaaagtcatggatggaagccaggtcactatgactgtccaagtgtcagggaatccaccccctgaagtcatctggctgcacaatgggaatgagatccaagagtcagaggacttccactttgaacagagaggaactcagcacagcctttgtatccaggaagtgttcccggaggacacgggcacgtacacctgcgaggcctggaacagcgctggagaggtccgcacccaggccgtgctcacggtacaagagcctcacgatggcacccagccctggttcatcagtaagcctcgctcagtgacagcctccctgggccagagtgtcctcatctcctgcgccatagctggtgacccctttcctaccgtgcactggctcagagatggcaaagccctctgcaaagacactggccacttcgaggtgcttcagaatgaggacgtgttcaccctggttctaaagaaggtgcagccctggcatgccggccagtatgagatcctgctcaagaaccgggttggcgaatgcagttgccaggtgtcactgatgctacagaacagctctgccagagcccttccacgggggagggagcctgccagctgcgaggacctctgtggtggaggagttggtgctgatggtggtggtagtgaccgctatgggtccctgaggcctggctggccagcaagagggcagggttggctagaggaggaagacggcgaggacgtgcgaggggtgctgaagaggcgcgtggagacgaggcagcacactgaggaggcgatccgccagcaggaggtggagcagctggacttccgagacctcctggggaagaaggtgagtacaaagaccctatcggaagacgacctgaaggagatcccagccgagcagatggatttccgtgccaacctgcagcggcaagtgaagccaaagactgtgtctgaggaagagaggaaggtgcacagcccccagcaggtcgattttcgctctgtcctggccaagaaggggacttccaagacccccgtgcctgagaaggtgccaccgccaaaacctgccaccccggattttcgctcagtgctgggtggcaagaagaaattaccagcagagaatggcagcagcagtgccgagaccctgaatgccaaggcagtggagagttccaagcccctgagcaatgcacagccttcagggcccttgaaacccgtgggcaacgccaagcctgctgagaccctgaagccaatgggcaacgccaagcctgccgagaccctgaagcccatgggcaatgccaagcctgatgagaacctgaaatccgctagcaaagaagaactcaagaaagacgttaagaatgatgtgaactgcaagagaggccatgcagggaccacagataatgaaaagagatcagagagccaggggacagccccagccttcaagcagaagctgcaagatgttcatgtggcagagggcaagaagctgctgctccagtgccaggtgtcttctgaccccccagccaccatcatctggacgctgaacggaaagaccctcaagaccaccaagttcatcatcctctcccaggaaggctcactctgctccgtctccatcgagaaggcactgcctgaggacagaggcttatacaagtgtgtagccaagaatgacgctggccaggcggagtgctcctgccaagtcaccgtggatgatgctccagccagtgagaacaccaaggccccagagatgaaatcccggaggcccaagagctctcttcctcccgtgctaggaactgagagtgatgcgactgtgaaaaagaaacctgcccccaagacacctccgaaggcagcaatgccccctcagatcatccagttccctgaggaccagaaggtacgcgcaggagagtcagtggagctgtttggcaaagtgacaggcactcagcccatcacctgtacctggatgaagttccgaaagcagatccaggaaagcgagcacatgaaggtggagaacagcgagaatggcagcaagctcaccatcctggccgcgcgccaggagcactgcggctgctacacactgctggtggagaacaagctgggcagcaggcaggcccaggtcaacctcactgtcgtggataagccagaccccccagctggcacaccttgtgcctctgacattcggagctcctcactgaccctgtcctggtatggctcctcatatgatgggggcagtgctgtacagtcctacagcatcgagatctgggactcagccaacaagacgtggaaggaactagccacatgccgcagcacctctttcaacgtccaggacctgctgcctgaccacgaatataagttccgtgtacgtgcaatcaacgtgtatggaaccagtgagccaagccaggagtctgaactcacaacggtaggagagaaacctgaagagccgaaggatgaagtggaggtgtcagatgatgatgagaaggagcccgaggttgattaccggacagtgacaatcaatactgaacaaaaagtatctgacttctacgacattgaggagagattaggatcctgtttgagcgcatcattgacgaggactttgagctgacggagcgtgagtgcatcaagtacatgcggcagatctcggagggagtggagtacatccacaagcagggcatcgtgcacctggacctcaagccggagaacatcatgtgtgtcaacaagacgggcaccaggatcaagctcatcgactttggtctggccaggaggctggagaatgcggggtctctgaaggtcctctttggcaccccagaatttgtggctcctgaagtgatcaactatgagcccatcggctacgccacagacatgtggagcatcggggtcatctgctacatcctagtcagtggcctttcccccttcatgggagacaacgataacgaaaccttggccaacgttacctcagccacctgggacttcgacgacgaggcattcgatgagatctccgacgatgccaaggatttcatcagcaatctgctgaagaaagatatgaaaaaccgcctggactgcacgcagtgccttcagcatccatggctaatgaaagataccaagaacatggaggccaagaaactctccaaggaccggatgaagaagtacatggcaagaaggaaatggcagaaaacgggcaatgctgtgagagccattggaagactgtcctctatggcaatgatctcagggctcagtggcaggaaatcctcaacagggtcaccaaccagcccgctcaatgcagaaaaactagaatctgaagaagatgtgtcccaagctttccttgaggctgttgctgaggaaaagcctcatgtaaaaccctatttctctaagaccattcgcgatttagaagttgtggagggaagtgctgctagatttgactgcaagattgaaggatacccagaccccgaggttgtctggttcaaagatgaccagtcaatcagggagtcccgccacttccagatagactacgatgaggacgggaactgctctttaattattagtgatgtttgcggggatgacgatgccaagtacacctgcaaggctgtcaacagtcttggagaagccacctgcacagcagagctcattgtggaaacgatggaggaaggtgaaggggaaggggaagaggaagaagagtgaaacaaagccagagaaaagcagtttctaagtcatattaaaaggactatttctctaaaactcaaaaaaaaaaaaaaaactcaagatagtaaaagcacctagtgtgatagattatcggttaggtcatttgtgggttgattcttcagaaacagcagttgatacctagcagcgttattgatgggcattaatctatgttagttggcaccttaagatactagtgcagctagatttcatttagggaaatcaccagtaacttgactgaccaattgattttagagagaaagtaaccaaaccaaatatttatctgggcaaagtcataaattctccacttgaatgcgctcatgaaaaataaggccaaaacaagagttctgggccacagctcagcccagagggttcctggggatgggaggcctctctctccccaccccctgactctagagaactgggttttctcccagtactccagcaattcatttctgaaagcagttgagccactttattccaaagtacactgcagatgttcaaactctccatttctctttccccttccacctgccagttttgctgactctcaacttgtcatgagtgtaagcattaaggacattatgcttcttcgattctgaagacaggtccctgctcatggatgactctggcttccttaggaaaatatttttcttccaaaatcagtaggaaatctaaacttatcccctctttgcagatgtctagcagcttcagacatttggttaagaacccatgggaaaaaaaaaatccttgctaatgtggtttcctttgtaaaccaggattcttatttgtgctgttatagaatatcagctctgaacgtgtggtaaagatttttgtgtttgaatataggagaaatcagtttgctgaaaagttagtcttaattatctattggccacgatgaaacagatttcaactgataaagagctggagaactccatgtactttggaatctcctccaagatagccagagtttaatacatcttcattctcaacactctccaaagaacttgacctaccttatgggttccatatttttcttcttaaatgtgcatcaatcatgccttgcccccaacctttaaatatattcttagacctggtaaatgcactcagacttgcgtctttaggaatttttaactttctttcactacattggcacttaaattttttctttataaagctttttgaaggtcataaacaaagaccataattgatgatagacctaatacatttcctctgtgtgtgtgtgtaacattccaaatactttttttttcttttccactgtttgtaaggtgcaacaatttaatatttttaagggactttttaagagttccttaagaaccaatttaaaattacttcagtgcaatcctacacagtatcaacattagaattttgatattagtcttatgttatcttccattctatttttatctgctttttgctgctagtttcaaactgccagtatttttccttttgcttttaaaatagttacaatatttttcatgatagccacagtattgccacagtttattataataaagggtttttatttgatttagcgcattcaaagcttttttctatcacttttgtgttcagaatataacctttgtgtgcgtgtatgttgtgtgtgtgcatgtgtggcgtatatgtgtgttacaggttaatgccttcttggaattgtgttaatgttctcttggtttattatgccatcagaatggtaaatgagaacactacaactgtagtcagctcacaatttttaaataaaggataccacagtgcatgctgtttgttcaaaaaaaaaaaaaaaaaa

SEQ ID NO: 11820 - DNA, 7645 bp, Homo sapiens
ggcgctgagcgagctcggagcccgcgctgtgcgcctgcggccggggcgccccgccgagcgccggtgccccggctcccgggccgccttcgccgcgcgggaaggattcttcaaaattaacagaaaccaatttgggccagctgaagagaaaaaataaaggtggctcccggctgcctctgctgcagttcagagcaacttcaggagcttcccagccgagagcttcaggacgcctttcctgtcccactggcccagttgccacaacaaacaacagagaagacggtgaccatgggggatgtgaagctggttgcctcgtcacacatttccaaaacctccctcagtgtggatccctcaagagttgactccatgcccctgacagaggcccctgctttcattttgccccctcggaacctctgcatcaaagaaggagccaccgccaagttcgaagggcgggtccggggttacccagagccccaggtgacatggcacagaaacgggcaacccatcaccagcgggggccgcttcctgctggattgcggcatccgggggactttcagccttgtgattcatgctgtccatgaggaggacaggggaaagtatacctgtgaagccaccaatggcagtggtgctcgccaggtgacagtggagttgacagtagaaggaagttttgcgaagcagcttggtcagcctgttgtttccaaaaccttaggggatagattttcagcttcagcagtggagacccgtcctagcatctggggggagtgcccaccaaagtttgctaccaagctgggccgagttgtggtcaaagaaggacagatgggacgattctcctgcaagatcactggccggccccaaccgcaggtcacctggctcaagggaaatgttccactgcagccgagtgcccgtgtgtctgtgtctgagaagaacggcatgcaggttctggaaatccatggagtcaaccaagatgacgtgggagtgtacacgtgcctggtggtgaacgggtcggggaaggcctcgatgtcagctgaactttccatccaaggtttggacagtgccaataggtcatttgtgagagaaacaaaagccaccaattcagatgtcaggaaagaggtgaccaatgtaatctcaaaggagtcgaagctggacagtctggaggctgcagccaaaagcaagaactgctccagcccccagagaggtggctccccaccctgggctgcaaacagccagcctcagcccccaagggagtccaagctggagtcatgcaaggactcgcccagaacggccccgcagaccccggtccttcagaagacttccagctccatcaccctgcaggccgcaagagttcagccggaaccaagagcaccaggcctgggggtcctatcaccttctggagaagagaggaagaggccagctcctccccgtccagccaccttccccaccaggcagcctggcctggggagccaagatgttgtgagcaaggctgctaacaggagaatccccatggagggccagagggattcagcattccccaaatttgagagcaagccccaaagccaggaggtcaaggaaaatcaaactgtcaagttcagatgtgaagggcttgccgtgatggaggtggccccctccttctccagtgtcctgaaggactgcgctgttattgagggccaggattttgtgctgcagtgctccgtacgggggaccccagtgccccggatcacttggctgctgaatgggcagcccatccagtacgctcgctccacctgcgaggccggcgtggctgagctccacatccaggatgccctgccggaggaccatggcacctacacctgcctagctgagaatgccttggggcaggtgtcctgcagcgcctgggtcaccgtccatgaaaagaagagtagcaggaagagtgagtaccttctgcctgtggctcccagcaagcccactgcacccatcttcctgcagggcctctctgatctcaaagtcatggatggaagccaggtcactatgactgtccaagtgtcagggaatccaccccctgaagtcatctggctgcacaatgggaatgagatccaagagtcagaggacttccactttgaacagagaggaactcagcacagcctttgtatccaggaagtgttcccggaggacacgggcacgtacacctgcgaggcctggaacagcgctggagaggtccgcacccaggccgtgctcacggtacaagagcctcacgatggcacccagccctggttcatcagtaagcctcgctcagtgacagcctccctgggccagagtgtcctcatctcctgcgccatagctggtgacccctttcctaccgtgcactggctcagagatggcaaagccctctgcaaagacactggccacttcgaggtgcttcagaatgaggacgtgttcaccctggttctaaagaaggtgcagccctggcatgccggccagtatgagatcctgctcaagaaccgggttggcgaatgcagttgccaggtgtcactgatgctacagaacagctctgccagagcccttccacgggggagggagcctgccagctgcgaggacctctgtggtggaggagttggtgctgatggtggtggtagtgaccgctatgggtccctgaggcctggctggccagcaagagggcagggttggctagaggaggaagacggcgaggacgtgcgaggggtgctgaagaggcgcgtggagacgaggcagcacactgaggaggcgatccgccagcaggaggtggagcagctggacttccgagacctcctggggaagaaggtgagtacaaagaccctatcggaagacgacctgaaggagatcccagccgagcagatggatttccgtgccaacctgcagcggcaagtgaagccaaagactgtgtctgaggaagagaggaaggtgcacagcccccagcaggtcgattttcgctctgtcctggccaagaaggggacttccaagacccccgtgcctgagaaggtgccaccgccaaaacctgccaccccggattttcgctcagtgctgggtggcaagaagaaattaccagcagagaatggcagcagcagtgccgagaccctgaatgccaaggcagtggagagttccaagcccctgagcaatgcacagccttcagggcccttgaaacccgtgggcaacgccaagcctgctgagaccctgaagccaatgggcaacgccaagcctgccgagaccctgaagcccatgggcaatgccaagcctgatgagaacctgaaatccgctagcaaagaagaactcaagaaagacgttaagaatgatgtgaactgcaagagaggccatgcagggaccacagataatgaaaagagatcagagagccaggggacagccccagccttcaagcagaagctgcaagatgttcatgtggcagagggcaagaagctgctgctccagtgccaggtgtcttctgaccccccagccaccatcatctggacgctgaacggaaagaccctcaagaccaccaagttcatcatcctctcccaggaaggctcactctgctccgtctccatcgagaaggcactgcctgaggacagaggcttatacaagtgtgtagccaagaatgacgctggccaggcggagtgctcctgccaagtcaccgtggatgatgctccagccagtgagaacaccaaggccccagagatgaaatcccggaggcccaagagctctcttcctcccgtgctaggaactgagagtgatgcgactgtgaaaaagaaacctgcccccaagacacctccgaaggcagcaatgccccctcagatcatccagttccctgaggaccagaaggtacgcgcaggagagtcagtggagctgtttggcaaagtgacaggcactcagcccatcacctgtacctggatgaagttccgaaagcagatccaggaaagcgagcacatgaaggtggagaacagcgagaatggcagcaagctcaccatcctggccgcgcgccaggagcactgcggctgctacacactgctggtggagaacaagctgggcagcaggcaggcccaggtcaacctcactgtcgtggataagccagaccccccagctggcacaccttgtgcctctgacattcggagctcctcactgaccctgtcctggtatggctcctcatatgatgggggcagtgctgtacagtcctacagcatcgagatctgggactcagccaacaagacgtggaaggaactagccacatgccgcagcacctctttcaacgtccaggacctgctgcctgaccacgaatataagttccgtgtacgtgcaatcaacgtgtatggaaccagtgagccaagccaggagtctgaactcacaacggtaggagagaaacctgaagagccgaaggatgaagtggaggtgtcagatgatgatgagaaggagcccgaggttgattaccggacagtgacaatcaatactgaacaaaaagtatctgacttctacgacattgaggagagattaggatctgggaaatttggacaggtctttcgacttgtagaaaagaaaactcgaaaagtctgggcagggaagttcttcaaggcatattcagcaaaagagaaagagaatatccggcaggagattagcatcatgaactgcctccaccaccctaagctggtccagtgtgtggatgcctttgaagaaaaggccaacatcgtcatggtcctggagatcgtgtcaggaggggagctgtttgagcgcatcattgacgaggactttgagctgacggagcgtgagtgcatcaagtacatgcggcagatctcggagggagtggagtacatccacaagcagggcatcgtgcacctggacctcaagccggagaacatcatgtgtgtcaacaagacgggcaccaggatcaagctcatcgactttggtctggccaggaggctggagaatgcggggtctctgaaggtcctctttggcaccccagaatttgtggctcctgaagtgatcaactatgagcccatcggctacgccacagacatgtggagcatcggggtcatctgctacatcctagtcagtggcctttcccccttcatgggagacaacgataacgaaaccttggccaacgttacctcagccacctgggacttcgacgacgaggcattcgatgagatctccgacgatgccaaggatttcatcagcaatctgctgaagaaagatatgaaaaaccgcctggactgcacgcagtgccttcagcatccatggctaatgaaagataccaagaacatggaggccaagaaactctccaaggaccggatgaagaagtacatggcaagaaggaaatggcagaaaacgggcaatgctgtgagagccattggaagactgtcctctatggcaatgatctcagggctcagtggcaggaaatcctcaacagggtcaccaaccagcccgctcaatgcagaaaaactagaatctgaagaagatgtgtcccaagctttccttgaggctgttgctgaggaaaagcctcatgtaaaaccctatttctctaagaccattcgcgatttagaagttgtggagggaagtgctgctagatttgactgcaagattgaaggatacccagaccccgaggttgtctggttcaaagatgaccagtcaatcagggagtcccgccacttccagatagactacgatgaggacgggaactgctctttaattattagtgatgtttgcggggatgacgatgccaagtacacctgcaaggctgtcaacagtcttggagaagccacctgcacagcagagctcattgtggaaacgatggaggaaggtgaaggggaaggggaagaggaagaagagtgaaacaaagccagagaaaagcagtttctaagtcatattaaaaggactatttctctaaaactcaaaaaaaaaaaaaaaactcaagatagtaaaagcacctagtgtgatagattatcggttaggtcatttgtgggttgattcttcagaaacagcagttgatacctagcagcgttattgatgggcattaatctatgttagttggcaccttaagatactagtgcagctagatttcatttagggaaatcaccagtaacttgactgaccaattgattttagagagaaagtaaccaaaccaaatatttatctgggcaaagtcataaattctccacttgaatgcgctcatgaaaaataaggccaaaacaagagttctgggccacagctcagcccagagggttcctggggatgggaggcctctctctccccaccccctgactctagagaactgggttttctcccagtactccagcaattcatttctgaaagcagttgagccactttattccaaagtacactgcagatgttcaaactctccatttctctttccccttccacctgccagttttgctgactctcaacttgtcatgagtgtaagcattaaggacattatgcttcttcgattctgaagacaggtccctgctcatggatgactctggcttccttaggaaaatatttttcttccaaaatcagtaggaaatctaaacttatcccctctttgcagatgtctagcagcttcagacatttggttaagaacccatgggaaaaaaaaaatccttgctaatgtggtttcctttgtaaaccaggattcttatttgtgctgttatagaatatcagctctgaacgtgtggtaaagatttttgtgtttgaatataggagaaatcagtttgctgaaaagttagtcttaattatctattggccacgatgaaacagatttcaactgataaagagctggagaactccatgtactttggaatctcctccaagatagccagagtttaatacatcttcattctcaacactctccaaagaacttgacctaccttatgggttccatatttttcttcttaaatgtgcatcaatcatgccttgcccccaacctttaaatatattcttagacctggtaaatgcactcagacttgcgtctttaggaatttttaactttctttcactacattggcacttaaattttttctttataaagctttttgaaggtcataaacaaagaccataattgatgatagacctaatacatttcctctgtgtgtgtgtgtaacattccaaatactttttttttcttttccactgtttgtaaggtgcaacaatttaatatttttaagggactttttaagagttccttaagaaccaatttaaaattacttcagtgcaatcctacacagtatcaacattagaattttgatattagtcttatgttatcttccattctatttttatctgctttttgctgctagtttcaaactgccagtatttttccttttgcttttaaaatagttacaatatttttcatgatagccacagtattgccacagtttattataataaagggtttttatttgatttagcgcattcaaagcttttttctatcacttttgtgttcagaatataacctttgtgtgcgtgtatgttgtgtgtgtgcatgtgtggcgtatatgtgtgttacaggttaatgccttcttggaattgtgttaatgttctcttggtttattatgccatcagaatggtaaatgagaacactacaactgtagtcagctcacaatttttaaataaaggataccacagtgcatgctgtttgttcaaaaaaaaaaaaaaaaaa

SEQ ID NO: 11821 - DNA, 7699 bp, Homo sapiens
ggcgctgagcgagctcggagcccgcgctgtgcgcctgcggccggggcgccccgccgagcgccggtgccccggctcccgggccgccttcgccgcgcgggaaggattcttcaaaattaacagaaaccaatttgggccagctgaagagaaaaaataaaggtggctcccggctgcctctgctgcagttcagagcaacttcaggagcttcccagccgagagcttcaggacgcctttcctgtcccactggcccagttgccacaacaaacaacagagaagacggtgaccatgggggatgtgaagctggttgcctcgtcacacatttccaaaacctccctcagtgtggatccctcaagagttgactccatgcccctgacagaggcccctgctttcattttgccccctcggaacctctgcatcaaagaaggagccaccgccaagttcgaagggcgggtccggggttacccagagccccaggtgacatggcacagaaacgggcaacccatcaccagcgggggccgcttcctgctggattgcggcatccgggggactttcagccttgtgattcatgctgtccatgaggaggacaggggaaagtatacctgtgaagccaccaatggcagtggtgctcgccaggtgacagtggagttgacagtagaaggaagttttgcgaagcagcttggtcagcctgttgtttccaaaaccttaggggatagattttcagcttcagcagtggagacccgtcctagcatctggggggagtgcccaccaaagtttgctaccaagctgggccgagttgtggtcaaagaaggacagatgggacgattctcctgcaagatcactggccggccccaaccgcaggtcacctggctcaagggaaatgttccactgcagccgagtgcccgtgtgtctgtgtctgagaagaacggcatgcaggttctggaaatccatggagtcaaccaagatgacgtgggagtgtacacgtgcctggtggtgaacgggtcggggaaggcctcgatgtcagctgaactttccatccaaggtttggacagtgccaataggtcatttgtgagagaaacaaaagccaccaattcagatgtcaggaaagaggtgaccaatgtaatctcaaaggagtcgaagctggacagtctggaggctgcagccaaaagcaagaactgctccagcccccagagaggtggctccccaccctgggctgcaaacagccagcctcagcccccaagggagtccaagctggagtcatgcaaggactcgcccagaacggccccgcagaccccggtccttcagaagacttccagctccatcaccctgcaggccgcaagagttcagccggaaccaagagcaccaggcctgggggtcctatcaccttctggagaagagaggaagaggccagctcctccccgtccagccaccttccccaccaggcagcctggcctggggagccaagatgttgtgagcaaggctgctaacaggagaatccccatggagggccagagggattcagcattccccaaatttgagagcaagccccaaagccaggaggtcaaggaaaatcaaactgtcaagttcagatgtgaagtttccgggattccaaagcctgaagtggcctggttcctggaaggcacccccgtgaggagacaggaaggcagcattgaggtttatgaagatgctggctcccattacctctgcctgctgaaagcccggaccagggacagtgggacatacagctgcactgcttccaacgcccaaggccaggtgtcctgtagctggaccctccaagtggaaaggcttgccgtgatggaggtggccccctccttctccagtgtcctgaaggactgcgctgttattgagggccaggattttgtgctgcagtgctccgtacgggggaccccagtgccccggatcacttggctgctgaatgggcagcccatccagtacgctcgctccacctgcgaggccggcgtggctgagctccacatccaggatgccctgccggaggaccatggcacctacacctgcctagctgagaatgccttggggcaggtgtcctgcagcgcctgggtcaccgtccatgaaaagaagagtagcaggaagagtgagtaccttctgcctgtggctcccagcaagcccactgcacccatcttcctgcagggcctctctgatctcaaagtcatggatggaagccaggtcactatgactgtccaagtgtcagggaatccaccccctgaagtcatctggctgcacaatgggaatgagatccaagagtcagaggacttccactttgaacagagaggaactcagcacagcctttgtatccaggaagtgttcccggaggacacgggcacgtacacctgcgaggcctggaacagcgctggagaggtccgcacccaggccgtgctcacggtacaagagcctcacgatggcacccagccctggttcatcagtaagcctcgctcagtgacagcctccctgggccagagtgtcctcatctcctgcgccatagctggtgacccctttcctaccgtgcactggctcagagatggcaaagccctctgcaaagacactggccacttcgaggtgcttcagaatgaggacgtgttcaccctggttctaaagaaggtgcagccctggcatgccggccagtatgagatcctgctcaagaaccgggttggcgaatgcagttgccaggtgtcactgatgctacagaacagctctgccagagcccttccacgggggagggagcctgccagctgcgaggacctctgtggtggaggagttggtgctgatggtggtggtagtgaccgctatgggtccctgaggcctggctggccagcaagagggcagggttggctagaggaggaagacggcgaggacgtgcgaggggtgctgaagaggcgcgtggagacgaggcagcacactgaggaggcgatccgccagcaggaggtggagcagctggacttccgagacctcctggggaagaaggtgagtacaaagaccctatcggaagacgacctgaaggagatcccagccgagcagatggatttccgtgccaacctgcagcggcaagtgaagccaaagactgtgtctgaggaagagaggaaggtgcacagcccccagcaggtcgattttcgctctgtcctggccaagaaggggacttccaagacccccgtgcctgagaaggtgccaccgccaaaacctgccaccccggattttcgctcagtgctgggtggcaagaagaaattaccagcagagaatggcagcagcagtgccgagaccctgaatgccaaggcagtggagagttccaagcccctgagcaatgcacagccttcagggcccttgaaacccgtgggcaacgccaagcctgctgagaccctgaagccaatgggcaacgccaagcctgccgagaccctgaagcccatgggcaatgccaagcctgatgagaacctgaaatccgctagcaaagaagaactcaagaaagacgttaagaatgatgtgaactgcaagagaggccatgcagggaccacagataatgaaaagagatcagagagccaggggacagccccagccttcaagcagaagctgcaagatgttcatgtggcagagggcaagaagctgctgctccagtgccaggtgtcttctgaccccccagccaccatcatctggacgctgaacggaaagaccctcaagaccaccaagttcatcatcctctcccaggaaggctcactctgctccgtctccatcgagaaggcactgcctgaggacagaggcttatacaagtgtgtagccaagaatgacgctggccaggcggagtgctcctgccaagtcaccgtggatgatgctccagccagtgagaacaccaaggccccagagatgaaatcccggaggcccaagagctctcttcctcccgtgctaggaactgagagtgatgcgactgtgaaaaagaaacctgcccccaagacacctccgaaggcagcaatgccccctcagatcatccagttccctgaggaccagaaggtacgcgcaggagagtcagtggagctgtttggcaaagtgacaggcactcagcccatcacctgtacctggatgaagttccgaaagcagatccaggaaagcgagcacatgaaggtggagaacagcgagaatggcagcaagctcaccatcctggccgcgcgccaggagcactgcggctgctacacactgctggtggagaacaagctgggcagcaggcaggcccaggtcaacctcactgtcgtggataagccagaccccccagctggcacaccttgtgcctctgacattcggagctcctcactgaccctgtcctggtatggctcctcatatgatgggggcagtgctgtacagtcctacagcatcgagatctgggactcagccaacaagacgtggaaggaactagccacatgccgcagcacctctttcaacgtccaggacctgctgcctgaccacgaatataagttccgtgtacgtgcaatcaacgtgtatggaaccagtgagccaagccaggagtctgaactcacaacggtaggagagaaacctgaagagccgaaggatgaagtggaggtgtcagatgatgatgagaaggagcccgaggttgattaccggacagtgacaatcaatactgaacaaaaagtatctgacttctacgacattgaggagagattaggatctgggaaatttggacaggtctttcgacttgtagaaaagaaaactcgaaaagtctgggcagggaagttcttcaaggcatattcagcaaaagagaaagagaatatccggcaggagattagcatcatgaactgcctccaccaccctaagctggtccagtgtgtggatgcctttgaagaaaaggccaacatcgtcatggtcctggagatcgtgtcaggaggggagctgtttgagcgcatcattgacgaggactttgagctgacggagcgtgagtgcatcaagtacatgcggcagatctcggagggagtggagtacatccacaagcagggcatcgtgcacctggacctcaagccggagaacatcatgtgtgtcaacaagacgggcaccaggatcaagctcatcgactttggtctggccaggaggctggagaatgcggggtctctgaaggtcctctttggcaccccagaatttgtggctcctgaagtgatcaactatgagcccatcggctacgccacagacatgtggagcatcggggtcatctgctacatcctaaaccgcctggactgcacgcagtgccttcagcatccatggctaatgaaagataccaagaacatggaggccaagaaactctccaaggaccggatgaagaagtacatggcaagaaggaaatggcagaaaacgggcaatgctgtgagagccattggaagactgtcctctatggcaatgatctcagggctcagtggcaggaaatcctcaacagggtcaccaaccagcccgctcaatgcagaaaaactagaatctgaagaagatgtgtcccaagctttccttgaggctgttgctgaggaaaagcctcatgtaaaaccctatttctctaagaccattcgcgatttagaagttgtggagggaagtgctgctagatttgactgcaagattgaaggatacccagaccccgaggttgtctggttcaaagatgaccagtcaatcagggagtcccgccacttccagatagactacgatgaggacgggaactgctctttaattattagtgatgtttgcggggatgacgatgccaagtacacctgcaaggctgtcaacagtcttggagaagccacctgcacagcagagctcattgtggaaacgatggaggaaggtgaaggggaaggggaagaggaagaagagtgaaacaaagccagagaaaagcagtttctaagtcatattaaaaggactatttctctaaaactcaaaaaaaaaaaaaaaactcaagatagtaaaagcacctagtgtgatagattatcggttaggtcatttgtgggttgattcttcagaaacagcagttgatacctagcagcgttattgatgggcattaatctatgttagttggcaccttaagatactagtgcagctagatttcatttagggaaatcaccagtaacttgactgaccaattgattttagagagaaagtaaccaaaccaaatatttatctgggcaaagtcataaattctccacttgaatgcgctcatgaaaaataaggccaaaacaagagttctgggccacagctcagcccagagggttcctggggatgggaggcctctctctccccaccccctgactctagagaactgggttttctcccagtactccagcaattcatttctgaaagcagttgagccactttattccaaagtacactgcagatgttcaaactctccatttctctttccccttccacctgccagttttgctgactctcaacttgtcatgagtgtaagcattaaggacattatgcttcttcgattctgaagacaggtccctgctcatggatgactctggcttccttaggaaaatatttttcttccaaaatcagtaggaaatctaaacttatcccctctttgcagatgtctagcagcttcagacatttggttaagaacccatgggaaaaaaaaaatccttgctaatgtggtttcctttgtaaaccaggattcttatttgtgctgttatagaatatcagctctgaacgtgtggtaaagatttttgtgtttgaatataggagaaatcagtttgctgaaaagttagtcttaattatctattggccacgatgaaacagatttcaactgataaagagctggagaactccatgtactttggaatctcctccaagatagccagagtttaatacatcttcattctcaacactctccaaagaacttgacctaccttatgggttccatatttttcttcttaaatgtgcatcaatcatgccttgcccccaacctttaaatatattcttagacctggtaaatgcactcagacttgcgtctttaggaatttttaactttctttcactacattggcacttaaattttttctttataaagctttttgaaggtcataaacaaagaccataattgatgatagacctaatacatttcctctgtgtgtgtgtgtaacattccaaatactttttttttcttttccactgtttgtaaggtgcaacaatttaatatttttaagggactttttaagagttccttaagaaccaatttaaaattacttcagtgcaatcctacacagtatcaacattagaattttgatattagtcttatgttatcttccattctatttttatctgctttttgctgctagtttcaaactgccagtatttttccttttgcttttaaaatagttacaatatttttcatgatagccacagtattgccacagtttattataataaagggtttttatttgatttagcgcattcaaagcttttttctatcacttttgtgttcagaatataacctttgtgtgcgtgtatgttgtgtgtgtgcatgtgtggcgtatatgtgtgttacaggttaatgccttcttggaattgtgttaatgttctcttggtttattatgccatcagaatggtaaatgagaacactacaactgtagtcagctcacaatttttaaataaaggataccacagtgcatgctgtttgttcaaaaaaaaaaaaaaaaaa

SEQ ID NO: 11822 - DNA, 5182 bp, Homo sapiens
ttcaggaaccgggttggcgaatgcagttgccaggtgtcactgatgctacagaacagctctgccagagcccttccacgggggagggagcctgccagctgcgaggacctctgtggtggaggagttggtgctgatggtggtggtagtgaccgctatgggtccctgaggcctggctggccagcaagagggcagggttggctagaggaggaagacggcgaggacgtgcgaggggtgctgaagaggcgcgtggagacgaggcagcacactgaggaggcgatccgccagcaggaggtggagcagctggacttccgagacctcctggggaagaaggtgagtacaaagaccctatcggaagacgacctgaaggagatcccagccgagcagatggatttccgtgccaacctgcagcggcaagtgaagccaaagactgtgtctgaggaagagaggaaggtgcacagcccccagcaggtcgattttcgctctgtcctggccaagaaggggacttccaagacccccgtgcctgagaaggtgccaccgccaaaacctgccaccccggattttcgctcagtgctgggtggcaagaagaaattaccagcagagaatggcagcagcagtgccgagaccctgaatgccaaggcagtggagagttccaagcccctgagcaatgcacagccttcagggcccttgaaacccgtgggcaacgccaagcctgctgagaccctgaagccaatgggcaacgccaagcctgccgagaccctgaagcccatgggcaatgccaagcctgatgagaacctgaaatccgctagcaaagaagaactcaagaaagacgttaagaatgatgtgaactgcaagagaggccatgcagggaccacagataatgaaaagagatcagagagccaggggacagccccagccttcaagcagaagctgcaagatgttcatgtggcagagggcaagaagctgctgctccagtgccaggtgtcttctgaccccccagccaccatcatctggacgctgaacggaaagaccctcaagaccaccaagttcatcatcctctcccaggaaggctcactctgctccgtctccatcgagaaggcactgcctgaggacagaggcttatacaagtgtgtagccaagaatgacgctggccaggcggagtgctcctgccaagtcaccgtggatgatgctccagccagtgagaacaccaaggccccagagatgaaatcccggaggcccaagagctctcttcctcccgtgctaggaactgagagtgatgcgactgtgaaaaagaaacctgcccccaagacacctccgaaggcagcaatgccccctcagatcatccagttccctgaggaccagaaggtacgcgcaggagagtcagtggagctgtttggcaaagtgacaggcactcagcccatcacctgtacctggatgaagttccgaaagcagatccaggaaagcgagcacatgaaggtggagaacagcgagaatggcagcaagctcaccatcctggccgcgcgccaggagcactgcggctgctacacactgctggtggagaacaagctgggcagcaggcaggcccaggtcaacctcactgtcgtggataagccagaccccccagctggcacaccttgtgcctctgacattcggagctcctcactgaccctgtcctggtatggctcctcatatgatgggggcagtgctgtacagtcctacagcatcgagatctgggactcagccaacaagacgtggaaggaactagccacatgccgcagcacctctttcaacgtccaggacctgctgcctgaccacgaatataagttccgtgtacgtgcaatcaacgtgtatggaaccagtgagccaagccaggagtctgaactcacaacggtaggagagaaacctgaagagccgaaggatgaagtggaggtgtcagatgatgatgagaaggagcccgaggttgattaccggacagtgacaatcaatactgaacaaaaagtatctgacttctacgacattgaggagagattaggatctgggaaatttggacaggtctttcgacttgtagaaaagaaaactcgaaaagtctgggcagggaagttcttcaaggcatattcagcaaaagagaaagagaatatccggcaggagattagcatcatgaactgcctccaccaccctaagctggtccagtgtgtggatgcctttgaagaaaaggccaacatcgtcatggtcctggagatcgtgtcaggaggggagctgtttgagcgcatcattgacgaggactttgagctgacggagcgtgagtgcatcaagtacatgcggcagatctcggagggagtggagtacatccacaagcagggcatcgtgcacctggacctcaagccggagaacatcatgtgtgtcaacaagacgggcaccaggatcaagctcatcgactttggtctggccaggaggctggagaatgcggggtctctgaaggtcctctttggcaccccagaatttgtggctcctgaagtgatcaactatgagcccatcggctacgccacagacatgtggagcatcggggtcatctgctacatcctagtcagtggcctttcccccttcatgggagacaacgataacgaaaccttggccaacgttacctcagccacctgggacttcgacgacgaggcattcgatgagatctccgacgatgccaaggatttcatcagcaatctgctgaagaaagatatgaaaaaccgcctggactgcacgcagtgccttcagcatccatggctaatgaaagataccaagaacatggaggccaagaaactctccaaggaccggatgaagaagtacatggcaagaaggaaatggcagaaaacgggcaatgctgtgagagccattggaagactgtcctctatggcaatgatctcagggctcagtggcaggaaatcctcaacagggtcaccaaccagcccgctcaatgcagaaaaactagaatctgaagatgtgtcccaagctttccttgaggctgttgctgaggaaaagcctcatgtaaaaccctatttctctaagaccattcgcgatttagaagttgtggagggaagtgctgctagatttgactgcaagattgaaggatacccagaccccgaggttgtctggttcaaagatgaccagtcaatcagggagtcccgccacttccagatagactacgatgaggacgggaactgctctttaattattagtgatgtttgcggggatgacgatgccaagtacacctgcaaggctgtcaacagtcttggagaagccacctgcacagcagagctcattgtggaaacgatggaggaaggtgaaggggaaggggaagaggaagaagagtgaaacaaagccagagaaaagcagtttctaagtcatattaaaaggactatttctctaaaactcaaaaaaaaaaaaaaaactcaagatagtaaaagcacctagtgtgatagattatcggttaggtcatttgtgggttgattcttcagaaacagcagttgatacctagcagcgttattgatgggcattaatctatgttagttggcaccttaagatactagtgcagctagatttcatttagggaaatcaccagtaacttgactgaccaattgattttagagagaaagtaaccaaaccaaatatttatctgggcaaagtcataaattctccacttgaatgcgctcatgaaaaataaggccaaaacaagagttctgggccacagctcagcccagagggttcctggggatgggaggcctctctctccccaccccctgactctagagaactgggttttctcccagtactccagcaattcatttctgaaagcagttgagccactttattccaaagtacactgcagatgttcaaactctccatttctctttccccttccacctgccagttttgctgactctcaacttgtcatgagtgtaagcattaaggacattatgcttcttcgattctgaagacaggtccctgctcatggatgactctggcttccttaggaaaatatttttcttccaaaatcagtaggaaatctaaacttatcccctctttgcagatgtctagcagcttcagacatttggttaagaacccatgggaaaaaaaaaatccttgctaatgtggtttcctttgtaaaccaggattcttatttgtgctgttatagaatatcagctctgaacgtgtggtaaagatttttgtgtttgaatataggagaaatcagtttgctgaaaagttagtcttaattatctattggccacgatgaaacagatttcaactgataaagagctggagaactccatgtactttggaatctcctccaagatagccagagtttaatacatcttcattctcaacactctccaaagaacttgacctaccttatgggttccatatttttcttcttaaatgtgcatcaatcatgccttgcccccaacctttaaatatattcttagacctggtaaatgcactcagacttgcgtctttaggaatttttaactttctttcactacattggcacttaaattttttctttataaagctttttgaaggtcataaacaaagaccataattgatgatagacctaatacatttcctctgtgtgtgtgtgtaacattccaaatactttttttttcttttccactgtttgtaaggtgcaacaatttaatatttttaagggactttttaagagttccttaagaaccaatttaaaattacttcagtgcaatcctacacagtatcaacattagaattttgatattagtcttatgttatcttccattctatttttatctgctttttgctgctagtttcaaactgccagtatttttccttttgcttttaaaatagttacaatatttttcatgatagccacagtattgccacagtttattataataaagggtttttatttgatttagcgcattcaaagcttttttctatcacttttgtgttcagaatataacctttgtgtgcgtgtatgttgtgtgtgtgcatgtgtggcgtatatgtgtgttacaggttaatgccttcttggaattgtgttaatgttctcttggtttattatgccatcagaatggtaaatgagaacactacaactgtagtcagctcacaatttttaaataaaggataccacagtgcatgctgtttgttcaaaaaaaaaaaaaaaaaa

SEQ ID NO: 11823 - DNA, 2858 bp, Homo sapiens
cggcaaaaggggattattcaaagtaccgaaaaccttctcccgggatcaggcgcggcggcacccccaggccaggggcacctctggtggggcagaaggtgattgaattactcagatatgaagatcatcatctaggttttgtgtaaaaggccctggatattttaagtggccattttggatttacagtgtttttggataattttgccccagaagtttattaaaattggcaagaatcgtctgtgaagtgaattgatagtagtgaacaattcagcaagctacttaaaaagagacccaggcagcatttcttcagtattttggttcaaacggattatataactggttacagtatttcagctggtggtaatttttgcctccccttcccccaccccgttgttggggttcttcagccgaaactgagagacgttgatttgtgtactgagtagtttcagcagtttcaaatgactgagtattgctgaagtttcatggcagtttatttttacctttattgaaagttttaggaatttttgacttcagctctttcatgtcacaatgggacactttttctgaatgaagagattgaaagaatacagagtttttttccttttatcttttatttacgtggaaatttaagatgttgcagttttccggcagcatggtagtattgagatagctatgtgtgtctctgtatatgctgatgtttaggaatgctcttcagatgtgaaattttctttttgtttttgctttttggctcgtaaattggatatttcatctggagtggacaagtacaacagtggcaagtacatggaataataaagaagactttgatcttaaatctaaagaacttggctaattcgggagatagccatatgaaaactttaaaacagaagtatgggtagctgacttgaagtaactctatgtcaaatagtcgtaggttaagtatcttcaaagaacttcgatattatttcagaggatacaaaataaaaatacaaactggaaaataaagattacagagaaaaaaccaacaccttcctgtgcagtcctgttggaatttggacttgccatgaggtgttgaagccttgtttcactgagttggagagactggacctaaatggcgcagcatgactttgctccagcctggcttaatttccctactccaccatcatcaacaaagtcgtcattgaattttgagaagcattctgaaaactttgcatggacagagaatcgttatgatgtgaaccgtcgacgacacaactcttcagatggctttgattctgctattggacgtcctaatggaggtaactttggaaggaaagaaaaaaatggatggcgtacacatggaagaaatggtacagaaaacataaatcatcgaggtggataccatggtggaagttcccgttctcgtagcagtattttccatgcaggaaaaagccaaggactacatgaaaacaacatacctgacaatgaaaccgggaggaaagaagacaagagagaacgcaaacagtttgaagctgaggattttccgtctttaaatcctgagtatgagagagaaccaaatcacaataagtctttagctgcaggtgtgtgggaatatcctccgaatcctaaatctagagctccaaggatgctggtcattaagaaaggtaatacaaaagacttacagctatctggattcccagtagtaggaaatcttccgtcacagccagttaagaatggaactggtccaagtgtttataaaggtttagtccctaaacctgctgctccacctacaaaacctacacaatggaaaagccaaacaaaagaaaataaagttggaacttctttccctcatgagtccacatttggcgttggcaactttaatgcttttaaatcaactgccaagaactttagtccatctacaaattcagtgaaagagtgtaatcgctcaaattcctcttctcctgttgacaaacttaatcagcagcctcgtctaaccaaactgacacgaatgcgcactgataagaagagtgaatttttgaaagcattgaaaagagacagagtagaagaggaacatgaagatgaaagccgtgctggctcagagaaggatgacgactcatttaatttacataacagcaatagtactcaccaagaaagggatataaaccgaaacttcgatgaaaatgaaattcctcaagagaatggcaatgcctcagtgatttcccagcagatcattcggtcttcaaccttcccacaaactgatgttctttcaagttcacttgaggcagaacacagattgttaaaggaaatgggctggcaggaagacagtgaaaatgatgaaacatgtgctcccttaactgaggatgaaatgagagaattccaagttattagtgaacagttacagaagaatggtctgagaaaaaatggtattttgaaaaatggcttgatctgtgacttcaagtttggaccgtggaagaacagcactttcaaacccacaactgagaatgatgacacagagacaagtagcagtgatacatcagatgacgacgatgtgtgaaggatttcctaacagctttagaaatcttagtgtgatacatctctcatacagtttggggtgaattgtaaaaatgaagaactataatttatgtagtgaaataccccattagaagaggattttttgggggacttcaatatgaagaaaaccaagaatgttttgttgggctgtgttgaacattatttctttgtaaatgaatgttgtaggaatgaggacttgggttggtccaacattgactttcttcatcactgcaacatttctctgactagcaatgtgacgatgtaacaaatgagattttctcatttaataataaaaaagttgtgtaatgttttgc

SEQ ID NO: 11824 - DNA, 3054 bp, Homo sapiens
cgaaaagctgcggttaaggagagtccggtttaaccgtcaccgggaagcgcgctcgttcgggatcgccgagggggctgagatagtgaattcctaagaagaaaataatggattgcatattagttgttctctaagtggactcaacagtgtgcaagcttgttggaaaagccaaaagaagatggcaactccttatgtcccagttcctatgcccataggaaactctgcttccagttttacaacaaacagaaatcaaagaagttcttcttttggcagtgtctcaacaagctcaaattcttctaagggccagttagaagactcaaatatgggtaattttaaacagacaagtgttcctgatcaaatggataatacttcatctgtctgtagcagtcccctcattaggactaaatttacaggtacagcttcttccattgagtattctactagaccaagagacactgaagaacaaaatccggaaacagtgaattgggaagatagaccatctacacctactatactgggttatgaagtgatggaagaaagagctaaatttactttaaaagagatgtttccaggttttcgactagcacttcctccaaaacgctggtttaaagataattacaatgctgactttttagaagacagacaattaggattacaagcgtttcttcaaaatttagtagctcacaaggacattgctaactgccttgcagtgagagaatttctttgtttggatgatccaccgggtccatttgatagcctagaggaaagcagggcattctgtgaaactttagaagagacaaactaccgcttacagaaagaactacttgaaaaacaaaaggagatggaatcactaaagaaactgctcagtgagaagcaacttcatatagacactttagagaacagaatcagaacattgtctttagaacctgaagaatcactggatgtgtcagaaacagaaggtgaacagatcctaaaggtggagtcctctgcacttgaggttgatcaagatgtcctggatgaagaatctagagctgataataaaccatgcttaagttttagtgaacctgaaaatgctgtatcagagatagaagtagcagaagtggcatatgatgctgaagaagactaatgtatcacaagcagttccctccatttagactattcaaaaatttagaagagtggcaaatactattttaaaagaagaaccaagaactgtaaaacatatagaaaagagcaagaatgcacatgtataaagtttacataaagaagtttttttaagttattgagataggaaatatattcactgctgcttttaattgtattttatccaattacatttaatacactaaaaaaaatcttgttggaattctgttatcaaggcccacattcttaaatactgtgcataaattattatggtgttttgcctatatattgctccaaactactgtgtatatatgtatgtgtgttaaatcaccaattatattaatcaaatggaaattaattgcatgttactatctgggtgatatattcttctttatatctctgacatgacatattttcattaatagtttaaatcagtgaccatcataataaagataaaatttagttgagtttttaatgtttacatgtttacatctttaaataaaatttgcttatttgaaatgttaatgctctttagaaaaatgactttctagtaccaaaggaaaactacttgaaagagctgtaatcatatagctaaagtgataagatagccttgattttaaaagctgattcattaatatcaaaatactttaataagtgtcacagttattaatatgttacatttgtttagtttccacgtaatctttatctctacctagatttagtgagtttgcctctttcagaatactacctccttttgttaaggcatattctttcgaaaatatagattctaaataaataggggcttatacaaaaaagaaaataaaaagccatatatactgcaaagttcctaactggcttgactcctgacattgcatttttatttctatttgtgtgaagatgttgttatactgtattatggctgattttctttttaatatatttagccaagtgatgcactttatgataattaaactcttttgtgccaagtttaattggtggatttttttagtaagtagagttaggagaaagaattatgtagtgcctttactatttcactttctacaaaagtctcctagggtctttgagtcagctttatgaaaaaatgtttgtttatttcagctttgtgtacagtcattaaaagtgccttgtttcatttttataggatgaagttatttattttctattttcactgttttgcatattgctgttaataagcattgtaatcatgctggcattttgcaatcccagtcggtatgctttctaaaaactgagggaaacttactggggaaatagaataacaatctccatttttttctttactatctaaaagtttatcggtatcttgatgtatatatatattaaggtgtggctgtttaaaattctaatgacatatatcaacacattcaatggctgttgttaacctttgaagtaaaaaggagatcactttttaccaaataaccaaaaatttttagtctttgtcaaagtgcacaggtatgttctcagaacatttttcacaatgtgtatcagaaatatgtttgctatccttagagacagaaatgaatataacaaattgatctgcttatttattaaaattattattctagacttacaaaaggcttaaaaagaacaatcatttaatcagtaccattctgtatcttatataacagatctttgccaaattctagatattatagtgttgcctgtctgttctaaagcgaaccagccactttttcaatctggctttttggaagattgtatttaaagttcttcaaggatgaagaaaaaaatctgttaattaggtaaaccactattatttatatttataatttacttttttttacttttataatgcattttactcccagtattatgttcatttaataaattattttttcactacaaaaaaaaaaaaaaaaa

SEQ ID NO: 11825 - DNA, 3308 bp, Homo sapiens
tactgtcaagatgataagcatggaataaagcttcagaagggtctttaccaatctttctcctaccaacttttacatacatgaaatcaggttaaaatgaactttacagaaatacttcacaagggaataaagtagaggaaaaagggataacatgtaacatggagtcaaggaaaaagagtgtgaagtagttttgctctctctatcttgcaaataggagtccttaaagacaactgggagaaggggtttgagatagtgaattcctaagaagaaaataatggattgcatattagttgttctctaagtggactcaacagtgtgcaagcttgttggaaaagccaaaagaagatggcaactccttatgtcccagttcctatgcccataggaaactctgcttccagttttacaacaaacagaaatcaaagaagttcttcttttggcagtgtctcaacaagctcaaattcttctaagggccagttagaagactcaaatatgggtaattttaaacagacaagtgttcctgatcaaatggataatacttcatctgtctgtagcagtcccctcattaggactaaatttacaggtacagcttcttccattgagtattctactagaccaagagacactgaagaacaaaatccggaaacagtgaattgggaagatagaccatctacacctactatactgggttatgaagtgatggaagaaagagctaaatttactgtatataaaatactagtaaagaaaaccccagaagaaagctgggtagttttcagaagatacactgacttctctaggcttaatgacaaattaaaagagatgtttccaggttttcgactagcacttcctccaaaacgctggtttaaagataattacaatgctgactttttagaagacagacaattaggattacaagcgtttcttcaaaatttagtagctcacaaggacattgctaactgccttgcagtgagagaatttctttgtttggatgatccaccgggtccatttgatagcctagaggaaagcagggcattctgtgaaactttagaagagacaaactaccgcttacagaaagaactacttgaaaaacaaaaggagatggaatcactaaagaaactgctcagtgagaagcaacttcatatagacactttagagaacagaatcagaacattgtctttagaacctgaagaatcactggatgtgtcagaaacagaaggtgaacagatcctaaaggtggagtcctctgcacttgaggttgatcaagatgtcctggatgaagaatctagagctgataataaaccatgcttaagttttagtgaacctgaaaatgctgtatcagagatagaagtagcagaagtggcatatgatgctgaagaagactaatgtatcacaagcagttccctccatttagactattcaaaaatttagaagagtggcaaatactattttaaaagaagaaccaagaactgtaaaacatatagaaaagagcaagaatgcacatgtataaagtttacataaagaagtttttttaagttattgagataggaaatatattcactgctgcttttaattgtattttatccaattacatttaatacactaaaaaaaatcttgttggaattctgttatcaaggcccacattcttaaatactgtgcataaattattatggtgttttgcctatatattgctccaaactactgtgtatatatgtatgtgtgttaaatcaccaattatattaatcaaatggaaattaattgcatgttactatctgggtgatatattcttctttatatctctgacatgacatattttcattaatagtttaaatcagtgaccatcataataaagataaaatttagttgagtttttaatgtttacatgtttacatctttaaataaaatttgcttatttgaaatgttaatgctctttagaaaaatgactttctagtaccaaaggaaaactacttgaaagagctgtaatcatatagctaaagtgataagatagccttgattttaaaagctgattcattaatatcaaaatactttaataagtgtcacagttattaatatgttacatttgtttagtttccacgtaatctttatctctacctagatttagtgagtttgcctctttcagaatactacctccttttgttaaggcatattctttcgaaaatatagattctaaataaataggggcttatacaaaaaagaaaataaaaagccatatatactgcaaagttcctaactggcttgactcctgacattgcatttttatttctatttgtgtgaagatgttgttatactgtattatggctgattttctttttaatatatttagccaagtgatgcactttatgataattaaactcttttgtgccaagtttaattggtggatttttttagtaagtagagttaggagaaagaattatgtagtgcctttactatttcactttctacaaaagtctcctagggtctttgagtcagctttatgaaaaaatgtttgtttatttcagctttgtgtacagtcattaaaagtgccttgtttcatttttataggatgaagttatttattttctattttcactgttttgcatattgctgttaataagcattgtaatcatgctggcattttgcaatcccagtcggtatgctttctaaaaactgagggaaacttactggggaaatagaataacaatctccatttttttctttactatctaaaagtttatcggtatcttgatgtatatatatattaaggtgtggctgtttaaaattctaatgacatatatcaacacattcaatggctgttgttaacctttgaagtaaaaaggagatcactttttaccaaataaccaaaaatttttagtctttgtcaaagtgcacaggtatgttctcagaacatttttcacaatgtgtatcagaaatatgtttgctatccttagagacagaaatgaatataacaaattgatctgcttatttattaaaattattattctagacttacaaaaggcttaaaaagaacaatcatttaatcagtaccattctgtatcttatataacagatctttgccaaattctagatattatagtgttgcctgtctgttctaaagcgaaccagccactttttcaatctggctttttggaagattgtatttaaagttcttcaaggatgaagaaaaaaatctgttaattaggtaaaccactattatttatatttataatttacttttttttacttttataatgcattttactcccagtattatgttcatttaataaattattttttcactacaaaaaaaaaaaaaaaaa

SEQ ID NO: 11826 - DNA, 3141 bp, Homo sapiens
cgaaaagctgcggttaaggagagtccggtttaaccgtcaccgggaagcgcgctcgttcgggatcgccgagggggctgagatagtgaattcctaagaagaaaataatggattgcatattagttgttctctaagtggactcaacagtgtgcaagcttgttggaaaagccaaaagaagatggcaactccttatgtcccagttcctatgcccataggaaactctgcttccagttttacaacaaacagaaatcaaagaagttcttcttttggcagtgtctcaacaagctcaaattcttctaagggccagttagaagactcaaatatgggtaattttaaacagacaagtgttcctgatcaaatggataatacttcatctgtctgtagcagtcccctcattaggactaaatttacaggtacagcttcttccattgagtattctactagaccaagagacactgaagaacaaaatccggaaacagtgaattgggaagatagaccatctacacctactatactgggttatgaagtgatggaagaaagagctaaatttactgtatataaaatactagtaaagaaaaccccagaagaaagctgggtagttttcagaagatacactgacttctctaggcttaatgacaaattaaaagagatgtttccaggttttcgactagcacttcctccaaaacgctggtttaaagataattacaatgctgactttttagaagacagacaattaggattacaagcgtttcttcaaaatttagtagctcacaaggacattgctaactgccttgcagtgagagaatttctttgtttggatgatccaccgggtccatttgatagcctagaggaaagcagggcattctgtgaaactttagaagagacaaactaccgcttacagaaagaactacttgaaaaacaaaaggagatggaatcactaaagaaactgctcagtgagaagcaacttcatatagacactttagagaacagaatcagaacattgtctttagaacctgaagaatcactggatgtgtcagaaacagaaggtgaacagatcctaaaggtggagtcctctgcacttgaggttgatcaagatgtcctggatgaagaatctagagctgataataaaccatgcttaagttttagtgaacctgaaaatgctgtatcagagatagaagtagcagaagtggcatatgatgctgaagaagactaatgtatcacaagcagttccctccatttagactattcaaaaatttagaagagtggcaaatactattttaaaagaagaaccaagaactgtaaaacatatagaaaagagcaagaatgcacatgtataaagtttacataaagaagtttttttaagttattgagataggaaatatattcactgctgcttttaattgtattttatccaattacatttaatacactaaaaaaaatcttgttggaattctgttatcaaggcccacattcttaaatactgtgcataaattattatggtgttttgcctatatattgctccaaactactgtgtatatatgtatgtgtgttaaatcaccaattatattaatcaaatggaaattaattgcatgttactatctgggtgatatattcttctttatatctctgacatgacatattttcattaatagtttaaatcagtgaccatcataataaagataaaatttagttgagtttttaatgtttacatgtttacatctttaaataaaatttgcttatttgaaatgttaatgctctttagaaaaatgactttctagtaccaaaggaaaactacttgaaagagctgtaatcatatagctaaagtgataagatagccttgattttaaaagctgattcattaatatcaaaatactttaataagtgtcacagttattaatatgttacatttgtttagtttccacgtaatctttatctctacctagatttagtgagtttgcctctttcagaatactacctccttttgttaaggcatattctttcgaaaatatagattctaaataaataggggcttatacaaaaaagaaaataaaaagccatatatactgcaaagttcctaactggcttgactcctgacattgcatttttatttctatttgtgtgaagatgttgttatactgtattatggctgattttctttttaatatatttagccaagtgatgcactttatgataattaaactcttttgtgccaagtttaattggtggatttttttagtaagtagagttaggagaaagaattatgtagtgcctttactatttcactttctacaaaagtctcctagggtctttgagtcagctttatgaaaaaatgtttgtttatttcagctttgtgtacagtcattaaaagtgccttgtttcatttttataggatgaagttatttattttctattttcactgttttgcatattgctgttaataagcattgtaatcatgctggcattttgcaatcccagtcggtatgctttctaaaaactgagggaaacttactggggaaatagaataacaatctccatttttttctttactatctaaaagtttatcggtatcttgatgtatatatatattaaggtgtggctgtttaaaattctaatgacatatatcaacacattcaatggctgttgttaacctttgaagtaaaaaggagatcactttttaccaaataaccaaaaatttttagtctttgtcaaagtgcacaggtatgttctcagaacatttttcacaatgtgtatcagaaatatgtttgctatccttagagacagaaatgaatataacaaattgatctgcttatttattaaaattattattctagacttacaaaaggcttaaaaagaacaatcatttaatcagtaccattctgtatcttatataacagatctttgccaaattctagatattatagtgttgcctgtctgttctaaagcgaaccagccactttttcaatctggctttttggaagattgtatttaaagttcttcaaggatgaagaaaaaaatctgttaattaggtaaaccactattatttatatttataatttacttttttttacttttataatgcattttactcccagtattatgttcatttaataaattattttttcactacaaaaaaaaaaaaaaaaa

SEQ ID NO: 11827 - DNA, 2065 bp, Homo sapiens
aacagcaatggcggaaggagaagatgtgccgccgctgccaacgtcgagcggcgacggctgggaaaaagatcttgaagaagctctggaagcaggaggttgtgatcttgaaacgttgagaaatataattcaaggaagaccgctgcctgctgatctgagggccaaagtttggaagattgctctgaatgttgcaggaaaaggtgattgtttggcatcatgggatggtattttagacttgccagaacagaacactattcacaaagattgcctgcagtttattgaccagctttcagtgccagaggagaaggcagcagaattacttttggatattgaatctgtaattaccttttattgtaaatcacgtaacattaaatatagcacatcccttagctggatacatctactgaaaccattggtgcatcttcaactgccacgcagcgatttatacaactgcttttatgccataatgaataagtacattcccagggattgttcccagaaagggagaccatttcatcccttcaggttgctcatccaataccatgagcctgagctttgttcttatcttgatacaaagaaaattactccagactcctatgcactcaactggcttggaagtctttttgcatgttactgttccactgaagtcactcaggcaatatgggatggatatctacaacaagcagatccattttttatttatttcttaatgttaattatccttgttaatgcaaaagaagttattttaacacaagagtcagacagcaaagaagaagttatcaagttcttggaaaatactccatccagtctgaatatagaagatatagaagaccttttctctctggctcagtattattgcagcaaaacaccggcttcttttaggaaggataatcaccatctctttggtagtactttgttgggaattaaggatgatgatgcagatctgagtcaggctctttgtctggccatctccgtgtcagagatccttcaagcgaatcagctacaaggggaaggagtccggttctttgtggtggattgccgtcctgcagaacaatataatgctgggcatttatcaactgctttccactcagattcagacctgatgcttcagaatccatctgagtttgcacagtcagtaaaatccttgctggaagcacagaagcagtccattgagtctggctccatagctggtggggagcacctctgttttatgggcagtggcagggaggaagaagacatgtatatgaacatggtcctggcacactttttacagaaaaacaaagaatatgtgagtattgccagtggaggatttatggcactgcagcagcacctggcagacattaatgtggatggaccagaaaatggatatggccattggattgctagtacctcaggctcaaggagcagtatcaattctgttgatggtgaatctcctaatggctcaagtgatagaggaatgaaatcactagtaaataaaatgactgtggctttgaagacaaaatccgttaatgtcagggaaaaagttatcagttttatagagaatacatcaactcctgtggatcggcatgtgagcagcagtgacagagtgggcaagccttaccgtggcgtaaagcctgttttcagcattggggatgaagaagaatacgacacagatgaaattgacagttcttcaatgtcagatgatgatagaaaagaggttgtaaacattcagacttggataaacaaaccagatgtcaaacatcattttccttgtaaagaagtaaaagaaagtggacacatgtttcccagtcatctgttggttactgcaacacatatgtactgtttaagggagattgtttcacggaaaggattggcttatatacagtctcgacaagcgctgaattctgtagttaaaattacatccaaaaaaaaacatcctgaactcattaccttcaagtatggaaatagcagtgcttcaggaatagaaatcttggcaatcgaaaggtatttgattccaaatgcaggggatgcaactaaagccataaaacagcagatcatgaaagttttggatgctttggaaagttaatat

SEQ ID NO: 11828 - DNA, 2453 bp, Homo sapiens
ggcccgcgcccggcctccgcggcgccgcctcccagcccagagcccagcgctcaggaaggtgcgggcgggggagaaagcaacaccattgtttttcaggcgcctccatttgcccccgagccgagccgtggctttccggatgatcgggagacgcggtctggacgggccgggaaaggagccgggcgcctgcggagaccccgcctcagcgagtacgcccggccgggcgggctgggaggatgaggacggctgccctggacttccgccgccacaggagggttttcggccggacgccgggagggagctccaggctgtgagctccatttgtaaaggtcttaataacaagaacagtgacttcggctccggagcttcaagatagtggcctgcttggcctgcccatctcggatctctccaggaggacccagccacccaagggtcgtcttctgctgctgacccccatcaaatcccatcatgcccacagccctgtgcccccgagtcttggctccgaaggaaagtgaggagcccaggaaaatgaggagcccacctggagagaaccctagcccccagggggagcttcccagccccgagtcctctcggcgtctcttccgccgtttccgctaccaggaggcggcgggcccccgggaggccctgcagcgcctctgggacctgtgcgggggctggctgcggcctgagaggcacaccaaggagcagattctggagctgctggtgctggagcagttcctggccatcctgccccgggagatccagagctgggtgcgggcgcaggagcctgagagcggagagcaggctgtggccgcggtggaggcactggaacgggagcccgggagaccctggcagtggctcaagcactgtgaagaccctgtggtgattgatgatggggacagccctctggaccaggagcaggagcagctgccggtagagccccacagcgaccttgcaaagaaccaggatgcccagcccataaccctggcacagtgcctggggctcccaagcagaccaccaagccagctcagcggggacccagttctgcaagatgctttccttcttcaggaagagaatgtgcgggacacacagcaggtgaccaccctccagctacccccgagtcgggtttctccattcaaggacatgattttatgcttctctgaagaggattggtcccttctagatcctgcccagactggcttctatggagagttcatcattggggaggattacggggtctcaatgcctccaaacgacctagctgcccagccagatctctcccagggagaggagaatgagccacgcgttccagagttgcaggatctccagggcaaagaagtgccccaggtctcctacttggactctccaagtctccagccattccaggtagaagaaagaaggaaacgtgaggagctgcaggtgccagagttccaggcctgcccacagacggtggtgcctcaaaacacctacccagctggcggcaacccgcgatctctagagaacagcctggatgaagaagtgaccatcgagatcgttctctccagctctggggacgaggactcccagcatggcccgtactgcacagaagagctggggagccccacagagaagcagcgcagcctccccgcctcccaccggagcagcaccgaggccggaggcgaggtgcagacctccaagaagtcctacgtgtgtccgaactgtgggaaaatcttccgctggagggtcaacttcatccggcatctgcggagccgcagggagcaggagaagccgcacgagtgctcggtgtgcggggagctgttcagcgacagcgaggacctggatgggcacctagagagccacgaggcccagaagccttaccggtgtggtgcctgcgggaagagcttccgcctgaactcccacctgctctcccaccggcggatacacctgcagccggacagactccagccggtggagaagagagagcaggcggcatccgaggacgcggacaagggtcccaaagagccgctggaaaacggcaaggccaaactgagcttccagtgctgtgagtgtgggaaggccttccagcggcacgaccacctggctcggcaccgcagccactttcacctgaaggacaaagcccggcccttccagtgccggtactgcgtcaagagcttcacgcagaactatgacctcctccgccacgagcgcctgcacatgaagcgccgttccaagcaggctctgaactcctactgagcctctccgcctggggcggcctcaccctggctggtgctgccccctcaccttggtactgatcagcgcccccacccaggacataccttccccaggatagagagcacacctccctcctgtccttgctctcaggtagtgagcgttcgggtggtgccatgggagcactctccctcccccaggtaatgaaagagtggccaagtgaaaaaaaaaaaaaaaaaaaaaaaaaa

SEQ ID NO: 11829 - DNA, 2500 bp, Homo sapiens
cggggggatcttggctgtgtgtctgcggatctgtagtggcggcggcggcggcggcggcggggaggcagcaggcgcgggagcgggcgcaggagcaggcggcggcggtggcggcggcggttagacatgaacgccgcctcggcgccggcggtgcacggagagccccttctcgcgcgcgggcggtttgtgtgattttgctaaaatgcatcaccaacagcgaatggctgccttagggacggacaaagagctgagtgatttactggatttcagtgcgatgttttcacctcctgtgagcagtgggaaaaatggaccaacttctttggcaagtggacattttactggctcaaatgtagaagacagaagtagctcagggtcctgggggaatggaggacatccaagcccgtccaggaactatggagatgggactccctatgaccacatgaccagcagggaccttgggtcacatgacaatctctctccaccttttgtcaattccagaatacaaagtaaaacagaaaggggctcatactcatcttatgggagagaatcaaacttacagggttgccaccagcagagtctccttggaggtgacatggatatgggcaacccaggaaccctttcgcccaccaaacctggttcccagtactatcagtattctagcaataatccccgaaggaggcctcttcacagtagtgccatggaggtacagacaaagaaagttcgaaaagttcctccaggtttgccatcttcagtctatgctccatcagcaagcactgccgactacaatagggactcgccaggctatccttcctccaaaccagcaaccagcactttccctagctccttcttcatgcaagatggccatcacagcagtgacccttggagctcctccagtgggatgaatcagcctggctatgcaggaatgttgggcaactcttctcatattccacagtccagcagctactgtagcctgcatccacatgaacgtttgagctatccatcacactcctcagcagacatcaattccagtcttcctccgatgtccactttccatcgtagtggtacaaaccattacagcacctcttcctgtacgcctcctgccaacgggacagacagtataatggcaaatagaggaagcggggcagccggcagctcccagactggagatgctctggggaaagcacttgcttcgatctattctccagatcacactaacaacagcttttcatcaaacccttcaactcctgttggctctcctccatctctctcagcaggcacagctgtttggtctagaaatggaggacaggcctcatcgtctcctaattatgaaggacccttacactctttgcaaagccgaattgaagatcgtttagaaagactggatgatgctattcatgttctccggaaccatgcagtgggcccatccacagctatgcctggtggtcatggggacatgcatggaatcattggaccttctcataatggagccatgggtggtctgggctcagggtatggaaccggccttctttcagccaacagacattcactcatggtggggacccatcgtgaagatggcgtggccctgagaggcagccattctcttctgccaaaccaggttccggttccacagcttcctgtccagtctgcgacttcccctgacctgaacccaccccaggacccttacagaggcatgccaccaggactacaggggcagagtgtctcctctggcagctctgagatcaaatccgatgacgagggtgatgagaacctgcaagacacgaaatcttcggaggacaagaaattagatgacgacaagaaggatatcaaatcaattactagcaataatgacgatgaggacctgacaccagagcagaaggcagagcgtgagaaggagcggaggatggccaacaatgcccgagagcgtctgcgggtccgtgacatcaacgaggctttcaaagagctcggccgcatggtgcagctccacctcaagagtgacaagccccagaccaagctcctgatcctccaccaggcggtggccgtcatcctcagtctggagcagcaagtccgagaaaggaatctgaatccgaaagctgcgtgtctgaaaagaagggaggaagagaaggtgtcctcggagcctccccctctctccttggccggcccacaccctggaatgggagacgcatcgaatcacatgggacagatgtaaaagggtccaagttgccacattgcttcattaaaacaagagaccacttccttaacagctgtattatcttaaacccacataaacacttctccttaacccccatttttgtaatataagacaagtctgagtagttatgaatcgcagacgcaagaggtttcagcattcccaattatcaaaaaacagaaaaacaaaaaaaagaaagaaaaaagtgcaacttgagggacgactttctttaacatatcattcagaatgtgcaaagcagtatgtacaggctgagacacagcccagagactgaacggc

SEQ ID NO: 11830 - DNA, 2214 bp, Homo sapiens
ggaggaagcgcgcggggcgccataaggaggaagcgggtagtcgaccgtgtccgcgcgcctgggagacgctgcctcggcccggacgcgcccgcgcccccgcggctggagggtggtcgccactgggacactgtgaaccaggagtgagtcggagctgccgcgctgcccaggccatggactgtgaggtcaacaacggttccagcctcagggatgagtgcatcacaaacctactggtgtttggcttcctccaaagctgttctgacaacagcttccgcagagagctggacgcactgggccacgagctgccagtgctggctccccagtgggagggctacgatgagctgcagactgatggcaaccgcagcagccactcccgcttgggaagaatagaggcagattctgaaagtcaagaagacatcatccggaatattgccaggcacctcgcccaggtcggggacagcatggaccgtagcatccctccgggcctggtgaacggcctggccctgcagctcaggaacaccagccggtcggaggaggaccggaacagggacctggccactgccctggagcagctgctgcaggcctaccctagagacatggagaaggagaagaccatgctggtgctggccctgctgctggccaagaaggtggccagtcacacgccgtccttgctccgtgatgtctttcacacaacagtgaattttattaaccagaacctacgcacctacgtgaggagcttagccagaaatgggatggactgaacggacagttccagaagtgtgactggctaaagctcgatgtggtcacagctgtatagctgcttccagtgtagacggagccctggcatgtcaacagcgttcctagagaagacaggctggaagatagctgtgacttctattttaaagacaatgttaaacttataacccactttaaaatatctacattaatatacttgaatgaaaatgtccatttacacgtatttgaatggccttcatatcatccacacatgaatctgcacatctgtaaatctacacacggtgcctttatttccactgtgcaggttcccacttaaaaattaaattggaaagcaggtttcaaggaagtagaaacaaaatacaatttttttggtaaaaaaaaattactgtttattaaagtacaaccatagaggatggtcttacagcaggcagtatcctgtttgaggaaagcaagaatcagagaaggaacataccccttacaaatgaaaaattccactcaaaatagggactatctatcttaatactaaggaaccaacaatcttcctgtttaaaaaaccacatggcacagagattctgaactaaagtgctgcactcaaatgatgggaagtccggccccagtacacaggggcttgactttttcaacttcgtttcctttgttggagtcaaaaagaaccacttgtggttctaaaaggtgtgaaggtgatttaagggcccaggtcagccactgtttgtttacaaaatcaggtaactaactgcatacactttttctctttccatgacatcaagactttgctaaagacatgaagccacgggtgccagaagctactgcgatgccccgggagttagccccctggtaatagctgtaaacttccaatttctagccatacgctcagctcatccatgcctcagaagtgcatctggagagaacaggtttctaagcataaaagatgaaagagcagttggactttttaaaaattcagcaaagtggttccctctcttagggacagtcaaaaccaagtcacttaggtagtaccaaaataaataaggaaaagcttagctttagaaacagtgcaacactggtctgctgttccagtggtaagctatgtcccaggaatcagtttaaaagcacgacagtggatgctgggtccatatcacacacattgctgtgaacaggaaactcctgtgaccacaacatgaggccactggagacgcatatgagtaagggcactgacggactcatgatttcttcttaccagatgctttcctgttctttaagagtttaaaatcatcagaaaggaaaaacaaactctatattgttcagcatgcaatacataccacgctagggctggctcaattgaaagtgggcaaaagcttacaaatactaaaaagaagtgctgccgcgcagtgtggaggccactgtttggaaataaatcttcctaacactacaaaaaaaaaaaaaaaa

SEQ ID NO: 11831 - DNA, 2506 bp, Homo sapiens
aaaacccgcgggcctggccgggtgcaggccacccttgccggcggatcggaatccccgcccacaccgtggtctttccagcaccgcagacacctgccggctcctcccgagcggagctcagggctgacaaagcgcggtcagagcggccgcttactggggctcgcccgctccttagagcactggcaatgatgtgcggatcctcgctgctgctgctgggaaactgttgagtggctgaatgaccccaggggaccctgggagagctctgaagccctcagccaccaagtggctgggctggcaagggttcattcattcattcaacaaatacgaatgtgcagcggtgctggggtcatgatggctcggtgggcagcgaggggccgggccggctggaggagcacagtgcggattctgtcgccactgggacactgtgaaccaggagtgagtcggagctgccgcgctgcccaggccatggactgtgaggtcaacaacggttccagcctcagggatgagtgcatcacaaacctactggtgtttggcttcctccaaagctgttctgacaacagcttccgcagagagctggacgcactgggccacgagctgccagtgctggctccccagtgggagggctacgatgagctgcagactgatggcaaccgcagcagccactcccgcttgggaagaatagaggcagattctgaaagtcaagaagacatcatccggaatattgccaggcacctcgcccaggtcggggacagcatggaccgtagcatccctccgggcctggtgaacggcctggccctgcagctcaggaacaccagccggtcggaggaggaccggaacagggacctggccactgccctggagcagctgctgcaggcctaccctagagacatggagaaggagaagaccatgctggtgctggccctgctgctggccaagaaggtggccagtcacacgccgtccttgctccgtgatgtctttcacacaacagtgaattttattaaccagaacctacgcacctacgtgaggagcttagccagaaatgggatggactgaacggacagttccagaagtgtgactggctaaagctcgatgtggtcacagctgtatagctgcttccagtgtagacggagccctggcatgtcaacagcgttcctagagaagacaggctggaagatagctgtgacttctattttaaagacaatgttaaacttataacccactttaaaatatctacattaatatacttgaatgaaaatgtccatttacacgtatttgaatggccttcatatcatccacacatgaatctgcacatctgtaaatctacacacggtgcctttatttccactgtgcaggttcccacttaaaaattaaattggaaagcaggtttcaaggaagtagaaacaaaatacaatttttttggtaaaaaaaaattactgtttattaaagtacaaccatagaggatggtcttacagcaggcagtatcctgtttgaggaaagcaagaatcagagaaggaacataccccttacaaatgaaaaattccactcaaaatagggactatctatcttaatactaaggaaccaacaatcttcctgtttaaaaaaccacatggcacagagattctgaactaaagtgctgcactcaaatgatgggaagtccggccccagtacacaggggcttgactttttcaacttcgtttcctttgttggagtcaaaaagaaccacttgtggttctaaaaggtgtgaaggtgatttaagggcccaggtcagccactgtttgtttacaaaatcaggtaactaactgcatacactttttctctttccatgacatcaagactttgctaaagacatgaagccacgggtgccagaagctactgcgatgccccgggagttagccccctggtaatagctgtaaacttccaatttctagccatacgctcagctcatccatgcctcagaagtgcatctggagagaacaggtttctaagcataaaagatgaaagagcagttggactttttaaaaattcagcaaagtggttccctctcttagggacagtcaaaaccaagtcacttaggtagtaccaaaataaataaggaaaagcttagctttagaaacagtgcaacactggtctgctgttccagtggtaagctatgtcccaggaatcagtttaaaagcacgacagtggatgctgggtccatatcacacacattgctgtgaacaggaaactcctgtgaccacaacatgaggccactggagacgcatatgagtaagggcactgacggactcatgatttcttcttaccagatgctttcctgttctttaagagtttaaaatcatcagaaaggaaaaacaaactctatattgttcagcatgcaatacataccacgctagggctggctcaattgaaagtgggcaaaagcttacaaatactaaaaagaagtgctgccgcgcagtgtggaggccactgtttggaaataaatcttcctaacactacaaaaaaaaaaaaaaaa

SEQ ID NO: 11832 - DNA, 9406 bp, Homo sapiens
cttatttcttatgaatgtcggatagctgcaccagcttggtggggaaagggtttgatgaatagcacaaagacactggctgttccctggaggctgtccctttaaaggagaatcttagtttattctggggggaggggatgcacacattagagtaggaaagagggcttggaataaaatgaaaacactcccccttcatagtcattgtactgaaatgcaaagactgcttcctaagctggagatgctaaccttgggtagctccttctgttctcttcaaggggaattttgtcaggctatggattcatttacaactgttagtcatgtgggcatgtgtgaggaaacagatgccagttttaatgtatttagcccgaagttccaatttgataggagccactgtcagtctctgaggttccaccaaaatatggaacttgattttggacactttgacgaaagagataagacatccaggaacatgcgaggctcccggatgaatgggttgcctagccccactcacagcgcccactgtagcttctaccgaaccagaaccttgcaggcactgagtaatgagaagaaagccaagaaggtacgtttctaccgcaatggggaccgctacttcaaggggattgtgtacgctgtgtcctctgaccgttttcgcagctttgacgccttgctggctgacctgacgcgatctctgtctgacaacatcaacctgcctcagggagtgcgttacatttacaccattgatggatccaggaagatcggaagcatggatgaactggaggaaggggaaagctatgtctgttcctcagacaacttctttaaaaaggtggagtacaccaagaatgtcaatcccaactggtctgtcaacgtaaaaacatctgccaatatgaaagccccccagtccttggctagcagcaacagtgcacaggccagggagaacaaggactttgtgcgccccaagctggttaccatcatccgcagtggggtgaagcctcggaaggctgtgcgtgtgcttctgaacaagaagacagcccactcttttgagcaagtcctcactgatatcacagaagccatcaaactggagaccggggttgtcaaaaaactctacactctggatggaaaacaggtaacttgtctccatgatttctttggtgatgatgatgtgtttattgcctgtggtcctgaaaaatttcgctatgctcaggatgatttttctctggatgaaaatgaatgccgagtcatgaagggaaacccatcagccacagctggcccaaaggcatccccaacacctcagaagacttcagccaagagccctggtcctatgcgccgaagcaagtctccagctgactcagcaaacggaacctccagcagccagctctctacccccaagtctaagcagtctcccatctctacgcccaccagtcctggcagcctccggaagcacaaggacctgtacctgcctctgtccttggatgactcggactcgcttggtgattccatgtaaaggaggggagagtgctcagagtccagagtacaaatccaagcctatcattgtagtagggtacttctgctcaagtgtccaacagggctattggtgctttcaagtttttattttgttgttgttgttattttgaaaaacacattgtaatatgttgggtttattttcctgtgatttctcctctgggccactgatccacagttaccaattatgagagatagattgataaccatcctttggggcagcattccagggatgcaaaatgtgctagtccatgacctttcaatggaaagcttaggtgcctgcgttatatttgccctgtctaattttgcccatacagtcttccttctgtagagggctgtttacatatacagcacttaaaatgtttgtgtgggaaaaaaaaaactcattggcagatccaagaatgacaaacacaagtgccccttttctctggatctcaagaatggtggaggaccctggaaggacagcaaggcagctccccagcctcactcttcactcctgattgaggcccgggtttgttgtccagcaccaattctggctgtcaatggggagaaataaaccaacaacttataattgtgacaccagatgcttaggatcctggtgctgggttagctaagagaatagacagaattggaaaatactgcagacatttccgaagagtttataaagcacagtgaattcctggtcaatctctccactgaggcaatttggaatcaataagcaattgataatagtttggagtaagggacttcatatacctgattcctctagaaggctgtctaacataccacatgattacatgaactgtatggtatccatctatctctgttctattgaatgccttgttaacagccaacactgaaaacactgtgagaatttgttttcaggtctgacacctttcagtctctttttatagcaagaaatcaatatcctttttataaaaattcatgtctgtatttcaggagcaaactcttcaggctccttttttataaactggtgatttttcttttgtctaaaaaacacatgaagaaaatttaccaaaaaaaaaaaaaaaagcagaagaataatgtagtttagaaattatgctgtcactgccaaacagtaacctccaggagaaaacaagatgaatagcagaggccaattcaatagaatcagttttttgatagctttttaacagttatgcttgcattaataatttcaatgtggaccagacattctaattatattttaaatgaaatgttacagcatattttaagcaactctttttatctataatcctaatatttcatactgaagacacagaaatctttcacttgtctttaacattagaaaggatttctctttactaaggactgatcatttgaaatagttttcagtcttttgagatacaggtttataacactgcttttttttttctgtaatcatagcccataatggcaaagacaactaaatttaagtgaaggtcatgcatgccaattctgtgtttgcttttagcagatatgaagatttccttatttctttgtaattgtgcagatattttgaaaggcacagcattcgaagccaagctgctgtttggctactgaatggcttgcagttgttcctccactctaaatggaatgagcttgctgtgtgtgtgtgtggtggtggtgggagggggtggtgcatgtgtgtgtgtgtgtgtgcatctgcagctgcttcaaaattaggaaatactacaggacacccctgtaatggattggtggcaactgggtggcactgctgatgtgcactgtgtaggggggaacccagtggtggtggggtagctcagatgcccctagacaagcttcagatgtctgtagctaccagaaacattttcggttcaggaaaagtgagatgatggtagtactggtttctggtgaaattgaagaaccccaaatgatgaggatctctttttgccccctctcctttttttgtagacccattcaaaaccattaataagcccattttactaagcccctatttctttctagaagctcagggttttcttagtgcctcccagaacattttgtagttaattgggaaaaagtgatacttggattagggggtgtgggcataaagaatggtgggaggcctgattttaaacttcaggccagaacccccaatgactccacccatagtctcactttaggtctcatttagtccatcacctttattttaagttgaggaagtggaggctggtaaagagcaggaccagaggaagaatccagatttccttatgcttgggcctcacactagctctctgagtatttccttgattgcggtatatgtactactagaaaataccaaatggatatattttctttaggataacctttgaaccaacaatcttcaataacaatagtacatcttccatcttacttttaatcgagtataaggaaatgtttctttatggccattttggagggagcaggggatgaggcttggcatagtccaaaatttaagtctccaataattaattgcattttaaattggcccactttcaaggcaattttttttgtgtgtctgtaactgagctcctccacccctgtcattcacttccaattttacccaatccaattttagcactcaagttccattgtgttaatttctgcacggtcaacaaacatcaagtcagcaagcatttgccaccactccctatacttctccctccttcttacacacacacacacacacacacacacaatccatctcttgcttgttcctacctcctgatttttcttccctacagaaatagaaatagggacaaagaaggggaaaatgtatatattggggctgggctgaacaactaacttcataagtagtattaactaggggtaaattgagagaaaagctccttttctcttcactgttttggaaaggatagccattagcatgactgctttgtgtccttatggactttagtattagcctagattgaattatagcgttttctagctggaaggaaccttaagatcacatcatctactcctctactccaaatttctcattcttcaggccaggaaaccgagacacagaggtaaagtaatttccccaaggtcacacagctggctggggcaggattgggtttacaacccacatctcctggctcttattccagggccttttcccactaagtagtattgccttccattaggctcctgagagttatttctcagggtcatgttgcatcttggagccacatgctgctgccctgatctcagtgggaaatccacccagcaacctaatacagccccttttccctgcattcacctggttcccatccacatgggttgcagatgtccttgaagagagtgaggcattgagggccaataggagcaatggggtccctggccttgtccatctgattcaggagatcactgctccatcgtgaggagccctctgaatagccccccactgaatgcttgccttgcccaaatggaatggaggaagattgattttctccatcagttcaccttgtgtcatctcataatggttggtctttccaggctgagggaaatgtttcttgtttccagagtagaaaaagaaagagtggaacaatagctttgttcatcctaactttctgagatggcttttcaacattttaaaaaaactagtgtggctaccattcactggcaatgatttcttttagaatatgggagtaagatgagctagagaaaataacctggtctcactgtggttgccctcatccacaatgtccccaaagccatcctgctctgatgaggacaatttccaggtataagcaaggggctttgtgacaaaaatgtaccctggctgatgttaaacattggctcctgtgtttgcaccaaaatagcaagctgtgtgctctatacactcttcccatcgtcttgtgtacactgctcctgtggccttccacagcagaaaccagggcaaaagggtccaaacacatggttttccttgctgcaaggctcttcctgggaactaagggggtatttattagttcagttctaagagacctccttctgggcttaccccactcctcaggtacttctctctccttcctccttctcctccacagtcacaagtaaccaaggaacctgaaagtggatgtgtagctatttgaagaaggcaaggaaccctgagattcttctttgaatcctctagtccaagtcttagaccagtgattggtgcttaccttgaacaaaattttgtctgtgttcctaatcccttcaatactctgggtacaatgctcccaatcaccctgcacatttgattctaaatggcttttattttttaaaaatccatatccctaggacaagagaacaggatgcctatatccccaaaatgagctccaggacactgatgggaatgatcccaaagatcaccccacctcagaaacgtctgtgccaagagacttccccagatagaaacactgggacagtggtttgaacgacttcttttatggttgtccagtttgctatggaaataaaaggcattgattttttaaaaagatgattggaacctgtctttggccacatagggccacttggatccatttccaggccttactcatatattgccttcactgaagggctttggctttaagtcccagactggtctcccaagtgaaccataagtgttttggagctcatctggggtgaggcatgagaatgttgccccatctatcccttcaggaaaaggtgccttccctccctttctcctaaagcctggtccccagaaattgtttttgtctccaaaagtctagtatggtctttatacacccagactcttagtgttgcgtcctgccttgtttccttgttaaggatctatgcagacctcccgctttggcttagctagcgtgacattggctatcatttgacaagactaacttttttttttttttttttttgactgagtctccctctgtcacctaggctggagtgcagtggcacaatcttggctcgctgcaaccttcacccttcacctcccaggtcgaagcgattctcctgcctcagtctcccgagtagctgggattacaggcgtgcgccaccaaatctggctatttttttattattattatttttagtagagatggggtttcaccatgttggccagactggtcttgaactcttggcctcaaattatctgcccacctcggcctcccaaagtgctgggattacaggcatgagccaccatgcccagctgacaagactaattttttatcccttggtttattggcttcaacatcttctggaatcagaggtgattttttcttaccttggatgcctgagactaggggagtatagaattccaattggtaattaaggcatctttctgctcctgatcagaagggcaggttagttgggagaggtcagatggcacaacagaagtcaccttgtaagtaaggcaaagacttgaaggcattagcgtttctcattactaggtcaataacctgagggaatcaatggctttttgccgctctacctcttgtgtatctctttgacttttctttctctgtctagtttcctctgttctcagtttatattctatgttatcagtctctctttccacagtacaaacatccatcctttctcctgtgcaattctgtctctccctcttattatctttatttgtactttttccttcctccctgtctaggcattgggcatgtgcctcttcttagcctgtgattttgccttgggactgatgataaattatttccagattcaatcagccctggtcctaccccagtccaatcagaagtatgttggtgggaatcaacctgatcctggccctttcttcttctccattttcattcgtaatccccctcagcagatctttacaagcagtttccttatagctcatgtatctttaggtctttgccttccaagcactgtacagaatactttgtggttcctttttagtctgacattttgtggagcagtgaagcgtgctcagagacataatcagctgaagagaaaaaatccacccatggatttatatcagctaaatactaataattgattttgtttgatgtgcccataatttttaaagctgcaatataatataatgagggaccacaggtaatttctcctgtcatttgttttggctggatgggggtgggggagtaattgcttaaagttttaccattacacattaaactctctataataatcttgtttggggcttgctaactgttgagctgttttaactaaactggtaggcaatcggagttgatttaaatgaaaagataatttaacaaatctatactataaaaagagacatttgcttaattgacatgtattttttccttctgagtcacctaaacatttactcttgacaccaactgttcatgatactgaatagacagtccatataagagaaattagtggacctaaagaagccagattgtaggtgttaatttattaaacagagtgcaaagcccttggaaatgtcactgcttggcaataccatatggaatgccaaaatttacaatgacttttctttataagttatccaaaagggatttgaacaagtaagaggttatgccaaaatgtctccaatgtatggtcctgtaatatattgcagcttgaagccaatgatcccttatgacttgtatacaactaatgcatgttttattgaattttgcatttcccacgtgtggtaagttctttaaaatgtttttgatcacctttttgtgccattaaacttgtacagaaaatgtttttatggccattttcaaagggagaaagtttaaaatggaaacagcccaccctttctgccctatagctgtagttagaattgagtacctgtagcaaaacagctgtaattggtggttgtagtgttagaggtgttagcttgctagtgactagctttggagagtaaatgcatggtattgtacatcacatttcttaactcgttttaacctctgaaaagaatatattcttctttgtagtccttcttcccacccccttgccctctccctctccctgctcccagttgtcttacagttgtaaatatctgatttgaggcccaataactcttgccaagtaaagtcagcaaacaacaaacaaaccaaaatgtggggaaaaggcatttctcaaccatctctcagcagttattgatcatttcttaaggaacagcattgtgatcaaagactcaactttacgtaaaaatcagtggtaaattggggttgtatttggccatttgattacatttcaggattgaatagttttcagaatcacatgtaatccaaagacagtaggtagtgatgtcccttatccctgcagctgttttaagatagagacctcagaagactctgcttgaccgatgaccaataattatttgaaaaaaaaagaaaaaatgagagaaataaaacagatatttaagaactttagccacctatttagaatagttatagccagaaaaaaaaacaagggcatgagttcaaatgcattactatcagtgtcctaggcaatacctaacctactctgaaattgtgattcaaaagcagtatttcaagaggcattctccttttttggtttgctgaccccacttggactggtaggtttggtgaggcccccataaaccagctggagcagacccttttcatctcctgtgcctgtaacacccctcttcccccaccccctccgcaattcaatgagggctttcttgggtcagaggacttcaaggttgtctagagaagtttgccatgtgtgtaaggtgctgtgaactgtgagtgctgaagattcgcagcattcaataccaggcagccaaagagctgctcttgcaattattttggctctcaagctctgttcttcatcgcattctcatttctgtgtacatttgcaagatgtgtgtaatgtcattttccaaaaataaaatttgatttcaata

SEQ ID NO: 11833 - DNA, 9122 bp, Homo sapiens
cacaaggcaaagcctgctctctctgtctctctgtctcctcttctccttttttgccttattctatccgattttttccctaagcttctacctgggattttcctttggaaaagtctctgaggttccaccaaaatatggaacttgattttggacactttgacgaaagagataagacatccaggaacatgcgaggctcccggatgaatgggttgcctagccccactcacagcgcccactgtagcttctaccgaaccagaaccttgcaggcactgagtaatgagaagaaagccaagaaggtacgtttctaccgcaatggggaccgctacttcaaggggattgtgtacgctgtgtcctctgaccgttttcgcagctttgacgccttgctggctgacctgacgcgatctctgtctgacaacatcaacctgcctcagggagtgcgttacatttacaccattgatggatccaggaagatcggaagcatggatgaactggaggaaggggaaagctatgtctgttcctcagacaacttctttaaaaaggtggagtacaccaagaatgtcaatcccaactggtctgtcaacgtaaaaacatctgccaatatgaaagccccccagtccttggctagcagcaacagtgcacaggccagggagaacaaggactttgtgcgccccaagctggttaccatcatccgcagtggggtgaagcctcggaaggctgtgcgtgtgcttctgaacaagaagacagcccactcttttgagcaagtcctcactgatatcacagaagccatcaaactggagaccggggttgtcaaaaaactctacactctggatggaaaacaggtaacttgtctccatgatttctttggtgatgatgatgtgtttattgcctgtggtcctgaaaaatttcgctatgctcaggatgatttttctctggatgaaaatgaatgccgagtcatgaagggaaacccatcagccacagctggcccaaaggcatccccaacacctcagaagacttcagccaagagccctggtcctatgcgccgaagcaagtctccagctgactcagcaaacggaacctccagcagccagctctctacccccaagtctaagcagtctcccatctctacgcccaccagtcctggcagcctccggaagcacaaggacctgtacctgcctctgtccttggatgactcggactcgcttggtgattccatgtaaaggaggggagagtgctcagagtccagagtacaaatccaagcctatcattgtagtagggtacttctgctcaagtgtccaacagggctattggtgctttcaagtttttattttgttgttgttgttattttgaaaaacacattgtaatatgttgggtttattttcctgtgatttctcctctgggccactgatccacagttaccaattatgagagatagattgataaccatcctttggggcagcattccagggatgcaaaatgtgctagtccatgacctttcaatggaaagcttaggtgcctgcgttatatttgccctgtctaattttgcccatacagtcttccttctgtagagggctgtttacatatacagcacttaaaatgtttgtgtgggaaaaaaaaaactcattggcagatccaagaatgacaaacacaagtgccccttttctctggatctcaagaatggtggaggaccctggaaggacagcaaggcagctccccagcctcactcttcactcctgattgaggcccgggtttgttgtccagcaccaattctggctgtcaatggggagaaataaaccaacaacttataattgtgacaccagatgcttaggatcctggtgctgggttagctaagagaatagacagaattggaaaatactgcagacatttccgaagagtttataaagcacagtgaattcctggtcaatctctccactgaggcaatttggaatcaataagcaattgataatagtttggagtaagggacttcatatacctgattcctctagaaggctgtctaacataccacatgattacatgaactgtatggtatccatctatctctgttctattgaatgccttgttaacagccaacactgaaaacactgtgagaatttgttttcaggtctgacacctttcagtctctttttatagcaagaaatcaatatcctttttataaaaattcatgtctgtatttcaggagcaaactcttcaggctccttttttataaactggtgatttttcttttgtctaaaaaacacatgaagaaaatttaccaaaaaaaaaaaaaaaagcagaagaataatgtagtttagaaattatgctgtcactgccaaacagtaacctccaggagaaaacaagatgaatagcagaggccaattcaatagaatcagttttttgatagctttttaacagttatgcttgcattaataatttcaatgtggaccagacattctaattatattttaaatgaaatgttacagcatattttaagcaactctttttatctataatcctaatatttcatactgaagacacagaaatctttcacttgtctttaacattagaaaggatttctctttactaaggactgatcatttgaaatagttttcagtcttttgagatacaggtttataacactgcttttttttttctgtaatcatagcccataatggcaaagacaactaaatttaagtgaaggtcatgcatgccaattctgtgtttgcttttagcagatatgaagatttccttatttctttgtaattgtgcagatattttgaaaggcacagcattcgaagccaagctgctgtttggctactgaatggcttgcagttgttcctccactctaaatggaatgagcttgctgtgtgtgtgtgtggtggtggtgggagggggtggtgcatgtgtgtgtgtgtgtgtgcatctgcagctgcttcaaaattaggaaatactacaggacacccctgtaatggattggtggcaactgggtggcactgctgatgtgcactgtgtaggggggaacccagtggtggtggggtagctcagatgcccctagacaagcttcagatgtctgtagctaccagaaacattttcggttcaggaaaagtgagatgatggtagtactggtttctggtgaaattgaagaaccccaaatgatgaggatctctttttgccccctctcctttttttgtagacccattcaaaaccattaataagcccattttactaagcccctatttctttctagaagctcagggttttcttagtgcctcccagaacattttgtagttaattgggaaaaagtgatacttggattagggggtgtgggcataaagaatggtgggaggcctgattttaaacttcaggccagaacccccaatgactccacccatagtctcactttaggtctcatttagtccatcacctttattttaagttgaggaagtggaggctggtaaagagcaggaccagaggaagaatccagatttccttatgcttgggcctcacactagctctctgagtatttccttgattgcggtatatgtactactagaaaataccaaatggatatattttctttaggataacctttgaaccaacaatcttcaataacaatagtacatcttccatcttacttttaatcgagtataaggaaatgtttctttatggccattttggagggagcaggggatgaggcttggcatagtccaaaatttaagtctccaataattaattgcattttaaattggcccactttcaaggcaattttttttgtgtgtctgtaactgagctcctccacccctgtcattcacttccaattttacccaatccaattttagcactcaagttccattgtgttaatttctgcacggtcaacaaacatcaagtcagcaagcatttgccaccactccctatacttctccctccttcttacacacacacacacacacacacacacaatccatctcttgcttgttcctacctcctgatttttcttccctacagaaatagaaatagggacaaagaaggggaaaatgtatatattggggctgggctgaacaactaacttcataagtagtattaactaggggtaaattgagagaaaagctccttttctcttcactgttttggaaaggatagccattagcatgactgctttgtgtccttatggactttagtattagcctagattgaattatagcgttttctagctggaaggaaccttaagatcacatcatctactcctctactccaaatttctcattcttcaggccaggaaaccgagacacagaggtaaagtaatttccccaaggtcacacagctggctggggcaggattgggtttacaacccacatctcctggctcttattccagggccttttcccactaagtagtattgccttccattaggctcctgagagttatttctcagggtcatgttgcatcttggagccacatgctgctgccctgatctcagtgggaaatccacccagcaacctaatacagccccttttccctgcattcacctggttcccatccacatgggttgcagatgtccttgaagagagtgaggcattgagggccaataggagcaatggggtccctggccttgtccatctgattcaggagatcactgctccatcgtgaggagccctctgaatagccccccactgaatgcttgccttgcccaaatggaatggaggaagattgattttctccatcagttcaccttgtgtcatctcataatggttggtctttccaggctgagggaaatgtttcttgtttccagagtagaaaaagaaagagtggaacaatagctttgttcatcctaactttctgagatggcttttcaacattttaaaaaaactagtgtggctaccattcactggcaatgatttcttttagaatatgggagtaagatgagctagagaaaataacctggtctcactgtggttgccctcatccacaatgtccccaaagccatcctgctctgatgaggacaatttccaggtataagcaaggggctttgtgacaaaaatgtaccctggctgatgttaaacattggctcctgtgtttgcaccaaaatagcaagctgtgtgctctatacactcttcccatcgtcttgtgtacactgctcctgtggccttccacagcagaaaccagggcaaaagggtccaaacacatggttttccttgctgcaaggctcttcctgggaactaagggggtatttattagttcagttctaagagacctccttctgggcttaccccactcctcaggtacttctctctccttcctccttctcctccacagtcacaagtaaccaaggaacctgaaagtggatgtgtagctatttgaagaaggcaaggaaccctgagattcttctttgaatcctctagtccaagtcttagaccagtgattggtgcttaccttgaacaaaattttgtctgtgttcctaatcccttcaatactctgggtacaatgctcccaatcaccctgcacatttgattctaaatggcttttattttttaaaaatccatatccctaggacaagagaacaggatgcctatatccccaaaatgagctccaggacactgatgggaatgatcccaaagatcaccccacctcagaaacgtctgtgccaagagacttccccagatagaaacactgggacagtggtttgaacgacttcttttatggttgtccagtttgctatggaaataaaaggcattgattttttaaaaagatgattggaacctgtctttggccacatagggccacttggatccatttccaggccttactcatatattgccttcactgaagggctttggctttaagtcccagactggtctcccaagtgaaccataagtgttttggagctcatctggggtgaggcatgagaatgttgccccatctatcccttcaggaaaaggtgccttccctccctttctcctaaagcctggtccccagaaattgtttttgtctccaaaagtctagtatggtctttatacacccagactcttagtgttgcgtcctgccttgtttccttgttaaggatctatgcagacctcccgctttggcttagctagcgtgacattggctatcatttgacaagactaacttttttttttttttttttttgactgagtctccctctgtcacctaggctggagtgcagtggcacaatcttggctcgctgcaaccttcacccttcacctcccaggtcgaagcgattctcctgcctcagtctcccgagtagctgggattacaggcgtgcgccaccaaatctggctatttttttattattattatttttagtagagatggggtttcaccatgttggccagactggtcttgaactcttggcctcaaattatctgcccacctcggcctcccaaagtgctgggattacaggcatgagccaccatgcccagctgacaagactaattttttatcccttggtttattggcttcaacatcttctggaatcagaggtgattttttcttaccttggatgcctgagactaggggagtatagaattccaattggtaattaaggcatctttctgctcctgatcagaagggcaggttagttgggagaggtcagatggcacaacagaagtcaccttgtaagtaaggcaaagacttgaaggcattagcgtttctcattactaggtcaataacctgagggaatcaatggctttttgccgctctacctcttgtgtatctctttgacttttctttctctgtctagtttcctctgttctcagtttatattctatgttatcagtctctctttccacagtacaaacatccatcctttctcctgtgcaattctgtctctccctcttattatctttatttgtactttttccttcctccctgtctaggcattgggcatgtgcctcttcttagcctgtgattttgccttgggactgatgataaattatttccagattcaatcagccctggtcctaccccagtccaatcagaagtatgttggtgggaatcaacctgatcctggccctttcttcttctccattttcattcgtaatccccctcagcagatctttacaagcagtttccttatagctcatgtatctttaggtctttgccttccaagcactgtacagaatactttgtggttcctttttagtctgacattttgtggagcagtgaagcgtgctcagagacataatcagctgaagagaaaaaatccacccatggatttatatcagctaaatactaataattgattttgtttgatgtgcccataatttttaaagctgcaatataatataatgagggaccacaggtaatttctcctgtcatttgttttggctggatgggggtgggggagtaattgcttaaagttttaccattacacattaaactctctataataatcttgtttggggcttgctaactgttgagctgttttaactaaactggtaggcaatcggagttgatttaaatgaaaagataatttaacaaatctatactataaaaagagacatttgcttaattgacatgtattttttccttctgagtcacctaaacatttactcttgacaccaactgttcatgatactgaatagacagtccatataagagaaattagtggacctaaagaagccagattgtaggtgttaatttattaaacagagtgcaaagcccttggaaatgtcactgcttggcaataccatatggaatgccaaaatttacaatgacttttctttataagttatccaaaagggatttgaacaagtaagaggttatgccaaaatgtctccaatgtatggtcctgtaatatattgcagcttgaagccaatgatcccttatgacttgtatacaactaatgcatgttttattgaattttgcatttcccacgtgtggtaagttctttaaaatgtttttgatcacctttttgtgccattaaacttgtacagaaaatgtttttatggccattttcaaagggagaaagtttaaaatggaaacagcccaccctttctgccctatagctgtagttagaattgagtacctgtagcaaaacagctgtaattggtggttgtagtgttagaggtgttagcttgctagtgactagctttggagagtaaatgcatggtattgtacatcacatttcttaactcgttttaacctctgaaaagaatatattcttctttgtagtccttcttcccacccccttgccctctccctctccctgctcccagttgtcttacagttgtaaatatctgatttgaggcccaataactcttgccaagtaaagtcagcaaacaacaaacaaaccaaaatgtggggaaaaggcatttctcaaccatctctcagcagttattgatcatttcttaaggaacagcattgtgatcaaagactcaactttacgtaaaaatcagtggtaaattggggttgtatttggccatttgattacatttcaggattgaatagttttcagaatcacatgtaatccaaagacagtaggtagtgatgtcccttatccctgcagctgttttaagatagagacctcagaagactctgcttgaccgatgaccaataattatttgaaaaaaaaagaaaaaatgagagaaataaaacagatatttaagaactttagccacctatttagaatagttatagccagaaaaaaaaacaagggcatgagttcaaatgcattactatcagtgtcctaggcaatacctaacctactctgaaattgtgattcaaaagcagtatttcaagaggcattctccttttttggtttgctgaccccacttggactggtaggtttggtgaggcccccataaaccagctggagcagacccttttcatctcctgtgcctgtaacacccctcttcccccaccccctccgcaattcaatgagggctttcttgggtcagaggacttcaaggttgtctagagaagtttgccatgtgtgtaaggtgctgtgaactgtgagtgctgaagattcgcagcattcaataccaggcagccaaagagctgctcttgcaattattttggctctcaagctctgttcttcatcgcattctcatttctgtgtacatttgcaagatgtgtgtaatgtcattttccaaaaataaaatttgatttcaata

SEQ ID NO: 11834 - DNA, 9054 bp, Homo sapiens
tttctttctctcagcatctccacccaaccagcagaaaaccggtctctgaggttccaccaaaatatggaacttgattttggacactttgacgaaagagataagacatccaggaacatgcgaggctcccggatgaatgggttgcctagccccactcacagcgcccactgtagcttctaccgaaccagaaccttgcaggcactgagtaatgagaagaaagccaagaaggtacgtttctaccgcaatggggaccgctacttcaaggggattgtgtacgctgtgtcctctgaccgttttcgcagctttgacgccttgctggctgacctgacgcgatctctgtctgacaacatcaacctgcctcagggagtgcgttacatttacaccattgatggatccaggaagatcggaagcatggatgaactggaggaaggggaaagctatgtctgttcctcagacaacttctttaaaaaggtggagtacaccaagaatgtcaatcccaactggtctgtcaacgtaaaaacatctgccaatatgaaagccccccagtccttggctagcagcaacagtgcacaggccagggagaacaaggactttgtgcgccccaagctggttaccatcatccgcagtggggtgaagcctcggaaggctgtgcgtgtgcttctgaacaagaagacagcccactcttttgagcaagtcctcactgatatcacagaagccatcaaactggagaccggggttgtcaaaaaactctacactctggatggaaaacaggtaacttgtctccatgatttctttggtgatgatgatgtgtttattgcctgtggtcctgaaaaatttcgctatgctcaggatgatttttctctggatgaaaatgaatgccgagtcatgaagggaaacccatcagccacagctggcccaaaggcatccccaacacctcagaagacttcagccaagagccctggtcctatgcgccgaagcaagtctccagctgactcagcaaacggaacctccagcagccagctctctacccccaagtctaagcagtctcccatctctacgcccaccagtcctggcagcctccggaagcacaaggacctgtacctgcctctgtccttggatgactcggactcgcttggtgattccatgtaaaggaggggagagtgctcagagtccagagtacaaatccaagcctatcattgtagtagggtacttctgctcaagtgtccaacagggctattggtgctttcaagtttttattttgttgttgttgttattttgaaaaacacattgtaatatgttgggtttattttcctgtgatttctcctctgggccactgatccacagttaccaattatgagagatagattgataaccatcctttggggcagcattccagggatgcaaaatgtgctagtccatgacctttcaatggaaagcttaggtgcctgcgttatatttgccctgtctaattttgcccatacagtcttccttctgtagagggctgtttacatatacagcacttaaaatgtttgtgtgggaaaaaaaaaactcattggcagatccaagaatgacaaacacaagtgccccttttctctggatctcaagaatggtggaggaccctggaaggacagcaaggcagctccccagcctcactcttcactcctgattgaggcccgggtttgttgtccagcaccaattctggctgtcaatggggagaaataaaccaacaacttataattgtgacaccagatgcttaggatcctggtgctgggttagctaagagaatagacagaattggaaaatactgcagacatttccgaagagtttataaagcacagtgaattcctggtcaatctctccactgaggcaatttggaatcaataagcaattgataatagtttggagtaagggacttcatatacctgattcctctagaaggctgtctaacataccacatgattacatgaactgtatggtatccatctatctctgttctattgaatgccttgttaacagccaacactgaaaacactgtgagaatttgttttcaggtctgacacctttcagtctctttttatagcaagaaatcaatatcctttttataaaaattcatgtctgtatttcaggagcaaactcttcaggctccttttttataaactggtgatttttcttttgtctaaaaaacacatgaagaaaatttaccaaaaaaaaaaaaaaaagcagaagaataatgtagtttagaaattatgctgtcactgccaaacagtaacctccaggagaaaacaagatgaatagcagaggccaattcaatagaatcagttttttgatagctttttaacagttatgcttgcattaataatttcaatgtggaccagacattctaattatattttaaatgaaatgttacagcatattttaagcaactctttttatctataatcctaatatttcatactgaagacacagaaatctttcacttgtctttaacattagaaaggatttctctttactaaggactgatcatttgaaatagttttcagtcttttgagatacaggtttataacactgcttttttttttctgtaatcatagcccataatggcaaagacaactaaatttaagtgaaggtcatgcatgccaattctgtgtttgcttttagcagatatgaagatttccttatttctttgtaattgtgcagatattttgaaaggcacagcattcgaagccaagctgctgtttggctactgaatggcttgcagttgttcctccactctaaatggaatgagcttgctgtgtgtgtgtgtggtggtggtgggagggggtggtgcatgtgtgtgtgtgtgtgtgcatctgcagctgcttcaaaattaggaaatactacaggacacccctgtaatggattggtggcaactgggtggcactgctgatgtgcactgtgtaggggggaacccagtggtggtggggtagctcagatgcccctagacaagcttcagatgtctgtagctaccagaaacattttcggttcaggaaaagtgagatgatggtagtactggtttctggtgaaattgaagaaccccaaatgatgaggatctctttttgccccctctcctttttttgtagacccattcaaaaccattaataagcccattttactaagcccctatttctttctagaagctcagggttttcttagtgcctcccagaacattttgtagttaattgggaaaaagtgatacttggattagggggtgtgggcataaagaatggtgggaggcctgattttaaacttcaggccagaacccccaatgactccacccatagtctcactttaggtctcatttagtccatcacctttattttaagttgaggaagtggaggctggtaaagagcaggaccagaggaagaatccagatttccttatgcttgggcctcacactagctctctgagtatttccttgattgcggtatatgtactactagaaaataccaaatggatatattttctttaggataacctttgaaccaacaatcttcaataacaatagtacatcttccatcttacttttaatcgagtataaggaaatgtttctttatggccattttggagggagcaggggatgaggcttggcatagtccaaaatttaagtctccaataattaattgcattttaaattggcccactttcaaggcaattttttttgtgtgtctgtaactgagctcctccacccctgtcattcacttccaattttacccaatccaattttagcactcaagttccattgtgttaatttctgcacggtcaacaaacatcaagtcagcaagcatttgccaccactccctatacttctccctccttcttacacacacacacacacacacacacacaatccatctcttgcttgttcctacctcctgatttttcttccctacagaaatagaaatagggacaaagaaggggaaaatgtatatattggggctgggctgaacaactaacttcataagtagtattaactaggggtaaattgagagaaaagctccttttctcttcactgttttggaaaggatagccattagcatgactgctttgtgtccttatggactttagtattagcctagattgaattatagcgttttctagctggaaggaaccttaagatcacatcatctactcctctactccaaatttctcattcttcaggccaggaaaccgagacacagaggtaaagtaatttccccaaggtcacacagctggctggggcaggattgggtttacaacccacatctcctggctcttattccagggccttttcccactaagtagtattgccttccattaggctcctgagagttatttctcagggtcatgttgcatcttggagccacatgctgctgccctgatctcagtgggaaatccacccagcaacctaatacagccccttttccctgcattcacctggttcccatccacatgggttgcagatgtccttgaagagagtgaggcattgagggccaataggagcaatggggtccctggccttgtccatctgattcaggagatcactgctccatcgtgaggagccctctgaatagccccccactgaatgcttgccttgcccaaatggaatggaggaagattgattttctccatcagttcaccttgtgtcatctcataatggttggtctttccaggctgagggaaatgtttcttgtttccagagtagaaaaagaaagagtggaacaatagctttgttcatcctaactttctgagatggcttttcaacattttaaaaaaactagtgtggctaccattcactggcaatgatttcttttagaatatgggagtaagatgagctagagaaaataacctggtctcactgtggttgccctcatccacaatgtccccaaagccatcctgctctgatgaggacaatttccaggtataagcaaggggctttgtgacaaaaatgtaccctggctgatgttaaacattggctcctgtgtttgcaccaaaatagcaagctgtgtgctctatacactcttcccatcgtcttgtgtacactgctcctgtggccttccacagcagaaaccagggcaaaagggtccaaacacatggttttccttgctgcaaggctcttcctgggaactaagggggtatttattagttcagttctaagagacctccttctgggcttaccccactcctcaggtacttctctctccttcctccttctcctccacagtcacaagtaaccaaggaacctgaaagtggatgtgtagctatttgaagaaggcaaggaaccctgagattcttctttgaatcctctagtccaagtcttagaccagtgattggtgcttaccttgaacaaaattttgtctgtgttcctaatcccttcaatactctgggtacaatgctcccaatcaccctgcacatttgattctaaatggcttttattttttaaaaatccatatccctaggacaagagaacaggatgcctatatccccaaaatgagctccaggacactgatgggaatgatcccaaagatcaccccacctcagaaacgtctgtgccaagagacttccccagatagaaacactgggacagtggtttgaacgacttcttttatggttgtccagtttgctatggaaataaaaggcattgattttttaaaaagatgattggaacctgtctttggccacatagggccacttggatccatttccaggccttactcatatattgccttcactgaagggctttggctttaagtcccagactggtctcccaagtgaaccataagtgttttggagctcatctggggtgaggcatgagaatgttgccccatctatcccttcaggaaaaggtgccttccctccctttctcctaaagcctggtccccagaaattgtttttgtctccaaaagtctagtatggtctttatacacccagactcttagtgttgcgtcctgccttgtttccttgttaaggatctatgcagacctcccgctttggcttagctagcgtgacattggctatcatttgacaagactaacttttttttttttttttttttgactgagtctccctctgtcacctaggctggagtgcagtggcacaatcttggctcgctgcaaccttcacccttcacctcccaggtcgaagcgattctcctgcctcagtctcccgagtagctgggattacaggcgtgcgccaccaaatctggctatttttttattattattatttttagtagagatggggtttcaccatgttggccagactggtcttgaactcttggcctcaaattatctgcccacctcggcctcccaaagtgctgggattacaggcatgagccaccatgcccagctgacaagactaattttttatcccttggtttattggcttcaacatcttctggaatcagaggtgattttttcttaccttggatgcctgagactaggggagtatagaattccaattggtaattaaggcatctttctgctcctgatcagaagggcaggttagttgggagaggtcagatggcacaacagaagtcaccttgtaagtaaggcaaagacttgaaggcattagcgtttctcattactaggtcaataacctgagggaatcaatggctttttgccgctctacctcttgtgtatctctttgacttttctttctctgtctagtttcctctgttctcagtttatattctatgttatcagtctctctttccacagtacaaacatccatcctttctcctgtgcaattctgtctctccctcttattatctttatttgtactttttccttcctccctgtctaggcattgggcatgtgcctcttcttagcctgtgattttgccttgggactgatgataaattatttccagattcaatcagccctggtcctaccccagtccaatcagaagtatgttggtgggaatcaacctgatcctggccctttcttcttctccattttcattcgtaatccccctcagcagatctttacaagcagtttccttatagctcatgtatctttaggtctttgccttccaagcactgtacagaatactttgtggttcctttttagtctgacattttgtggagcagtgaagcgtgctcagagacataatcagctgaagagaaaaaatccacccatggatttatatcagctaaatactaataattgattttgtttgatgtgcccataatttttaaagctgcaatataatataatgagggaccacaggtaatttctcctgtcatttgttttggctggatgggggtgggggagtaattgcttaaagttttaccattacacattaaactctctataataatcttgtttggggcttgctaactgttgagctgttttaactaaactggtaggcaatcggagttgatttaaatgaaaagataatttaacaaatctatactataaaaagagacatttgcttaattgacatgtattttttccttctgagtcacctaaacatttactcttgacaccaactgttcatgatactgaatagacagtccatataagagaaattagtggacctaaagaagccagattgtaggtgttaatttattaaacagagtgcaaagcccttggaaatgtcactgcttggcaataccatatggaatgccaaaatttacaatgacttttctttataagttatccaaaagggatttgaacaagtaagaggttatgccaaaatgtctccaatgtatggtcctgtaatatattgcagcttgaagccaatgatcccttatgacttgtatacaactaatgcatgttttattgaattttgcatttcccacgtgtggtaagttctttaaaatgtttttgatcacctttttgtgccattaaacttgtacagaaaatgtttttatggccattttcaaagggagaaagtttaaaatggaaacagcccaccctttctgccctatagctgtagttagaattgagtacctgtagcaaaacagctgtaattggtggttgtagtgttagaggtgttagcttgctagtgactagctttggagagtaaatgcatggtattgtacatcacatttcttaactcgttttaacctctgaaaagaatatattcttctttgtagtccttcttcccacccccttgccctctccctctccctgctcccagttgtcttacagttgtaaatatctgatttgaggcccaataactcttgccaagtaaagtcagcaaacaacaaacaaaccaaaatgtggggaaaaggcatttctcaaccatctctcagcagttattgatcatttcttaaggaacagcattgtgatcaaagactcaactttacgtaaaaatcagtggtaaattggggttgtatttggccatttgattacatttcaggattgaatagttttcagaatcacatgtaatccaaagacagtaggtagtgatgtcccttatccctgcagctgttttaagatagagacctcagaagactctgcttgaccgatgaccaataattatttgaaaaaaaaagaaaaaatgagagaaataaaacagatatttaagaactttagccacctatttagaatagttatagccagaaaaaaaaacaagggcatgagttcaaatgcattactatcagtgtcctaggcaatacctaacctactctgaaattgtgattcaaaagcagtatttcaagaggcattctccttttttggtttgctgaccccacttggactggtaggtttggtgaggcccccataaaccagctggagcagacccttttcatctcctgtgcctgtaacacccctcttcccccaccccctccgcaattcaatgagggctttcttgggtcagaggacttcaaggttgtctagagaagtttgccatgtgtgtaaggtgctgtgaactgtgagtgctgaagattcgcagcattcaataccaggcagccaaagagctgctcttgcaattattttggctctcaagctctgttcttcatcgcattctcatttctgtgtacatttgcaagatgtgtgtaatgtcattttccaaaaataaaatttgatttcaata

SEQ ID NO: 11835 - DNA, 13746 bp, Homo sapiens
cgccgcctgtgcagccgctgccgccgccgccgccgccgccgccgccgccgccgccgccgccgccgctgccgccccggctgccgcgccgcgccgctgcctctgccccggccgcccccgccgccgctgccgccgccggcccgcagccagccaggcgggcggcccagcccgcctgagcccgcagcggctgccgccgcagcgtcgggtcgctgggtgcgcgggctaccgcggaccgagcggacccgagtgggcgaccaggcgcttgcccgcccagtgccactgccgccgcttcctcgccggagcacaggaccagacacctccagcgcccgctgctgctgccgatgcggcccggacacttttagctgggcgggagggctggagagccgggggccgccgagaaccgccagcgagctgtgccgagagccgcgccgacccgctgcgatcagggacaggcgcccgcccgccgccgccgcctggccgctatggatctattcgactttttcagagactgggacttggagcagcagtgtcactatgaacaagaccgtagtgcacttaaaaaaagggaatgggagcggaggaatcaagaagtccagcaagaagacgatctcttttcttcaggctttgatctttttggggagccatacaaggtagctgaatatacaaacaaaggtgatgcacttgccaaccgagtccagaacacgcttggaaactatgatgaaatgaagaatttgctaactaaccattctaatcagaatcacctagtgggaattccaaagaattctgtgccccagaatcccaacaacaaaaatgaaccaagcttttttccagaacaaaagaacagaataattccacctcaccaggataatacccatccttcagcaccaatgcctccaccttctgttgtgatactgaattcaactctaatacacagcaacagaaaatcaaaacctgagtggtcacgtgatagtcataaccctagcactgtactggcaagccaggccagtggtcagccaaacaagatgcagactttgacacaggaccagtctcaagccaaactggaagacttctttgtctacccagctgaacagccccagattggagaagttgaagagtcaaacccatctgcaaaggaagacagtaaccctaattctagtggagaagatgctttcaaagaaatctttcaatccaattcaccggaagaatctgaattcgccgtgcaagcgcctgggtctcccctagtggcttcctctttattagctcctagcagtggcctttcagttcaaaacttcccaccagggctttactgcaaaacaagcatggggcagcaaaagccaactgcatacgtcagacccatggatggccaggaccaggcaccggacatctcaccaacactgaaaccttcaattgaatttgagaacagctttgggaatctgtcatttggaacactcttggatggaaaacccagtgcagccagttcaaagactaaactgccaaagttcaccatcctccaaacaagtgaagtaagccttcccagtgatccaagctgtgttgaagaaatcttgcgggagatgacccattcctggcctactcctctcacttccatgcatactgctggacactctgagcagagcaccttttccatcccaggacaggaatcgcagcatctgaccccaggattcaccttacaaaagtggaatgacccaaccaccagagcttctacaaagtcagtgtctttcaaatcgatgcttgaggatgacctgaagctgagcagtgatgaagatgaccttgagcctgtgaagaccttgaccactcagtgcactgccactgagctctaccaggctgttgaaaaggcaaaacctaggaataatcctgtgaacccacccttggccactccccagcccccacctgcagtgcaagccagcgggggttctggcagctccagcgaatcggagagcagctctgagtcggattcagacactgaaagtagcaccactgacagcgaatctaatgaggcacctcgtgtggcaactccagagcctgagccaccctcaaccaacaagtggcaactggataaatggcttaacaaagtgacatcccagaacaagtcttttatttgtggccaaaatgaaacacccatggagactatttctctgcctcctccaatcatccaaccaatggaagtccagatgaaagtgaagacgaatgccagtcaggtcccagctgaacccaaagaaaggcctctcctcagtctcattagggagaaagcccgtccacggcccactcagaaaattccagaaacaaaggctttgaagcataagttgtcaacaactagtgagacagtgtctcaaaggacaattgggaaaaaacagcccaaaaaagttgagaagaacaccagcactgacgagtttacctggcccaaaccaaatattaccagcagcactcccaaagaaaaagaaagtgtggagcttcatgacccaccaagaggccgcaacaaagccactgcccacaaaccagcccctaggaaagaaccaagacctaacatccctttggctcccgagaagaagaagtacagagggcctggcaagattgtgccaaagtctcgggaattcattgaaacagattcatctacatctgactccaacacagatcaggaagagaccctgcaaatcaaagtcctgcctccgtgcattatttctggaggtaatactgccaaatccaaggaaatctgtggtgccagcctgaccctcagcaccttaatgagtagcagtggcagcaacaacaacttatccatcagtaatgaagagccaacattttcacctattcctgtcatgcaaactgaaatcctgtcccctctgcgagatcatgagaacctgaaaaacctctgggtgaagattgaccttgacttactctctagagtacctggccacagctcactccatgcagcacctgccaagccagaccacaaggagactgccacaaaacccaagcgtcagacagctgtcacagctgtggagaaaccagcccctaagggcaaacgtaagcacaagccaatagaagttgcagagaagatccctgagaagaagcagcgcctggaggaggccacaactatctgcttgctccctccttgcatctcaccagccccaccccacaagcctcccaacactagagaaaataattcatccaggagagcaaatagaagaaaggaagaaaaactatttcctcctccactttccccactgccagaggaccctccacgccgcagaaatgtcagtggcaataatggtccctttggtcaagacaaaaacatcgccatgactggacaaatcacatctaccaaacctaagagaactgaaggcaaattctgtgctactttcaaagggatatcggtaaatgagggagacactccaaaaaaggcatcctctgccaccatcactgtcaccaatactgctattgccactgctactgtcactgctactgccattgtcaccaccactgtcacagctactgccaccgccacggccaccaccacaactactaccactaccatttccaccatcacctctaccatcactactggcctcatggatagcagtcacctggagatgacgtcctgggcggctctgccccttctatccagcagcagcactaatgtccggagacccaagctcacttttgatgactcggttcacaatgctgattattacatgcaagaagctaagaagctgaagcacaaagctgatgcactgttcgagaaatttggcaaagctgtgaattatgctgatgccgccctctccttcactgaatgtggcaatgccatggaacgcgaccctctggaagcaaagtccccatacaccatgtactctgagactgtggagctcctcaggtatgcaatgaggctgaagaactttgcaagtcccttggcttcggatggggacaaaaagctagcagtactatgctaccgatgtttatcactcctctatttgagaatgtttaagctgaagaaggaccatgctatgaagtactccagatcactgatggaatattttaagcaaaatgcttcaaaagtcgcacagataccctctccatgggtaagcaatggaaagaacactccatccccagtgtctctcaacaacgtctcccccatcaacgcaatggggaactgtaacaatggcccagtcaccattccccagcgcattcaccacatggctgccagccacgtcaacatcactagcaatgtgttacggggctatgaacactgggatatggccgacaaactgacaagagaaaacaaagaattctttggtgatctggacacgctgatggggcctctgacccagcacagcagcatgaccaatcttgtccgctacgttcgccaaggactgtgttggctgcgcatcgatgcccacttgttgtagtgggtgttctcagatctctagcatcacgacccatcactctacctctaccagcgcactgatggtcactggtggaactccactcactggggaacgttctctttggttatgtttgtttttatgcttcttttgttatctgtaaaaaacagaagtcattgtaagttgacactacaacttaagggcagtgtacgttttattacttagtcattttttttcttttagcatttgatatgcatttctcagattccaccatctttttgtgctttatggaatgacagtccctacaatattgttttaagcccacactacccaaaacaaagaatgggaagcacttgtgataaagacaggctcctgagaaatgcaacaagtggtcttacatatacatgagaacttagacacaagggaccatcccccaaactctactcttatacccagaaaagaacatatttcagaatctgtcaaacttttgtgtatcccacagattcaatcttcaggtgagaattttcattgtcaaaacccactggttagatgttgtagcaacatcataaaatcaagagtatcaagaaaataaatgagcatagcaatgctactcttaaaaagatgctatgccacacaaccagaggactttcttgttagcatccctttcctgattccctattttgttaattttaatgataagaagaaagggtgacatttattttgacaagttttaggcatcagctggcatcagtgtttttcaactccattatttgaagtgtaaatcctcacctggggttctctgtgtgcaaagctgtccttttgaagaacagtttggttgatgcatgccttagtagccaaaatgctacactctagacttacaagtgggagttaagagaggtctggaaagtgtccaacaaggaattcacacctctgcctcctttgcaacaacaacatttacacagttggtaagtgggtccataactggcaggatttttaaattgtattttgctcaaatctatgggaacaaaagtcaaggtatcactacctagaagtaatgatatacagttttcttcctagtggcttgaaaatctggacttcctcaattattattcacattttctctcttataggttttctgttttctactttcttttttctcttatctgtgtttccctttcctttgtttggctcattaacttttgactgaattacaattactccttttattaaagtccatattattgtgaatcatttccatgaaaatttctaagaaaactccaaactctctaaatagtagctaacttttatttttttaaaatgagtcgtggggtagtgcttcaccttgagatgctttgaaagagccctaaacattgggaaccattcacctaatttggagacatttctcactggttgtgactacccccttatgatccttcacattcattttatgtccctaaacatcacaatgtaaatatcatttttgatgttccagctcaccagaagattcttacacttggggtaaacactatccatgcattacttactggtaattacctgctggtatataattccatgtagcctttaatatgctgggttatcaaattctgttcactgagttatgaccagataaataatagatatgcacatgaaagatgcaaacttgtgtgattattaaagccagccatgcaggtccatgatagaaacagcaggtgatgactctgcactctcattgtcaaggttagatatatccccagttgcaaaacagccagacttgagctgtgctctggtcatctttgagtttaaggccttttgttgtataaggctgtggaagttgtactccaatggctgaagccatgttgttaatatggctgatgggagcatccctgcagctgaacccagcactttttatgctcccactgtggttgagctttatgtttacagtctcagcaacaacacttatgcatccaaacactcacaaatgaaacctgaaagaatcttttctgagcctcttaaaagaggaaaatgatgataacattaaagactctgaacacccaaggttggtgtcacatataaaaattaagctgatgactttgcagtgactcaagttgtctctttatcatggtttaccaggtagagtgcctggctattactatataatgaagcccactggcttgacttgtaagttcaacctaaaccacaatcctagaccatcatggatttaggagtagattcttcttgaaatcccacatccagaaactagacattagaatgttgaggcagtttcccagagaaacaagcatattgcctcatggatgaaagacttgtagttctagtttcagtgacttgttatatctacttacatacaacagggaggcaagaggattctctgtcatctctggtgactgagtgtaaaatatgtgccaagtctgcagcacagtgaccaaatctgacaatcgagctctggatcaccacttgattatgtagtagactcatttataaagcagcttaggaactaattaaacatggaggatgaattaccttcctatcccttgagataagacatctttcagtttcatgattaaggattgttgctgttttatagttactctgttcatcacagtgtaaatggtgatgcgtgtcgtaggtgtgcagctatttgagggactaagggatggagatattctgtcaaatgaatctcttcagtataccagtttgtgggagggatatgagacatgtggatggcagtgagagatcgtgcctctagatcttgatggaggcttggtgagacacacttaaataagcacgtggaggttagaatagagggcagagtaaaaggaagctccatctgagcaagtacaccaaatgatctcagccctgcaacttgacccaggtagggccaccactacgccttcacttgtcacccaagctccaaccacagagagtttgacaagtttgtgttatgatgttggcttggctttgtatttttaattaactttggatttttagtggttttgtcatataactgtctgagtttggtaggtaggattactttgaaaagggtttactagtgtggtcctccgggtagaatttagctgtaagcatgttgttagccagcctgtagactgttaattacttaataatctcattgggaaaatactagtagttttatatttggatgacataattggaaaagcagattagctgctactacttttaaaagacttaaggtcgggatgcctttttttccatgtaaggaaatgaaaagaccaaaatcttcaggcaaaaagcaagttgcaaaattagaaaccattggctaaaaatgtgttttgttgagtttccaaatggatgaattttcatttggacattacatcactaaattcattagattttgtctgcattggaaagatactcttctagcatatctttcccaaagatatctaatttggattctgtttcatgcaaatttgcatcccggaggttgaagttggagtttgaggttggaaaatatctttgaaggcagaatcagttgagttgtgagggtgaagcctcacatacttctcaacagacatgataaaattcacctgcatgagttggcaggtgggagaaccaaactggatcactgggtaagactactcagtaaagcaatgaactgcttgcttagagaagcatcactatccccattgagaaaaatgtgtggcaagatgatacagctacacagtatcaaatgaatgggtcaattcagcacccccaaatttaattctgtggggaaaaattattgagccagttgtcagtgttctgttacatgactggcagactaaattcttcatcgttgttgttattgttgttgttgtttctcattttcactcgcacggccttattctcataattaaaatctaattcattttctctttagtgttagtagactccaacaacagaagtggcatctgtgtattcataatcagcatttaccctggcaggagactaatcagataggccggtctcagacattaatcctaccatctgatatttttggtgaaggaaaaagtattaattctctttccatcctcctcctcagaaatatagaagccctctttaccaaaatcatcacattttactctgtaatctaccagctaaaagaaaattgcattgtggggagggcagaaagggggtgggggtgggggtgggggggtggggggtggggaagccccacaaagccagattgcagttcttgcccctttttgcgtctgacatgagatgttaaagaattattcatagtgctcacattgggttaggggacactgaactgctttttagatccatgatcagtcatcattcttctaagagattggagctttgctgtttcattaactgtgcagtgtagactaatggtgtttaataaaaatcattcaaaatttcaaactcttttgccagtgacctcaattttgttggctctgtgatttgtatcagactttgaggagggaagggggaagtgaaggaagcctacgtccaggcccctgacaggatgctgcagtagcaagctcaagctcgcctgcctgccagcagttgctggtgagcagcagcatgcagaccagctgtgggaagcctcctgaagaatgccccagctgatgctttcagctgggaatagtttgttcctattggggaactcattgttctccagtctctgcagcaggaagccagctgtcatattcggagggaatttcagatgctttacctttttggttttgtcctgcatcactcatgtggctacgaaagtgtctctgagaatagagcccaatgtggtgacaatgggtagtcaaatgcaccccagatgctcaagccctgttgtggttctgcagtgtttatgaaattgggaggaaggagaccctggacagtaagcaaaattggagacactccaacgaggctaagttaatgccgtgttgcccagaacaagatctagcttctcatttggtcagcctagcatgcaaccagtggtgtgctggtaaaatgtttaacaaccagctcgctgagaatagaaagcacctggtttgcaccatttgccaatttccatggcataaatactaccactttagatgattttaagctaccaactgtgatgtcactgaacacatggttggaaagagatgcacgcagttggctcttgcaagcctgggcaaaaatgcttcaacacgccactggatgcagccagtcagagggttcatatttaatatatgtgttcatgtggacacacacagacacacacacacaaactcacccttacacacacacttcgatgactaaaacaattacatagttttaagatatgaatcaatgtgtgaatgtagaaagcttatgataaggccctagaggtatgggttgccctggaagcctaggttttaagcaggagaatagctgagaagaatgaagccctcctgagctgaaaggagagatggatcaatggagatggttccatcatctccttccatatctcacaggtaaaatgggcactcagaaaaccctcacgattgattttttaaaaagataagtgagtgttttttattttattattattgtcatcattattttgatttacaaatgctatttgtaacttttacatgtaactaggataaagtatttacgggaactctatggagaatagcacaatccagaatttactgtgtttttcttttatgtgacgtggaaactcagtaattctcccaccttcacattgttgttcataagaattttactttagttattagggaatctaagttttttgttaacatttgtttttagttaaaagtatctacttactgttttagctctgaactcaaaccagaatatctctgtatcaattgcatgactattcagaaacaataatccaaaccaaaataattctttttccacccagtacgaagaaaactaagctcagtaacaagaaggcataaactaaagtatataatgaggctttcattaaatacacacacacacacactcacacacacacacatacactttttaaatttttaaattaggcctccacacataaatcattttgaaagtagaatagaaaatctcaaagaattcattctcctggtcctgtgcatcttctgcagttaataagaggtttgtatctggaaagatggaagaacttgttctaaaatcttatttttcaaaaaaaaatttccattttctctctgggcctgtatccatggttgaatgttagccctggaggagatccatgtcttactcgctctttctggcccttctgtcttttgcctctgcaattctttttgtagctggcacgatagcagggactgggggtctatcctttcatggtattgctacaatatttgtccttactggaaaatggtaacatccgggtctgatttaattggcattacacttacacagggactctgagcacccccgtcaccacaccagacagtggaccagttttcacagctacaaagagctagaaatgtgtttaacatcatccagtgcatcccctaattcaaaaccatcctcactaatcaatcatattcacccataaatattacaaatgagattgattccatctcaagacaatttgtcaaatacttaattttcttcctggatgattctacttactggatattttagaaagagaaatgtctgagataaaatccctcacatttactcaatataacaaattactgtttctactcctattctgagtagtgcttctgaagattgtttgctgtagtgttgtctttgataaaatgaatgtcagtagtgagccttttagagataccatgctcagacatcctctttgggatcagaagatacctaaaattctccccttttgcccacttggttagatgagtgatatattctttggatcctgcaaagaagagattggtttcttttcttttctggtggtggtagtggttgtatctgtggctgtgatggttgttgttacttgtctctctctctctctggctctggcttttgctttcctgctagtgttctttctctttccaaacaaatagttaaattaaacgtgagcttctgaattgtacttgttcatactttcaaaacataacagattaataaaaatagatgtgtcctgatttaaaacatgccccctggaaaggcatgctgtattatgaaatcgtgataatataactgcattattacatggcagtataaatattagtctgttgaattcatttgtccaattgtataactttgtggagcagtgttttgacctttgatacataattctggagcaagtggagtggttgcaggcagatgagacagtgttatatcaggatttttcaatcaactttagttggaggcctggcaattacaaacatcttcagatgtttctgtaaccattataaatatgaaaaaaacctcttcaaaaaatttcccatagtacttcagtcaagactttttaggtttatcttttttttttcatttctccttttccttttccattatttttcgatgggggggttgttatcattgactgaagaaatattttgattgcaatggtctctctctctctccccctctctctctctctcctctattctttcctccttccctctgtccatcacccctcattaaaatattgaaatctggagtctttgataaatctgcattagaccaggctatatgctaggaatgaaatctgggcaaatatcgatgggttttcaaagaatgctccatgttcattgggccctttcacaccccacagtgataaatgaaaaggatagaggtagttttttcaaaagagcactttaataatatcctctgagacctaatgcagtttaacaaatgactccacctatttttccagtaggtaaattgactgagacttgcaaaatacccctgagagttgtcaggggtgtcttctgcctggtctatagcgtgtgtgtttgctttgtatctaacaggcacattcacgtctcgtgtactcatatgaagtatttcctaacattcccattagcctgtatataagaatcagaaagataatcccaacatgttgtaaatgaagatgtgactctataacctttctcttcttcctggaaaaaaaaggacattttcatgcatattttaaacagaaattttgtatatttaagtgtcatagaaaatatttattgagtaactgggacacaaatgggaatttaattgtcatcatatgctttgtgtgtggggatgcttaccaacaccatgtcgctggaccattgtggcaagccataactgcacaaagagtacacatcgtcagtgtgtgtgtgtgtgtgtgtgtgcgcgcacgcacgtgcgtgtgtgtgtccctgcatgtgcaacatgtctagcttgctgtccttcatgggattttagctttcccttcttgaaaaacattattttacagttccaggaggccctggttacattactatatgaaggcagtgatttgaaatgaaaattcctttcctcttggaagctttggtcataatatcatggttcaattaaacggattccaccggactttgtgatgaaaaaggctctgttaaaatccaattgagtttccaagaggaaattgtagtaggtcaagatgcatgagagggaagatggaggccacctcagctggagaacatgagctgagttgagccctcagtgttgaagttgacttgctccaagctgcagtctaaaaccctggggcccgtgcctggcctatgctccctcccaagtaagtagaggagcagaaccatcaggaacagcctgcctggctcctatgaagaaaacttcctgacgtcctgtccccaaaggaagaccctttccccaagggcaccccaggtggccattaaattgtgatgatcattcagaaagtgcccccttggctttatgagaatccaattagtcttctgaaccaccttttcttgggtgcagatttccaacattcatgctcattgcagatccaccaactgtcactgttcttaacaagcatgctcgtcttgtcagaatttcagtaagttccaatttcctgtacagaccagggtaaactgttctaaaatcaatcaattaatgaaatgttatctggtttttaaaagctggtttcatgtgctttatgtgtataaaactatatctgcctgtgtggctttgcatttcaaatgtgtggcgcacaagcgttttgttggtgctttgttctcagtacagtaactctgtgtacaaacattttaatgtggttttgttgttttccaacaagatgtctctgtaaaaatgatattggctgagctggtgcgttggtttctctcatagaggcattaactatactgccaatgcattgaattatttaaaaatgcaaaataaaatttttatgaaaatctca

SEQ ID NO: 11836 - DNA, 3188 bp, Homo sapiens
acacacacagcgagcgggcgggcagaaggcggttctgctggtctcctcttcctgctgcagccagcccagcgtgcgggccatgggccctgccggcgggtgaggcagccgcgtggcaggcatgttcggaggcccggggcctggggtcctgggagcccagggcatggcgggacccctgcggggccgggtggaagagctgaagctgccgtggtggcgggagagctcaccgctggtgctgcggcacagcgaggcggctcggctggcggccgacgccctcctggagcggggtgaggctgcctacctgcgggtcatctccgaggagcgggagctgcccttcctgagcgccctggatgtggactacatgaccagccatgtgcgcgggggccctgagctcagcgaggctcaggggcaggaggcctccgggccagaccgcctcagcctgctctctgaagtcacctcagggacttacttccccatggcctctgacatagaccccccagacctggacctgggctggcccgaggtgccacaggccacaggcttcagccccacccaggctgtggtccacttccagagggacaaggccaagaacatcaaggacctgctgcgcttccttttcagccaggcccacacggtggtggctgtggtgatggacatattcactgacatggagcttctgtgtgacctcatggaggcctcaagccggcgtggtgtccctgtgtacctgctccttgcccaggagcacctgaggcacttcctggagatgtgctacaagatggacctcaatggggagcacctgccgaacatgcgtgtgcggagcacgtgtggggacacatactgcagcaaggctggccgccgcttcacggggcaggccctggagaagttcgtcctcattgactgtgagcaagtggtggcgggcagttacagcttcacctggctttgcagccaggcccacactagcatggtgctgcagctgaggggccgcatcgtggaagactttgaccgggagttccgctgtctgtacgctgagtcgcagcctgtggagggcttctgtggcggtgaggacccgctgtctccccgggcactgcgtcctccccctgtggccctagccttcaggcctgatgtcccaagccccacgtcgtccctgccctccagcaccagcctcagcagcatcaagcagtcaccgcttatgggtcgctcctcctacctcgctctaccaggaggtggtgattgcagtgatacgggtgtggtgtcctcgtccctgggtcctgcccgccgtgaggccagtggccagccctccctacatcgccaactgtcagaccctaaccacggctcccctcctgggctctatagggccaatctcggcaagctaggggcatacccatggtcccagtcctcccctgccctcaaccataatagtaccagccccttaaccttggcagtggggtcacctctgcttcctcgctcccggcccctcctccagttccatcggggtgccccagctctgtcccggttcccagagaatgggctcccaggaagccaagagcccagccccctgcggggtcgatgggtacctggcacaaccctggagacagtggaggagaaggagaagaaggcatctccaagtcagagccgtggccagctggatctccttgtccccttccccagagcccgagaagtgggagaccctgactctggggttacccccaactcaggcccccttcggcctggcgagcaggccccagaggacaggaggttgtccccaagccaggccgacagccagctggatctcctgtcccgagccctgggtactgggggtgcccctgagttgggttccctcagacctggtgatcgggccctggaggacaggaggctgtccctaaaccaaagccgtggccaatcagacctcctgatgcagtaccccaaggcccagggttccagagtgccccttgaaaccaactcctcagccagacctgccagacgggcaccagatgagcggcggcagaccctggggcacagccagctggacctcatcacaaagttcggcccattccgtggtgaggggcctgggcccaatggtctcccgatatcaagccctgctcgcacggctggagctgggtctggggatgagaaacggctaaccctgggccacagcaagctggacctcatcaccaagtatcatcagttgcacggggccaggcagggaactgagcctgggggtcccaagggtggccatctcaatggtggtaacagtgacctggtcagggatgagaaacggctgaccctgggtcacagcaaactggacctcatcactaagtacaacaagtccaagttcaagcagctccgaagccgctttgagtcctagccaaaggactggcatcgggggtgcactggcaagggcaggcccctcctctgtccaccgagactctggacttgctcaggtcccagactggggaagggaggtgtctagaaacccaggtcagacacactctctgggctcaagattcttgtgtatacacacacacacacacacacacacacaccctaactagtatcttcttgaatctaggctgtgtttccagccctgtgctgggcctgtagagctgacaggtgggtcacactcagacctggggacagaggtgaaatgcacaagctgctggagaaggggtcagagccatatcaagttaaaggttaaccagttacagagggtgttagaaaacaaagggcagagagtcctggagaaggtggagtagtcagaaaactttcttagaggagatggaggtggcctttgagccaggccctgaaggatggggaggttttggacagagggaggagagagttagaaaaatttttggtagagagaatcaggtgaaagagatgccctaaagaggactgagtgggtctgaggtgaatgagtgaggaagagcagagtatgtggatacccggaaacacacacacacacacatcatcattatcatcatcatcattgtcgtcgtcatcatcttgctgagtcatcatcatcatcatcatcattgtcgtcgtcatcatcttgctgagtgtctcttgaagtacaggctgtgacaggttgtgggccattttcctgaactcaccacttacccgggatagtaaacatgatacacatcaataaaggcagactttattgtgaaaaaaaaaaaaaaaaaaaaaaaaaa

SEQ ID NO: 11837 - DNA, 1629 bp, Homo sapiens
gaagcagggagcgcggagtcgttcccgagagaggcggccaggctatgctcgccggtttccggcgttccgctccggccagccagagtctctgtctcaacctgtgtccgtgctccagcagtctcctcagcccggccccgcggcgcggttggcggcggcgccccaggcgcgccccctcctccgatggcggcggagatccagcccaagcctctgacccgcaagccgatcctgctgcagcggatggaggggtcccaggaggtggtgaatatggccgtgatcgtgcccaaagaggagggcgtcatcagcgtctccgaggacaggacagttcgtgtttggttaaagagagacagtggacagtattggccaagcgtataccatgcaatgccttctccatgttcatgcatgtcttttaacccggaaacaagaagactgtccataggtctagacaatggtacaatctcagagtttatattgtcagaagattataacaagatgactcctgtgaaaaactatcaagcgcatcagagcagagtgacgatgatcctgtttgtcctggagctggagtgggtgctgagcacaggacaggacaagcaatttgcctggcactgctctgagagtgggcagcgcctgggaggttatcggaccagtgctgtggcctcaggcctgcaatttgatgttgaaacccggcatgtgtttatcggtgaccactcaggccaagtaacaatcctcaaactggagcaagaaaactgcaccctggtcacaacattcagaggacacacaggtggggtgaccgctctctgttgggacccagtccagcgggtgttgttctcaggcagttcagatcactctgtcatcatgtgggacatcggtgggagaaaaggaacagccatcgagctccaaggacacaacgacagagtccaggccctctcctatgcacagcacacgcgacaattgatctcctgtggcggtgatggtgggattgtcgtctggaacatggacgtggagaggcaggagacccctgaatggttggacagtgattcctgccaaaagtgtgatcagcctttcttctggaacttcaagcaaatgtgggacagtaagaaaattggtctaagacagcaccactgccgcaagtgtgggaaggccgtctgtggcaagtgcagctccaagcgctcctccatccccctgatgggcttcgagtttgaagtgagggtctgtgacagctgccacgaggccatcacagatgaagaacgtgcacccacagccaccttccatgacagtaaacataacattgtgcatgtgcatttcgatgcaaccagaggatggttactgacttctggaactgacaaggttattaagttgtgggatatgaccccagtcgtgtcttgatgactctcccaggaatcagaaagatagtatttactaaagaaacggttgttttaacccaaatcattaccagagtggtaaagcagacatgtgagaagtaagaaagaaactaaagaccctgaatgaatttgcagattacccatgtgcacagtggggacctggccagtgagcactcgcaaggggactcttccaacttgttcatacaatataaaagaagctatttttttaacaaaaaaaaaaaaaaaaaaa

SEQ ID NO: 11838 - DNA, 2842 bp, Homo sapiens
gtcgcgggagctctctgatccactcaggggtcagggcatcactggtctcgcgtgcgcgtgaccaggcccggtttccggtgccaggacctttccgaagcgtcgagtggcctaacggtcacagctgtcgcccatcggagaggcaggactactgcgagcagttttaccgcgacctccggaggccggcgtgacaggctctgtcactaaaataggagtagaggtttaccactcttaggtgactaagcagtatcacaaataaaccctccagcaagtttaaaaataattaggtccaactcagaggaagtggagtttctcctgttgcacaaaaatgatgtctaacagctccagtgaaatcgatgtgcaggaaccgaatattgtatctgacgcatcctgtaatactgaagagcaactgaagacagttgatgatgtccttattcattgccaggttatatatgatgctctgcaaaacctggataagaagattgatgtgattcgtagaaaggtttcaaaaatccaacgtttccatgcgagatccctgtggacaaatcataagcgatatggatataaaaagcattcttaccggcttgttaaaaagcttaaactccagaaaatgaagaaaaatgaggtttacgagacattctcctaccctgaaagttacagccccactttaccagtgtcaaggcgtgagaataattccccgagcaaccttccaaggccatccttttgcatggaagaataccagcgagctgagctggaggaggacccgatcctcagccgcactccgagtccagtgcatccctcagatttctctgagcataattgtcagccgtattatgcatctgatggtgcaacgtatggttcttcttcagggctctgccttggcaaccctcgggctgacagcatccacaacacttactcaactgaccatgcttctgcagcaccaccttcagttacaaggtcaccagttgaaaatgacggttacatagaggaaggaagcatcactaagcacccttcaacctggtcggtggaagcagtggtcctatttctaaaacaaacagatcctcttgcattatgccctcttgtcgacctcttcagaagccatgaaattgacgggaaggctctgctcctactcacgagtgacgtgttgctgaagcacttgggggtgaagctgggaacggctgtgaagctatgctactacattgaccgacttaaacaaggaaaatgctttgaaaattgaaaaaatccttgtgcaaatttagattgggccaacttctagaggcaccaatgccttcttagtgtggaatcatttttctgccctttagtcgtttttgttttgtagaaagtatctctcaaaatatattatagctagaattgtagaactatgttatagtccagtctacttctttaaaaaccatttaaactgctagatagtattagaatagtccaatagaaaattcattctttataggtctttaaaaattacttttattatattgtttacaaatatatttcatgcaagaaacagaaaaaaaaaaaaaccctttgattctggttcatctcgatacagagaaccaaaacagctaagagaggtattatcagggttgacaactcctatgattgaatctatgggaattattcctcagaagagaatttaaaggtgtacccatatatatctctttctggagtattttatctgtctgatgttgcagtattctacaagtttccagaaagagaatagccatataaattattttcctttctgctattatttctctatatgttttatttattcagatttagagtaaaaaataagcatataaacttttattatgtgctcttaacagttttaagataaactataggatagatagaatggttattttatgcaagaaatattgtaccgcaagggtggtttggatgaagtctgactactttttttcaaacaaactattatattaaaactgtcatattttggctaagtttggacctataactacactttcattgtttgcatctctctatgaagatacgtctgtccaaacttttaaaaggcataactgtattttatgtgtttattctttatatagatagtattttatattttattctcacccgaagtattcacacaatctttttaaaaaaaatttgaaatggcattttgtattgccacagaggtaggatgagccatatattagtgaaatgttttattttgtaaaatataaatggattatttgccatcattagtacctctcaacttactttttagaggacaagaaacaatctgtagattggtttccatacagggaagttctccgtcctatgcaatgtttctaattaatttgcttaattctgagccattaatcctgctacactttgaatgatacattaattcagactaatctttgggggctttattttgtaagttagaactttcaagggaaacatgttcaacactattattttgttataaatttataactttgttattacattgtgtaacaaatataaggtttacgagctatgagaattggtgctatcaccattagctatttgctgtaatgtcaagaaaatgttcaccagatgcaagaatgtaccttttctttttagaaagccaaatgtactttagacatgaatgcaactatttaaagaatagcttcatcaatgttattccttacatgtcataagattcttacttaaacttggtcttctttcaaattgtttgtatgaagatgctgtacccacttgaacagtcctcaggtgtttacataaatactatgttttacagttttcatattttaaaatattaataaagttaaatcacaatagttcaaaaaaaaaaaaaaaa

SEQ ID NO: 11839 - DNA, 5922 bp, Homo sapiens
gcggccgcggggaccctcggcgtggtcctctgaccctgcaaacccgcgacggaggaaggggaggtcctgcccgaggcgccagcccgaggaggaggatgcccatttaacccgccctcgcctgccgggcgcttgcctcggtgcccgccgccggagcctccgagccgcgcccgtggaagtgctgcatggggcagggctgctgaagcgcggagttcggggtcgcgccgctcccaggcaggcgcgggagcccggtgcggcagttggcacagtttcggcggcgccttctgcgcgggagtggggggcgcggtgcgcccggccggcctccgcggtgccctggtgaggcgagagttatggagccgcccagctgcattcaggatgagccgttcccgcaccccctggagcccgagccgggcgtctcagctcagcccggccccgggaagccaagcgataagcggttccggctgtggtacgttggggggtcgtgcctggaccacaggaccacgctgcctatgctgccctggctcatggccgagatccgcaggcgcagccagaagcccgaggcgggcggctgcggggcgccggcggcccgagaggtgatcctggtgctcagcgcgcccttcctgcgttgcgtccccgcgccgggcgctggggcctcggggggcactagtccgtcggccacgcagcccaacccggcggtattcatcttcgagcacaaggcgcagcatatctcgcgcttcatccacaacagccacgacctcacctactttgcctacctgatcaaggcgcagcccgacgaccccgagtcgcagatggcctgccacgttttccgcgccacagaccccagccaggttcctgatgttattagcagcataaggcaattatctaaagcggccatgaaagaggatgccaaacccagcaaagataatgaggacgccttttacaactctcagaagttcgaagtcctgtactgtggaaaggtgaccgtgacccacaagaaggccccctcaagcctcatcgatgactgcatggagaagttcagcctgcacgaacagcagcgcctgaagatccaaggcgagcagcgcggtccggacccaggagaggacctggctgacttggaggtggtggtgcccgggtcccccggagactgcctgccggaggaggctgacggcaccgacacccaccttggcttacctgccggggccagccagcctgccctgaccagctctcgggtctgcttccctgagcggattttggaagattctggctttgatgagcagcaggagtttcggtctcggtgcagcagtgtcaccggcgtgcaacggagagttcacgagggcagccagaaatcccagccgcgacggagacacgcgagcgcacccagtcacgtccagccctcggactcggagaagaacaggaccatgctcttccaggttgggcgatttgagattaaccttatcagtccagacactaaatcagttgtgctagaaaagaattttaaagatatctcctcttgttctcagggtataaagcatgtggatcactttggctttatctgccgggagtctccagagcctggacttagccagtatatttgttatgtattccagtgtgccagcgaatctctggttgatgaggtaatgctgactctgaaacaggccttcagtacggcggctgccctgcagagtgccaagacgcagattaaactgtgtgaggcctgcccgatgcactctttgcataagctctgtgaaaggattgaaggtctctacccaccaagagccaagctggtgatacagaggcatctctcatcactgacagataatgagcaagctgacatctttgaaagagttcagaaaatgaagccagtcagtgaccaggaagaaaatgaacttgtgattttacacctgaggcagctgtgtgaagccaagcagaagacacacgtgcacatcggggaaggcccttctactatttcaaatagtacaatcccagaaaatgcaacaagcagtggaaggttcaaacttgacattctgaaaaataaagctaagagatccttaactagctccctggaaaatatcttctcaaggggagctaacagaatgagaggtcggcttggaagtgtggacagttttgaacggtccaacagtcttgcttcagagaaggactactcaccaggggattctccaccagggacaccgccagcgtccccaccgtcctcagcttggcaaacgtttcccgaagaggattccgactccccgcagtttcgaagacgggcacacacgttcagccacccaccttcaagcacaaagagaaagctgaatttgcaggatgggagggctcagggtgtgcgttcccctctgctgaggcagagctccagtgaacagtgcagcaatctttcgtcagttcgacgcatgtacaaggagagtaattcttcctccagtcttccaagtcttcacacttccttctctgccccttccttcactgccccctctttcctgaaaagcttttaccagaattcaggtagactgtccccacagtatgaaaatgaaatcagacaagacactgcttcagaatcaagtgatggagaagggagaaaaaggacctcatctacctgcagcaatgagtccctaagtgtgggaggaacctctgtcactcctcgccggatctcctggcggcagcgcattttcctcagggttgcttctcccatgaacaaatctccctcagcaatgcaacagcaagatggattggacaggaacgagctgctgccactgtcccccctctctccaaccatggaggaggaaccgctggttatattcctgtctggggaggatgacccagaaaagattgaagaaagaaagaaatcaaaagaactgaggagcttgtggagaaaagctatacaccaacaaatcttgttacttcgaatggaaaaagaaaaccagaaacttgaaggagcaagcagagatgaactccagtccagaaaagttaaattagactatgaagaagttggtgcatgtcagaaagaggtcttaataacttgggataagaagttgttaaactgcagagctaaaatcagatgtgatatggaagatattcatactcttcttaaagaaggagttcccaaaagtcgacgaggagaaatttggcagtttctggctttacagtaccgactcagacacagattgcctaataaacaacagcctcctgacatatcctataaggaacttttgaagcagctcactgctcagcagcatgcgattctcgtggatttaggaaggacgtttcctactcacccttacttttcagtacagcttgggccaggacagctgtcactgtttaacctcctgaaagcctattctttgctggacaaagaagtgggatactgtcaggggatcagctttgtggctggagtcctgcttctgcacatgagtgaagagcaagcctttgaaatgctgaaattcctcatgtatgacctcggcttccgcaagcagtacagacctgacatgatgtcgctgcagattcaaatgtaccagctgtccaggctccttcatgactatcacagagatctctacaatcaccttgaagaaaatgaaatcagccccagtctttatgctgccccctggttcctcacattgtttgcctctcagttttcattaggatttgtagccagagtttttgatattatttttcttcagggaactgaagttatattcaaggttgcactcagcctactgagcagccaagagacacttataatggaatgtgagagctttgaaaatattgttgagtttcttaaaaacacgctacctgatatgaatacctctgaaatggaaaaaattattacccaggtttttgagatggatatttctaagcagttgcatgcctatgaggtggaatatcatgtgctacaggatgagcttcaggaatcttcatattcctgtgaggatagtgaaactttggagaagctggagagggccaatagccaactgaaaagacaaaacatggacctcctagaaaaattacaggtagctcatactaaaatccaggccttggaatcaaacctggaaaatcttttgacgagagagaccaaaatgaagtctttaatccggaccctggaacaagaaaaaatggcttatcaaaagacagtggagcaactccggaagctgctgcccgcggatgctctagccaattgtgacctgttgctgagagacctaaactgcaaccctaacaacaaagccaagataggaaataagccataattgaagaggcacggcctcagcagaaagtgctccttagaatactacagagaggaagagcctgcatgtcgctggcccaaggctggaccctgaagctgatggaaccacctaatactggtgctgagctcctagtcacagcaggtggacctcgtgctcatcagagcatgccaatcctaagccattggacatatgtagactggtttttgttgttgctatgtacatataaatatatatataaaatgaacatagttcatgctttcagataaaatgagtagatgtatatttagattaatttttttagtcagaacttcatgaaatccacaccaaaggaaaggtaaactgaaatttcccttggacatatgtgaaatctttttgtctttatagtgaaacaaagccagagcatctttgtatattgcaatatacttgaaaaaaatgaatgtatttttttctccaaagaacagcatgtttcactcaatggtgaaaaggtggaaacatttatgtaactttatgtgtatctgtcttgatatctactgacattgtctatatgaggaaaatgattactggtcatgctcctgtgagttttttgggaaggtagggtcatttctccctgcctgctttgtgccaactagcatgttgcatctacatgcattatgagtctggttaggcattactttaaacatacataaagagacagtaggacattgtggctgagtctacccagctcaaggtaaaggagaatgttgctaattttttagcaaactagaccagcattattactcaaactaaaaatatcacacctgaaaaatttaatttaggacctaaaatgtctagattagctttctgctttttttatttgaataactcattcagttgtgaatgaattcctctttatttggtgccacagtcaccaaatgacaaggatttgccactttcccaccaaattgtgagtgcttgtaatttaggtctctctaccttaaattcagtataaggaaacgtaattatgattgattttttccaaagatgacaagctgtgttgaaatacattttttcttttgaccaattgacagaatctaataagctttaataatcttccccttttatgtgaaaagttttgagaactgtgaaatgtttaggaacaaactgttgaaatccattggaagggaaaaaagaaagtggtaccagtgttaccagctcaactaaaacctgcaattctgcatttcaactcttcacttcctcagcctacaaatagctcattagatgacattcacgcatgctgggtataggcaaggaaagtaattttcaaagtacatttgcagttctctttttcagagatgattctatgatagtgcctctgaaagttgatgcagcatttttgcctttccaaaaagtatttatcctcactgctttttgcagtacttgtattttcacagatggattatctggggtaattttcttcaaagggagtttgttatacacagtgaaaatgtattatagagtagaatagtaaagctctaggggtttcagaaagctttgatgaacagatgacaaacatctgaaaccccctccgcactgttacccagtgtgtatataatgacttgttatagctcagtgtgcccttgaatccatacagtttcttaaaagacaataaaatcttattaataaagttaatgtaacttct

SEQ ID NO: 11840 - DNA, 2727 bp, Homo sapiens
ctaggcgcgtttcctgaaggtcgatggccaggtggtcttcataaactatactgccttgtgatgcctccctagaaatgagaggtctcaataccagctcagaccatgtggaccgcggatgagattgctcagctatgctatgaacactatgggatcaggctgcccaagaaggggaagcctgagccaaaccatgagtggacattattggcagcggtggtgaagatacaatctccagctgacaaggcctgcgacacccctgataagccggtgcaagtgacaaaggaaattgtgtcaatgggaacaggaacaaaatgcataggacagtccaaaatgaggaagaacggagacatcctcaatgatagccatgctgaggtcatagccagaaggagtttccaaaggtaccttctccaccaactccagttggcagccaccctgaaagaggatagcatctttgtcccaggaactcaaaaaggagtgtggaaacttagacgagacctcatttttgtgtttttctccagccatacaccctgtggggatgcctccatcattccgatgcttgagtttgaagatcagccttgctgtcctgtcttcagaaattgggccaacaactcatcagtagaagccagtagtaacctggaagctcctggaaatgaaagaaaatgtgaagaccctgacagtcctgtaaccaaaaagatgaggcttgagcctgggactgcagccagggaggtcaccaacggagcagctcaccatcagagttttggcaagcagaaaagtggcccaatctcaccaggcatccacagctgtgatctcactgtagagggactggctactgtcaccagaatagcccctggtagtgccaaagtgacagacgtttatagaactggagccaagtgtgtacctggagaagctggagactccggaaagccgggtgctgcgtttcaccaggtggggctgctccgagtgaagccaggccgtggagacagaacacgctccatgtcctgtagtgacaagatggcccgatggaacgtcctcggatgccaaggggcactgttgatgcacttgctggaagagcccatctacctgtcagctgtggtcattgggaagtgcccatacagccaggaagccatgcagagagcactgattggaaggtgtcagaatgtgtctgctttaccaaaaggcttcggagttcaagaattaaaaatactgcagtcagatttactatttgaacagagccgcagtgcggtgcaggcaaaaagggctgatagcccaggtcgacttgttccttgtggggcagccatcagctggagtgcagttcctgagcagcctttggatgttactgccaatggctttccacagggaacaacaaagaaaacaattggaagccttcaggcaagatcccaaatcagcaaagtggaactcttcagatcattccagaagctgctaagcagaattgcaagggacaagtggccacactccctcagggtgcagaagctggatacctaccaggagtacaaggaggctgcgtcctcttaccaggaagcctggagcacactccggaagcaggtgtttggatcctggatcagaaacccaccggattatcaccagttcaagtgagaaggaaatgtttgctctggtagcaggacccttcatcctgaactgccttcctccacgcaggacaagtcttagcttttttggtagttaaatcagggaacattctttctgagctttgcatctctgttgtgtaatacagatggaatctggaacttagagcaagctatacttgattgaagtagctctctgctaaaatggcatctcactaatgacctcactatctgacttccattgtgttttattgcttctctaaaatatgaaatcagagtttggaacatgatgctttgaaagtactctgcagcagctctgttttatgggttcctacattgattcagcaaatatttattgagctgaaatgatgtttgacgctctgcaagttttacagctttgcctagcatagcgaatatatattttgtattcccagcctttctttcttcagggagccattcttttcccattcttcagtggtcctgctctgtgcctcagacttggctgaagctaaccttactccctggctctaggaatagcctgtgagccagccctggactgccctggacttgttctcagaggtatcaggaaaggctttctgttttgatctggagctgtaagggtcacataatcatgggactgccggtggccatcttttcctactacctagagaaagccagcaaagaatgaaggcaacaaaggaaacagccaagagaatcaaagatctagtaacactgtttagatgtctcaattatgtgagacagattcctgttgttattttgattaagcctgtttgtgttggttttctgacttacaattgaaagagttctgtccaaaaagccaaaaggtggccaggcttggtggctcaggcctgtaatcccagcactttgggaagcccaggcaggcagatcacttgaggtcaggagttcaagaccagcctggccaacctggtgaaaccctgtctctactaaaaatgcaaaaactagccgggcatggtggcgcacacctgtaatcctagctactcgggaggctgaggcaggagaattgcttgaacccaggaggcggaggtagtggtgagcaaagatcgtaccgctgcactccagcctgggtgatagagcaagaccctatctc

SEQ ID NO: 11841 - DNA, 3161 bp, Homo sapiens
agcgaccgcagccggggggacgcgggaggatggagcaagtggagatcctgaggaaattcatccagagggtccaggccatgaagagtcctgaccacaatggggaggacaacttcgcccgggacttcatgcggttaagaagattgtctaccaaatatagaacagaaaagatatatcccacagccactggagaaaaagaagaaaatgttaaaaagaacagatacaaggacatactgccatttgatcacagccgagttaaattgacattaaagactccttcacaagattcagactatatcaatgcaaattttataaagggcgtctatgggccaaaagcatatgtagcaactcaaggacctttagcaaatacagtaatagatttttggaggatgatatgggagtataatgttgtgatcattgtaatggcctgccgagaatttgagatgggaaggaaaaaatgtgagcgctattggcctttgtatggagaagaccccataacgtttgcaccatttaaaatttcttgtgaggatgaacaagcaagaacagactacttcatcaggacactcttacttgaatttcaaaatgaatctcgtaggctgtatcagtttcattatgtgaactggccagaccatgatgttccttcatcatttgattctattctggacatgataagcttaatgaggaaatatcaagaacatgaagatgttcctatttgtattcattgcagtgcaggctgtggaagaacaggtgccatttgtgccatagattatacgtggaatttactaaaagctgggaaaataccagaggaatttaatgtatttaatttaatacaagaaatgagaacacaaaggcattctgcagtacaaacaaaggagcaatatgaacttgttcatagagctattgcccaactgtttgaaaaacagctacaactatatgaaattcatggagctcagaaaattgctgatggagtgaatgaaattaacactgaaaacatgatcagctccatagagcctgaaaaacaagattctcctcctccaaaaccaccaaggacccgcagttgccttgttgaaggggatgctaaagaagaaatactgcagccaccggaacctcatccagtgccacccatcttgacaccttctcccccttcagcttttccaacagtcactactgtgtggcaggacaatgatagataccatccaaagccagtgttgcatatggtttcatcagaacaacattcagcagacctcaacagaaactatagtaaatcaacagaacttccagggaaaaatgaatcaacaattgaacagatagataaaaaattggaacgaaatttaagttttgagattaagaaggtccctctccaagagggaccaaaaagttttgatgggaacacacttttgaataggggacatgcaattaaaattaaatctgcttcaccttgtatagctgataaaatctctaagccacaggaattaagttcagatctaaatgtcggtgatacttcccagaattcttgtgtggactgcagtgtaacacaatcaaacaaagtttcagttactccaccagaagaatcccagaattcagacacacctccaaggccagaccgcttgcctcttgatgagaaaggacatgtaacgtggtcatttcatggacctgaaaatgccatacccatacctgatttatctgaaggcaattcctcagatatcaactatcaaactaggaaaactgtgagtttaacaccaagtcctacaacacaagttgaaacacctgatcttgtggatcatgataacacttcaccactcttcagaacacccctcagttttactaatccacttcactctgatgactcagactcagatgaaagaaactctgatggtgctgtgacccagaataaaactaatatttcaacagcaagtgccacagtttctgctgccactagtactgaaagcatttctactaggaaagtattgccaatgtccattgctagacataatatagcaggaacaacacattcaggtgctgaaaaagatgttgatgttagtgaagattcacctcctcccctacctgaaagaactcctgaatcgtttgtgttagcaagtgaacataatacacctgtaagatcggaatggagtgaacttcaaagtcaggaacgatctgaacaaaaaaagtctgaaggcttgataacctctgaaaatgagaaatgtgatcatccagcgggaggtattcactatgaaatgtgcatagaatgtccacctactttcagtgacaagagagaacaaatatcagaaaatccaacagaagccacagatattggttttggtaatcgatgtggaaaacccaaaggaccaagagatccaccttcagaatggacatgattcagggagctagaagacactttaagttatactggaaaattcaggtgccactgaaagccagatttatagtattccatctttaatatgtgggactaacagcagtgtagattgttaccttaatattttttgctgggaccatctacctgccttatactacacttaggaaaaagtattacatatggtttattttgaaacttcaagtattattgccttaatgtctcttaaccctgttacacgctgcttgtagacatgttaatatagtaatacctttatgatatattgagtttaaggactactctttttctgttttatcatgtatgcattattttgtatatgtacagggcaagtaggtatataatttgataaagttgcaattgaaatattattaacagaagatgtaagaaatttctgcatggtctaaatctttgtgtactttatttgtaaattatttgccctggagttttagaaaatagtttctgaattttaaacttgctggattcatgcagccagctttgcaggttatcagagatcaaagattgtaataataattttgtaaattgtaagcaaaaagttatttttatattatatacagtctaattgttcatcctaattgttcctgttttcatctagtcagagattcagtaagtgccttggaacaatattgaattctcttagcttgtgtgtgtttctttaatatttgaactcaagtgggattagaagactatcaaaatacatgtatgtttcaggatatttgacctgtcattaaaaaaaacaaacagttttacagtg

SEQ ID NO: 11842 - DNA, 2848 bp, Homo sapiens
gtttcgccggccgcgcggccagatgaggggggcgatggagctggagcctgagctgctgttgcaggaggcccgcgagaacgtggaggcagcgcagagctaccggcgggagctgggtcaccggcttgaggggctgcgtgaggcgcggaagcagatcaaagaaagtgcatcacagacaagggatgttctcaaacagcattttaatgatttaaagggaacccttggaaagctcctggatgagcgattggtgacccttttgcaagaggtggacaccattgaacaggagaccattaaaccactagatgactgccagaagctcatagaacacggagtcaacactgcagaggacttagtccgagaaggtgaaatcgccatgcttggtggtgtgggagaagagaatgagaaactgtggagctttaccaaaaaggcttcgcacattcagttggacagcttaccagaagtacctttactggttgatgtgccttgtttatctgctcagttggatgactcaattcttaacatagtgaaagaccacatttttaagcatggaacagtagcatctcgcccaccagtacagatagaagaactaatagagaaacctggaggcatcattgtacgatggtgtaaggtggatgatgactttacagcccaagattacaggctccagtttcgtaaatgtacttcaaatcattttgaggatgtatatgtaggttctgaaactgaattcatagtattgcacatagaccccaacgttgattaccagttcagagtctgcgcccgaggagatggccgacaggagtggagtccttggagtgtcccccagataggtcattccacattggtgcctcatgagtggacagctggttttgaggggtacagtctgagcagtcgaagaaatatagcacttcggaacgattctgaatcatcgggtgttctctactccagagctccgacttatttctgtgggcagacattaacattcagagttgaaactgtgggacagccagacagaagagacagcataggagtgtgtgcagaaaaacaggatggatatgactctctgcagcgggatcaagctgtgtgcattagtacaaatggtgcagtttttgtcaatggaaaagaaatgacaaatcagttacccgcagttacttctgggtccactgtcacgtttgacattgaagccgtgactctaggaaccaccagtaataatgaaggtggacacttcaagcttcgagtaactataagttcaaataatagagaagtggtttttgactggttacttgatcagtcttgtggttctctttactttggatgctcatttttctatcctggatggaaagtgttagtgttttagatgtttgggtgcttggctttggttttcagggtctaacgtagctgtcctcagcccagcgtagttgtaattgctttaaaaacaaagttgaattcatctctaacttaggccattggaaagtgtttactggattcattttgtaatattttagcaaaaagagacttgaatgttgtggacaaaatcatacaattcagtcaattttatttttagcatactgttaaatatcacatcacaataaaaatcaaattggcattaaaagtatagaagatataggaagttctatacccttccactgtacttctcaaagttggttattagaccaggaaaacttaatgtaatattatttttaaaatcatcttaaaggatccaagtccatgtaactctttagaacaagaggaataggtcagatagaagaagctgtgtaatgtattaatacatccgttcatgtgctgtccacatgaatgtgttgactgtgctctccatgttcaggtatttgtaagcagtgttgacttttatcccctcttcagtaatctttaagtccccaaaacattataattttttctttttttgttgagacggagtctcactcttgtcactcaggctggagtgcagtggtgtgatctcagttcactgcaacctctgcctcccacgttcaagcgatcctcctgcctcagcctcctgagtagctgggattacaggtgtcggccaccacacctggctaatttttgtatttttagtagagacagggtttcaccatgttggccaggctggtctttaactcctgacctcaggtgttccacccacctcagccttccaaagtgctaggattacaggcgtgagccactgcagtgggccaatttttgtatttttttaaatgcttgaccaagtgtctaaaataggcaagtagtaccttttgttctttcattgcaatttgatacagtataggctacagtatttttacagggtaaaactagttatggcagtagtatgcacagcagtgttagccatttcgtatgtatgtaatatgcacgtgtgtatccaatctgcctgtgacatgcattttactctttgcagagaatgagctgcagtccagtttaatgtcagtttaataagtggtctctttttagcagagcaaaaaaatatagcgtaaatacttattttttttaaaaacttacttaaatttgtgtgtaaaatatttatttgaaggactttaatatgtaaaaataattgtcttctatgccaccctacagattctattttaatgtgaattatttttttcatttttaccagtagtaaaaaagtagaaaagcaagtatgatatttttgtaagataatttatttggggattcatgttcccctgttagacaatcatgaccttttctacttgtctttttatatataagtagtagatttccacttgtttagggattaagaagatgttctagaatgtagataccttgtccagccataggaatcaaaataaaaaactaaaaaagttca

SEQ ID NO: 11843 - DNA, 3179 bp, Homo sapiens
aagacgctagcgctgcgatggcggaggccgtggagcgcactgacgagctggtccgggagtacctgctcttccgcgggttcacgcacacactgcggcagctggacgccgagatcaaggcggacaaggagaaggggttccgggtggataagattgtggaccagctgcagcagttaatgcaggtgtatgacttggctgcccttcgggattattggagctacttggagcgtcggctcttcagccgcttggaggatatatacagacccacaatccacaagctgaaaaccagcctgtttcgattttatcttgtctacacaatccagacaaacagaaatgacaaggctcaggagttctttgcaaagcaggccacggaactccagaaccaggctgagtggaaggattggtttgtcctgcccttcctgccatccccggacaccaaccccacctttgctacctacttttctcgacagtgggctgacaccttcattgtgtccctgcacaacttcctgagcgtcctgtttcagtgcatgccagtccctgtgatcctgaactttgatgcggagtgtcagaggactaaccaggttcaagaagaaaatgaagttctgcgtcagaagctttttgcattgcaagctgaaatccaccgactgaagaaagaggagcaacagccagaagaggaagaggccttggtccaacacaaattgcctccttatgtctccaacatggaccgcctgggggactcggaacttgccatggtgtgcagccaaaggaatgcctccctctcccagtcacctcgtgtgggcttcctgtcctcgctgctgcctcagagtaagaagagcccctcaaggttgtcgcctgctcagggccctcctcaacctcagagctcggccaagaaagagtccttcggtggtcagggcaccaagggaagggacccgacgtccggagccaaggatgggaagagcctcctcagcgggctggccactggggagtccggttggtcacagcaccggcagcggcgcctgcaggaccatggcaaggagaggaaggagcttttctccacaaccacttcccagtgtgcagagaagaaaccagaagccagtggcccagaggctgagccctgcccagagctccacacggagccagtggagccactgactcgggcatcctcggcaggccctgagggtggaggagtccgccccgagcagccctttattgtgctgggacaggaggagtacggggaacaccactcatccatcatgcactgcagagtggactgctctgggaggagagtcgccagcttagacgtagatggggtcatcaaagtgtggtccttcaaccccatcatgcagaccaaagcatcctccatttccaaatcaccgctgctgtctttggaatgggccaccaaacgggacagactgctcttgctgggcagtggtgtgggaacagtgcgtctctatgacacggaagccaagaagaatctctgtgaaatcaatatcaacgacaacatgcccagaatcctgtctcttgcgtgcagccccaacggggcctctttcgtctgttcggcagcagctccgagcctcacttcccaggtggacttctcagcaccagacatcggcagcaagggcatgaaccaggttcctggcaggctgctgctgtgggacacgaaaaccatgaagcagcagctccagttctccctggatccagaacccattgctatcaactgtacagccttcaatcacaacgggaacctgctggtcacaggggcagctgatggcgtcatccggctgtttgacatgcagcagcatgagtgcgcgatgagctggagggcccactacggggaggtctactctgtggagttcagctatgatgagaacaccgtgtacagcatcggcgaggacgggaagttcatccagtggaacatccacaagagtggcctcaaggtatccgagtacagcctcccctcagatgccacgggcccctttgtgctgtctggatacagcggctacaagcaggttcaagtccccaggggccgactcttcgcttttgactcggagggaaattacatgctgacatgttctgccacaggcggcgtcatctacaagctgggtggcgatgagaaggttctggagagctgcttgagcctaggtggccaccgagcccctgtggtcaccgtggactggagcactgccatggactgtgggacctgcctcaccgcctccatggatggcaagatcaagctgaccaccctcctggcccataaagcctgatgacttgccccaagggccacccgaggaagcagtattatctgcggtggggggaggagatataggacaggaaaaccacgtgctccactccagctccctgccagtgcagtgactctgcagggaaagactggcaaggaggctcaggtgcttccatctgtggtgactggaatgggacccacgtggagtaggtgacatatgcttcccagagactggtattgtggctgtgccaggagtacatgtgagactatgggaggaaagctccggaagaaggagaaacattgcagtggctactgtgttggcccagtagaaattgacagtattttgtatatatgtgcccatttatctttttcttttttaaaaaaagagaatactcttgtggtcccctgatgtctctttctaggatgtgtgtcactttgcttcagtgacagccctcccacccagcctggctctgctggccccgaactgaacctctccaggctctcctgttgctttgccatggagccaggtcagctctctgtctgttctgctgggtaacaaggtttggcagttcctgtttctctgggcttaagtcaaggccacagaattctttttcttccctgaaagctggcagcttttgttacagaagattctcaggatgaaggcaggggctgaggcctctgctactggctgcccctttccatccagtggctgctgtttcccaagacaggctaagcgtttcttatctgaaatgcttgggacaggagtgttacagattttggattttttcagactttggaatatttgcatatatacataatgaggtatcttggtaggtctcatgtctaaacatgaaattcattcatgttttatatataccttatacatgtagcctgaaggtaactctatacagtattttaaataattttgtacatgaaacaaagt

SEQ ID NO: 11844 - DNA, 3449 bp, Homo sapiens
acgtgggaggaagtgctggtgccctctgccgctgctcccgtctctttggttacgctcgtcagccggtcggccgccgcctccagccgtgtgccgctatgggagtcccggcgttcttccgctggctcagccgcaagtacccgtccatcatagtcaactgcgtggaagagaagccaaaagaatgcaatggtgtaaagattccagttgatgccagtaaacctaatccaaatgatgtggagtttgataatctgtatttggatatgaatggaatcatccatccctgtactcatcctgaagacaaaccagcaccaaaaaatgaagatgaaatgatggttgcaatttttgagtacattgacagacttttcagtattgtaagaccaagaagacttctctacatggcaatagatggagtggcaccacgtgctaaaatgaaccagcagcgttcaaggaggttcagggcatcaaaagaaggaatggaagcagcagtcgagaagcagcgagtcagggaagaaatattggcaaaaggtggctttcttcctccagaagaaataaaagaaagatttgacagcaactgtattacaccaggaactgaattcatggacaatcttgctaaatgccttcgctattacatagctgatcgtttaaataatgaccctgggtggaaaaatttgacagttattttatctgatgctagtgctcctggtgaaggagaacataaaatcatggattacattagaaggcaaagagcccagcctaaccatgacccaaatactcatcattgtttatgtggagcagatgctgatctcattatgcttggccttgccacacatgaaccgaactttaccattattagagaagaattcaaaccaaacaagcccaaaccatgtggtctttgtaatcagtttggacatgaggtcaaagattgtgaaggtttgccaagagaaaagaagggaaagcatgatgaacttgccgatagtcttccttgtgcagaaggagagtttatcttccttcggcttaatgttcttcgtgagtatttggaaagagaactcacaatggccagcctaccattcacatttgatgttgagaggagcattgatgactgggttttcatgtgcttctttgtgggaaatgacttcctccctcatttgccatcgttagagattagggaaaatgcaattgaccgtttggttaacatatacaaaaatgtggtacacaaaactgggggttaccttacagaaagtggttatgtcaatctgcaaagagtacagatgatcatgttagcagttggtgaagttgaggatagcatttttaaaaagagaaaggatgatgaggacagttttagaagacgacagaaagaaaaaagaaagagaatgaagagagatcaaccagctttcactcctagtggaatattaactcctcatgccttgggttcaagaaattcaccaggttctcaagtagccagtaatccgagacaagcagcctatgaaatgaggatgcagaataactctagtccttcgatatctcctaatacgagtttcacatctgatggctccccgtctccattaggaggaattaagcgaaaagcagaagacagtgacagtgaacctgagccagaggataatgtcaggttatgggaagctggctggaagcagcggtactacaagaacaaatttgatgtggatgcagctgatgagaaattccgtcggaaagttgtgcagtcgtacgttgaaggactttgctgggttcttagatattattaccagggctgtgcttcctggaagtggtattatccatttcattatgcaccatttgcttcagactttgaaggcattgcagacatgccatctgattttgagaagggtacgaaaccgtttaaaccactagaacaacttatgggggtatttccagctgcaagtggtaattttctacctccatcatggcggaagctcatgagtgatcctgattctagtataattgacttctatcctgaagattttgctattgatttgaatgggaagaaatatgcatggcaaggtgttgctctcttgccattcgtggatgagcgaaggctacgagctgccctagaagaggtatacccagacctcactccagaagagaccagaagaaacagccttggaggtgatgtcttatttgtggggaaacatcacccactccatgacttcattttagagctgtaccagacaggttccacagagccagtggaggtaccccctgaactatgtcatgggattcaaggaaagttttctttggatgaagaagccattcttccagatcaaatagtatgttctcctgttcctatgttaagggatctgacacagaacactgtagtcagtattaattttaaagacccacagtttgctgaagattacatttttaaagctgtaatgcttccaggagcaagaaagccagcagcagtactgaaacctagtgactgggaaaaatccagcaatggacggcagtggaagcctcagcttggctttaaccgtgaccggaggcctgtgcacctggatcaggcagccttcaggactttgggccatgtgatgccaagaggctcaggaactggcatttacagcaatgctgcaccaccacctgtgacttaccagggaaacttatacaggccgcttttgagaggacaagcccagattccaaaacttatgtcaaatatgaggccccaggattcctggcgaggtcctcctccccttttccagcagcaaaggtttgacagaggcgttggggctgaacctctgctcccatggaaccggatgctgcaaacccagaatgcagccttccagccaaaccagtaccagatgctagctgggcctggtgggtatccacccagacgagatgatcgtggagggagacagggatatcccagagaaggaaggaaataccctttgccaccaccctcaggaagatacaattggaattaagcttttgtaaagctttcccaaatcctttcatcattctacagttttatgctatttgtggaaagatttctttctcaagtagtagtttttaataaaactacagtactttgtgtatttcttttaactgtgtatatttctactgatctgatctcactgtttatgttgctttccaaagatgtatgttgcataatacagtggatctgaatttattattgcttataaaacacatttgatggaataggagtactggtttttcataatggttaaaaatgaaaccagctgtggatttcaaaacacagtgtattctagatcatctaagatccatgctgatttttattgcacaagaattaggtttgaactcgagctggaacctcagcaaactagagtatatattgttcagtatttctttggaaacatttcattaatgtacttgtcttacagaaatttctgaactttagtaaaaaaaaataaagttaaacttttaaaactcaaaaaaaaaaaaaa

SEQ ID NO: 11845 - DNA, 3245 bp, Homo sapiens
cgcaggtcgggaggacgagcaccgagtcgagggctcgctcgtctgggccgcccgagagtcttaatcgcgggcgcttgggccgccatcttagatggcgggagtaagaggaaaacgattgtgaggcgggaacggctttctgctgccttttttgggccccgaaaagggtcagctggccgggctttggggcgcgtgccctgaggcgcggagcgcgtttgctacgatgcgggggctgctcggggctccgtcccctgggctggggacgcgccgaatgtgaccgcctcccgctccctcacccgccgcggggaggaggagcgggcgagaagctgccgccgaacgacaggacgttggggcggcctggctccctcaggtttaagaattgtttaagctgcatcaatggagcacatacagggagcttggaagacgatcagcaatggttttggattcaaagatgccgtgtttgatggctccagctgcatctctcctacaatagttcagcagtttggctatcagcgccgggcatcagatgatggcaaactcacagatccttctaagacaagcaacactatccgtgttttcttgccgaacaagcaaagaacagtggtcaatgtgcgaaatggaatgagcttgcatgactgccttatgaaagcactcaaggtgaggggcctgcaaccagagtgctgtgcagtgttcagacttctccacgaacacaaaggtaaaaaagcacgcttagattggaatactgatgctgcgtctttgattggagaagaacttcaagtagatttcctggatcatgttcccctcacaacacacaactttgctcggaagacgttcctgaagcttgccttctgtgacatctgtcagaaattcctgctcaatggatttcgatgtcagacttgtggctacaaatttcatgagcactgtagcaccaaagtacctactatgtgtgtggactggagtaacatcagacaactcttattgtttccaaattccactattggtgatagtggagtcccagcactaccttctttgactatgcgtcgtatgcgagagtctgtttccaggatgcctgttagttctcagcacagatattctacacctcacgccttcacctttaacacctccagtccctcatctgaaggttccctctcccagaggcagaggtcgacatccacacctaatgtccacatggtcagcaccaccctgcctgtggacagcaggatgattgaggatgcaattcgaagtcacagcgaatcagcctcaccttcagccctgtccagtagccccaacaatctgagcccaacaggctggtcacagccgaaaacccccgtgccagcacaaagagagcgggcaccagtatctgggacccaggagaaaaacaaaattaggcctcgtggacagagagattcaagctattattgggaaatagaagccagtgaagtgatgctgtccactcggattgggtcaggctcttttggaactgtttataagggtaaatggcacggagatgttgcagtaaagatcctaaaggttgtcgacccaaccccagagcaattccaggccttcaggaatgaggtggctgttctgcgcaaaacacggcatgtgaacattctgcttttcatggggtacatgacaaaggacaacctggcaattgtgacccagtggtgcgagggcagcagcctctacaaacacctgcatgtccaggagaccaagtttcagatgttccagctaattgacattgcccggcagacggctcagggaatggactatttgcatgcaaagaacatcatccatagagacatgaaatccaacaatatatttctccatgaaggcttaacagtgaaaattggagattttggtttggcaacagtaaagtcacgctggagtggttctcagcaggttgaacaacctactggctctgtcctctggatggccccagaggtgatccgaatgcaggataacaacccattcagtttccagtcggatgtctactcctatggcatcgtattgtatgaactgatgacgggggagcttccttattctcacatcaacaaccgagatcagatcatcttcatggtgggccgaggatatgcctccccagatcttagtaagctatataagaactgccccaaagcaatgaagaggctggtagctgactgtgtgaagaaagtaaaggaagagaggcctctttttccccagatcctgtcttccattgagctgctccaacactctctaccgaagatcaaccggagcgcttccgagccatccttgcatcgggcagcccacactgaggatatcaatgcttgcacgctgaccacgtccccgaggctgcctgtcttctagttgactttgcacctgtcttcaggctgccaggggaggaggagaagccagcaggcaccacttttctgctccctttctccagaggcagaacacatgttttcagagaagctgctgctaaggaccttctagactgctcacagggccttaacttcatgttgccttcttttctatccctttgggccctgggagaaggaagccatttgcagtgctggtgtgtcctgctccctccccacattccccatgctcaaggcccagccttctgtagatgcgcaagtggatgttgatggtagtacaaaaagcaggggcccagccccagctgttggctacatgagtatttagaggaagtaaggtagcaggcagtccagccctgatgtggagacacatgggattttggaaatcagcttctggaggaatgcatgtcacaggcgggactttcttcagagagtggtgcagcgccagacattttgcacataaggcaccaaacagcccaggactgccgagactctggccgcccgaaggagcctgctttggtactatggaacttttcttaggggacacgtcctcctttcacagcttctaaggtgtccagtgcattgggatggttttccaggcaaggcactcggccaatccgcatctcagccctctcagggagcagtcttccatcatgctgaattttgtcttccaggagctgcccctatggggcggggccgcagggccagccttgtttctctaacaaacaaacaaacaaacagccttgtttctctagtcacatcatgtgtatacaaggaagccaggaatacaggttttcttgatgatttgggttttaattttgtttttattgcacctgacaaaatacagttatctgatggtccctcaattatgttattttaataaaataaattaaattt

SEQ ID NO: 11846 - DNA, 7444 bp, Homo sapiens
gctggctgcggaaggggagggggggggagaaggcgattggatgcggcggcggcggcggatcccggagagccccggagtgagcggagtagcgagtcggcaacccggaggggtagaaatatttctgtcatggctcattcaaagactaggaccaatgatggaaaaattacatatccgcctggggtcaaggaaatatcagataaaatatctaaagaggagatggtgagacgattaaagatggttgtgaaaacttttatggatatggaccaggactctgaagaagaaaaggagctttatttaaacctagctttacatcttgcttcagatttttttctcaagcatcctgataaagatgttcgcttactggtagcctgctgccttgctgatattttcaggatttatgctcctgaagctccttacacatcccctgataaactaaaggatatatttatgtttataacaagacagttgaaggggctagaggatacaaagagcccacaattcaataggtatttttatttacttgagaacattgcttgggtcaagtcatataacatatgctttgagttagaagatagcaatgaaattttcacccagctatacagaaccttattttcagttataaacaatggccacaatcagaaagtccatatgcacatggtagaccttatgagctctattatttgtgaaggtgatacagtgtctcaggagcttttggatacggttttagtaaatctggtacctgctcataagaatttaaacaagcaagcatatgatttggcaaaggctttactgaagaggacagctcaagctattgagccatatattaccaatttttttaatcaggttctgatgcttgggaaaacatctatcagcgatttgtcagagcatgtctttgacttaattttggagctctacaatattgatagtcatttgctgctctctgttttaccccagcttgaatttaaattaaagagcaatgataatgaggagcgcctacaagttgttaaactactggcaaaaatgtttggggcaaaggattcagaattggcttctcaaaacaagccactttggcagtgctacttgggcaggtttaatgatatccatgtaccaatccgcctggaatgtgtgaaatttgctagccattgtctcatgaaccatcctgatttagcaaaagacttaacagagtatcttaaagtgaggtcacatgaccctgaggaagctattagacatgatgttattgtgtcaatagttacagctgctaaaaaggatattcttctggtcaatgatcacttacttaattttgtgagagagagaacattagacaaacgatggagagtacgcaaagaagccatgatgggacttgcccaaatttataagaaatatgctttacagtcagcagctggaaaagatgctgcaaaacagatagcatggatcaaagacaaattgctacatatatattatcaaaatagtattgatgatcgactacttgttgaacggatctttgctcaatacatggttcctcacaatttagaaactacagaacggatgaaatgcttatattacttgtatgccacactggatttaaatgctgtgaaagcattgaatgaaatgtggaaatgtcaaaatctgctccgacatcaagtaaaggatttgcttgacttgattaagcaacccaaaacagatgccagtgtcaaggccatattttcaaaagtgatggttattacaagaaatttacctgatcctggtaaggctcaggatttcatgaagaaattcacacaggtgttagaagatgatgagaaaataagaaagcagttagaagtacttgttagtccaacatgctcctgcaagcaggctgaaggttgtgtgcgtgaaataactaagaagttgggcaaccccaaacagcctacaaatcctttcctggaaatgatcaagtttctcttggagaggatagcacctgtgcacatagataccgaatctatcagtgctcttattaaacaagtgaacaaatcaatagatggaacagcagatgatgaagatgagggtgttccaactgatcaagccatcagagcaggtcttgaactgcttaaggtactctcatttacacatcccatctcatttcattctgctgaaacatttgaatcattactggcttgtctgaaaatggatgatgaaaaagtagcagaagctgcactacaaattttcaaaaacacaggaagcaaaattgaagaggattttccacacatcagatcagccttgcttcctgttttacatcacaaatctaaaaaaggacccccccgtcaagccaaatatgccattcattgtatccatgcgatattttctagtaaagagacccagtttgcacagatatttgagcctctgcataagagcctagatccaagcaacctggaacatctcataacaccattggttactattggtcatattgctctccttgcacctgatcaatttgctgctcctttgaaatctttggtagctactttcattgtgaaagatcttctcatgaatgatcggcttccagggaaaaagacaactaaactttgggttccagatgaagaagtatctcctgagacaatggtcaaaattcaggctattaaaatgatggttcgatggctacttggaatgaaaaataatcacagtaaatcaggaacttctaccttaagattgctaacaacaatattgcatagtgatggagacttgacagaacaggggaaaattagtaaaccagatatgtcacgtctgagacttgctgctgggagtgctattgtgaagctggcacaagaaccctgttaccatgaaatcatcacattagaacaatatcagctatgtgcattagctatcaacgatgaatgctatcaagtaagacaagtgtttgcccagaaacttcacaaaggcctttcccgtttacggcttccacttgagtatatggcaatctgtgccctttgtgcaaaagatcctgtaaaggagagaagagctcatgctaggcaatgtttggtgaaaaatataaatgtaaggcgggagtatctgaagcagcatgcagctgttagtgaaaaattattgtctcttctaccagagtatgttgttccatatacaattcaccttttggcacatgacccagattatgtcaaagtacaggatattgaacaacttaaagatgttaaagaatgtctttggtttgttctggaaatattaatggctaaaaatgaaaataacagtcacgcttttatcagaaagatggtagaaaatattaaacaaacaaaagatgcccaaggaccagatgatgcaaaaatgaatgaaaaactgtacactgtgtgtgatgttgccatgaatatcatcatgtcaaagagtactacatacagtttggaatctcctaaagacccggtactaccagctcgtttcttcactcaacctgacaagaatttcagtaacaccaaaaattatctgcctcctgaaatgaaatcatttttcactcctggaaaacctaaaacaaccaatgttctaggagctgttaacaagccactttcatcagcaggcaagcaatctcagaccaaatcatcacgaatggaaactgtaagcaatgcaagcagcagctcaaatccaagctctcctggaagaataaaggggaggcttgatagttctgaaatggatcacagtgaaaatgaagattacacaatgtcttcacctttgccggggaaaaaaagtgacaagagagacgactctgatcttgtaaggtctgaattggagaagcctagaggcaggaaaaaaacgcccgtcacagaacaggaggagaaattaggtatggatgacttgactaagttggtacaggaacagaaacctaaaggcagtcagcgaagtcggaaaagaggccatacggcttcagaatctgatgaacagcagtggcctgaggaaaagaggctcaaagaagatatattagaaaatgaagatgaacagaatagtccgccaaaaaagggtaaaagaggccgaccaccaaaacctcttggtggaggtacaccaaaagaagagccaacaatgaaaacttctaaaaaaggaagcaaaaaaaaatctggacctccagcaccagaggaggaggaagaagaagaaagacaaagtggaaatacggaacagaagtccaaaagcaaacagcaccgagtgtcaaggagagcacagcagagagcagaatctcctgaatctagtgcaattgaatccacacagtccacaccacagaaaggacgaggaagaccatcaaaaacgccatcaccatcacaaccaaaaaaaaatgtccgtgtaggacgctccaaacaagcagctactaaggaaaatgattcaagtgaagaagtagatgtgtttcagggtagctctcctgtcgatgatattccacaggaagaaacagaggaggaggaagtttctacagtaaatgtacggcggcgaagtgctaaaagggaacggcgatgaacaaatgtaattaataactttctctgtgaaagctttggaaaaatcttttttttttttttttttttttggtcaagcttgaggctgaataaagcctttgatgcacaaaatgggactgctgaagagtggacagttggaccttactttggtgaccccatacatttgtggtcacatgctttagccatacacatggtaacattgactatggagtcttgtgaaagtgtaatgtgcgatggctatgtagacataaagaagaaacttgtaaatatcttttttcttttttttaatgtttctgatttctgaagtgcttgtatagcttttatctgcggctttaaactgacagtacccgactgtttattggatctattgatttgaaaagaatttgttaggatagatcttaagcagtaatctgtcagtgtttgtatttgtattctctgcaattttactgtgaaaaaaaatttgttttcaacaattggtgtcattttcttgatgtcactatttgttggagagttaaatggtctcttccctttgtgtatcttacctagtgtttactcctgggcacccttaatcttcagaggtgctaaattgtctgccattacaccagaaggatgcctctgataggaggacaaccatgcaaattgtgaaatagtcctgaagttcttggattactttacacctcagtattgatttgtcccagaattttctggcctttcatggcaatgaaaattttaagaagaaagatttaaagtattttaattttaaagagtgtgttataaaataatgtactgaattctttatcccattttatcatcctttcagtttttattaatctactgtatcaataaaattctgtaatttgaatgagtttttaatagtctagaatgttattgtgtatagatatttcctcttgaacgttatgttcagaaaatgcaaattacactataatataaaacctgatatatacacattagaaatattccagttctccgtaacagtgtaaagttaatcagaaagaaaaaattttattgatgcagtgtgtctttataaagctgttcttgaaagccaagtgttttgtattttatagtgagttgcatgtttttgaaaaaaagtgctgaaaatgggatgtgctgttttctgtaaattcatatttagccatagtatatgatagattgccccataacatagtttttcatcaagagtttattattgtactttattttggagccaaaaaattgattctggggggtgggggcagcgtagaagtggtatatccaagtatatcagctactgtagttgtcacagtcttgtgaactttgaatgaaattccactttgtccagattgggagaagtggaaatttatttggatttagagcaggtctttttttttcttcattgtaatctgcaaaatgtagaaataaattacttaaggcagtatcctttatacagttgtataaactgtattttgaaccaaaacatataggttactacttaatgcttacctaatttcattttagtattttaggtgctgttatgttttttcatggttaacaccagaggggaaaaaatcatattctaacttattaaatttatcacattgaatagtggaacattttcatatgatacaccattatgtttaagatatatttccaagattggttataatagatggggcatataataaagaagctactattttggaaaatgacattttactatttgccaatgtatattgcaattgatgtgattatttttcttttaaagatttgtttgtgtttatgaaacagccatttattttttaaaaagtgttttgaattgtgtcttaatctctccatattcaactattcttcatttacaacaatagtgacaccagtaattatgagaggctgtcatatatcaaagcagctcaggtgggatcaacatacattggttttgaaatgtttccttagctcggttctcccaaacacataatttctgtttcagcagtacaaaggcatgttttaaaatctataacataaagaataaggaatagctttgtatttttgtcattgattaaattgcaccagaaatgtttatggaaatattaagaacattttataaaacatacgaaaaagtgattgtgaaggatttttatttgcatgattatagttaagcaaatttcatttcacatttttgtaatgctgtacagcagttcacaaaaaaatgttcattgtagattttgttatgttcaatgccaatgagtctgtaattttacgacctgtctgttctttttttgggtggattacgatgtaaatttttcttttctttctttctttttttttttttttgtgtagaaaaataggtgcaataatgatcaaagttttgatgtcttgagtctccatcttaggggattatcttacgtttaagcttaacatttcatgtagtaagatttggagagccacatactttacagtaaaattaagtgtgtataaaacattaattgctaacaattgttagcaaactatttcagtgataatgttcattttgaaaatatgtactgtataacattaagaaaatatttaactccctgtaacaagttccattatgaaaatcttattcctcagtgaggttatcttgctgcactctgtagcaaatttgtttaatctacattataataaaatttcttgctgcagtgcaacaggaggctttttcagtgatcttcactgtatatgtaaattacaaatgtggctgtaaaacttattccaggtattaaaggttaaattgctttctatatcttcttataacttgtaagtctgatttttaagatttccttttgtccacttgtaagaatgtcaggaatttaagaatttgtttaaattaggcatatctctgccatcacatagtattatgtcaccataatgaacaattgctatttaaatagataaccaattttcagacacatttttggatttctgtgaagttgaataaacataaaagctaa

SEQ ID NO: 11847 - DNA, 2325 bp, Homo sapiens
acctcattcatttctaccggtctctagtagtgcagcttcggctggtgtcatcggtgtccttcctccgctgccgcccccgcaaggcttcgccgtcatcgaggccatttccagcgacttgtcgcacgcttttctatatacttcgttccccgccaaccgcaaccattgacgccatgtcgggttattcgagtgaccgagaccgcggccgggaccgagggtttggtgcacctcgatttggaggaagtagggcagggcccttatctggaaagaagtttggaaaccctggggagaaattagttaaaaagaagtggaatcttgatgagctgcctaaatttgagaagaatttttatcaagagcaccctgatttggctaggcgcacagcacaagaggtggaaacatacagaagaagcaaggaaattacagttagaggtcacaactgcccgaagccagttctaaatttttatgaagccaatttccctgcaaatgtcatggatgttattgcaagacagaatttcactgaacccactgctattcaagctcagggatggccagttgctctaagtggattggatatggttggagtggcacagactggatctgggaaaacattgtcttatttgcttcctgccattgtccacatcaatcatcagccattcctagagagaggcgatgggcctatttgtttggtgctggcaccaactcgggaactggcccaacaggtgcagcaagtagctgctgaatattgtagagcatgtcgcttgaagtctacttgtatctacggtggtgctcctaagggaccacaaatacgtgatttggagagaggtgtggaaatctgtattgcaacacctggaagactgattgactttttagagtgtggaaaaaccaatctgagaagaacaacctaccttgtccttgatgaagcagatagaatgcttgatatgggctttgaaccccaaataaggaagattgtggatcaaataagacctgataggcaaactctaatgtggagtgcgacttggccaaaagaagtaagacagcttgctgaagatttcctgaaagactatattcatataaacattggtgcacttgaactgagtgcaaaccacaacattcttcagattgtggatgtgtgtcatgacgtagaaaaggatgaaaaacttattcgtctaatggaagagatcatgagtgagaaggagaataaaaccattgtttttgtggaaaccaaaagaagatgtgatgagcttaccagaaaaatgaggagagatgggtggcctgccatgggtatccatggtgacaagagtcaacaagagcgtgactgggttctaaatgaattcaaacatggaaaagctcctattctgattgctacagatgtggcctccagagggctagatgtggaagatgtgaaatttgtcatcaattatgactaccctaactcctcagaggattatattcatcgaattggaagaactgctcgcagtaccaaaacaggcacagcatacactttctttacacctaataacataaagcaagtgagcgaccttatctctgtgcttcgtgaagctaatcaagcaattaatcccaagttgcttcagttggtcgaagacagaggttcaggtcgttccaggggtagaggaggcatgaaggatgaccgtcgggacagatactctgcgggcaaaaggggtggatttaatacctttagagacagggaaaattatgacagaggttactctagcctgcttaaaagagattttggggcaaaaactcagaatggtgtttacagtgctgcaaattacaccaatgggagctttggaagtaattttgtgtctgctggtatacagaccagttttaggactggtaatccaacagggacttaccagaatggttatgatagcactcagcaatacggaagtaatgttccaaatatgcacaatggtatgaaccaacaggcatatgcatatcctgctactgcagctgcacctatgattggttatccaatgccaacaggatattcccaataagactttagaagtatatgtaaatgtctgtttttcataattgctctttatattgtgtgttatctgacaagatagttatttaagaaacatgggaattgcagaaatgactgcagtgcagcagtaattatggtgcactttttcgctatttaagttggatatttctctacattcctgaaacaatttttaggttttttttgtactagaaaatgcaggcagtgttttcacaaaagtaaatgtacagtgatttgaaatacaataatgaaggcaatgcatggccttccaataaaaaatatttgaagactgaaaaaaaaaa

SEQ ID NO: 11848 - DNA, 2525 bp, Homo sapiens
agccggccgctaagaagccgaaagatgtccaggtcgggcgcggcggctgagaaggcggactccagacagcgaccccagatgaaggtaaatgaatataaagaaaatcaaaacatcgcttatgtgtctctgagaccagcacagactacagttttaataaaaacagctaaggtctatcttgcccccttttcactcagtaattaccagctagaccagcttatgtgccccaaatccctatcagaaaagaattctaacaatgaagtggcgtgtaagaagactaaaataaagaaaacttgcagaaggattatacctccaaagatgaaaaacacatcttccaaggcagaatccacgctgcaaaattcatcctcagctgttcatactgaaagtaacaagctacaacccaagagaacggcagatgcgatgaatctcagtgttgatgtggaaagtagtcaggatggagacagtgatgaagataccacaccagccctggatttttcgggattgtcaccctacgaaaggaagagactgaagaacatatcagaaaacgcagacttttttgcttctcttcagttgtctgagtctgctgcaagactccgtgaaatgatagagaagagacagcctcctaaatccaaaagaaagaagcctaagagagaaaatgggattggatgtagaaggtcaatgcgattactaaaagttgatccttcgggagtttcattaccagcagctccaacaccgccgacattagtagcagatgaaactcctttgttacctcctgggcctttagaaatgacttctgaaaatcaagaagacaacaatgaacgatttaaaggatttctgcacacatgggcaggaatgagcaagccaagtagtaagaacactgagaagggattatctagcattaaaagctacaaagccaatttaaatggcatggtcattagtgaagataccgtttacaaagttaccacaggcccaatattctctatggctctccatccatcagaaactagaactttggtagcagttggggccaaatttgggcaagttggactttgtgatttgacccagcaacctaaagaagatggagtttatgtttttcacccccatagtcagccagttagctgtctttacttctcacccgccaatccggcccacatactgtcactgagctatgatggcacgttacgctgtggggatttttccagggctatttttgaagaggtgtatagaaatgaaagaagtagcttttcctccttcgacttcttggcagaagatgcctccactttaatagtaggacactgggatggaaatatgtcactggtggatagacggacacctggaacttcttatgagaaacttaccagttcttctatgggaaaaataagaactgttcatgtccacccagtgcatagacagtattttatcactgccggattgagggatactcatatttatgatgcaaggcgattgaattccaggagaagtcagcctttgatttctttgactgaacatacaaagagcattgcttccgcctatttttcacctcttactggtaacagagtggtgaccacatgtgctgattgtaatctgagaatttttgacagcagctgtatatcttctaagattccgctcctcaccaccatcaggcacaacactttcactgggcgatggctgaccaggttccaagccatgtgggatcctaaacaagaagactgtgtcatagttggcagcatggcccatccacgacgggtagaaatcttccatgagacaggaaagagggtgcattcgtttggtggagaataccttgtctctgtgtgttccatcaatgccatgcacccaactcggtatattttggctggaggtaattccagcgggaagatacatgtttttatgaatgaaaaaagctgctgagtttttggtttaggaacatcaatttgttcaaattgaccactgtctaaggagcctagtaatcggcgtgccttagtgtgtttatgtggtaatgtgttacatttagcaattataacattgttttattaataagactataagaagagtgtacttttagtaagggagaagtcttggagggttgcttctgcaggacggggagggaatttgaggggaggctgaggtgccgtcaggactttttttttttttttttttttgagatggagttttgctcttgttgcccaggctggagtgcaatagcgcgatcttggctcaccgcaacctccgcctcccaggttcaagcgattctcctgcctcagactcctaagtagctgggattacaggcacctgccaccacgcctggctatttttttgtatttttagtagagatggggtttcatcatgttggccaggctggtctcgagctcctgacctcaggtgatctgcccgcctcggcctccaaaagtgctggaattacaggcgtgagccaccatgcctggccatcagaacttgtaatcaagacagtatgttgagaaattctaacattataaattacaaagctttgactattaaagtttttgtgatct

SEQ ID NO: 11849 - DNA, 3349 bp, Homo sapiens
ctcagcgtagggctgtgagggcgcagtccaccgccaggagccttccggtttctgcgcggtgcgcgacctcgtcccgaagcctggggatacaccctctcgagagcccgctgtcgccctccgttaaggtcgaacccctcacagttgctgtgggcaactccagcccaacattccctcgctctggttctcgccccattgggaaactcggccccacgcttcccacttttctggatgaggtgtcccctttctccccactaaaatgtcaaataacctacggagggtcttcctgaaacccgcagaggaaaattcaggcaacgcctcgcgttgtgtttcaggctgcatgtaccaagtagttcagacgattggctcggatggaaaaaatcttctgcaattacttccaattcctaagtcttctggaaatcttataccactagttcaatcttcagtcatgtctgatgctttgaaagggaatacaggaaaaccagttcaagttacttttcagactcagatttccagctcttccacaagtgcatcagttcaattgcccatttttcagccagccagttcttcaaactattttcttacaagaacagtagatacatcagaaaaaggtagagttacttctgtgggaactggaaatttttcttcatcagtttctaaagttcagagtcatggtgtgaaaattgatggactcaccatgcaaacatttgctgttcctccctcaacacaaaaagactcatcttttattgtagttaatacccagagtcttccagtgactgtgaagtctccagttttgccttctgggcatcatttacagattccagcccatgctgaagtgaaatctgtaccagcgtcatcattgcctccttcagtgcagcaaaagatacttgcaactgccaccaccagtacctcaggaatggttgaggcctcccaaatgccaaccgttatttatgtatctcctgtaaatacagtgaaaaatgtagttaccaagaactttcaaaacatttacccaaaacctgttacagaaatagcaaagccagtaatactaaataccacacaaattccaaagaatgttgctacagagacacaattgaaaggtggtcagcattctcaagctgctccagtgaaatggattttccaagataatctacagccttttacgccatctcttgttcctgttaagtcttcaaataatgtggcttcaaagattttaaaaacttttgtagataggaaaaatttgggagataatactataaatatgccaccattgagtaccatcgatcctagtgggacgcgatccaaaaatatgcctattaaagataatgctttggttatgtttaatgggaaagtctatctgttggctaaaaaggggacagatgttctgccatcacaaattgaccaacagaattctgtttctcctgatactccagtaagaaaagacacgttacagacagtgagttcaagtccagtcacagaaatatccagagaggttgtaaatattgttttggctaaaagtaaatcttcccagatggagacaaaatcactttccaatacccagcttgcttccatggccaatctaagggcagagaagaataaagtggagaaaccatctccttctaccacaaatccacatatgaaccaatccagtaactacttaaaacagagtaagactttattcacaaatccaatctttccagttggatttagtacaggacacaatgcccccagaaaagtaacagccgtcatttatgctagaaaaggaagtgtcctccagagcatagagaaaataagttcctctgttgatgcaacaactgttacttcacaacagtgtgttttcagagaccaagaaccaaagatccataatgagatggcatcaacatcagataaaggtgcccaaggaagaaatgacaagaaagattctcaaggaagaagtaataaggcattacatctgaagagtgatgctgaatttaaaaagatatttggccttactaaggatttgagagtgtgccttactcgaattcctgaccatttgacctctggagaaggtttcgattcctttagcagtttggtaaagagtggtacttacaaagagacagagtttatggtgaaggaaggagagagaaaacagcagaattttgataagaaaagaaaagcaaaaactaataagaagatggatcacataaagaagagaaaaacagagaatgcttataacgcaatcataaatggggaagctaatgtcaccggttcccaactcctaagcagtattttaccaacttcagatgtgtcacaacataacattctcacgagtcacagcaaaaccagacaagaaaagagaactgagatggaatactatacccatgagaagcaagagaaaggcactttgaattcaaatgcagcttatgaacaaagtcatttcttcaataaaaattataccgaagatattttcccagtgacaccaccggagttagaagaaaccattcgagatgaaaaaataagaagacttaagcaggtgctgagagagaaagaagcagctcttgaagaaatgcgtaagaagatgcaccaaaaataaaatctcctgtaaagacttcagtgaaatagctgttttttaaaatatacttcagcattaataagttaattgtaggtgtgttctgaaagtgtctttgaatatgaagcttgttttttcatcagtcgattgtacaactttaaggaatacagaaaaggttgattcacatatgacttgtgaataatttacatggggtatctatacctttgtcttagatacctttttttggaaggataaattttatatttttctattattttaactagaattctccaagtttgaatatttgggcagggtttttgttattgtttgtatctttacctaaattgctcaggcattattccagcagtagatagtgactgtgtattactgaaattttacaattcaagagaggaaatcagctccaaacttagcttttccagtggatttgtatatgtacttgctttatctctttacccttaaaatgatgataccttgtattcaccattgttttttttaatgtcgtgaaataatatgtattatggcaacattatttaaacattcaaacatttctcaagaatgagcaacatttgtaactttacaatgtaattttatataatccaaaggtattttagaattcaggccatttgatgttttgtttgcttatagtgatgtgttcccaggcaaatgctgctttttttttttttgggactatgtacatacgttactgagattgtgtaaaaagtagatcctgaacagttatcacatttaatatttcttaaactgtaaaagtgtaaaaaaaaaaaaaaa

SEQ ID NO: 11850 - DNA, 1928 bp, Homo sapiens
agttgcacagctgcctggtaggtgactggaggcattgagcagtgtgctcactggtatttcgctgatgtggccccaaccccgcctccctccccaccccgcgatgtcagaaaaaacacaacaggggaaattggccgcagccaagaaaaagttaaaagcatattggcagaggaagagccctggcattccagcaggagctaacaggaaaaagaaaatcaatggcagtagccctgacacagccacttctggtggttaccactcacctggggattcagcaacaggtatctacggggagggccgtgcatcctctactaccctggaggatctggagagccagtaccaagaactagcagtggccctggattcaagctccgcaataatcagtcaactcactgaaaacatcaattcactggttcgcacatctaaggaggagaagaagcatgagatacatctggtacagaagcttgggaggagcttgttcaaactcaaaaaccagacggctgaacccctggccccagagcccccagcagggccatctaaggtagagcagctacaagatgagaccaaccacctaaggaaggagctagagagtgtgggaagacagctccaggctgaggtggaaaacaatcagatgttgagtctcctgaacaggagacaggaggagaggctacgtgaacaggaggagaggctacgtgaacaggaggagaggctacgtgaacaggaggagaggctacatgaacaggaggagaggctgtgtgaacaggaggagaggctgtgtgaacaggaggagaggctacgtgaacatgaggagaggctgtgtgaacaggaggagaggctacgtgaacatgaggagaggctgtgtgaacaggaggagaggctgtgtgaacaggaggagaggctacgtgaacaggaggagaggctgtgtgaacaggaggagaggctgtgtgaacaggaggagaggctgtgtgaacaggaggagaggctacgtgaacaggaggagaggctgtgtgaacaggaggagaggctacgtgaacaggaggagaggctgtgtgaacaggaggagaggctacgtgaacaggaggagaggctgtgtgaacaggaggagaggctacgtgaacaggaggagaggctgtgtgaacaggagaagctgccagggcaggagaggctgctggaagaggtggagaagctgttagaacaggagaggcggcaggaggagcaggagaggctgctggagagggagaggctgctggaagaggtggagaagctgttagaacaggagaggcggcaggaggagcaggagaggctgctggagagggagaggctgctggaagaggtggagaagctgttagaacaggagaggcggcaggaggagcaggagaggctgctggagagggagaggctgctggacgaggtggaggagctcctggacgaggtggaggagctcctggagcaggagaggcttcggtaacaggatgagaggctgtggcagcaggagactctgcgggagctggagaggctgcgggagctggagaggatgctggagctggggtgggaagccctgtacaagcagcgggccgagccacgcagcggcttcgaggagctgaacaacgagaacaagagcacactgcagttggagcagcaagtaaaggagctggagaagtcgggtggagctgaagagccaagaggctccgagtctgcagcagcagccagaccagtagctggagccccagtcccacaaggagcttggatgtgcggacaagcagggtggactccccaggagcacccaggcttgggtggagaagctgttggtacaggagaggcggcaggaggagcaggagaggctgcatgccattcttttcgggctgccgagaacagggagctaaacatcaccatcatctaagagcgggtcaaggaattaaaaaaaaaacaac

SEQ ID NO: 11851 - DNA, 4272 bp, Homo sapiens
aagaggttgggcggatgttgtgagccgggtcgctgcggccgaggctccggcccccaggaccactggctgcccatgagagatgaaggatggcatccaagggggccggcatgtctttctcccgcaagagctataggctgacctcagatgctgagaaatccagggtcacaggcattgtgcaggagaagctgctgaatgactacctgaaccgcatcttttcctcttctgaacatgcacccccagcagccaccagcaggaaacccctgaacttccagaacctgccagaacatttggaccagttgctacaggtggacaatgaggaggaggaaagccagggacaggttgaagggcggcttggcccatccactgtggtcctggaccacacaggcggctttgaggggcttctcctggtggatgatgacctgctgggggtgattggacacagcaactttggcaccatccgctctaccacatgcgtgtacaaagggaaatggctctacgaggtcctcatctcctcccaggggctcatgcagatcggctggtgcaccatcagctgccgcttcaaccaggaggagggggttggagatacacacaactcctatgcctatgatggcaaccgcgtgcgcaagtggaatgtgaccacaacgaattatggcaaggcgtgggcagcgggggacatcgtgagctgcctgattgacctggatgatggcactctgtccttctgcctgaacggtgtatcactgggcactgcctttgagaacctgtccaggggcctgggtatggcctacttcccagccatcagcctctctttcaaggagtccgtggccttcaactttggcagccgtcctctgcgctacccagtggcaggctaccggcccctgcaggacccaccgagtgctgacctggtgcgggcacagaggttgctgggctgcttccgggcagtgctgagtgtggagctggaccctgtggaggggcggctgttggacaaggagagctccaagtggcggttgcggggccagcccaccgtcctcctcacactggcccacatcttccatcactttgcaccgcttctgcgcaaggtgtatctggtggaggctgtgctcatgagcttcttgctgggcatcgtggagaagggcacacccacacaggcacagtccgtggtgcaccaggtcctggacctcttgtggctcttcatggaggactacgaggtacaagattgcctcaagcagttgatgatgtctctgcttcggctgtaccgattctcacccattgtcccagacctgggcctacagatccattacctgcggctcactatcgccatcctgaggcatgagaagtcccgcaagtttctgcttagcaatgtcctcttcgacgtgctccgctccgtcgtcttcttttacatcaagagccccctgcgtgtggaggaggccggcctgcaggagctcattcccaccacctggtggccccactgctccagtagggagggcaaagagagcacggagatgaaggaggagaccgcagaggagcggctgcggcggcgagcctacgaacggggctgtcagcggctcaggaagcgcatcgaagtggtggaagaactacaggtccagatcctgaagctgctgctggacaataaagatgacaatgggggtgaagcttctaggtatatcttcctgaccaagtttcgcaagtttctgcaggagaacgccagtggccgggggaacatgcccatgctctgcccccctgagtacatggtctgcttcttacaccggctgatctctgccctgcgctactattgggatgaatacaaggcttccaatcctcatgcttccttcagtgaggaggcctacatcccgccccaggtcttctataatggcaaggtggactactttgacctgcagcgcctggggggcctcctctcgcacctgcggaagaccctcaaagatgaccttgcttccaaagccaacattgtgatcgacccactggagctccagtcaaccgccatggatgacctagatgaggatgaggagccagccccagctatggcccagcgccccatgcaggccctggctgttggggggccactgcccctgccccggcccggctggctcagttctccaactttgggccgagccaaccgcttcctcagcacagcggctgtgagcctcatgaccccacggcggcctctgagcacctcggagaaagtgaaggtccgcacgctgagcgtggagcagaggacccgtgaggacattgaaggcagccactggaatgagggcttgctgctggggcggccccccgaggagcctgagcagcccctcaccgagaactcgctgctggaagtcctggatggggcggtcatgatgtacaacctcagcgtacaccagcagctgggcaagatggtgggtgtctccgatgatgtcaatgaatacgctatggctctgagggacacagaggacaagctccgccggtgccccaagaggaggaaggacatccttgcagagttgaccaagagccagaaggttttctcagaaaagctggaccacctgagccgccgtcttgcctgggtccatgccactgtctactcccaggagaagatgctggacatctactggctgctgcgcgtctgcctgcggaccattgagcacggtgatcgcacagggtctctctttgccttcatgcccgagttctacctgagcgtggccatcaacagctacagtgctctcaagaattactttggtcccgtgcacagcatggaggagctcccaggctatgaagagaccctgacccgcctggctgccattctcgccaaacactttgccgacgcacgcattgtgggcactgacatccgagactcactgatgcaggccctggccagctacgtgtgctacccacactccctgcgggctgtggagcgaatccccgaggagcagcgtatcgccatggtgaggaacctcctggcgccctatgagcagcggccctgggcccagaccaactggatcctggtgcggctctggaggggctgtggcttcgggtaccgctatacacggctgccacatctgctgaaaaccaaacttgaggacgccaatttgcccagcctccagaagccctgcccttccaccctgctgcagcagcacatggcggacctcctacagcagggtcctgatgtggcacccagcttcctcaacagcgtcctcaatcagctcaactgggccttctctgaattcattggcatgatccaagagatccagcaggctgctgagcgcctggagcggaactttgtggacagccggcagctcaaggtatgtgccacctgctttgacctctcggtcagcctgctgcgtgtcttggagatgactatcacactggtgcctgagatattccttgactggacccggcctacctctgagatgctgctgcggcgtcttgcacagctgctaaaccaggtgctgaaccgggtgacagctgagaggaacctgtttgatcgtgtggtcaccctacggctgcctggcctagagagcgtggaccactatcccattctggtggcagtgacgggcatcctggtgcagctcctggtgcgtggcccagcctcagagagagagcaagccacatcagtgctcctggcagatccctgcttccagctacgctcaatatgctatctcctgggacagccagagcccccagcacctggcactgctctgccagcccctgaccggaagcgcttctccctgcagagctatgcggattatatcagtgccgatgagctggcccaagtggaacagatgctggcgcacctgacctctgcatctgcccaggcagcagctgcctccctgcccaccagtgaggaggacctctgccccatctgctatgcccaccccatctctgctgtgttccagccctgtggccacaagtcctgcaaagcctgtatcaaccagcacctgatgaacaacaaggactgcttcttctgcaaaaccaccatcgtgtctgtagaggactgggagaagggagccaatacgagtactacctcctcagctgcctagccctcacagcctgtgccatcctggaacctccacctttgaacccagagccaggctgggccctatttatgagctccctttgcccttctcctgtatcccacaccaccacatccaacctccttgcctgcctgtatcctcattggtgggagcccagccatggccctaattgtgcctgagcttgactttcagtcagggccacagtgagcattaaattattattccatacaaaaaaaaaaaaaaaaaa

SEQ ID NO: 11852 - DNA, 3853 bp, Homo sapiens
gagcggcttcgcttccagccccgagtgaggcggagacccaggcgggcgggcagagcaggcggcaccgcacctcggccagaggcggctgcagcagctgctgcccttgtccctgccgccgcctctccagtcccttctgtgattaccactccagctgctgggaacgggcgagaaagaggaggaggcgagaaactcccaccgacccacagagggagcatgacttcggcaacttcacctatcattctgaaatgggaccccaaaagtttggaaatccggacgctaacagtggaaaggctgttggagccacttgttacacaggtgactacacttgtcaacacaagcaacaaaggcccatctggtaaaaagaaagggaggtcaaagaaagcccatgtactagctgcctctgtagagcaagccactcagaatttcctggaaaagggtgaacagatcgctaaggagagtcaagatctcaaagaagagttggtggctgctgtagaggatgtgcgcaaacaaggtgagacgatgcggatcgcctcctccgagtttgcagatgacccttgctcgtcggtaaagcgcggcaccatggtacgggcggcaagggctttgctctccgcggtgacacgcttactcatcctggcggacatggcagatgtcatgagacttttatcccatctgaaaattgtggaagaggccctggaagctgtcaaaaatgctacaaatgagcaagaccttgcaaaccgttttaaagagtttgggaaagagatggtgaaacttaactatgtagcagcaagaagacaacaggagctgaaggatcctcactgtcgggatgagatggcagccgcccgaggggctctgaagaagaatgccacaatgctgtacacggcctctcaagcatttctccgccacccagatgtcgccgctacgagagccaaccgagattatgtgttcaaacaagtccaggaggccatcgccggcatctccaatgctgctcaagctacctcgcccactgacgaagccaagggccacacgggcatcggcgagctggctgcggctcttaatgagtttgacaataagattatcctggaccccatgacgttcagcgaggccaggttccggccgtccctggaggagaggctggagagcatcatcagcggcgcagcgctgatggccgactcctcctgcacgcgagacgaccggcgcgagaggatcgtggcggagtgcaacgccgtgcggcaggcgctccaggacctgctcagcgagtacatgaataatactggaaggaaagaaaaaggagatcctctcaacattgcgattgataagatgactaagaaaacaagagatctaaggagacagcttcggaaagcagtgatggatcacatatctgactctttcctggaaaccaatgttcctttgctagttctcattgaggctgcaaagagcggaaatgaaaaggaagtgaaagaatatgcccaagttttccgtgagcatgccaacaaactggtagaggttgccaatttggcctgttccatctccaacaatgaagaaggggtgaaattagttcggatggcagccacccagattgacagcctgtgtccccaggtcatcaatgccgctctgacactggctgcccggccacagagcaaagttgctcaggataacatggacgtcttcaaagaccagtgggagaagcaggtccgagtgttgacagaggccgtggatgacatcacctcagtggatgacttcctctctgtctcagaaaatcacatcttggaggatgtgaacaagtgtgtgatagccctccaagagggcgatgtggacactctggaccggactgcaggggccatcaggggccgggcagctcgagtcatacacatcatcaatgctgagatggagaactatgaagctggggtttatactgagaaggtgttggaagctacaaaattgctttctgaaacagtgatgccacgcttcgctgaacaagtagaggttgccattgaagccctgagtgccaacgttcctcaaccgtttgaggagaatgagttcatcgatgcctctcgcctggtgtatgatggcgttcgggacatcagaaaggctgtgctgatgatcaggaccccagaagaactagaggatgattctgactttgagcaggaagattatgatgtgcgtagcaggacaagtgttcagactgaggatgaccagctcattgcagggcagagcgcacgggccatcatggcgcaactaccgcaggaggagaaggcaaaaatagctgagcaggtggagatattccatcaagagaaaagcaagctggatgcagaagtggccaaatgggacgacagcggcaatgatatcattgtactggccaagcagatgtgtatgatcatgatggaaatgacagacttcacaagaggcaaaggcccattgaaaaatacatctgatgtcattaatgctgccaagaaaattgccgaagcaggttctcgaatggacaaattagctcgtgctgtggctgatcagtgtcctgattcagcatgtaagcaggatttattagcctaccttcaacgaattgccttgtattgccatcagcttaatatctgcagcaaggtgaaggcagaagtgcagaatctgggaggagagctcattgtgtcagggctggacagtgccacatcgcttatccaggcagctaaaaacctgatgaatgctgttgtcctcacggtgaaagcatcctatgtggcctcaaccaaataccagaaggtctatgggacagcagctgtcaactcacctgttgtgtcttggaagatgaaggctccagagaagaagccccttgtgaagagagaaaagcctgaagaattccagacacgagttcgacgaggttctcagaagaaacacatttcgcctgtacaggctttaagtgaattcaaagcaatggattccttctaggacgataggttttaacaagaaagctttttctttcttttctttctttctttttctttttaattccatttttgtatgcatacctgccagctcgtatgcctctggcatggggaaattaagggaacagtgtctgtttgcatgtaagatgagatgagatcaatactactgatccatctgtagcctgggaaggagacaggacattcctgtactaaggtggcacagagctgtcctttgcaacattctcataaaattgggcacagagttcgcattggcgcaatatttatgggagtgggagggatggggaaaataaacttaactctacaaaagcaaactctaatgcatgcaagaatcattaggttggcaggtatatgcataagtgaaaaatctggaagtgtaatggtagaacataaaacttgtattgcttctgtttcagtgcaaaaatgtactagccaatacgcttaagtgtgtggcccatgaattgaacaatttaaccttgaagtctatatccgtgatattatgtcgatttttaactgaggggaaattaactagtccagcctaaaatgcttcttttaatctgcattctgtttcctcttctagttgtgccattactagtgatcatgtttttttcccccctttaatgaaaacaataaacatctatttgagacaattaaaatccttctgggggcactggaagcacaatacggtgaccaatcttgctttcatttttttttctttttaatttgaaccatgattttgctagaaatagaaggcccagtggtggaatattagagggaaggaaactgacaacgtgtgaaagttagaggcaaatacataggtgtagcttggagtgctggtatctaatataccattgtattcactaactaactcaaaataaacacatttaatcttgaaaaaaaaaaaaaaa

SEQ ID NO: 11853 - DNA, 2248 bp, Homo sapiens
gacgccgccagctcttcactccacgcccacctctctcctggagcgctgggccttcgctggccgcaccggcagccatgagctcggagatggagccgctgctcctggcctggagctattttaggcgcaggaagttccagctctgcgccgatctatgcacgcagatgctggagaagtccccttatgaccaggaaccagatcctgaattgccagtgcatcaggcagcttggatcttaaaagcaagagcgctaacagaaatggtatacatagatgaaattgatgtagatcaggaaggaattgcagaaatgatgctggatgaaaatgctatagctcaagttccacgccctggaacgtctttgaaactccctggaactaatcagacaggagggcctagccaggccgttaggccaatcacacaagctggaagacccattacaggtttcctcaggcccagcacgcagagtggaaggccaggcactatggaacaggctatcagaacacccagaaccgcctacacagcccgccctatcaccagctcctccggaagatttgtcaggctgggaacggcttccatgcttacaagtcctgatggaccatttataaatttatctaggctgaatttaacaaagtattcccagaaacctaagttggcaaaggctttgtttgagtatatctttcatcatgaaaatgatgttaagactgctttggatctggctgccctctccacagaacattctcagtacaaggactggtggtggaaagtacagattggaaaatgttactacaggttgggaatgtatcgtgaagcagaaaaacagtttaaatcagccctgaagcagcaggaaatggtagatacatttctgtacttggcaaaagtttatgtctcattggatcaacctgtgactgctttaaatcttttcaaacaaggcttagataagtttccaggagaagtaaccctgctctgtggaattgcaagaatctatgaggaaatgaacaatatgtcatcagcagcagaatattacaaagaagttttgaaacaagacaatactcatgtggaagccatcgcatgcattggaagcaaccacttctattctgatcagccagaaatagctctccggttttacaggcggctgctgcagatgggcatttataacggccagctttttaacaatctggggctgtgttgcttctatgcccagcagtatgatatgactctgacctcatttgaacgtgccctttctttggctgaaaatgaagaagaggcagctgatgtctggtacaacttgggacatgtagctgtgggaataggagatacaaatttggcccatcagtgcttcaggctggctctggtcaacaacaacaaccacgccgaggcctacaacaacctggctgtgctggagatgcggaagggccacgttgaacaggcaagggcactattacaaactgcatcatcattagcaccccatatgtatgaaccgcattttaattttgcaacaatctctgataagattggagatctgcagagaagctatgttgctgcgcagaagtctgaagcagcatttccagaccatgtggacacacaacatttaattaaacaattaaggcagcattttgctatgctctgattgttccttagaccacatatgttcttatgaagcagcattatgcaaggggaaaaaagcactatgtctgtgtatgtatgtatatagtgtaatacgtatattttaacaaacctgtccttgatattagttaaggtgacacataagggtgacacagaatgtgtaatgcaaatttcatagtaatagtaactttataaaataatattataaaatacaggatttaaacctttctaaatagatcctgaaactgtctctcacattatatagtagatgtttgtttataatgtttacaaaacattttggtgaatttcctcaatgttttataaatgtacattttttaagtccttaagctgactcttagccatcatgtagcttaaggagtctgaaatctgccattaaaactgcacctttaagccaggtgtggtagcatgtgcctatagtcccagctacttgggaggtggaggtgggaggattataaatagagactttccttaagactttaaaaatgtatttaaaactattttttattaaatactttgtgatttcctattaagctttaaaataaatcattgtgtaaaacaccatcaaaaaaaaaaaaaaaaaaaaaaaaaaaaaaaaaaaaaaaaaaaaaa

SEQ ID NO: 11854 - DNA, 2218 bp, Homo sapiens
gacgccgccagctcttcactccacgcccacctctctcctggagcgctgggccttcgctggccgcaccggcagccatgagctcggagatggagccgctgctcctggcctggagctattttaggcgcaggaagttccagctctgcgccgatctatgcacgcagatgctggagaagtccccttatgaccaggcagcttggatcttaaaagcaagagcgctaacagaaatggtatacatagatgaaattgatgtagatcaggaaggaattgcagaaatgatgctggatgaaaatgctatagctcaagttccacgccctggaacgtctttgaaactccctggaactaatcagacaggagggcctagccaggccgttaggccaatcacacaagctggaagacccattacaggtttcctcaggcccagcacgcagagtggaaggccaggcactatggaacaggctatcagaacacccagaaccgcctacacagcccgccctatcaccagctcctccggaagatttgtcaggctgggaacggcttccatgcttacaagtcctgatggaccatttataaatttatctaggctgaatttaacaaagtattcccagaaacctaagttggcaaaggctttgtttgagtatatctttcatcatgaaaatgatgttaagactgctttggatctggctgccctctccacagaacattctcagtacaaggactggtggtggaaagtacagattggaaaatgttactacaggttgggaatgtatcgtgaagcagaaaaacagtttaaatcagccctgaagcagcaggaaatggtagatacatttctgtacttggcaaaagtttatgtctcattggatcaacctgtgactgctttaaatcttttcaaacaaggcttagataagtttccaggagaagtaaccctgctctgtggaattgcaagaatctatgaggaaatgaacaatatgtcatcagcagcagaatattacaaagaagttttgaaacaagacaatactcatgtggaagccatcgcatgcattggaagcaaccacttctattctgatcagccagaaatagctctccggttttacaggcggctgctgcagatgggcatttataacggccagctttttaacaatctggggctgtgttgcttctatgcccagcagtatgatatgactctgacctcatttgaacgtgccctttctttggctgaaaatgaagaagaggcagctgatgtctggtacaacttgggacatgtagctgtgggaataggagatacaaatttggcccatcagtgcttcaggctggctctggtcaacaacaacaaccacgccgaggcctacaacaacctggctgtgctggagatgcggaagggccacgttgaacaggcaagggcactattacaaactgcatcatcattagcaccccatatgtatgaaccgcattttaattttgcaacaatctctgataagattggagatctgcagagaagctatgttgctgcgcagaagtctgaagcagcatttccagaccatgtggacacacaacatttaattaaacaattaaggcagcattttgctatgctctgattgttccttagaccacatatgttcttatgaagcagcattatgcaaggggaaaaaagcactatgtctgtgtatgtatgtatatagtgtaatacgtatattttaacaaacctgtccttgatattagttaaggtgacacataagggtgacacagaatgtgtaatgcaaatttcatagtaatagtaactttataaaataatattataaaatacaggatttaaacctttctaaatagatcctgaaactgtctctcacattatatagtagatgtttgtttataatgtttacaaaacattttggtgaatttcctcaatgttttataaatgtacattttttaagtccttaagctgactcttagccatcatgtagcttaaggagtctgaaatctgccattaaaactgcacctttaagccaggtgtggtagcatgtgcctatagtcccagctacttgggaggtggaggtgggaggattataaatagagactttccttaagactttaaaaatgtatttaaaactattttttattaaatactttgtgatttcctattaagctttaaaataaatcattgtgtaaaacaccatcaaaaaaaaaaaaaaaaaaaaaaaaaaaaaaaaaaaaaaaaaaaaaa

SEQ ID NO: 11855 - DNA, 3867 bp, Homo sapiens
actgtcttcctcattggcgccgtgcagagaggcggaatgttcaactcctaactgcggcggaaacgtgggagccgcgcgggccgctgtcgtcccaacccccgccgccctcgtcgcgcgcggggcctccgcgcccccggctgctgctcacgccccgcccgggagccagattttgtggaagtataatactttgtcattatgagatgtcgtctctcggtgcctcctttgtgcaaattaaatttgatgacttgcagttttttgaaaactgcggtggaggaagttttgggagtgtttatcgagccaaatggatatcacaggacaaggaggtggctgtaaagaagctcctcaaaatagagaaagaggcagaaatactcagtgtcctcagtcacagaaacatcatccagttttatggagtaattcttgaacctcccaactatggcattgtcacagaatatgcttctctgggatcactctatgattacattaacagtaacagaagtgaggagatggatatggatcacattatgacctgggccactgatgtagccaaaggaatgcattatttacatatggaggctcctgtcaaggtgattcacagagacctcaagtcaagaaacgttgttatagctgctgatggagtattgaagatctgtgactttggtgcctctcggttccataaccatacaacacacatgtccttggttggaactttcccatggatggctccagaagttatccagagtctccctgtgtcagaaacttgtgacacatattcctatggtgtggttctctgggagatgctaacaagggaggtcccctttaaaggtttggaaggattacaagtagcttggcttgtagtggaaaaaaacgagagattaaccattccaagcagttgccccagaagttttgctgaactgttacatcagtgttgggaagctgatgccaagaaacggccatcattcaagcaaatcatttcaatcctggagtccatgtcaaatgacacgagccttcctgacaagtgtaactcattcctacacaacaaggcggagtggaggtgcgaaattgaggcaactcttgagaggctaaagaaactagagcgtgatctcagctttaaggagcaggagcttaaagaacgagaaagacgtttaaagatgtgggagcaaaagctgacagagcagtccaacaccccgctgctgccttcctttgagattggtgcatggacggaagacgatgtgtattgttgggttcagcagctcgtcagaaaaggtgactcttcagcagagatgagtgtatatgcaagcttgtttaaagaaaacaacattacagggaagcggctgctgctgctggaggaagaagacctgaaagacatgggcattgtctccaaggggcatatcattcacttcaagtcagccattgagaaattaacccatgattacataaatttgtttcacttcccaccactaattaaggactcaggaggtgaacctgaagaaaatgaggaaaaaatagtgaacctggaactggtttttggttttcacttgaaaccaggaactggcccacaggattgtaagtggaaaatgtatatggagatggatggggatgaaattgcaataacctacataaaagatgtgacattcaacactaacctacctgatgcggagattttaaagatgacaaagccaccatttgtaatggagaagtggattgtaggaatagcaaaaagtcagactgtggagtgcactgtcacatatgagagtgatgttagaactccaaaaagcactaaacatgtccattcgattcagtggagtagaacaaaacctcaggatgaagtgaaagcagtccaacttgccattcagacattattcaccaattcagatggcaaccctggaagcaggtccgactcaagtgctgattgccagtggttagatactctgaggatgcggcagattgcatccaacacttctttacagcgttcccagagcaatcctattctggggtcaccgttcttctcacactttgatggccaggattcctacgctgctgctgtgagacggccccaggtgcccattaagtatcaacagattacacctgtgaaccagtccagaagctcgtctcctactcagtatggactgaccaaaaacttctcttccctacatctcaactctagggacagtggcttttccagtggcaatactgacacctcttcagagaggggtcgatactcagacagaagcaggaacaaatatggacgtggtagtatatcactcaattcttctcctagaggaagatacagtggaaagagtcagcattccactccttcaagaggaagataccctggaaagttctacagggtttctcagtcagcactcaatcctcaccagtcgcctgacttcaagagaagccccagggacctccaccaacccaacaccataccagggatgcctttgcaccctgagactgactcaagagccagtgaagaggacagcaaagtcagcgaagggggctggacaaaagtggaataccggaaaaagccccacaggccatctcccgccaaaaccaataaagagagagccagaggggaccaccgtggatggagaaacttttgatgaattgaactacatagcttttctaagcaggttaaaaaaaaaaaaaaaaagaaatgtaatggtttttgataatatgatcccttcagattgaattaacgaaaagacaacacttccagtttttggattgggaaataccttctaattgagactatagccaaaccagggccaaaattatggatattggtcacccagtgatcataactaggcttgaaaatcactacacatattttctgccttgagtgaacatttttagaggaaaggttatgccatctttttaccctaaccactgatattctggttagcagggccaggacaaggggaaggaaaatgaggtcaacaaaaaaatcaaatttttaggaaaagataagatgaatgttactgatttttccttttggctgaggctgcaatatggcctggcaaggcactgttactgatcttgtctttaacattttgatattttgttcatcataatttttgcatttatttttttaaatattgcattaaaatatcatttagcttgattatcgagttttttggtttgaggttttttgttgcttcttttttcttttctttctttccccctcttttttttggatgtccccttaaattttgtgcccaaggcaggtacctcactcatctcatccttggctcagccctgctggttagtatttagtatttattttagtaagatatttgtgtctgtatgatggtcagagttgaactgatctggcttgtcatttttcagtaataaaaaaagttactgaatttaatgttgaatatgatgcatatctcattcattacgatttatcagaaaccaaagatttaaattgcctagatttgtggttctttctcttcctaagttcccagcgactgctttcaaatactattttctaaatttcaccaaaggagcaaagaggataaaacaacactccataaaggcctcttgggatgtcagaaatctaaaatctaaaagaaaacagacacagagcaagacaataacatcacaagctaaaagccagagaaatttaaaattaccaacatccttgttggagtaagacagtaaatatcagccttgcagcaagacagctctgagcagctgtgggcaaagaggtaaaccagtgggggtgcaaggagactgtctgcagcttagggcagaaatggtgggatccaacttgtgaaatgcttcatgttttacaaaccaaaaagtcaggtagcaacaaacttattgtatgtcaaatcaataaatgttactttcaataaaaaa

SEQ ID NO: 11856 - DNA, 7194 bp, Homo sapiens
actgtcttcctcattggcgccgtgcagagaggcggaatgttcaactcctaactgcggcggaaacgtgggagccgcgcgggccgctgtcgtcccaacccccgccgccctcgtcgcgcgcggggcctccgcgcccccggctgctgctcacgccccgcccgggagccagattttgtggaagtataatactttgtcattatgagatgtcgtctctcggtgcctcctttgtgcaaattaaatttgatgacttgcagttttttgaaaactgcggtggaggaagttttgggagtgtttatcgagccaaatggatatcacaggacaaggaggtggctgtaaagaagctcctcaaaatagagaaagaggcagaaatactcagtgtcctcagtcacagaaacatcatccagttttatggagtaattcttgaacctcccaactatggcattgtcacagaatatgcttctctgggatcactctatgattacattaacagtaacagaagtgaggagatggatatggatcacattatgacctgggccactgatgtagccaaaggaatgcattatttacatatggaggctcctgtcaaggtgattcacagagacctcaagtcaagaaacgttgttatagctgctgatggagtattgaagatctgtgactttggtgcctctcggttccataaccatacaacacacatgtccttggttggaactttcccatggatggctccagaagttatccagagtctccctgtgtcagaaacttgtgacacatattcctatggtgtggttctctgggagatgctaacaagggaggtcccctttaaaggtttggaaggattacaagtagcttggcttgtagtggaaaaaaacgagagattaaccattccaagcagttgccccagaagttttgctgaactgttacatcagtgttgggaagctgatgccaagaaacggccatcattcaagcaaatcatttcaatcctggagtccatgtcaaatgacacgagccttcctgacaagtgtaactcattcctacacaacaaggcggagtggaggtgcgaaattgaggcaactcttgagaggctaaagaaactagagcgtgatctcagctttaaggagcaggagcttaaagaacgagaaagacgtttaaagatgtgggagcaaaagctgacagagcagtccaacaccccgcttctcttgcctcttgctgcaagaatgtctgaggagtcttactttgaatctaaaacagaggagtcaaacagtgcagagatgtcatgtcagatcacagcaacaagtaacggggagggccatggcatgaacccaagtctgcaggccatgatgctgatgggctttggggatatcttctcaatgaacaaagcaggagctgtgatgcattctgggatgcagataaacatgcaagccaagcagaattcttccaaaaccacatctaagagaagggggaagaaagtcaacatggctctggggttcagtgattttgacttgtcagaaggtgacgatgatgatgatgatgacggtgaggaggaggataatgacatggataatagtgaatgaaagcagaaagcaaagtaataaaatcacaaatgtttggaaaacacaaaagtaacttgtttatctcagtctgtacaaaaacagtaaggaggcagaaagccaagcactgcatttttaggccaatcacatttacatgaccgtaatttcttatcaattctacttttatttttgcttacagaaaaacggggggagaattaagccaaagaagtatatttatgaatcagcaaatgtggtgcctgattatagaaatttgtgatcctatatacaatataggacttttaaagttgtgacattctggctttttcttttaatgaatactttttagtttgtatttgactttatttcctttattcaaatcatttttaaaaacttacattttgaacaaacactcttaactcctaattgttctttgacacgtagtaattctgtgacatactttttttttcttatagcaatacactgtaatatcagaaatggttggcctgagcaacctagtaagacctcgtctctactaataattaaaaaactagctggcatggtagcacacacctgtagtcccagatacttgggaggccaaggcaggaggattgcttgagacctagcaatcagtcagggctgcagtgagccatgatggcaccactgcactctagcctgggcaagagaacaagatcctgtctcaaaaaacaaaaaaaagaaagaattgatagtacaaaatccaacaacaatactgagatgatctaagaaggttataacaaaatgctcttcagaaatacctaagtgctgagaatttttagtactaaagagcacagctgctcaaagtaaagcctgagcagtgttctcagtaatgtatttgaaggaaaaataccctgatttgaaaccaacagcagatgttgcaaactttcataccactgctggccatggaagcctcttaacaacacactgtcatttaaggctgtgcttgtgctttatacaaagagaaagaggtggtcttaaggggatgcttccaggggggtgagttcatgcctctcctgtattttccagcaagtggggtatgtgtggtggtttgttttttagaggggcataataatccaggattctaagcatatgctcagctattttaaagaggaaattaaatattataaaagaaatagtaaagataagttatcctcacttaggcaaaagcacaggtcctttccatatcaagtttagcctaccagggttgttttttgttttaaccctgcttaataatgttggtgttttagaagtagatacaggcactgctctgaaaacctggctagccaaggatattctcagaatgttatcacctgtttgtcaaagcttgtttaaattataaaacacttttaattatatatatgaggcaaaagaactaagacttttttcaaactaaattagaaaggagtgtcattatttgactgttaaaccaaaatatttttggtgggtctttttatggaagtttaaagaaaggacatcatcatagatatgatctaacagtatttctaactatatttgatcattaaaagcctcttggaatttgaagcgtgacgtgtttctaatgccccttgagaggtgaaaaataccacataatgatcagtatgctgtgccagcttcatttggggagaaataactagtagaaagttctgggtgtgaggtgtacagcagtctaggtggcatagtgatgaagaaagggatcagagtctgactgtcactcagaatcctgggctcagttgcttgacaaccttgggaaaattgttttatctttgtgcgtctgtttgctgatcttcagcgtgggaataataacagtacctacttgaaaggatcattgtgcggattaaaagaaataatatatgtaaagcactttaacacagcaccaggcccacggaaagtggctaatgttagctactatgaatggtgccagtgaagacactgaaaaataagtgatttcagtaaccttctggaaagctatcagtttcaaataatattttctctgtagtatgagatgaaattaaaagtggatagctttcaggaaagataaagagaacatgcttagaatgtaagctaaacagattttttctgttgctctttgaaaactatgagccctggccagcttaacctggtctgaggtgagactaaacacaaaaacagtagataaatctctccctaaaagatggattcccccacatacccatgctactagtttctctgtctattcacacatatgtacaaatacatgaacacagcctgtctgtgctcagacatagagaagtactacctgacttgagtcaatgcacccaagaagaaaagcttggagtagagcagaagggagggcttgggactcctgtctttccagcatgccctggggtgcagtggtcagccacctgaagagagagccaatagcatggggtttacaaggcaaagatagtcattcattcaacacatattcatagagctccttctctgtgccagacactgttctggaagatagctagatgaaaatctttgcactcacagagcttacatgccagtgagtgaagatcgatgataaataaagcaaatgcatcatatgttcacatttgataagtatatgccaaaaaatgaagccgggaaggaggacaaggcccatgggtgggtgttgaggtttttaaagtgtggtcaggaaaggccccactgataaggtaacatttgagcaagtctgaaaaaggcaaggggatctttggggctaacttcgggatccctgcactttatgtaagaatgtaaacctggagtctcatttaagaatgatcagcaatacgtttagaacatatgaactgaatgaaatggacattttttcttaatttatgtataaatccatatgattatacataaagttctgatgcattaataaaagcagccaaatagggccaaagagaaaaataacaggactctgtactggacctaactttatcattaattaggtaatattttcctcatttctttactgctgccattttcctcaccagtattccagagatggtcatagctcattactctaccaccaagaacctaaaaggaattagaatacagcagaattggcctcagtgaagagcttaaaattgttctcctcgtagaactggactattgatcattaccacgtgacgttggctctattactttctgttcccaatgtccttctagtggtttgaaaatgttaaaacatccctaaaatctaaatcatataatcagaattctatagtgtcccactctatctgtaaagatcatttggaagactttagactctattaattttaaaaggaatatttattagccatatgcagaatttctaatgatgatattgtacagcttctaattcacttttcagatcagtgtttgaaatggcaattatcagtgttggatttagttccaactacttgatttacaaaaatgtacatttagaggttaaaagaaacagtgagaaatgtaaacattcaaaatgataattgaatctctcagttgtgggaataattatcagagacatgcaactgaaaatgtctcacctttcatctttttttcttaattcataaagttatcttgtagaatttgatgagaccctccctagtcattctcaactggggcggtgctgtcaccgaatggtgtttgagagtgttggggctagggcacatttttggttgtcacagcaactggggtggcatttgctgcccagtgccaggaatagtaacattatgaatgccagggacagtgtgctcagtaaagtcttccatccaaaaggggcagggcacggtggctcacgcctgtaatcccagcactttgggaggccaaggtgggcggatcacctgatgtcaggggttcgagaccagcctggccaacatggtgaaaccctgttgctactaaaaatacaaaaattggctgggtgtggtgtcacatgccagtaaccccagctactagggaggctgaggcaggagaatcacttgaacccgggaggcagaggttgcagtgagctgagattgcaccactacactccagcctggatgacagagtgagacttcatctcaaaaaaaaaaaaaaacaaaaaaaaacaacccggtagcattgtcccttccccactgacaaacttatcaaatccagaagctttagagtttcgtctctaattatttttctcctgaacaaaattacccaagtcaaaacaaaatgtatttttagaattacggcagcatacgacctgaattttgtgagtttcgtggctttatcttaaatcaccatttccctaaaaatggtttctttctccttagaaatgctggtggcaacttgatgaaacagccaaatgcaccagggcaggtcactttcccattacactgattccacaattaaaaaaaaaaaagaaaaaaaactcattgagatagctacagttctataggttaatttaaagcctcctttttctactcatttttgaaagcaaaattacattttactattttacataaccagtgaaaagacgttgaaagcctacagctcactgtttttggtgctctggaaatgttgagggtgggtttttaaccagtgatttttaacgtgcagtgaatttgttagacttttaaacaccagctaaggtagtcaaacttgatccccattaaaaatcaaggaattaggggtcgggggagggtttaggagtgatccagaatgacctcccagaattactgtgcgtacaactttatttttcagagttttcattggaatggtaagagttttatgaaagacagttttaaaacttattctgagttaaatattaatactttaaaaaattattgtactagacttattgcagccttttgaaagtagcagagtttcatcataccacatatataacagagcataaattttctataatcaggcaccttttgctgcttttgagtaagactgttttcctgtttaagtgttaagcatcgccagacataaaaatctattctctcctctcgattgtagcatagcctgacagctctagatacagcatttctatgatgaaaaatgagtatccatcaggaaatctagaagactagccgtgttttctcagactccacctttgtttgcactctgttgcctgtgaggagctttctggcatgtgattatttacttcaaaactagagttccaagcacctacattaattattttatattgtgtgcagaatagtatatcttttaatgtcagatatgatacactgcacatattgcttttgcactcttaaaatttttgtactaaataatagaaaatatttatattctttgagtgtgagctttgaatagatggcattatcactttattgtttttttaacaaaaactttttctcaattattctattgcaatgttattctgagcaagtcctatgccaaatatcttgtataatgtttgtatggaagattaaattttactcttgtgtggtaagactatttcagttactgattttatagttggaatttgatattccagcacaaagtccacagtgtattcagaaatccaagttggtgtcatacatttcattttgatgtgaacttttctttgctttcctttgttctaagactccattttgcaataaacgttttgacagtaaaaaaaaaaaaa

SEQ ID NO: 11857 - DNA, 1460 bp, Homo sapiens
gacggcctggcatacccactgcccaccccagtgactgctcttctgcttcaggcctgctggcctcccagcactgcctgcccctccctgtcgggggacatcgcctccacaccggctggggaaggagcccaggggtggggctggtgggtggggctggtggttggggcagccagagaagtaagagggaagtgagaagccgggtggggcaggctggaaggaagacgaacctacgaagcagagatctgaagacagcatgtacacagccattccccagagtggctctccattcccaggctcagtgcaggatccaggcctgcatgtgtggcgggtggagaagctgaagccggtgcctgtggcgcaagagaaccagggcgtcttcttctcgggggactcctacctagtgctgcacaatggcccagaagaggtttcccatctgcacctgtggataggccagcagtcatcccgggatgagcagggggcctgtgccgtgctggctgtgcacctcaacacgctgctgggagagcggcctgtgcagcaccgcgaggtgcagggcaatgagtctgacctcttcatgagctacttcccacggggcctcaagtaccaggaaggtggtgtggagtcagcatttcacaagacctccacaggagccccagctgccatcaagaaactctaccaggtgaaggggaagaagaacatccgtgccaccgagcgggcactgaactgggacagcttcaacactggggactgcttcatcctggacctgggccagaacatcttcgcctggtgtggtggaaagtccaacatcctggaacgcaacaaggcgagggacctggccctggccatccgggacagtgagcgacagggcaaggcccaggtggagattgtcactgatggggaggagcctgctgagatgatccaggtcctgggccccaagcctgctctgaaggagggcaaccctgaggaagacctcacagctgacaaggcaaatgcccaggccgcagctctgtataaggtctctgatgccactggacagatgaacctgaccaaggtggctgactccagcccatttgcccttgaactgctgatatctgatgactgctttgtgctggacaacgggctctgtggcaagatctatatctggaaggggcgaaaagcgaatgagaaggagcggcaggcagccctgcaggtggccgagggcttcatctcgcgcatgcagtacgccccgaacactcaggtggagattctgcctcagggccatgagagtcccatcttcaagcaatttttcaaggactggaaatgagggtgggcgtcttcctgccccatgctcccctgccccccaccacctgcctgcttgcttctctggctgcctggtcagtgcagaggtgccccctgcagatgttcaataaaggagacaagtgctttcccagctcttttcctgcaccaccaaaaaaaaaaaaaaaaaa

SEQ ID NO: 11858 - DNA, 1718 bp, Homo sapiens
caggaaaccctggtactggcagcagccagcctctgctgtgcccacatgacccacaactctggcagcggacccggcacttccaacattattaaataataagaaagcggctcctactccaggctcaaacctccctgcagaccaatggacaccttctaagagtttggcgagtcagtgactgaagcgcccgtccattccaagataaataggatttaccaatccttggatgaagtgcttgggaagtctttaagtgccataatcaactgccatttcaaagaatatagatggttttgaaaagttcatgctgtcccttcattgaattttagaatgattgaagatagtgggaaaagaggaaataccatggcagaaagaagacagctgtttgcagagatgagggctcaagatctggatcgcatccgactctccacctacagaacagcatgcaagcttaggtttgttcagaagaaatgcaatttgcacctggtggacatatggaatgtcatagaagcattgcgggaaaatgctctgaacaacctggacccaaacactgaactcaacgtgtcccgcttagaggctgtgctctccactattttttaccagctcaacaaacggatgccaaccactcaccaaatccatgtggagcagtccatcagcctcctccttaacttcctgcttgcagcgtttgatccggaaggccatggtaaaatttcagtatttgctgtcaaaatggctttagccacattgtgtggagggaagatcatggacaaattaagatatattttctcaatgatttctgactccagtggggtgatggtttatggacgatatgaccaattccttcgggaagttctcaaactacccacggcagtttttgaaggtccttcatttggttacacagaacagtcagccagatcctgtttctcccaacagaaaaaagtcacgttaaatggtttcttggacacgcttatgtcagatcctcccccgcagtgtctggtctggttgcctcttctgcatcgactagcaaatgtggaaaatgtcttccatccggttgagtgttcctactgccacagtgagagtatgatgggatttcgctaccgatgccaacagtgtcacaattaccagctctgtcaggactgcttctggaggggacatgccggtggttctcatagcaaccagcaccaaatgaaagagtacacgtcatggaaatcacctgctaagaagctgactaatgcattaagcaagtccctgagctgtgcttccagccgtgaacctttgcaccccatgttcccagatcagcctgagaagccactcaacttggctcacatcgttgatacttggcctcccagacctgtaaccagcatgaacgacaccctgttctcccactctgttccctcctcaggaagtccttttattaccaggagctcggacggtgcttttggtggatgcgtctagatggataacatgacttcttctaccctaaaatattcctataatactttgagctgttctggttcctccagggtgcatggtacccattaacccaaaatatgattatttcccttttttcccattttcagtcattttggaatgttctctgtgaaccacagttgtgttgtttaaagctcacatttctttctgtcaccacagagattggcctacggtttctgttttgagggtgctgttcaataaagctgtgtacactaaatgtcaaaaaaaaaaaa

SEQ ID NO: 11859 - DNA, 3204 bp, Homo sapiens
ttgagcacaaggggaagaatgaacacagctttttattgaagttaaaggttactttggagtttgtttggaaatgtgtaaggtcaaatactatagttttcagcatatgtagtacttcagaggaagaattaaggggcatgttggtgcatttaactacaaaaccaggtggcaggttgctgctctctccttcagaaccccgctctgaggaaagctaaggaagagaacaggacgtctgagtgtgtgactgagaatgattgaagatagtgggaaaagaggaaataccatggcagaaagaagacagctgtttgcagagatgagggctcaagatctggatcgcatccgactctccacctacagaacagcatgcaagcttaggtttgttcagaagaaatgcaatttgcacctggtggacatatggaatgtcatagaagcattgcgggaaaatgctctgaacaacctggacccaaacactgaactcaacgtgtcccgcttagaggctgtgctctccactattttttaccagctcaacaaacggatgccaaccactcaccaaatccatgtggagcagtccatcagcctcctccttaacttcctgcttgcagcgtttgatccggaaggccatggtaaaatttcagtatttgctgtcaaaatggctttagccacattgtgtggagggaagatcatggacaaattaagatatattttctcaatgatttctgactccagtggggtgatggtttatggacgatatgaccaattccttcgggaagttctcaaactacccacggcagtttttgaaggtccttcatttggttacacagaacagtcagccagatcctgtttctcccaacagaaaaaagtcacgttaaatggtttcttggacacgcttatgtcagatcctcccccgcagtgtctggtctggttgcctcttctgcatcgactagcaaatgtggaaaatgtcttccatccggttgagtgttcctactgccacagtgagagtatgatgggatttcgctaccgatgccaacagtgtcacaattaccagctctgtcaggactgcttctggaggggacatgccggtggttctcatagcaaccagcaccaaatgaaagagtacacgtcatggaaatcacctgctaagaagctgactaatgcattaagcaagtccctgagctgtgcttccagccgtgaacctttgcaccccatgttcccagatcagcctgagaagccactcaacttggctcacatcgttgatacttggcctcccagacctgtaaccagcatgaacgacaccctgttctcccactctgttccctcctcaggaagtccttttattaccaggagctctcctcccaaggacagtgaagtagagcagaacaaactgctggctagggctgctccagcttttctgaagggcaaagggatacagtacagcctgaatgtggcagacaggctagctgatgaacatgttctcatcgggttgtatgtcaacatgctccggaacaacccctcatgcatgcttgagagttcaaaccggcttgatgaagaacacaggctaattgccaggtatgcggcaaggctggcagcagagtcctcttcgtctcagccacctcagcagagaagtgctcctgacatctctttcaccatcgatgcgaataagcagcaaaggcagctgattgctgagctagaaaacaagaacagagaaatcttacaggagatccagagacttcggctagagcatgaacaagcttctcagcccacgccagagaaggcacagcaaaaccccaccctgctggcagaactccggctcctcagacagcgcaaagatgagctggaacagagaatgtctgctctccaggagagccggagagagctaatggtccagttggagggtctcatgaagctactaaaggaagaagaactgaagcagggagtaagttatgtcccctactgcaggtcttaactaacagtggaggggcctgccgacctgcggttttctcattgcttttgctctaatgtatgttcatgcttcagtttggaaagagaaaaaagtcatactaatttgcttctttttcaatgtagtgcttgaattgagatatataaatttagcattttttataactatcactactatccacatcaaaagaagaactatgacatcttttagaaaagggaacgaattgtcatttattggaaacattttagatccccagaggtataagtttcaaaccagtcttagcttttcaagttgttgatcagacccttctcttaacagagagataccacagtcactagagataccctgaggttcatgtcatcccaaaacccacagcactcagaagctaacctctacacccactcacactgtgagtattcagttcggtttcattttactgaaaacctgtgaaacctctttttataaaaatcaggcaattaaatcccttttcatcacacaattattgagccttgttccccatggctcaccaaaatgtgctcaattttgtgagagaaagactgtactccataactgactattcacgtcccatctttttggctcttccccaaagcagaatccttactgttggttgacagtaatctctttttaaaaagtaactctcagctttttccttagcaccagagcctttcggctccgggagacgagagggtcattacatacttttttttttttctggaaataggggcattgtgactttatagcctaaactggagctgtctgaacctgtggtcaggctcaagagccagcagggggagcagcaaactcaaaaaaaaaaacaaattaaattaaattaaattaaattaaatagaagcaaaataaaagcagctttaatttcaagtgcatgtaccacgctatgtatgacaatatatcccactcactagcattatttaaaagtttcacattatttccatggatcaattagaaccacaacctgtccaatttcaacgtatctttcatttcttctgtatgctcttttctattattcattatgtgtgtttgtgtgtaacaaagaatgtttggaaaatgctggacacatttttacccttcattcccatggtctgtaaaaaaggaaagtgtaaaatcaatctgtaatgtcagacaataaagataatgtattacattattttgtattttgtgaaaaaaattactttactaaattaaagtcaaattttaacagaagacagtccccc

SEQ ID NO: 11860 - DNA, 6072 bp, Homo sapiens
caggaaaccctggtactggcagcagccagcctctgctgtgcccacatgacccacaactctggcagcggacccggcacttccaacattattaaataataagaaagcggctcctactccaggctcaaacctccctgcagaccaatggacaccttctaagagtttggcgagtcagtgactgaagcgcccgtccattccaagataaataggatttaccaatccttggatgaagtgcttgggaagtctttaagtgccataatcaactgccatttcaaagaatatagatggttttgaaaagttcatgctgtcccttcattgaattttagaatgattgaagatagtgggaaaagaggaaataccatggcagaaagaagacagctgtttgcagagatgagggctcaagatctggatcgcatccgactctccacctacagaacagcatgcaagcttaggtttgttcagaagaaatgcaatttgcacctggtggacatatggaatgtcatagaagcattgcgggaaaatgctctgaacaacctggacccaaacactgaactcaacgtgtcccgcttagaggctgtgctctccactattttttaccagctcaacaaacggatgccaaccactcaccaaatccatgtggagcagtccatcagcctcctccttaacttcctgcttgcagcgtttgatccggaaggccatggtaaaatttcagtatttgctgtcaaaatggctttagccacattgtgtggagggaagatcatggacaaattaagatatattttctcaatgatttctgactccagtggggtgatggtttatggacgatatgaccaattccttcgggaagttctcaaactacccacggcagtttttgaaggtccttcatttggttacacagaacagtcagccagatcctgtttctcccaacagaaaaaagtcacgttaaatggtttcttggacacgcttatgtcagatcctcccccgcagtgtctggtctggttgcctcttctgcatcgactagcaaatgtggaaaatgtcttccatccggttgagtgttcctactgccacagtgagagtatgatgggatttcgctaccgatgccaacagtgtcacaattaccagctctgtcaggactgcttctggaggggacatgccggtggttctcatagcaaccagcaccaaatgaaagagtacacgtcatggaaatcacctgctaagaagctgactaatgcattaagcaagtccctgagctgtgcttccagccgtgaacctttgcaccccatgttcccagatcagcctgagaagccactcaacttggctcacatcgttgatacttggcctcccagacctgtaaccagcatgaacgacaccctgttctcccactctgttccctcctcaggaagtccttttattaccaggagcatgcttgagagttcaaaccggcttgatgaagaacacaggctaattgccaggtatgcggcaaggctggcagcagagtcctcttcgtctcagccacctcagcagagaagtgctcctgacatctctttcaccatcgatgcgaataagcagcaaaggcagctgattgctgagctagaaaacaagaacagagaaatcttacaggagatccagagacttcggctagagcatgaacaagcttctcagcccacgccagagaaggcacagcaaaaccccaccctgctggcagaactccggctcctcagacagcgcaaagatgagctggaacagagaatgtctgctctccaggagagccggagagagctaatggtccagttggagggtctcatgaagctactaaagactcagggggcaggctctccccgctcctcccccagccacaccatcagcaggccaattcccatgcccatccggtcagcgtcagcctgctccaccccgacgcacacgccgcaggactccctcacaggagtagggggagatgtacaagaggcatttgcacaaagttcaagaagaaacttaaggaatgacttgctagtggctgcagattccatcactaacactatgtcctctcttgtgaaagagctgaattctgaggttgggagtgaaacagagagtaatgtggattctgaatttgcacggactcagtttgaggatcttgttccctcaccaacctctgaaaaggcttttctagcgcaaatccatgcccgaaaacctgggtacattcacagtggagctaccacaagtaccatgcgtggcgacatggttacggaggatgcagatccctatgtgcagcctgaagatgaaaactatgaaaatgactctgtccggcagctggagaatgagctccagatggaggaatacctgaaacagaagctgcaagatgaagcttatcaggtcagcttgcaaggttgaatgcaatatccttttatcacactcctctcaagcaagctatagtcagacagatgatgaaagtaacatgaaaactggtgatgatggagagccctgtggccacacagaggaggaagacagcagcctggcagcagcctcaccgaagagaggaaccaccacacccagcagctcctgacagacccccacccctaaagatgtgtcctgatgactatagtgcagctaactttttgttctcagatttgtagtgcataggtgtgtgtttcaagaaggaaaaaaaaagacttctgttcaaagttaacttatcagctacatcctctgtaacgtggttcatccctggttaaaaagcaaacaaacacaggctgaaaacccatgctgctgttatacacaatggcagtattaacaagcattttaaacctttgcacatgatattgaacctgttcagtttacaatgacaatattaatactgtttatagctagaagtttgatttctgaattctttgagattttagcaaaacagtttattatacactgtacatttttttcacagcaattggaaaaaaacaaccacttgcaatcattcaataaccctgaagaatttggttcctgagtgtacaaactcagagcccggaagccaagaagggtccttggcctgcacggtctgtagttgactccaagtctctgtgagcagtgacttgaaccaaacacaccaggaataatccattctttggggcctctttccaactcgaggttgttttctttcaagatactctaatcagccatagaatttagtgtaaatatttttttttccaaatagatatcatattcaaaaaaggcagcattcaaattatatagaatctagtttttaaaatcagcacagatcttcttaaaaactgtgaactatgttttgaaatactcgttactaaagctgtttataaaccacaggtgccataagatccccaaacggactaaagttatctctgctcttccatggtcttgttcctctcgttttggctttaggaagcatgtctttaacagcaccgctcgttcacaagttcccccatcaagttgtttggaggccttcagctttaaatgtacaggcttaaagtgcgcttgcaaacgtttgctctcctttttttctgaatgttgattgccttagctggccacctggtgttctgcatgtagccttctgtggtcatgtgaaaggagacaggctcttctaagttgagttgggatttttgcactcagtgaaaagctgaagtgcaaaagagctatcaaagacaagaggataaaagactgggatagtcttttccaaggaccctctttagagggccctaaagacctcctttgggaattctggggaaaaagaaaaagtaatcttctacttgcttcaagatttgatttttttaaaaaagcctgcgacctattcaatacattatgcttaaattagcagtttctctggaattcctgtctctcctttaaaagaaaggagagaacattttagaacaatagttctcaaagtgtgttccccggacaagcagcatctgcaacacttaggaaggtcttcgaaatactaatttgtaagccccacctcaggcctactgaatcagaagctctgggggttgggtccagaagtctgttttagtcaaccctctaggtgattctgatgctcgctaaaggttgagaactactgctttagaatgaagtcgtataataaagtctctgaaaaggccttattcagaataagcaagaaaggttctgtgattcacttttgcttctggggctggcaaaaaccttctctgaacccacacaccaagttcgtagttggtaggtgcccagccaagtcctgacatcttcatgccccctctgcagagggcggctgtacgatgttcacatgtctgcgtttggtcagacatcatctccttggctgccctttgaaaccaaatcacttgccttggggataaagtgctcaattggcattagtgagaagcccatcctatcccttgacatacttaatcatatatctctccagagaactcacctgacaaatgtctctgagcacaggctgacaccaaagtggcacaactgcacagttctcagatttctttgcacagattgatttttattgcgggttttgttggggtgtcttaatgttcatctcttttccactgcccatcctctgtgaacccatacctctctagatggagcaggtggccactggtgcctcatactcagtattgaaaaccactacatcccagctacctataatgctgtcagctcaaaatcatagccaggtagttcttgaactcagaacttaaatcctgcacgtggcactccaccactgactggaccgagctggcatatgttgtttctttgtgtttctacatcaaaatgttcgtctaagatttgaactgttctgctgataaccttccccgttgtcatagctatttcattgccaaccaactccatcacatggttgttgatatcgtcatataaagccattgcaaggactctggaaactgccgccaatgaccaatttctgactaaccagccaccttttctctctcttagctccacgtcagcactgagaccagactcgagcacccctgtcctgtaagcgagacaaaatggcgtgtgttattttggggttttgtgttttttggtgggtttctttccttggctctccagatttacttttggggcctgttctaagtgcaaacccagcaagtttcacttgtcctgtccattagatacaactacatcttgcgggggttgtttctttcttgttccacaatgaattgcacatccatctccatcagagctgatagcctgttaataagcactggtctaacacagccaaccctcctccacagcgccatattaatggaggaggggaggaaggtgaaatctactgcatgggattcaggaaacagttgtggttggtcaggacggaagttggggtaagtttggttggtcagagggagttgtgctggagattgtgaaaaatgggttcttgaatgatctactataaggcagggaaggttcatttgtaagtagtaatgtgaactgaattgcattaagagtgtgtggcctttgttgtgatatactatgtattttcttatatgcatgagccaaactgttgcatcataatttagcactgatgtctgcttttattttgatcatctttgtccacccttattagttcttggctgttaaccgtagatagatcttgtaaatccagcaacctttggttgctgcattccccttggttcgattccacgcaaggagccacaagtgagaactccactgtccttagaagaaagggcatttttacttttgaaccaaaaagagaaaaaaaaatcagaagtgttgcatcttgaggcgaattaactgtaagacatttttaattatgactactgcaatttgacaccatttgaaataatcaattcagagacactaaagatttcacaatattcattggtattgtaaaaaaaaaatactattgtatggatttttgtattgctgttaagtattgttttgtgtgtgtgtgtgtgtgtgtgtgttggaacctcctggggacatgttatattttgaagtgattaaactatttaattgtgtgtctatattttggagtggaataatttcttcattaaaaaatgtttttaaaaacactaaaaaaaaaaaaaaaaaaaa

SEQ ID NO: 11861 - DNA, 3110 bp, Homo sapiens
caggaaaccctggtactggcagcagccagcctctgctgtgcccacatgacccacaactctggcagcggacccggcacttccaacattattaaataataagaaagcggctcctactccaggctcaaacctccctgcagaccaatggacaccttctaagagtttggcgagtcagtgactgaagcgcccgtccattccaagataaataggatttaccaatccttggatgaagtgcttgggaagtctttaagtgccataatcaactgccatttcaaagaatatagatggttttgaaaagttcatgctgtcccttcattgaattttagaatgattgaagatagtgggaaaagaggaaataccatggcagaaagaagacagctgtttgcagagatgagggctcaagatctggatcgcatccgactctccacctacagaacagcatgcaagcttaggtttgttcagaagaaatgcaatttgcacctggtggacatatggaatgtcatagaagcattgcgggaaaatgctctgaacaacctggacccaaacactgaactcaacgtgtcccgcttagaggctgtgctctccactattttttaccagctcaacaaacggatgccaaccactcaccaaatccatgtggagcagtccatcagcctcctccttaacttcctgcttgcagcgtttgatccggaaggccatggtaaaatttcagtatttgctgtcaaaatggctttagccacattgtgtggagggaagatcatggacaaattaagatatattttctcaatgatttctgactccagtggggtgatggtttatggacgatatgaccaattccttcgggaagttctcaaactacccacggcagtttttgaaggtccttcatttggttacacagaacagtcagccagatcctgtttctcccaacagaaaaaagtcacgttaaatggtttcttggacacgcttatgtcagatcctcccccgcagtgtctggtctggttgcctcttctgcatcgactagcaaatgtggaaaatgtcttccatccggttgagtgttcctactgccacagtgagagtatgatgggatttcgctaccgatgccaacagtgtcacaattaccagctctgtcaggactgcttctggaggggacatgccggtggttctcatagcaaccagcaccaaatgaaagagtacacgtcatggaaatcacctgctaagaagctgactaatgcattaagcaagtccctgagctgtgcttccagccgtgaacctttgcaccccatgttcccagatcagcctgagaagccactcaacttggctcacatcgttgatacttggcctcccagacctgtaaccagcatgaacgacaccctgttctcccactctgttccctcctcaggaagtccttttattaccaggagcatgcttgagagttcaaaccggcttgatgaagaacacaggctaattgccaggtatgcggcaaggctggcagcagagtcctcttcgtctcagccacctcagcagagaagtgctcctgacatctctttcaccatcgatgcgaataagcagcaaaggcagctgattgctgagctagaaaacaagaacagagaaatcttacaggagatccagagacttcggctagagcatgaacaagcttctcagcccacgccagagaaggcacagcaaaaccccaccctgctggcagaactccggctcctcagacagcgcaaagatgagctggaacagagaatgtctgctctccaggagagccggagagagctaatggtccagttggagggtctcatgaagctactaaaggaagaagaactgaagcagggagtaagttatgtcccctactgcaggtcttaactaacagtggaggggcctgccgacctgcggttttctcattgcttttgctctaatgtatgttcatgcttcagtttggaaagagaaaaaagtcatactaatttgcttctttttcaatgtagtgcttgaattgagatatataaatttagcattttttataactatcactactatccacatcaaaagaagaactatgacatcttttagaaaagggaacgaattgtcatttattggaaacattttagatccccagaggtataagtttcaaaccagtcttagcttttcaagttgttgatcagacccttctcttaacagagagataccacagtcactagagataccctgaggttcatgtcatcccaaaacccacagcactcagaagctaacctctacacccactcacactgtgagtattcagttcggtttcattttactgaaaacctgtgaaacctctttttataaaaatcaggcaattaaatcccttttcatcacacaattattgagccttgttccccatggctcaccaaaatgtgctcaattttgtgagagaaagactgtactccataactgactattcacgtcccatctttttggctcttccccaaagcagaatccttactgttggttgacagtaatctctttttaaaaagtaactctcagctttttccttagcaccagagcctttcggctccgggagacgagagggtcattacatacttttttttttttctggaaataggggcattgtgactttatagcctaaactggagctgtctgaacctgtggtcaggctcaagagccagcagggggagcagcaaactcaaaaaaaaaaacaaattaaattaaattaaattaaattaaatagaagcaaaataaaagcagctttaatttcaagtgcatgtaccacgctatgtatgacaatatatcccactcactagcattatttaaaagtttcacattatttccatggatcaattagaaccacaacctgtccaatttcaacgtatctttcatttcttctgtatgctcttttctattattcattatgtgtgtttgtgtgtaacaaagaatgtttggaaaatgctggacacatttttacccttcattcccatggtctgtaaaaaaggaaagtgtaaaatcaatctgtaatgtcagacaataaagataatgtattacattattttgtattttgtgaaaaaaattactttactaaattaaagtcaaattttaacagaagacagtccccc

SEQ ID NO: 11862 - DNA, 6166 bp, Homo sapiens
ttgagcacaaggggaagaatgaacacagctttttattgaagttaaaggttactttggagtttgtttggaaatgtgtaaggtcaaatactatagttttcagcatatgtagtacttcagaggaagaattaaggggcatgttggtgcatttaactacaaaaccaggtggcaggttgctgctctctccttcagaaccccgctctgaggaaagctaaggaagagaacaggacgtctgagtgtgtgactgagaatgattgaagatagtgggaaaagaggaaataccatggcagaaagaagacagctgtttgcagagatgagggctcaagatctggatcgcatccgactctccacctacagaacagcatgcaagcttaggtttgttcagaagaaatgcaatttgcacctggtggacatatggaatgtcatagaagcattgcgggaaaatgctctgaacaacctggacccaaacactgaactcaacgtgtcccgcttagaggctgtgctctccactattttttaccagctcaacaaacggatgccaaccactcaccaaatccatgtggagcagtccatcagcctcctccttaacttcctgcttgcagcgtttgatccggaaggccatggtaaaatttcagtatttgctgtcaaaatggctttagccacattgtgtggagggaagatcatggacaaattaagatatattttctcaatgatttctgactccagtggggtgatggtttatggacgatatgaccaattccttcgggaagttctcaaactacccacggcagtttttgaaggtccttcatttggttacacagaacagtcagccagatcctgtttctcccaacagaaaaaagtcacgttaaatggtttcttggacacgcttatgtcagatcctcccccgcagtgtctggtctggttgcctcttctgcatcgactagcaaatgtggaaaatgtcttccatccggttgagtgttcctactgccacagtgagagtatgatgggatttcgctaccgatgccaacagtgtcacaattaccagctctgtcaggactgcttctggaggggacatgccggtggttctcatagcaaccagcaccaaatgaaagagtacacgtcatggaaatcacctgctaagaagctgactaatgcattaagcaagtccctgagctgtgcttccagccgtgaacctttgcaccccatgttcccagatcagcctgagaagccactcaacttggctcacatcgttgatacttggcctcccagacctgtaaccagcatgaacgacaccctgttctcccactctgttccctcctcaggaagtccttttattaccaggagctctcctcccaaggacagtgaagtagagcagaacaaactgctggctagggctgctccagcttttctgaagggcaaagggatacagtacagcctgaatgtggcagacaggctagctgatgaacatgttctcatcgggttgtatgtcaacatgctccggaacaacccctcatgcatgcttgagagttcaaaccggcttgatgaagaacacaggctaattgccaggtatgcggcaaggctggcagcagagtcctcttcgtctcagccacctcagcagagaagtgctcctgacatctctttcaccatcgatgcgaataagcagcaaaggcagctgattgctgagctagaaaacaagaacagagaaatcttacaggagatccagagacttcggctagagcatgaacaagcttctcagcccacgccagagaaggcacagcaaaaccccaccctgctggcagaactccggctcctcagacagcgcaaagatgagctggaacagagaatgtctgctctccaggagagccggagagagctaatggtccagttggagggtctcatgaagctactaaagactcagggggcaggctctccccgctcctcccccagccacaccatcagcaggccaattcccatgcccatccggtcagcgtcagcctgctccaccccgacgcacacgccgcaggactccctcacaggagtagggggagatgtacaagaggcatttgcacaaagttcaagaagaaacttaaggaatgacttgctagtggctgcagattccatcactaacactatgtcctctcttgtgaaagagctgaattctgaggttgggagtgaaacagagagtaatgtggattctgaatttgcacggactcagtttgaggatcttgttccctcaccaacctctgaaaaggcttttctagcgcaaatccatgcccgaaaacctgggtacattcacagtggagctaccacaagtaccatgcgtggcgacatggttacggaggatgcagatccctatgtgcagcctgaagatgaaaactatgaaaatgactctgtccggcagctggagaatgagctccagatggaggaatacctgaaacagaagctgcaagatgaagcttatcaggtcagcttgcaaggttgaatgcaatatccttttatcacactcctctcaagcaagctatagtcagacagatgatgaaagtaacatgaaaactggtgatgatggagagccctgtggccacacagaggaggaagacagcagcctggcagcagcctcaccgaagagaggaaccaccacacccagcagctcctgacagacccccacccctaaagatgtgtcctgatgactatagtgcagctaactttttgttctcagatttgtagtgcataggtgtgtgtttcaagaaggaaaaaaaaagacttctgttcaaagttaacttatcagctacatcctctgtaacgtggttcatccctggttaaaaagcaaacaaacacaggctgaaaacccatgctgctgttatacacaatggcagtattaacaagcattttaaacctttgcacatgatattgaacctgttcagtttacaatgacaatattaatactgtttatagctagaagtttgatttctgaattctttgagattttagcaaaacagtttattatacactgtacatttttttcacagcaattggaaaaaaacaaccacttgcaatcattcaataaccctgaagaatttggttcctgagtgtacaaactcagagcccggaagccaagaagggtccttggcctgcacggtctgtagttgactccaagtctctgtgagcagtgacttgaaccaaacacaccaggaataatccattctttggggcctctttccaactcgaggttgttttctttcaagatactctaatcagccatagaatttagtgtaaatatttttttttccaaatagatatcatattcaaaaaaggcagcattcaaattatatagaatctagtttttaaaatcagcacagatcttcttaaaaactgtgaactatgttttgaaatactcgttactaaagctgtttataaaccacaggtgccataagatccccaaacggactaaagttatctctgctcttccatggtcttgttcctctcgttttggctttaggaagcatgtctttaacagcaccgctcgttcacaagttcccccatcaagttgtttggaggccttcagctttaaatgtacaggcttaaagtgcgcttgcaaacgtttgctctcctttttttctgaatgttgattgccttagctggccacctggtgttctgcatgtagccttctgtggtcatgtgaaaggagacaggctcttctaagttgagttgggatttttgcactcagtgaaaagctgaagtgcaaaagagctatcaaagacaagaggataaaagactgggatagtcttttccaaggaccctctttagagggccctaaagacctcctttgggaattctggggaaaaagaaaaagtaatcttctacttgcttcaagatttgatttttttaaaaaagcctgcgacctattcaatacattatgcttaaattagcagtttctctggaattcctgtctctcctttaaaagaaaggagagaacattttagaacaatagttctcaaagtgtgttccccggacaagcagcatctgcaacacttaggaaggtcttcgaaatactaatttgtaagccccacctcaggcctactgaatcagaagctctgggggttgggtccagaagtctgttttagtcaaccctctaggtgattctgatgctcgctaaaggttgagaactactgctttagaatgaagtcgtataataaagtctctgaaaaggccttattcagaataagcaagaaaggttctgtgattcacttttgcttctggggctggcaaaaaccttctctgaacccacacaccaagttcgtagttggtaggtgcccagccaagtcctgacatcttcatgccccctctgcagagggcggctgtacgatgttcacatgtctgcgtttggtcagacatcatctccttggctgccctttgaaaccaaatcacttgccttggggataaagtgctcaattggcattagtgagaagcccatcctatcccttgacatacttaatcatatatctctccagagaactcacctgacaaatgtctctgagcacaggctgacaccaaagtggcacaactgcacagttctcagatttctttgcacagattgatttttattgcgggttttgttggggtgtcttaatgttcatctcttttccactgcccatcctctgtgaacccatacctctctagatggagcaggtggccactggtgcctcatactcagtattgaaaaccactacatcccagctacctataatgctgtcagctcaaaatcatagccaggtagttcttgaactcagaacttaaatcctgcacgtggcactccaccactgactggaccgagctggcatatgttgtttctttgtgtttctacatcaaaatgttcgtctaagatttgaactgttctgctgataaccttccccgttgtcatagctatttcattgccaaccaactccatcacatggttgttgatatcgtcatataaagccattgcaaggactctggaaactgccgccaatgaccaatttctgactaaccagccaccttttctctctcttagctccacgtcagcactgagaccagactcgagcacccctgtcctgtaagcgagacaaaatggcgtgtgttattttggggttttgtgttttttggtgggtttctttccttggctctccagatttacttttggggcctgttctaagtgcaaacccagcaagtttcacttgtcctgtccattagatacaactacatcttgcgggggttgtttctttcttgttccacaatgaattgcacatccatctccatcagagctgatagcctgttaataagcactggtctaacacagccaaccctcctccacagcgccatattaatggaggaggggaggaaggtgaaatctactgcatgggattcaggaaacagttgtggttggtcaggacggaagttggggtaagtttggttggtcagagggagttgtgctggagattgtgaaaaatgggttcttgaatgatctactataaggcagggaaggttcatttgtaagtagtaatgtgaactgaattgcattaagagtgtgtggcctttgttgtgatatactatgtattttcttatatgcatgagccaaactgttgcatcataatttagcactgatgtctgcttttattttgatcatctttgtccacccttattagttcttggctgttaaccgtagatagatcttgtaaatccagcaacctttggttgctgcattccccttggttcgattccacgcaaggagccacaagtgagaactccactgtccttagaagaaagggcatttttacttttgaaccaaaaagagaaaaaaaaatcagaagtgttgcatcttgaggcgaattaactgtaagacatttttaattatgactactgcaatttgacaccatttgaaataatcaattcagagacactaaagatttcacaatattcattggtattgtaaaaaaaaaatactattgtatggatttttgtattgctgttaagtattgttttgtgtgtgtgtgtgtgtgtgtgtgttggaacctcctggggacatgttatattttgaagtgattaaactatttaattgtgtgtctatattttggagtggaataatttcttcattaaaaaatgtttttaaaaacactaaaaaaaaaaaaaaaaaaaa

SEQ ID NO: 11863 - DNA, 3123 bp, Homo sapiens
gattgctgtgtgttgagcacaaggggaagaatgaacacagctttttattgaagttaaaggttactttggagtttgtttggaaatgtgtaaggtcaaatactatagttttcagcatatgtagtacttcagaggaagaattaaggggcatgttggtgcatttaactacaaaaccagaatgattgaagatagtgggaaaagaggaaataccatggcagaaagaagacagctgtttgcagagatgagggctcaagatctggatcgcatccgactctccacctacagaacagcatgcaagcttaggtttgttcagaagaaatgcaatttgcacctggtggacatatggaatgtcatagaagcattgcgggaaaatgctctgaacaacctggacccaaacactgaactcaacgtgtcccgcttagaggctgtgctctccactattttttaccagctcaacaaacggatgccaaccactcaccaaatccatgtggagcagtccatcagcctcctccttaacttcctgcttgcagcgtttgatccggaaggccatggtaaaatttcagtatttgctgtcaaaatggctttagccacattgtgtggagggaagatcatggacaaattaagatatattttctcaatgatttctgactccagtggggtgatggtttatggacgatatgaccaattccttcgggaagttctcaaactacccacggcagtttttgaaggtccttcatttggttacacagaacagtcagccagatcctgtttctcccaacagaaaaaagtcacgttaaatggtttcttggacacgcttatgtcagatcctcccccgcagtgtctggtctggttgcctcttctgcatcgactagcaaatgtggaaaatgtcttccatccggttgagtgttcctactgccacagtgagagtatgatgggatttcgctaccgatgccaacagtgtcacaattaccagctctgtcaggactgcttctggaggggacatgccggtggttctcatagcaaccagcaccaaatgaaagagtacacgtcatggaaatcacctgctaagaagctgactaatgcattaagcaagtccctgagctgtgcttccagccgtgaacctttgcaccccatgttcccagatcagcctgagaagccactcaacttggctcacatcgtgcctcccagacctgtaaccagcatgaacgacaccctgttctcccactctgttccctcctcaggaagtccttttattaccaggagctctcctcccaaggacagtgaagtagagcagaacaaactgctggctagggctgctccagcttttctgaagggcaaagggatacagtacagcctgaatgtggcagacaggctagctgatgaacatgttctcatcgggttgtatgtcaacatgctccggaacaacccctcatgcatgcttgagagttcaaaccggcttgatgaagaacacaggctaattgccaggtatgcggcaaggctggcagcagagtcctcttcgtctcagccacctcagcagagaagtgctcctgacatctctttcaccatcgatgcgaataagcagcaaaggcagctgattgctgagctagaaaacaagaacagagaaatcttacaggagatccagagacttcggctagagcatgaacaagcttctcagcccacgccagagaaggcacagcaaaaccccaccctgctggcagaactccggctcctcagacagcgcaaagatgagctggaacagagaatgtctgctctccaggagagccggagagagctaatggtccagttggagggtctcatgaagctactaaaggaagaagaactgaagcagggagtaagttatgtcccctactgcaggtcttaactaacagtggaggggcctgccgacctgcggttttctcattgcttttgctctaatgtatgttcatgcttcagtttggaaagagaaaaaagtcatactaatttgcttctttttcaatgtagtgcttgaattgagatatataaatttagcattttttataactatcactactatccacatcaaaagaagaactatgacatcttttagaaaagggaacgaattgtcatttattggaaacattttagatccccagaggtataagtttcaaaccagtcttagcttttcaagttgttgatcagacccttctcttaacagagagataccacagtcactagagataccctgaggttcatgtcatcccaaaacccacagcactcagaagctaacctctacacccactcacactgtgagtattcagttcggtttcattttactgaaaacctgtgaaacctctttttataaaaatcaggcaattaaatcccttttcatcacacaattattgagccttgttccccatggctcaccaaaatgtgctcaattttgtgagagaaagactgtactccataactgactattcacgtcccatctttttggctcttccccaaagcagaatccttactgttggttgacagtaatctctttttaaaaagtaactctcagctttttccttagcaccagagcctttcggctccgggagacgagagggtcattacatacttttttttttttctggaaataggggcattgtgactttatagcctaaactggagctgtctgaacctgtggtcaggctcaagagccagcagggggagcagcaaactcaaaaaaaaaaacaaattaaattaaattaaattaaattaaatagaagcaaaataaaagcagctttaatttcaagtgcatgtaccacgctatgtatgacaatatatcccactcactagcattatttaaaagtttcacattatttccatggatcaattagaaccacaacctgtccaatttcaacgtatctttcatttcttctgtatgctcttttctattattcattatgtgtgtttgtgtgtaacaaagaatgtttggaaaatgctggacacatttttacccttcattcccatggtctgtaaaaaaggaaagtgtaaaatcaatctgtaatgtcagacaataaagataatgtattacattattttgtattttgtgaaaaaaattactttactaaattaaagtcaaattttaacagaagacagtccccc

SEQ ID NO: 11864 - DNA, 2876 bp, Homo sapiens
aaaaaaaatatattaataaaaaagttcaaaaaaggggggggattgtcatctcctttggggtgcgatggcttcaaatccaaactgaggctctccgggtggtaaggatgtgcgaggaggcctcttgaagaactccaggcctatcatgctgtctctccgctaaagcctgaggcccgaggtcagaggattcaggaaggctctgcagtcggcccaggagggcggggtcccgtggtggaggcggggagagggaaggaccgcacggagcaccaacccctgctcggccccgtaccaggaagcgctggggggcagaggagcggagttgaggcagaagccagtcaggatggtggtgccttcgctgaagcttcaggacctcatcgaagagattcgcggggccaagactcaggcccaggagcgggaggtgatccaaaaggagtgtgcccacatccgggcctccttccgcgacggggacccagtgcacaggcaccggcagctggccaaactgctctacgtccacatgttgggctaccccgcccactttggacagatggagtgcctgaaactgatcgcctcctccagattcacagacaagagggtgggctacctgggggccatgcttctattggatgagaggcacgatgcccacctgctcattaccaacagcatcaagaatgacctgagccaggggattcagccagtacaaggcctggccttgtgcactttgagcaccatgggctctgctgagatgtgccgagacctggccccagaggtggagaaactgctcctgcagcccagtccctacgtgcgcaagaaggctattctgactgcagtgcacatgatccggaaggtccctgaactctccagtgtcttcctcccaccctgtgcccaactgcttcatgagcgtcaccatggcatcctgctgggcaccatcacgctgatcacggagctctgcgaacgaagccctgcagccctcaggcacttccgaaaggtggtaccccagctggtacacatcctccggactctggtgacaatgggatactccacagaacacagcatatctggagtcagcgaccccttcctgcaggtccagatacttcgtctgcttcggatcctgggccggaaccacgaggagagcagtgagaccatgaatgacttgctggcccaggtggccactaacacggacaccagccgaaatgccggaaatgcggtcctgtttgagacagtactcaccatcatggatatccgctctgcagctggcctacgggttctagctgtcaacattcttggtcgcttcctactcaacagtgacaggaacattaggtatgtagccctgacatcactgcttcgactggtgcagtctgatcacagtgctgtgcagcggcatcggcccactgtggtggaatgtctacgggaaactgatgcctccctcagccggagagccctggaactaagcctggctctggtaaatagctccaatgtgcgagccatgatgcaagagctgcaggcctttctggagtcctgccctcctgacctacgggctgactgtgcctcaggcatcctgctggctgcagagaggtttgctccaaccaaacgctggcacatagacaccatcctgcatgtgctgacaacggcgggcacccatgtgcgggatgatgcagtggccaacctgacccagctgattgggggggcccaggagctacatgcctactctgtgcgccgcctctacaatgccctggcagaagacatttcccagcaaccactggtgcaggtggcagcctggtgcattggggagtatggggacctcctgctggcagggaactgcgaggagattgagccccttcaggtggacgaagaggaagtgctggcattgctggaaaaggtgctgcagtcccacatgtccctgccagccactcgaggatatgccctcacagccctcatgaagctcagcactcgcctctgtggggacaacaaccgcatccgccaggtggtgtccatctacgggagctgcttggacgtggagctgcagcagcgggctgtggagtatgacacactcttccggaaatacgaccacatgagggctgccatcctggaaaaaatgcctcttgtggagcgagatggccctcaggctgatgaggaagcaaaggaaagcaaagaagcagcccagctttcagaagcagccccagtgcccacagagccccaggcctcacagctcctggatctgctagatctcctggatggggcttctggggatgtccagcatcctccccatctggacccctccccaggaggtgccctggtacacctgcttgaccttccctgtgtacctccacccccagctcccatcccagatctcaaagtgtttgagcgtgagggagtacagctgaatctgtctttcattcgaccccctgaaaaccctgctttgctgttaatcaccatcactgccaccaacttctcagagggtgatgtcacccatttcatctgccaggctgctgtgcccaagagtctccagctgcagctgcaggcccccagtgggaacacagttccagctcggggtggccttcctatcacccagctcttcagaatcctcaatcctaacaaggcccccctgcggctaaagctgcgcctcacctacgaccactttcaccagtcggtgcaggagatctttgaggtgaacaacttgcctgtggaatcgtggcagtaactgtctccactcacagcctgaaattctcctgtgtcccaaaccccagggggccccagcagcttcgaacctacacctgagggctaccagcaggtggcgctctggctttgcactgcaaaaactggggaccagcccccttctcccacaaataaagcccaataaagcctgagaagtgaggaaagcc

SEQ ID NO: 11865 - DNA, 3305 bp, Homo sapiens
aaaaaaaatatattaataaaaaagttcaaaaaaggggggggattgtcatctcctttggggtgcgatggcttcaaatccaaactgaggctctccgggtggtaaggatgtgcgaggaggcctcttgaagaactccaggcctatcatgctgtctctccgctaaagcctgaggcccgaggtcagaggattcaggaaggctctgcagtcggcccaggagggcggggtcccgtggtggaggcggggagagggaaggaccgcacggagcaccaacccctgctcggccccgtaccaggaagcgctggggggcagaggagcggagttgaggcagaagccaggtgaggctggagtcctggggtaggcaggctgtcgctgccgctgccgctgcctgagatggaaatcgggggaggaagctcgcggaagaaacagcggagggttcgtggaaaaaaaagcaatggctgagctaagggatggggtaccaggttagggggaggaaacggtagagagaaataggtggggctcccgcgcatgctcaatagggaaggggcgcccgtggggtgcggacgcatgcgtagtgggcttctcgggcggtggggtgggcgcggaatttggagacccacttcgggaaaggtaaaatgcgggcgcaattttagggtacctgtgggacccgggctcttagggtcttgacacaggacgggcctgggccgaaagcccaggcacgcccgaccagagagtgtttctccactcccggactctgccagtcaggatggtggtgccttcgctgaagcttcaggacctcatcgaagagattcgcggggccaagactcaggcccaggagcgggaggtgatccaaaaggagtgtgcccacatccgggcctccttccgcgacggggacccagtgcacaggcaccggcagctggccaaactgctctacgtccacatgttgggctaccccgcccactttggacagatggagtgcctgaaactgatcgcctcctccagattcacagacaagagggtgggctacctgggggccatgcttctattggatgagaggcacgatgcccacctgctcattaccaacagcatcaagaatgacctgagccaggggattcagccagtacaaggcctggccttgtgcactttgagcaccatgggctctgctgagatgtgccgagacctggccccagaggtggagaaactgctcctgcagcccagtccctacgtgcgcaagaaggctattctgactgcagtgcacatgatccggaaggtccctgaactctccagtgtcttcctcccaccctgtgcccaactgcttcatgagcgtcaccatggcatcctgctgggcaccatcacgctgatcacggagctctgcgaacgaagccctgcagccctcaggcacttccgaaaggtggtaccccagctggtacacatcctccggactctggtgacaatgggatactccacagaacacagcatatctggagtcagcgaccccttcctgcaggtccagatacttcgtctgcttcggatcctgggccggaaccacgaggagagcagtgagaccatgaatgacttgctggcccaggtggccactaacacggacaccagccgaaatgccggaaatgcggtcctgtttgagacagtactcaccatcatggatatccgctctgcagctggcctacgggttctagctgtcaacattcttggtcgcttcctactcaacagtgacaggaacattaggtatgtggccctgacatcactgcttcgactggtgcagtctgatcacagtgctgtgcagcggcatcggcccactgtggtggaatgtctacgggaaactgatgcctccctcagccggagagccctggaactaagcctggctctggtaaatagctccaatgtgcgagccatgatgcaagagctgcaggcctttctggagtcctgccctcctgacctacgggctgactgtgcctcaggcatcctgctggctgcagagaggtttgctccaaccaaacgctggcacatagacaccatcctgcatgtgctgacaacggcgggcacccatgtgcgggatgatgcagtggccaacctgacccagctgattgggggggcccaggagctacatgcctactctgtgcgccgcctctacaatgccctggcagaagacatttcccagcaaccactggtgcaggtggcagcctggtgcattggggagtatggggacctcctgctggcagggaactgcgaggagattgagccccttcaggtggacgaagaggaagtgctggcattgctggaaaaggtgctgcagtcccacatgtccctgccagccactcgaggatatgccctcacagccctcatgaagctcagcactcgcctctgtggggacaacaaccgcatccgccaggtggtgtccatctacgggagctgcttggacgtggagctgcagcagcgggctgtggagtatgacacactcttccggaaatacgaccacatgagggctgccatcctggaaaaaatgcctcttgtggagcgagatggccctcaggctgatgaggaagcaaaggaaagcaaagaagcagcccagctttcagaagcagccccagtgcccacagagccccaggcctcacagctcctggatctgctagatctcctggatggggcttctggggatgtccagcatcctccccatctggacccctccccaggaggtgccctggtacacctgcttgaccttccctgtgtacctccacccccagctcccatcccagatctcaaagtgtttgagcgtgagggagtacagctgaatctgtctttcattcgaccccctgaaaaccctgctttgctgttaatcaccatcactgccaccaacttctcagagggtgatgtcacccatttcatctgccaggctgctgtgcccaagagtctccagctgcagctgcaggcccccagtgggaacacagttccagctcggggtggccttcctatcacccagctcttcagaatcctcaatcctaacaaggcccccctgcggctaaagctgcgcctcacctacgaccactttcaccagtcggtgcaggagatctttgaggtgaacaacttgcctgtggaatcgtggcagtaactgtctccactcacagcctgaaattctcctgtgtcccaaaccccagggggccccagcagcttcgaacctacacctgagggctaccagcaggtggcgctctggctttgcactgcaaaaactggggaccagcccccttctcccacaaataaagcccaataaagcctgagaagtgaggaaagccaaaaaa

SEQ ID NO: 11866 - DNA, 10812 bp, Homo sapiens
gcggcgtcggggcttcacaacaacagtggtggccgtagcagcggccgggccgggctgaggcgcaggcggggagcgggcccggcgccgcggcgctggtggatgctggggctccgaggcgacggccggggggcgggggccgaggcaggtataacggtaccggcggcggcagcgccgctgctcttcccttctcctcaggaggggggccaatggctagcgagaagccgggcccgggcccggggctcgagcctcagcccgtggggctcattgccgtcggggccgctggcggaggcggcgggggcagcggtggtggcggcaccgggggcagcgggatgggggagctaaggggggcgtccggctccggctcggtgatgctccccgcggggatgattaacccttcggtgccgatccgcaacatccggatgaaattcgcagtgttgattggactcatacaggtcggagaggtcagcaacagggacatcgtggagacggtgctcaacctgctggttggtggagaatttgacttggagatgaactttattatccaggatgctgagagtataacatgtatgacagagcttttggagcactgtgatgtaacatgtcaagcagaaatatggagcatgtttacagccattctacgaaaaagtgttcggaatttacagactagcacagaagttgggctaattgaacaagtattgctgaaaatgagtgctgtagatgacatgatagcagatcttctagttgatatgttgggggttcttgccagctacagcatcactgtcaaggagttgaagcttttgttcagcatgcttcgaggagaaagtggaatctggccaagacatgcagtaaaattattatcagttcttaatcagatgccacagagacacggtcctgatacttttttcaatttccctggttgtagcgctgcggcaattgccttgcctcctattgcaaagtggccttatcagaatggcttcaccttaaacacttggtttcgtatggatccattaaataatattaatgttgataaggataaaccttatctttattgttttcgtactagcaaaggagttggttactctgctcattttgttggcaactgtttaatagtcacatcattgaagtccaaaggaaaaggttttcagcattgtgtgaaatatgattttcaaccacgcaagtggtacatgatcagcattgtccacatttacaatcgatggaggaacagtgaaattcggtgttatgttaatggacaactggtatcttatggtgatatggcttggcatgttaacacaaatgatagctatgacaagtgctttcttggatcatcagaaactgctgatgcaaatagggtattctgtggtcaacttggtgccgtgtatgtgttcagtgaagcactcaacccagcacagatatttgcaattcatcagttaggacctggatataagagtaccttcaagtttaaatctgagagtgatattcatttggcagaacatcataaacaggtgttatatgatgggaaacttgcaagtagcattgcctttacatataatgctaaggccactgatgctcagctctgcctggaatcatcaccaaaagagaatgcatcaatttttgtgcattccccacatgctctaatgcttcaggatgtgaaagcgatagtaacacattcaattcatagtgcaattcattcaattggagggattcaagtgctttttccactttttgcccaattggataataggcagctcaatgacagtcaagtggaaacaactgtctgtgctactctgttggcattcctggttgaactacttaaaagttcagtagccatgcaagaacagatgctgggtggaaaaggctttttagtcattggctacttacttgaaaagtcatcaagagttcatataactagagctgtcctggagcaatttttatcttttgcaaaataccttgatggtttatctcatggagcacctttgctgaagcagctttgtgatcacattttatttaacccagccatctggatacatacacctgcaaaggttcagctttccctatacacatatttgtctgctgaatttattggaactgctaccatctacaccaccatacgcagagtaggaacagtattacagctaatgcacaccttaaaatattactactgggttattaatcctgctgacagtagtggcattacacctaaaggattagatggtccccggccatcacaaaaagaaattatatcactgagggcatttatgctactttttctgaaacagctgatactaaaggatcgaggggtcaaggaagatgaacttcagagtatattaaattacctacttacgatgcatgaggatgaaaatattcatgatgtgctacagttactggtggctttaatgtcggaacacccagcctcaatgataccagcatttgatcaaagaaatggaataagggtgatctacaaattattggcttctaaaagtgaaagtatttgggttcaagctttgaaggttctgggatactttctgaagcatttaggtcacaagagaaaagttgaaattatgcacacccatagtcttttcactcttcttggagaaaggctgatgttgcatacaaacactgtgactgtcaccacatacaacacactttatgagatcttgacagaacaagtatgtactcaggtcgtacacaaaccacatccagagccagattctacagtgaaaattcagaatccaatgattcttaaagtggtggcaactttgttaaaaaactctacaccaagtgcagagctgatggaagttcgtcgtttatttttatctgatatgataaaacttttcagtaacagccgtgaaaatagaagatgcttattgcagtgttcagtgtggcaggattggatgttttctcttggctatatcaatcctaaaaattctgaggaacagaagattaccgaaatggtctacaatatcttccggattcttttgtatcatgcaataaaatatgaatggggaggctggagagtctgggtggataccctctcaatagcccattccaaggtcacttatgaagctcataaggaatacctagccaaaatgtatgaggaatatcaaagacaagaggaggaaaacattaaaaagggaaagaaagggaatgtgagcaccatctctggtctttcatcacagacaacaggagcaaaaggtggaatggaaattcgagagatagaagatctttcacaaagccagagcccagaaagtgagaccgattaccctgtcagcacagatactcgagacttactcatgtcaacaaaagtgtcagatgatattcttggaaattcagatagaccaggaagtggtgtacatgtggaagtacatgatcttttagtagatataaaagcagagaaagtggaagcaacagaagtaaagctcgatgatatggatttatcaccggagactttagtaggtggagagaatggtgcccttgtggaggttgaatctctgttggataatgtatatagtgctgctgttgagaaactccagaacaatgtacatggaagtgttggtatcattaaaaaaaatgaagaaaaggataatggtccattgataacattagcagatgagaaagaagaccttcccaatagtagtacatcatttctctttgataaaatacccaaacaggaggaaaaactacttcctgaactttctagcaatcacattattccaaatattcaggacacacaagtacatcttggtgttagtgatgatcttggattgcttgctcacatgaccggtagcgtagacttaacttgtacatccagtataatagaagaaaaagaattcaaaatccatacaacttcagatggaatgagcagtatttctgaaagagacttagcgtcatcaactaaggggctggagtatgctgaaatgactgctacaactctggaaactgagtcttctagtagcaaaattgtaccaaatattgatgcaggaagtataatttcagatactgaaaggtctgacgatggcaaagaatcaggaaaagaaatccgaaaaatccaaacaactactacgacacaagctgtgcagggtcggtctatcacccaacaagaccgagatctccgagttgatttaggatttcgaggaatgccaatgactgaggaacagcgacgccagtttagcccaggtccacggactacaatgtttcgtattcctgagtttaaatggtctccaatgcaccagcggcttctcactgatttactatttgcattagaaactgatgtacatgtttggaggagccattctacaaagtctgtaatggattttgtcaatagcaatgaaaatattatttttgtacataacacaattcacctcatttcccaaatggtagacaacatcatcattgcttgtggaggaattttacctttgctctctgctgctacatcaccaactggttctaagacggaattggaaaatattgaagtgacacaaggcatgtcagctgagacagcagtaactttcctcagccggctgatggctatggttgatgtacttgtgtttgcaagctctctaaattttagtgagattgaagctgagaaaaacatgtcttctggaggtttaatgcgacagtgcctaagattagtttgttgtgttgctgtgagaaactgtttagaatgtcggcaaagacagagagacaggggaaataaatcttcccatggaagcagtaaacctcaggaagttcctcaaagtgtgactgctacagcagcttcgaagactccattggaaaatgttccaggtaacctttctcctattaaggatccggatagacttcttcaggatgttgatatcaatcgccttcgtgctgttgtctttcgggatgtggatgatagcaaacaagcacagttcttagctctggctgttgtttacttcatttcggttctgatggtttccaagtatcgtgacatattagaaccccagagagagactacaagaactggaagccaaccaggtagaaacatcaggcaagaaataaattcaccaacaagtacagttgtggtcataccatctatccctcatccaagtttgaaccatggattccttgccaagttaattcctgagcagagctttggccactcattttacaaagaaacacctgctgcatttccagacaccataaaagaaaaagaaacaccaactcctggtgaagatattcaggtagaaagttcaattccccatacagattcaggaattggagaggagcaagtggctagcatcctgaatggggcagaattagaaacaagtacaggccctgatgccatgagtgaactcttatccactttgtcatccgaagtgaagaaatcacaagagagcttaactgaaaatcctagtgaaacgttgaagcctgcaacatccatatctagcattagtcaaaccaaaggcatcaatgtgaaggaaatactgaaaagtcttgtggctgctccagttgaaatagcagaatgtggccctgaacctatcccatacccagatccagcattgaagagagaaacacaagctattcttcctatgcagtttcattcctttgacaggagtgttgtggtgcctgtaaagaaaccacctccaggtagtttagctgtaaccactgtgggagccactactgctggaagtgggctgccaacaggcagtacctctaatatatttgctgctactggagctacaccaaaaagtatgattaatacaacaggtgccgtggattcagggtcctcctcctcttcctcctcttctagttttgtgaatggtgctactagcaaaaaccttccagctgtacaaactgttgctccaatgccagaagattcagctgaaaatatgagcatcactgcaaaacttgaaagagcgttagaaaaagttgctcctcttcttcgtgaaatttttgtagactttgccccattcctatctcgtacacttcttggcagtcatggacaagagctattgatagaaggccttgtttgtatgaagtccagcacatctgtggttgagcttgttatgctgctttgttctcaggaatggcaaaactctattcagaagaatgcaggacttgcatttattgagctcatcaatgaaggaagattactgtgccatgctatgaaggaccatatagtccgtgttgcaaatgaagctgagtttattttgaacagacaaagagccgaggatgtacataaacatgcagagtttgagtcacagtgtgcccaatatgctgctgatagaagagaggaagaaaagatgtgtgaccatcttatcagtgctgctaaacatcgagatcatgtaacagcaaatcagctgaaacagaagattctcaatattctcacaaataaacatggtgcttggggagcagtttctcatagccaattgcatgatttctggcgtttggattactgggaagatgatcttcgtcgaaggagacgatttgttcgcaatgcatttggctccactcatgctgaagcattgctgaaagctgcaatagaatatggcacggaagaagatgtagtaaagtcaaagaaaacattcagaagtcaagcaatagtgaaccaaaatgcagagacagaacttatgctggaaggagacgatgatgcagtcagtctgctacaggagaaagaaattgacaaccttgcaggcccagtggttctcagcacccctgcccagctcatcgctcccgtggtggtggccaaggggactctctccatcaccacgacagaaatctacttcgaggtagatgaggatgattctgccttcaagaagatcgacacgaaagttcttgcatacactgagggacttcacggaaaatggatgttcagcgagatacgagctgtattttcaagacgttaccttctacaaaacactgctttggaagtatttatggcaaaccgaacctcagttatgtttaatttccctgatcaagcaacagtaaaaaaagttgtctatagcttgcctcgggttggagtagggaccagctatggtctgccacaagccaggaggatatcattggccactcctcgacagctttataaatcttccaatatgactcagcgctggcaaagaagggaaatttcaaacttcgaatatttgatgttccttaatactattgcaggacggacatataatgatctgaaccaatatccagtgtttccgtgggtgttaaccaactatgaatcagaagagttggacctgactcttccaggaaacttcagggatctatcaaagccaattggtgctttgaaccccaagagagctgtgttttatgcagagcgttatgagacatgggaagatgatcaaagcccaccctaccattataatacccattattcaacagcaacatctactttatcctggcttgttcgaattgaacctttcacaaccttcttcctcaatgcaaatgatggaaaatttgatcatccagatcgaaccttctcatccgttgcaaggtcttggagaactagtcagagagatacttctgatgtaaaggaactaattccagagttctactacctaccagagatgtttgtcaacagtaatggatataatcttggagtcagagaagatgaagtagtggtaaatgatgttgatcttcccccttgggcaaaaaaacctgaagactttgtgcggatcaacaggatggccctagaaagtgaatttgtttcttgccaacttcatcagtggatcgaccttatatttggctataagcagcgaggaccagaagcagttcgtgctctgaatgtttttcactacttgacttatgaaggctctgtgaacctggatagtatcactgatcctgtgctcagggaggccatggaggcacagatacagaactttggacagacgccatctcagttgcttattgagccacatccgcctcggagctctgccatgcacctgtgtttccttccacagagtccgctcatgtttaaagatcagatgcaacaggatgtgataatggtgctgaagtttccttcaaattctccagtaacccatgtggcagccaacactctgccccacttgaccatccccgcagtggtgacagtgacttgcagccgactctttgcagtgaatagatggcacaacacagtaggcctcagaggagctccaggatactccttggatcaagcccaccatcttcccattgaaatggatccattaatagccaataattcaggtgtaaacaaacggcagatcacagacctcgttgaccagagtatacaaatcaatgcacattgttttgtggtaacagcagataatcgctatattcttatctgtggattctgggataagagcttcagagtttattctacagaaacagggaaattgactcagattgtatttggccattgggatgtggtcacttgcttggccaggtccgagtcatacattggtggggactgctacatcgtgtccggatctcgagatgccaccctgctgctctggtactggagtgggcggcaccatatcataggagacaaccctaacagcagtgactatccggcaccaagagccgtcctcacaggccatgaccatgaagttgtctgtgtttctgtctgtgcagaacttgggcttgttatcagtggtgctaaagagggcccttgccttgtccacaccatcactggagatttgctgagagcccttgaaggaccagaaaactgcttattcccacgcttgatatctgtctccagcgaaggccactgtatcatatactatgaacgagggcgattcagtaatttcagcattaatgggaaacttttggctcaaatggagatcaatgattcaacacgggccattctcctgagcagtgacggccagaacctggtcaccggaggggacaatggggtagtagaggtctggcaggcctgtgacttcaagcaactgtacatttaccctggatgtgatgctggcattagagcaatggacttgtcccatgaccagaggactctgatcactggcatggcttctggtagcattgtagcttttaatatagattttaatcggtggcattatgagcatcagaacagatactgaagataaaggaagaaccaaaagccaagttaaagctgagagcacaagtgctgcatggaaaggcaatatctctggtggaaaaaactcgtctacatcgacctccgtttgtacattccatcacacccagcaatagctgtacattgtagtcagcaaccattttactttgtgtgttttttcacgactgaacaccagctgctatcaagcaagcttatatcatgtaaattatatgaattaggagatgttttggtaattatttcatatattgttgtttattgagaaaaggttgtaggatgtgtcacaagagacttttgacaattctgaggaaccttgtgtccagttgttacaaagtttaagctttgaacctaacctgcatcccatttccagcctcttttcaagctgagaaaaaaaaaaaaaaacacgtttgatactttgtacatcagatgcatcttatttaaaagggatacttttgtaaaagtaaaaccttgtataaagaacaaaatgtttcttaattttattgtggagttacaacttgcatgttccttactcctgttggcttgatggaacaggtgcattcacactatgaaacagaaagatctgtccaaggacacagcttgtatgaaagggttgaatttgggctccatcagtaatttttgacattttcaccaaaatatagtttgcactttttaatctaaagtcatcccttctgagtgaaatttgctcataaagcatttggatactaagccattatttgccattttgggtactttatacaaagaaaattcagccctaccctgcataatttgaagacacagcagaaagggggcttagggatgaggtcctggtttttcttgtataaataggagtcatgggcgttagttctgtagtaataacttcccagcacctggacatctcttccagagttatcccactggcttggtgtgtatacattaggggaggataatctgatgctaactttttttttctctttggttcttgaatagcttagtttctttaataacaagtcaaactttattacaacaataactgaagttattcttttaggttctcgtgaaattctcactgaaagccacattcttagcctaaggcatttcatcttttatgatataaaatgatggctatcaaatgattttccatacattgtactgatcaagttatacacccaggggtatatacactttcttcatgtttcttctttgtatatttggtgactgtatcgtcatagatgtacatattgtgtcggtagggctatgaggcatgttacaggaatgtaattttctcagaatttacactcactcgcagtcatttatttaaaaagataaaacaagataatgggttctttgtattggcactttgcaccagaaacatatcattatttattgatgtgattacttatttgttatccaccttgtactagtaagttttagcactgaattccttcttcactgttgtttgtatttatgaaattctgaaattatggggaatcagcgtaatgattaagttattcatcaccaggctgtaagcaatatcttgagtttgtagcttagaattgggaggatacttaacatctggaagacaagttcatttcatcttgagatcatggtgaaatattttggatatataaattccttaagctattgtaaccatgttttattgcaaagatgtaaaatatgccagatgtgtgtgagttggaaatcaaaaaaagaaaaataaaatatgcaaagaattcaaaaaaaaaaaaaaaaaaaaa

SEQ ID NO: 11867 - DNA, 7389 bp, Homo sapiens
gtttctctctctggtcggaagcggcggtaatggcggatggtgggttgtggcgccggcggcggctgctgtgagggacgatgagtgcctccttcgtgccgaacggggccagcctggaagattgtcactgtaacctcttctgcctggctgacttgacaggaattaagtggaaaaaatatgtatggcaaggcccaacttctgcccctattctgtttcctgtgacagaagaagaccccattttgagcagttttagtcgctgccttaaggcagatgtacttggtgtttggcggcgagatcaaagacctggaagaagagaattgtggatattttggtggggtgaagacccagttttgctgaccttattcaccatgacttatcagaagaagaagatggaatgtgggagaatggactttcctatgaatgccgtactctgcttttccaaagcagttcacaatctattggaacggtgtttaatgaacaggaattttgtacgtattggcaagtggtttgtaaagccttatgaaaaagatgaaaaacctataaataaaagtgaacacttgtcctgctccttcacctttttcttgcatggagacagcaatgtttgtaccagtgtggaaattaaccaacatcaacctgtataccttctcagtgaagagcatatcacccttgctcaacagtctaatagcccatttcaagttatcttatgcccatttggactaaatggcactctcacaggacaggcattcaagatgtctgattcagctacaaaaaaattaattggtgaatggaaacagttctatcctatctcatgttgcttgaaggagatgtctgaagaaaaacaggaagatatggattgggaagatgattctttagctgcagtagaagttcttgttgctggtgtccgaatgatctacccagcatgctttgttctagtccctcagtcagacattcctactcctagccctgtgggatccactcactgttcatcttcttgcttgggtgtccaccaagtgcctgcttccacaagagatcctgctatgtcttcggttacgcttacaccacctacgtctcctgaggaagtccaaacagttgatcctcagtctgtccagaagtgggtcaaattttcttcagtatctgatggcttcaactccgatagtactagccaccatggtgggaaaatacccagaaaattagcaaatcatgtggtggatagagtttggcaagaatgcaatatgaacagagcacagaacaagaagaagtattctgcttcatcaggtggtctatgcgaagaagcgacagctgctaaagtggcatcctgggattttgttgaagccacacaaagaacaaattgcagttgtttgaggcacaaaaatctcaagtcaagaaatgctggacaacaaggacaggcaccatctttaggtcagcaacaacaaatacttcctaagcacaagaccaatgagaagcaagaaaagagtgaagagccacagaaacgccccttgactccttttcaccatcgtgtgtctgttagtgatgatgttggcatggacgcagattcagccagccaaagacttgtgatctctgctccagacagtcaagtgagattttcaaatatccgaactaatgatgtagcaaagactcctcagatgcatggcaccgaaatggcaaattcacctcaaccacccccacttagtcctcacccttgtgatgtggttgatgaaggagtgactaaaacaccttcaactcctcagagtcaacatttttatcaaatgccaacaccagatcccttggttccttctaaaccaatggaagataggatagacagtttgtcccagtctttcccacctcaatatcaggaagctgtagaacctacagtatatgttggtacagcagtaaacttggaagaagatgaagccaatatagcctggaagtattacaagttcccaaagaaaaaagatgtagagtttttaccacctcaacttccaagtgataaattcaaggatgatccagttggaccttttggacaggaaagtgtaacatcagttacagagttaatggtgcaatgtaagaaacctttaaaagtttctgatgaattagtgcagcaatatcaaattaaaaaccagtgtctttcagcaatagcatctgatgcagaacaagaacctaaaattgatccatatgcatttgttgaaggagatgaggaattcctttttcctgataaaaaagatagacaaaatagtgagagagaagctggaaaaaaacacaaggtagaagatgggacatctagtgtaacagtgttatcacatgaagaagatgctatgtcattatttagtccctctatcaagcaagatgctccacgccctactagtcatgcccgtcctccatcaacaagtttgatttatgactcagacctggctgtctcttatactgaccttgataatctcttcaattctgatgaagatgaactaacacctggatctaaaagatcagcaaatggatcagatgataaagccagctgcaaggaatcaaagacaggaaatctggacccgttatcttgcataagcactgcagatcttcataaaatgtatcctacaccaccatcattggaacaacatattatgggattttccccaatgaatatgaataataaagaatatggtagtatggatacaacacctggaggaactgttctagaaggaaatagttctagtataggagcgcagttcaaaattgaggttgatgagggattctgtagccccaaaccttctgaaattaaagatttttcttatgtctataagcctgaaaattgtcaaattctagtgggatgttccatgtttgcacctctaaaaactctaccaagccaatatctgccccttatcaaattgccagaagagtgtatttaccgtcagagttggactgttggaaaattggaattgctttcttcagggccttcaatgccattcatcaaagagggtgatggaagtaatatggatcaagaatatggcactgcttatacacctcaaactcatacttcttgtgggatgcctcctagcagtgcacctcctagtaacagcggagcaggaattcttccttctccatccacccctcggtttccaactccaaggactccaaggactcctcggactcctcgtggagctggtggacctgctagtgctcaaggttcagtcaaatatgaaaattcagacttgtattcaccagcttctaccccatctacatgcagaccccttaattctgttgaacctgcaactgtcccttccatccctgaagcacacagtctttatgtaaacctcatcctttcagaatcagttatgaatttgtttaaagactgtaactctgatagttgttgcatctgtgtttgcaacatgaacatcaagggtgccgatgttggagtttacattccagatccaacgcaggaagcacaatataggtgtacctgtggcttcagtgctgtcatgaacagaaaatttggaaacaattcaggattatttcttgaagatgaactagatatcataggacgcaatacagactgtggcaaagaagcagaaaaacgttttgaagctctcagggctacctctgctgaacatgttaatggaggactaaaggaatctgaaaaattatctgatgatttgatattattgctacaagatcagtgcactaatttattttcaccctttggagcagcagaccaagatccttttcctaaaagtggtgtaattagcaattgggtacgtgttgaagagcgtgactgttgcaatgactgctaccttgcattagaacatgggcgtcagttcatggataacatgtcaggaggaaaagttgatgaagcacttgtgaaaagttcatgcttacacccctggtccaaaagaaacgatgtgagtatgcagtgctcacaggatatacttcgaatgctcctctctcttcagccagttcttcaggatgccattcagaaaaaaagaacagtaagaccttggggtgttcagggtcctctcacttggcaacaatttcataaaatggctggccgaggctcttatggaactgatgaatccccagaaccactgccaatccccacatttttgttgggttatgattatgattatctggtgctttctccatttgctcttccttattgggagagacttatgctggaaccctatggatctcaaagagatatagcctatgttgtactgtgtccagaaaatgaagccttgttaaatggagcaaaaagcttttttagagatcttactgcaatatatgagtcctgtcgattaggtcaacatagacctgtttctcgactgttaacagatgggatcatgagagttggatctactgcatcaaagaaactatcagaaaagttggtagcagaatggttttctcaggcagctgatggtaacaatgaagcattttctaaactcaagctttatgcacaagtctgcagatatgacctaggtccttatcttgcttccctgccattggacagctctctactttcccagccaaatttagttgcccctacaagtcagtctttgattactccacctcagatgacaaatactggaaatgctaatactccatctgccaccttagcatctgcagcgagcagcactatgacagtgacttcaggtgttgccatatctacttcagttgccacagctaattcaactttgaccacagcttcaacttcatcttcatcatcctccaacttgaatagtggagtatcatcaaataaactaccttcgtttccaccctttggcagtatgaacagtaatgctgcaggatccatgtctacacaagcaaatacagttcagagtggtcagctaggagggcaacagacatcagctctacagacagctgggatttctggagaatcatcttcacttcccactcagccgcatcctgatgtgtctgaaagcacgatggatcgggataaagtgggaatccccacagatggtgattcacatgcagtcacgtatccacctgcaattgttgtttatataattgatccttttacatacgaaaatacagacgagagcactaactcttctagtgtgtggacattggggctacttcgatgctttctagaaatggtccagactcttcctcctcatatcaagagtactgtttctgtacagattattccttgtcagtacctgttgcaacctgtgaagcatgaagatagagaaatctatccccagcatttaaaatccctggctttttcggcctttacccagtgtcggaggccacttccaacatcaaccaatgtgaaaacattgactggctttggtccaggtttagccatggaaactgcccttagaagtcctgatagaccagagtgtattcgactttatgcacctccttttattctggctccagtgaaggacaaacagacagagctaggagaaacatttggagaagctggacagaaatataatgttctttttgtgggatactgtttatcacatgatcaaaggtggattcttgcatcttgcacagatctatatggagaacttttagaaacttgtatcattaacatcgatgttccaaatagggctcgtcggaaaaaaagttctgctagaaaatttggtctacagaaactttgggagtggtgcttaggacttgtacaaatgagttcattgccatggagagttgtaattggtcgtctaggaaggattggtcatggagaattgaaagattggagctgtttgctgagtcgtcgaaacttgcagtctctaagtaaaaggctcaaagacatgtgtagaatgtgtggtatatctgctgcagactcccctagcattctcagtgcttgcttggtggcaatggagccgcaaggctcttttgttattatgccagattctgtgtcaactggttctgtatttggaagaagcacgactctaaatatgcagacatctcagctaaataccccacaggatacatcatgtactcatatacttgtgtttcctacttctgcttctgtgcaagtagcttcagctacttataccactgaaaatttggatttagctttcaatcccaacaatgatggagcagatggaatgggtatctttgatttgttagacacaggagatgatcttgaccctgatatcattaatatccttcctgcttctccaactggttctcctgtacattctccaggatctcattacccccatggaggtgatgcgggcaagggtcagagtactgatcggctactatcaacagaacctcatgaggaagtacctaatattcttcagcaaccattggcccttggttactttgtatcaactgccaaagcaggtccattacctgactggttctggtcagcatgtcctcaagcacaatatcagtgtcccctttttcttaaggcctctttgcacctccacgtgccttcagtgcaatctgacgagctgcttcacagtaaacactcccacccacttgactcaaatcagacttcagatgtcctcaggtttgttttggaacagtacaatgcactctcctggctaacctgtgaccctgcaacccaggacagacgctcatgtctcccaattcattttgtggtgctgaatcagttatataactttattatgaatatgctgtgatcttcatttgatggaactgtgcaagaaaagaacaaggaaaaatggatgtttcgctgcaggattaagttacaattatcttctcagtgaaggtcatttgtgatggggtctaattcttattacttcaacaaatattgttttgacttggggggaggggctataaccctgctatttttcattgactctattgaactctttaggatgatgactgatcatacaaaacgtattataacattttcgtagcaaaattaaccttttttttttccagtcacagtatttgtgaaaagtaatgagccatagtacccagtcatgttaaatgaatattaaaagcatggagaggaaacatgaggaacaatgaatttcaacatatggcttcagaacatgaagatgttcttgtatggattatagtatctagtattcaaaaatgcctgcatctcttctcttatttattgtaagtttttaaatgtataaattgtcttatatttcttaacctcttttataaaaattttcctagaaggtttatactgccttcttgctttaaagcaattggtctaaaatatatgtaatcgtcttaattaaaaagttgcagtagggttgcttttagagtattatttttttgtaagggggtgggtgggacagtaaatttgtattgtctcgatgtacagtttaacggggatagagggggaataatgtccataccattgtgtgtggaggatttacagctaagctgtagttgcagagtacatgtacagtaatgaagttcactgtgtttataaattgaaaaggtacc

SEQ ID NO: 11868 - DNA, 1438 bp, Homo sapiens
atgccatgtggcaaacaaggaaatttgcaagttcccggttccaaggtgttacctggcttgggagaaggttgtaaagaaatgtggcttcgaaaggtaatctacggaggtgaggtctgggggaagtccccagaacctgagttcccctcactcgtgaacctgtgccagagttggaaaattaacaatttgatgtcaactgtccacagtgatgaggctggtatgctgtcctactttctgtttgaagagctgatgcgatgtgacaaagattccatgccagatggaaatctgtcagaggaggaaaaattgtttctctcatattttcctttgcacaagtttgagctagaacagaacatcaaagaacttaacacccttgcggaccaagttgacaccactcacgagttgcttaccaagaccagcctggtggccagctcttccggggctgtttctggggtcatgaacatcctgggtttggccctagcacctgtgacagcaggaggcagtctcatgctctcagcaactgggacagggttgggggcagcagctgccatcaccaacatagtaacaaatgtcttagaaaatagaagcaattcagcagcaagagacaaagccagccgactggggcctctgacaacatcacatgaggctttcggaggaataaattggtctgaaatcgaggctgctggcttttgtgttaataagtgtgtaaaagctatccagggcatcaaggatcttcatgcctaccagatggccaaatccaactctggcttcatggctatggtcaagaattttgtggccaagagacacatccctttctggacggctagaggggtgcagagagcctttgagggcacaactctggccatgaccaatggtgcctgggtgatgggtgctgctggggctggcttcttacttatgaaagacatgagcagcttcctgcagagctggaagcacctggaggatggggcaaggacggagacagcagaggaactgagagcacttgctaagaagctggagcaggagctggaccggctcacccagcaccaccggcacctgccgcagaaggcgagccagacctgttccagctcccggggcagggctgttcgaggatcccgtgtggttaaaccagaagggtctcgctcacctctcccctggcctgttgtggagcaccagcctaggctgggccctggcgtggcactgaggacaccaaagaggacagtctctgccccaaggatgcttggccaccagccagccccaccagcaccagcaagaaaggggagacaggccccgggaagacaccgacaatgagaagagttggtcaccctgtcaccactgaaccttgatttaacagaggcaaaatgcaagtcttccctgaagaatactgggggtagggaaacttctagtggcaatgataaaaccagcagcaatgataatagaaggcaaa

SEQ ID NO: 11869 - DNA, 1690 bp, Homo sapiens
gccaaatcgcaaatatggcgccggagcggctgcggagccgggcgctctccgccttcaagttgcggggcttgctgctccgtggtgaagctattaagtacctcacagaagctcttcagtctatcagtgaattagagcttgaagataaactggaaaagataattaatgcagttgagaagcaacccttgtcatcaaacatgattgaacgatctgtggtggaagcagcagtccaggaatgcagtcagtctgttgatgaaactatagagcacgttttcaatatcataggagcatttgatattccacgctttgtgtacaattcagaaagaaaaaaatttcttcctctgttaatgaccaaccaccctgcaccaaatttatttggaacaccaagagataaagcagagatgtttcgtgagcgatataccattttgcaccagaggacccacaggcatgaattatttactcctccggtgataggttctcaccctgatgaaagcggaagcaaattccagcttaaaacaatagaaaccttattgggtagtacaaccaaaatcggagatgcgattgttcttggaatgataacgcagttaaaagagggaaaattttttctggaagatcctactggaacagtccaactagaccttagtaaagctcagttccatagtggtttatacacagaggcatgctttgtcttagcagaaggttggtttgaagatcaagtgtttcatgtcaatgcctttggatttccacccactgagccctctagtactactagggcatactatggaaatattaatttttttggaggtccttctaatacatctgtgaagacttctgcaaaactaaaacagctagaagaggagaataaagatgctatgtttgtgtttttatctgatgtttggttggaccaggtggaagtattggaaaaacttcgcataatgtttgctggttattcaccagcacctccaacctgctttattctgtgtggtaatttttcatctgcaccatatggaaaaaatcaagttcaagctttgaaagattccctaaaaactttggcagatataatatgtgaatacccagatattcaccaaagtagtcgttttgtgtttgtacctggtccagaggatcctggatttggttccatcttaccaaggccaccacttgctgaaagcatcactaatgaattcagacaaagggtaccattttcagtttttactactaatccttgcagaattcagtactgtacacaggaaattactgtcttccgtgaagacttagtaaataaaatgtgcagaaactgcgtccgttttcctagcagcaatttggctattcctaatcactttgtaaagactatcttatcccaaggacatctgactcccctacctctttatgtctgcccagtgtattgggcatatgactatgctttgagagtgtatcctgtgcccgatctacttgtcattgcagacaaatatgatcctttcactacgacaaataccgaatgcctctgcataaaccctggctcttttccaagaagtggattttcattcaaagttttttatccttctaataagacagtagaagatagcaaacttcaaggcttttgagattcttaaagatcatctgaagaaaattcatcagttttctgcttaactctatatcttatgtgattctgatattacaataaaattatggtaaa

SEQ ID NO: 11870 - DNA, 2077 bp, Homo sapiens
aatcaggcgcgtccctctggcgctggagccaggacctggcgttgggcggtacttggacagcggttcttgagctctcgcggttgccggtagattgttgccagttgccagttgccagtcgtttttcggaaagctggcagcggctttttcaccgggttctgcttgaggccgagccaaagagtggctgtgactcgggagacggagtggaacacccggctgggcaggcccggacagctcccgcgacccagcaccgcaggatcagaccgtgcctctgcggggagaggctggagaggaagagtccggcctgggagccgtcagagcagccctgcagaacggggtgggggctgctgtagatagacccttacgcccagagaactgctgggaggctgtggcgcgaggcgggactcaaatgctggaggaaggagtactgccttccccaggccctgcccttccccaagaggaaaacacaggagaggaaggaatggctgctggtctcctcatagctgggccccggggatccacattcttcagcagtgtgacggtagcttttgcacaggaagggtggaggtgcctcgtgtctactccacgggacaggttcaaggaggggataccaggaaagtccaggagccttgtcctactaggacttccagtttcccagcctggcatgaactcccagttggaacaaagggaaggcgcatggatgctggagggcgaagacctgcgaagtccctctccaggctggaagattatatctggatcaccaccagagcaagccctttctgaagcttcattccaagacccatgtgtagagatgccccctggggattcagaccacgggaccagtgaccttgagaagagcttcaatctgagaccagtcctctctccgcaacagagagtgcccgtggaagcgagacctcgcaaatgtgagacacacaccgagagcttcaagaactcggaaatcctgaaacctcacagagcaaaaccatatgcatgtaatgaatgtggcaaagccttcagttactgttcttccctttctcagcatcagaagagccacactggagagaagccctatgagtgcagtgaatgtgggaaggccttcagccagagctcatctctcattcagcaccagaggattcacactggagagaagccttacaagtgcagtgaatgtggaagagccttcagccagaatgccaacctcaccaaacaccagcgaacccacaccggagagaagccctacagatgcagcgagtgtgagaaagccttcagtgactgctcagctcttgttcagcatcagagaattcataccggagagaagccctacgaatgcagcgactgtgggaaggccttccgtcacagtgcaaacctcacgaaccatcagaggactcacaccggggagaagccctacaagtgcagcgagtgtgggaaggccttcagttactgcgcagcgttcattcagcaccagaggattcacaccggggagaagccctacagatgtgccgcgtgtgggaaggccttcagccagagtgcaaacctcacaaaccatcagaggactcacactggggagaaaccctacaagtgcagcgagtgtgggaaggccttcagccagagtaccaatctcataatccaccaaaagacccacaccggggagaagccatataaatgtaatgaatgtgggaaattcttcagtgagagctcagccctcattcggcatcatataatccacaccggagaaaaaccttatgagtgtaatgagtgtggtaaagcgtttaaccagagctcatcccttagtcagcatcagagaatccacacaggcgtgaaaccctacgaatgcagcgagtgtgggaaggccttccggtgcagctctgccttcgttagacatcagagactccacgccggagagtaactaggaacatggtagaagtggagagagtcccggacatgccgactcaggacaggtgggtgaggatctgagaaatgctaaaggcttgaaagcatctgaagacatctaacttagagtctgcagcccagagccacatgcaaaacaccttcaataaacagccactatttcacatgctgt

SEQ ID NO: 11871 - DNA, 8126 bp, Homo sapiens
cggccgccgccggcacccacagcgccaagagcggcggctccgaggcggctctcaaggagggtggaagcgccgccgcgctgtcctcctcctcctcctcctccgcggcggcagcggcggcatcctcttcctcctcgtcgggcccgggctcggccatggagacggggctgctccccaaccacaaactgaaaaccgttggcgaagcccccgccgcgccgccccaccagcagcaccaccaccaccaccatgcccaccaccaccaccaccatgcccaccacctccaccaccaccacgcactacagcagcagctaaaccagttccagcagcagcagcagcagcagcaacagcagcagcagcagcagcagcaacagcaacatcccatttccaacaacaacagcttgggcggcgcgggcggcggcgcgcctcagcccggccccgacatggagcagccgcaacatggaggcgccaaggacagtgctgcgggcggccaggccgaccccccgggcccgccgctgctgagcaagccgggcgacgaggacgacgcgccgcccaagatgggggagccggcgggcggccgctacgagcacccgggcttgggcgccctgggcacgcagcagccgccggtcgccgtgcccgggggcggcggcggcccggcggccgtcccggagtttaataattactatggcagcgctgcccctgcgagcggcggccccggcggccgcgctgggccttgctttgatcaacatggcggacaacaaagccccgggatggggatgatgcactccgcctccgccgccgccgccggggcccccggcagcatggaccccctgcagaactcccacgaagggtaccccaacagccagtgcaaccattatccgggctacagccggcccggcgcgggcggcggcggcggcggcggcggcggaggaggaggaggcagcggaggaggaggaggaggaggaggagcaggagcaggaggagcaggagcgggagctgtggcggcggcggccgcggcggcggcggcagcagcaggaggcggcggcggcggcggctatgggggctcgtccgcggggtacggggtgctgagctccccccggcagcagggcggcggcatgatgatgggccccgggggcggcggggccgcgagcctcagcaaggcggccgccggctcggcggcggggggcttccagcgcttcgccggccagaaccagcacccgtcgggggccaccccgaccctcaatcagctgctcacctcgcccagccccatgatgcggagctacggcggcagctaccccgagtacagcagccccagcgcgccgccgccgccgccgtcgcagccccagtcccaggcggcggcggcgggggcggcggcgggcggccagcaggcggccgcgggcatgggcttgggcaaggacatgggcgcccagtacgccgctgccagcccggcctgggcggccgcgcaacaaaggagtcacccggcgatgagccccggcacccccggaccgaccatgggcagatcccagggcagcccaatggatccaatggtgatgaagagacctcagttgtatggcatgggcagtaaccctcattctcagcctcagcagagcagtccgtacccaggaggttcctatggccctccaggcccacagcggtatccaattggcatccagggtcggactcccggggccatggccggaatgcagtaccctcagcagcaggactctggagatgccacatggaaagaaacattctggttgatgccacctcagtatggacagcaaggtgtgagtggttactgccagcagggccaacagccatattacagccagcagccgcagcccccgcacctcccaccccaggcgcagtatctgccgtcccagtcccagcagaggtaccagccgcagcaggacatgtctcaggaaggctatggaactagatctcaacctcctctggcccccggaaaacctaaccatgaagacttgaacttaatacagcaagaaagaccatcaagtttaccagatctgtctggctccattgatgacctccccacgggaacggaagcaactttgagctcagcagtcagtgcatccgggtccacgagcagccaaggggatcagagcaacccggcgcagtcgcctttctccccacatgcgtcccctcatctctccagcatcccggggggcccatctccctctcctgttggctctcctgtaggaagcaaccagtctcgatctggcccaatctctcctgcaagtatcccaggtagtcagatgcctccgcagccacccgggagccagtcagaatccagttcccatcccgccttgagccagtcaccaatgccacaggaaagaggttttatggcaggcacacaaagaaaccctcagatggctcagtatggacctcaacagacaggaccatccatgtcgcctcatccttctcctgggggccagatgcatgctggaatcagtagctttcagcagagtaactcaagtgggacttacggtccacagatgagccagtatggaccacaaggtaactactccagacccccagcgtatagtggggtgcccagtgcaagctacagcggcccagggcccggtatgggtatcagtgccaacaaccagatgcatggacaagggccaagccagccatgtggtgctgtgcccctgggacgaatgccatcagctgggatgcagaacagaccatttcctggaaatatgagcagcatgacccccagttctcctggcatgtctcagcagggagggccaggaatggggccgccaatgccaactgtgaaccgtaaggcacaggaggcagccgcagcagtgatgcaggctgctgcgaactcagcacaaagcaggcaaggcagtttccccggcatgaaccagagtggacttatggcttccagctctccctacagccagcccatgaacaacagctctagcctgatgaacacgcaggcgccgccctacagcatggcgcccgccatggtgaacagctcggcagcatctgtgggtcttgcagatatgatgtctcctggtgaatccaaactgcccctgcctctcaaagcagacggcaaagaagaaggcactccacagcccgagagcaagtcaaagaagtccagctcctccaccactactggggagaagatcacgaaggtgtacgagctggggaatgagccagagagaaagctctgggtcgaccgatacctcaccttcatggaagagagaggctctcctgtctcaagtctgcctgccgtgggcaagaagcccctggacctgttccgactctacgtctgcgtcaaagagatcgggggtttggcccaggttaataaaaacaagaagtggcgtgagctggcaaccaacctaaacgttggcacctcaagcagtgcagcgagctccctgaaaaagcagtatattcagtacctgtttgcctttgagtgcaagatcgaacgtggggaggagcccccgccggaagtcttcagcaccggggacaccaaaaagcagcccaagctccagccgccatctcctgctaactcgggatccttgcaaggcccacagaccccccagtcaactggcagcaattccatggcagaggttccaggtgacctgaagccacctaccccagcctccacccctcacggccagatgactccaatgcaaggtggaagaagcagtacaatcagtgtgcacgacccattctcagatgtgagtgattcatccttcccgaaacggaactccatgactccaaacgccccctaccagcagggcatgagcatgcccgatgtgatgggcaggatgccctatgagcccaacaaggacccctttgggggaatgagaaaagtgcctggaagcagcgagccctttatgacgcaaggacagatgcccaacagcagcatgcaggacatgtacaaccaaagtccctccggagcaatgtctaacctgggcatggggcagcgccagcagtttccctatggagccagttacgaccgaaggcatgaaccttatgggcagcagtatccaggccaaggccctccctcgggacagccgccgtatggagggcaccagcccggcctgtacccacagcagccgaattacaaacgccatatggacggcatgtacgggcccccagccaagcgccacgagggcgacatgtacaacatgcagtacagcagccagcagcaggagatgtacaaccagtatggaggctcctactcgggcccggaccgcaggcccatccagggccagtacccgtatccctacagcagggagaggatgcagggcccggggcagatccagacacacggaatcccgcctcagatgatgggcggcccgctgcagtcgtcctccagtgaggggcctcagcagaatatgtgggcagcacgcaatgatatgccttatccctaccagaacaggcagggccctggcggccctacacaggcgcccccttacccaggcatgaaccgcacagacgatatgatggtacccgatcagaggataaatcatgagagccagtggccttctcacgtcagccagcgtcagccttatatgtcgtcctcagcctccatgcagcccatcacacgcccaccacagccgtcctaccagacgccaccgtcactgccaaatcacatctccagggcgcccagcccagcgtccttccagcgctccctggagaaccgcatgtctccaagcaagtctccttttctgccgtctatgaagatgcagaaggtcatgcccacggtccccacatcccaggtcaccgggccaccaccccaaccacccccaatcagaagggagatcacctttcctcctggctcagtagaagcatcacaaccagtcttgaaacaaaggcgaaagattacctccaaagatatcgttactcctgaggcgtggcgtgtgatgatgtcccttaaatcaggtcttttggctgagagtacgtgggctttggacactattaatattcttctgtatgatgacagcactgttgctactttcaatctctcccagttgtctggatttctcgaacttttagtcgagtactttagaaaatgcctgattgacatttttggaattcttatggaatatgaagtgggagaccccagccaaaaagcacttgatcacaacgcagcaaggaaggatgacagccagtccttggcagacgattctgggaaagaggaggaagatgctgaatgtattgatgacgacgaggaagacgaggaggatgaggaggaagacagcgagaagacagaaagcgatgaaaagagcagcatcgctctgactgccccggacgccgctgcagacccaaaggagaagcccaagcaagccagtaagttcgacaagctgccaataaagatagtcaaaaagaacaacctgtttgttgttgaccgatctgacaagttggggcgtgtgcaggagttcaatagtggccttctgcactggcagctcggcgggggtgacaccaccgagcacattcagactcactttgagagcaagatggaaattcctcctcgcaggcgcccacctccccccttaagctccgcaggtagaaagaaagagcaagaaggcaaaggcgactctgaagagcagcaagagaaaagcatcatagcaaccatcgatgacgtcctctctgctcggccaggggcattgcctgaagacgcaaaccctgggccccagaccgaaagcagtaagtttccctttggtatccagcaagccaaaagtcaccggaacatcaagctgctggaggacgagcccaggagccgagacgagactcctctgtgtaccatcgcgcactggcaggactcgctggctaagcgatgcatctgtgtgtccaatattgtccgtagcttgtcattcgtgcctggcaatgatgccgaaatgtccaaacatccaggcctggtgctgatcctggggaagctgattcttcttcaccacgagcatccagagagaaagcgagcaccgcagacctatgagaaagaggaggatgaggacaagggggtggcctgcagcaaagatgagtggtggtgggactgcctcgaggtcttgagggataacacgttggtcacgttggccaacatttccgggcagctagacttgtctgcttacacggaaagcatctgcttgccaattttggatggcttgctgcactggatggtgtgcccgtctgcagaggcacaagatccctttccaactgtgggacccaactcggtcctgtcgcctcagagacttgtgctggagaccctctgtaaactcagtatccaggacaataatgtggacctgatcttggccactcctccatttagtcgtcaggagaaattctatgctacattagttaggtacgttggggatcgcaaaaacccagtctgtcgagaaatgtccatggcgcttttatcgaaccttgcccaaggggacgcactagcagcaagggccatagctgtgcagaaaggaagcattggaaacttgataagcttcctagaggatggggtcacgatggcccagtaccagcagagccagcacaacctcatgcacatgcagcccccgcccctggaaccacctagcgtagacatgatgtgcagggcggccaaggctttgctagccatggccagagtggacgaaaaccgctcggaattccttttgcacgagggccggttgctggatatctcgatatcagctgtcctgaactctctggttgcatctgtcatctgtgatgtactgtttcagattgggcagttatgacataagtgagaaggcaagcatgtgtgagtgaagattagagggtcacatataactggctgttttctgttcttgtttatccagcgtaggaagaaggaaaagaaaatctttgctcctctgccccattcactatttaccaattgggaattaaagaaataattaatttgaacagttatgaaattaatatttgctgtctgtgtgtataagtacatcctttggggttttttttttctcttttttttaaccaaagttgctgtctagtgcattcaaaggtcactttttgttcttcacagatctttttaatgttctttcccatgttgtattgcatttttgggggaagcaaattgactttaaagaaaaaagttgtggcaaaagatgctaagatgcgaaaatttcaccacactgagtcaaaaaggtgaaaaattatccatttcctatgcgttttactcctcagagaatgaaaaaaactgcatcccatcacccaaagttctgtgcaatagaaatttctacagatacaggtataggggctcaaggaggtatgtcggtcagtagtcaaaactatgaaatgatactggtttctccacaggaatatggttccattaggctgggagcaaaaacaatgttttttaagattgagaatacatacctgacaacgatccggaaactgctcctcaccactcccgtcatgcctgctgtcggcgtttgaccttccacgtgacagttcttcacaattcctttcatcattttttaaatattttttttactgcctatgggctgtgatgtatatagaagttgtacattaaacataccctcatttttttcttttcttttttttttttttttttagtacaaagttttagtttctttttcatgatgtggtaactacgaagtgatggtagatttaaataattttttatttttattttatatattttttcattagggccatatctccaaaaaaagaaagaaaaaatacaaaaaacaaaaacaaaaaaaaaagagggtaatgtacaagtttctgtatgtataaagtcatgctcgatttcaggagagcagctgatcacaatttgcttcatgaatcaaggtgtggaaatggttatatatggattgatttagaaaatggttaccagtacagtcaaaaaagagaaaatgaaaaaaatacaactaaaaggaagaaacacaacttcaaagatttttcagtgatgagaatccacatttgtatttcaagataatgtagtttaaaaaaaaaaaaaagaaaaaaacttgatgtaaattcctccttttcctctggcttaatgaatatcatttattcagtataaaatctttatatgttccacatgttaagaataaatgtacattaaatcttgttaagcactgtgaaaaaaaaaaaaaaaaaaaaaa

SEQ ID NO: 11872 - DNA, 8087 bp, Homo sapiens
cggccgccgccggcacccacagcgccaagagcggcggctccgaggcggctctcaaggagggtggaagcgccgccgcgctgtcctcctcctcctcctcctccgcggcggcagcggcggcatcctcttcctcctcgtcgggcccgggctcggccatggagacggggctgctccccaaccacaaactgaaaaccgttggcgaagcccccgccgcgccgccccaccagcagcaccaccaccaccaccatgcccaccaccaccaccaccatgcccaccacctccaccaccaccacgcactacagcagcagctaaaccagttccagcagcagcagcagcagcagcaacagcagcagcagcagcagcagcaacagcaacatcccatttccaacaacaacagcttgggcggcgcgggcggcggcgcgcctcagcccggccccgacatggagcagccgcaacatggaggcgccaaggacagtgctgcgggcggccaggccgaccccccgggcccgccgctgctgagcaagccgggcgacgaggacgacgcgccgcccaagatgggggagccggcgggcggccgctacgagcacccgggcttgggcgccctgggcacgcagcagccgccggtcgccgtgcccgggggcggcggcggcccggcggccgtcccggagtttaataattactatggcagcgctgcccctgcgagcggcggccccggcggccgcgctgggccttgctttgatcaacatggcggacaacaaagccccgggatggggatgatgcactccgcctccgccgccgccgccggggcccccggcagcatggaccccctgcagaactcccacgaagggtaccccaacagccagtgcaaccattatccgggctacagccggcccggcgcgggcggcggcggcggcggcggcggcggaggaggaggaggcagcggaggaggaggaggaggaggaggagcaggagcaggaggagcaggagcgggagctgtggcggcggcggccgcggcggcggcggcagcagcaggaggcggcggcggcggcggctatgggggctcgtccgcggggtacggggtgctgagctccccccggcagcagggcggcggcatgatgatgggccccgggggcggcggggccgcgagcctcagcaaggcggccgccggctcggcggcggggggcttccagcgcttcgccggccagaaccagcacccgtcgggggccaccccgaccctcaatcagctgctcacctcgcccagccccatgatgcggagctacggcggcagctaccccgagtacagcagccccagcgcgccgccgccgccgccgtcgcagccccagtcccaggcggcggcggcgggggcggcggcgggcggccagcaggcggccgcgggcatgggcttgggcaaggacatgggcgcccagtacgccgctgccagcccggcctgggcggccgcgcaacaaaggagtcacccggcgatgagccccggcacccccggaccgaccatgggcagatcccagggcagcccaatggatccaatggtgatgaagagacctcagttgtatggcatgggcagtaaccctcattctcagcctcagcagagcagtccgtacccaggaggttcctatggccctccaggcccacagcggtatccaattggcatccagggtcggactcccggggccatggccggaatgcagtaccctcagcagcagatgccacctcagtatggacagcaaggtgtgagtggttactgccagcagggccaacagccatattacagccagcagccgcagcccccgcacctcccaccccaggcgcagtatctgccgtcccagtcccagcagaggtaccagccgcagcaggacatgtctcaggaaggctatggaactagatctcaacctcctctggcccccggaaaacctaaccatgaagacttgaacttaatacagcaagaaagaccatcaagtttaccagatctgtctggctccattgatgacctccccacgggaacggaagcaactttgagctcagcagtcagtgcatccgggtccacgagcagccaaggggatcagagcaacccggcgcagtcgcctttctccccacatgcgtcccctcatctctccagcatcccggggggcccatctccctctcctgttggctctcctgtaggaagcaaccagtctcgatctggcccaatctctcctgcaagtatcccaggtagtcagatgcctccgcagccacccgggagccagtcagaatccagttcccatcccgccttgagccagtcaccaatgccacaggaaagaggttttatggcaggcacacaaagaaaccctcagatggctcagtatggacctcaacagacaggaccatccatgtcgcctcatccttctcctgggggccagatgcatgctggaatcagtagctttcagcagagtaactcaagtgggacttacggtccacagatgagccagtatggaccacaaggtaactactccagacccccagcgtatagtggggtgcccagtgcaagctacagcggcccagggcccggtatgggtatcagtgccaacaaccagatgcatggacaagggccaagccagccatgtggtgctgtgcccctgggacgaatgccatcagctgggatgcagaacagaccatttcctggaaatatgagcagcatgacccccagttctcctggcatgtctcagcagggagggccaggaatggggccgccaatgccaactgtgaaccgtaaggcacaggaggcagccgcagcagtgatgcaggctgctgcgaactcagcacaaagcaggcaaggcagtttccccggcatgaaccagagtggacttatggcttccagctctccctacagccagcccatgaacaacagctctagcctgatgaacacgcaggcgccgccctacagcatggcgcccgccatggtgaacagctcggcagcatctgtgggtcttgcagatatgatgtctcctggtgaatccaaactgcccctgcctctcaaagcagacggcaaagaagaaggcactccacagcccgagagcaagtcaaagaagtccagctcctccaccactactggggagaagatcacgaaggtgtacgagctggggaatgagccagagagaaagctctgggtcgaccgatacctcaccttcatggaagagagaggctctcctgtctcaagtctgcctgccgtgggcaagaagcccctggacctgttccgactctacgtctgcgtcaaagagatcgggggtttggcccaggttaataaaaacaagaagtggcgtgagctggcaaccaacctaaacgttggcacctcaagcagtgcagcgagctccctgaaaaagcagtatattcagtacctgtttgcctttgagtgcaagatcgaacgtggggaggagcccccgccggaagtcttcagcaccggggacaccaaaaagcagcccaagctccagccgccatctcctgctaactcgggatccttgcaaggcccacagaccccccagtcaactggcagcaattccatggcagaggttccaggtgacctgaagccacctaccccagcctccacccctcacggccagatgactccaatgcaaggtggaagaagcagtacaatcagtgtgcacgacccattctcagatgtgagtgattcatccttcccgaaacggaactccatgactccaaacgccccctaccagcagggcatgagcatgcccgatgtgatgggcaggatgccctatgagcccaacaaggacccctttgggggaatgagaaaagtgcctggaagcagcgagccctttatgacgcaaggacagatgcccaacagcagcatgcaggacatgtacaaccaaagtccctccggagcaatgtctaacctgggcatggggcagcgccagcagtttccctatggagccagttacgaccgaaggcatgaaccttatgggcagcagtatccaggccaaggccctccctcgggacagccgccgtatggagggcaccagcccggcctgtacccacagcagccgaattacaaacgccatatggacggcatgtacgggcccccagccaagcgccacgagggcgacatgtacaacatgcagtacagcagccagcagcaggagatgtacaaccagtatggaggctcctactcgggcccggaccgcaggcccatccagggccagtacccgtatccctacagcagggagaggatgcagggcccggggcagatccagacacacggaatcccgcctcagatgatgggcggcccgctgcagtcgtcctccagtgaggggcctcagcagaatatgtgggcagcacgcaatgatatgccttatccctaccagaacaggcagggccctggcggccctacacaggcgcccccttacccaggcatgaaccgcacagacgatatgatggtacccgatcagaggataaatcatgagagccagtggccttctcacgtcagccagcgtcagccttatatgtcgtcctcagcctccatgcagcccatcacacgcccaccacagccgtcctaccagacgccaccgtcactgccaaatcacatctccagggcgcccagcccagcgtccttccagcgctccctggagaaccgcatgtctccaagcaagtctccttttctgccgtctatgaagatgcagaaggtcatgcccacggtccccacatcccaggtcaccgggccaccaccccaaccacccccaatcagaagggagatcacctttcctcctggctcagtagaagcatcacaaccagtcttgaaacaaaggcgaaagattacctccaaagatatcgttactcctgaggcgtggcgtgtgatgatgtcccttaaatcaggtcttttggctgagagtacgtgggctttggacactattaatattcttctgtatgatgacagcactgttgctactttcaatctctcccagttgtctggatttctcgaacttttagtcgagtactttagaaaatgcctgattgacatttttggaattcttatggaatatgaagtgggagaccccagccaaaaagcacttgatcacaacgcagcaaggaaggatgacagccagtccttggcagacgattctgggaaagaggaggaagatgctgaatgtattgatgacgacgaggaagacgaggaggatgaggaggaagacagcgagaagacagaaagcgatgaaaagagcagcatcgctctgactgccccggacgccgctgcagacccaaaggagaagcccaagcaagccagtaagttcgacaagctgccaataaagatagtcaaaaagaacaacctgtttgttgttgaccgatctgacaagttggggcgtgtgcaggagttcaatagtggccttctgcactggcagctcggcgggggtgacaccaccgagcacattcagactcactttgagagcaagatggaaattcctcctcgcaggcgcccacctccccccttaagctccgcaggtagaaagaaagagcaagaaggcaaaggcgactctgaagagcagcaagagaaaagcatcatagcaaccatcgatgacgtcctctctgctcggccaggggcattgcctgaagacgcaaaccctgggccccagaccgaaagcagtaagtttccctttggtatccagcaagccaaaagtcaccggaacatcaagctgctggaggacgagcccaggagccgagacgagactcctctgtgtaccatcgcgcactggcaggactcgctggctaagcgatgcatctgtgtgtccaatattgtccgtagcttgtcattcgtgcctggcaatgatgccgaaatgtccaaacatccaggcctggtgctgatcctggggaagctgattcttcttcaccacgagcatccagagagaaagcgagcaccgcagacctatgagaaagaggaggatgaggacaagggggtggcctgcagcaaagatgagtggtggtgggactgcctcgaggtcttgagggataacacgttggtcacgttggccaacatttccgggcagctagacttgtctgcttacacggaaagcatctgcttgccaattttggatggcttgctgcactggatggtgtgcccgtctgcagaggcacaagatccctttccaactgtgggacccaactcggtcctgtcgcctcagagacttgtgctggagaccctctgtaaactcagtatccaggacaataatgtggacctgatcttggccactcctccatttagtcgtcaggagaaattctatgctacattagttaggtacgttggggatcgcaaaaacccagtctgtcgagaaatgtccatggcgcttttatcgaaccttgcccaaggggacgcactagcagcaagggccatagctgtgcagaaaggaagcattggaaacttgataagcttcctagaggatggggtcacgatggcccagtaccagcagagccagcacaacctcatgcacatgcagcccccgcccctggaaccacctagcgtagacatgatgtgcagggcggccaaggctttgctagccatggccagagtggacgaaaaccgctcggaattccttttgcacgagggccggttgctggatatctcgatatcagctgtcctgaactctctggttgcatctgtcatctgtgatgtactgtttcagattgggcagttatgacataagtgagaaggcaagcatgtgtgagtgaagattagagggtcacatataactggctgttttctgttcttgtttatccagcgtaggaagaaggaaaagaaaatctttgctcctctgccccattcactatttaccaattgggaattaaagaaataattaatttgaacagttatgaaattaatatttgctgtctgtgtgtataagtacatcctttggggttttttttttctcttttttttaaccaaagttgctgtctagtgcattcaaaggtcactttttgttcttcacagatctttttaatgttctttcccatgttgtattgcatttttgggggaagcaaattgactttaaagaaaaaagttgtggcaaaagatgctaagatgcgaaaatttcaccacactgagtcaaaaaggtgaaaaattatccatttcctatgcgttttactcctcagagaatgaaaaaaactgcatcccatcacccaaagttctgtgcaatagaaatttctacagatacaggtataggggctcaaggaggtatgtcggtcagtagtcaaaactatgaaatgatactggtttctccacaggaatatggttccattaggctgggagcaaaaacaatgttttttaagattgagaatacatacctgacaacgatccggaaactgctcctcaccactcccgtcatgcctgctgtcggcgtttgaccttccacgtgacagttcttcacaattcctttcatcattttttaaatattttttttactgcctatgggctgtgatgtatatagaagttgtacattaaacataccctcatttttttcttttcttttttttttttttttttagtacaaagttttagtttctttttcatgatgtggtaactacgaagtgatggtagatttaaataattttttatttttattttatatattttttcattagggccatatctccaaaaaaagaaagaaaaaatacaaaaaacaaaaacaaaaaaaaaagagggtaatgtacaagtttctgtatgtataaagtcatgctcgatttcaggagagcagctgatcacaatttgcttcatgaatcaaggtgtggaaatggttatatatggattgatttagaaaatggttaccagtacagtcaaaaaagagaaaatgaaaaaaatacaactaaaaggaagaaacacaacttcaaagatttttcagtgatgagaatccacatttgtatttcaagataatgtagtttaaaaaaaaaaaaaagaaaaaaacttgatgtaaattcctccttttcctctggcttaatgaatatcatttattcagtataaaatctttatatgttccacatgttaagaataaatgtacattaaatcttgttaagcactgtgaaaaaaaaaaaaaaaaaaaaaa

SEQ ID NO: 11873 - DNA, 8246 bp, Homo sapiens
cggccgccgccggcacccacagcgccaagagcggcggctccgaggcggctctcaaggagggtggaagcgccgccgcgctgtcctcctcctcctcctcctccgcggcggcagcggcggcatcctcttcctcctcgtcgggcccgggctcggccatggagacggggctgctccccaaccacaaactgaaaaccgttggcgaagcccccgccgcgccgccccaccagcagcaccaccaccaccaccatgcccaccaccaccaccaccatgcccaccacctccaccaccaccacgcactacagcagcagctaaaccagttccagcagcagcagcagcagcagcaacagcagcagcagcagcagcagcaacagcaacatcccatttccaacaacaacagcttgggcggcgcgggcggcggcgcgcctcagcccggccccgacatggagcagccgcaacatggaggcgccaaggacagtgctgcgggcggccaggccgaccccccgggcccgccgctgctgagcaagccgggcgacgaggacgacgcgccgcccaagatgggggagccggcgggcggccgctacgagcacccgggcttgggcgccctgggcacgcagcagccgccggtcgccgtgcccgggggcggcggcggcccggcggccgtcccggagtttaataattactatggcagcgctgcccctgcgagcggcggccccggcggccgcgctgggccttgctttgatcaacatggcggacaacaaagccccgggatggggatgatgcactccgcctccgccgccgccgccggggcccccggcagcatggaccccctgcagaactcccacgaagggtaccccaacagccagtgcaaccattatccgggctacagccggcccggcgcgggcggcggcggcggcggcggcggcggaggaggaggaggcagcggaggaggaggaggaggaggaggagcaggagcaggaggagcaggagcgggagctgtggcggcggcggccgcggcggcggcggcagcagcaggaggcggcggcggcggcggctatgggggctcgtccgcggggtacggggtgctgagctccccccggcagcagggcggcggcatgatgatgggccccgggggcggcggggccgcgagcctcagcaaggcggccgccggctcggcggcggggggcttccagcgcttcgccggccagaaccagcacccgtcgggggccaccccgaccctcaatcagctgctcacctcgcccagccccatgatgcggagctacggcggcagctaccccgagtacagcagccccagcgcgccgccgccgccgccgtcgcagccccagtcccaggcggcggcggcgggggcggcggcgggcggccagcaggcggccgcgggcatgggcttgggcaaggacatgggcgcccagtacgccgctgccagcccggcctgggcggccgcgcaacaaaggagtcacccggcgatgagccccggcacccccggaccgaccatgggcagatcccagggcagcccaatggatccaatggtgatgaagagacctcagttgtatggcatgggcagtaaccctcattctcagcctcagcagagcagtccgtacccaggaggttcctatggccctccaggcccacagcggtatccaattggcatccagggtcggactcccggggccatggccggaatgcagtaccctcagcagcagatgccacctcagtatggacagcaaggtgtgagtggttactgccagcagggccaacagccatattacagccagcagccgcagcccccgcacctcccaccccaggcgcagtatctgccgtcccagtcccagcagaggtaccagccgcagcaggacatgtctcaggaaggctatggaactagatctcaacctcctctggcccccggaaaacctaaccatgaagacttgaacttaatacagcaagaaagaccatcaagtttaccagatctgtctggctccattgatgacctccccacgggaacggaagcaactttgagctcagcagtcagtgcatccgggtccacgagcagccaaggggatcagagcaacccggcgcagtcgcctttctccccacatgcgtcccctcatctctccagcatcccggggggcccatctccctctcctgttggctctcctgtaggaagcaaccagtctcgatctggcccaatctctcctgcaagtatcccaggtagtcagatgcctccgcagccacccgggagccagtcagaatccagttcccatcccgccttgagccagtcaccaatgccacaggaaagaggttttatggcaggcacacaaagaaaccctcagatggctcagtatggacctcaacagacaggaccatccatgtcgcctcatccttctcctgggggccagatgcatgctggaatcagtagctttcagcagagtaactcaagtgggacttacggtccacagatgagccagtatggaccacaaggtaactactccagacccccagcgtatagtggggtgcccagtgcaagctacagcggcccagggcccggtatgggtatcagtgccaacaaccagatgcatggacaagggccaagccagccatgtggtgctgtgcccctgggacgaatgccatcagctgggatgcagaacagaccatttcctggaaatatgagcagcatgacccccagttctcctggcatgtctcagcagggagggccaggaatggggccgccaatgccaactgtgaaccgtaaggcacaggaggcagccgcagcagtgatgcaggctgctgcgaactcagcacaaagcaggcaaggcagtttccccggcatgaaccagagtggacttatggcttccagctctccctacagccagcccatgaacaacagctctagcctgatgaacacgcaggcgccgccctacagcatggcgcccgccatggtgaacagctcggcagcatctgtgggtcttgcagatatgatgtctcctggtgaatccaaactgcccctgcctctcaaagcagacggcaaagaagaaggcactccacagcccgagagcaagtcaaaggatagctacagctctcagggtatttctcagcccccaaccccaggcaacctgccagtcccttccccaatgtcccccagctctgctagcatctcctcatttcatggagatgaaagtgatagcattagcagcccaggctggccaaagactccatcaagccctaagtccagctcctccaccactactggggagaagatcacgaaggtgtacgagctggggaatgagccagagagaaagctctgggtcgaccgatacctcaccttcatggaagagagaggctctcctgtctcaagtctgcctgccgtgggcaagaagcccctggacctgttccgactctacgtctgcgtcaaagagatcgggggtttggcccaggttaataaaaacaagaagtggcgtgagctggcaaccaacctaaacgttggcacctcaagcagtgcagcgagctccctgaaaaagcagtatattcagtacctgtttgcctttgagtgcaagatcgaacgtggggaggagcccccgccggaagtcttcagcaccggggacaccaaaaagcagcccaagctccagccgccatctcctgctaactcgggatccttgcaaggcccacagaccccccagtcaactggcagcaattccatggcagaggttccaggtgacctgaagccacctaccccagcctccacccctcacggccagatgactccaatgcaaggtggaagaagcagtacaatcagtgtgcacgacccattctcagatgtgagtgattcatccttcccgaaacggaactccatgactccaaacgccccctaccagcagggcatgagcatgcccgatgtgatgggcaggatgccctatgagcccaacaaggacccctttgggggaatgagaaaagtgcctggaagcagcgagccctttatgacgcaaggacagatgcccaacagcagcatgcaggacatgtacaaccaaagtccctccggagcaatgtctaacctgggcatggggcagcgccagcagtttccctatggagccagttacgaccgaaggcatgaaccttatgggcagcagtatccaggccaaggccctccctcgggacagccgccgtatggagggcaccagcccggcctgtacccacagcagccgaattacaaacgccatatggacggcatgtacgggcccccagccaagcgccacgagggcgacatgtacaacatgcagtacagcagccagcagcaggagatgtacaaccagtatggaggctcctactcgggcccggaccgcaggcccatccagggccagtacccgtatccctacagcagggagaggatgcagggcccggggcagatccagacacacggaatcccgcctcagatgatgggcggcccgctgcagtcgtcctccagtgaggggcctcagcagaatatgtgggcagcacgcaatgatatgccttatccctaccagaacaggcagggccctggcggccctacacaggcgcccccttacccaggcatgaaccgcacagacgatatgatggtacccgatcagaggataaatcatgagagccagtggccttctcacgtcagccagcgtcagccttatatgtcgtcctcagcctccatgcagcccatcacacgcccaccacagccgtcctaccagacgccaccgtcactgccaaatcacatctccagggcgcccagcccagcgtccttccagcgctccctggagaaccgcatgtctccaagcaagtctccttttctgccgtctatgaagatgcagaaggtcatgcccacggtccccacatcccaggtcaccgggccaccaccccaaccacccccaatcagaagggagatcacctttcctcctggctcagtagaagcatcacaaccagtcttgaaacaaaggcgaaagattacctccaaagatatcgttactcctgaggcgtggcgtgtgatgatgtcccttaaatcaggtcttttggctgagagtacgtgggctttggacactattaatattcttctgtatgatgacagcactgttgctactttcaatctctcccagttgtctggatttctcgaacttttagtcgagtactttagaaaatgcctgattgacatttttggaattcttatggaatatgaagtgggagaccccagccaaaaagcacttgatcacaacgcagcaaggaaggatgacagccagtccttggcagacgattctgggaaagaggaggaagatgctgaatgtattgatgacgacgaggaagacgaggaggatgaggaggaagacagcgagaagacagaaagcgatgaaaagagcagcatcgctctgactgccccggacgccgctgcagacccaaaggagaagcccaagcaagccagtaagttcgacaagctgccaataaagatagtcaaaaagaacaacctgtttgttgttgaccgatctgacaagttggggcgtgtgcaggagttcaatagtggccttctgcactggcagctcggcgggggtgacaccaccgagcacattcagactcactttgagagcaagatggaaattcctcctcgcaggcgcccacctccccccttaagctccgcaggtagaaagaaagagcaagaaggcaaaggcgactctgaagagcagcaagagaaaagcatcatagcaaccatcgatgacgtcctctctgctcggccaggggcattgcctgaagacgcaaaccctgggccccagaccgaaagcagtaagtttccctttggtatccagcaagccaaaagtcaccggaacatcaagctgctggaggacgagcccaggagccgagacgagactcctctgtgtaccatcgcgcactggcaggactcgctggctaagcgatgcatctgtgtgtccaatattgtccgtagcttgtcattcgtgcctggcaatgatgccgaaatgtccaaacatccaggcctggtgctgatcctggggaagctgattcttcttcaccacgagcatccagagagaaagcgagcaccgcagacctatgagaaagaggaggatgaggacaagggggtggcctgcagcaaagatgagtggtggtgggactgcctcgaggtcttgagggataacacgttggtcacgttggccaacatttccgggcagctagacttgtctgcttacacggaaagcatctgcttgccaattttggatggcttgctgcactggatggtgtgcccgtctgcagaggcacaagatccctttccaactgtgggacccaactcggtcctgtcgcctcagagacttgtgctggagaccctctgtaaactcagtatccaggacaataatgtggacctgatcttggccactcctccatttagtcgtcaggagaaattctatgctacattagttaggtacgttggggatcgcaaaaacccagtctgtcgagaaatgtccatggcgcttttatcgaaccttgcccaaggggacgcactagcagcaagggccatagctgtgcagaaaggaagcattggaaacttgataagcttcctagaggatggggtcacgatggcccagtaccagcagagccagcacaacctcatgcacatgcagcccccgcccctggaaccacctagcgtagacatgatgtgcagggcggccaaggctttgctagccatggccagagtggacgaaaaccgctcggaattccttttgcacgagggccggttgctggatatctcgatatcagctgtcctgaactctctggttgcatctgtcatctgtgatgtactgtttcagattgggcagttatgacataagtgagaaggcaagcatgtgtgagtgaagattagagggtcacatataactggctgttttctgttcttgtttatccagcgtaggaagaaggaaaagaaaatctttgctcctctgccccattcactatttaccaattgggaattaaagaaataattaatttgaacagttatgaaattaatatttgctgtctgtgtgtataagtacatcctttggggttttttttttctcttttttttaaccaaagttgctgtctagtgcattcaaaggtcactttttgttcttcacagatctttttaatgttctttcccatgttgtattgcatttttgggggaagcaaattgactttaaagaaaaaagttgtggcaaaagatgctaagatgcgaaaatttcaccacactgagtcaaaaaggtgaaaaattatccatttcctatgcgttttactcctcagagaatgaaaaaaactgcatcccatcacccaaagttctgtgcaatagaaatttctacagatacaggtataggggctcaaggaggtatgtcggtcagtagtcaaaactatgaaatgatactggtttctccacaggaatatggttccattaggctgggagcaaaaacaatgttttttaagattgagaatacatacctgacaacgatccggaaactgctcctcaccactcccgtcatgcctgctgtcggcgtttgaccttccacgtgacagttcttcacaattcctttcatcattttttaaatattttttttactgcctatgggctgtgatgtatatagaagttgtacattaaacataccctcatttttttcttttcttttttttttttttttttagtacaaagttttagtttctttttcatgatgtggtaactacgaagtgatggtagatttaaataattttttatttttattttatatattttttcattagggccatatctccaaaaaaagaaagaaaaaatacaaaaaacaaaaacaaaaaaaaaagagggtaatgtacaagtttctgtatgtataaagtcatgctcgatttcaggagagcagctgatcacaatttgcttcatgaatcaaggtgtggaaatggttatatatggattgatttagaaaatggttaccagtacagtcaaaaaagagaaaatgaaaaaaatacaactaaaaggaagaaacacaacttcaaagatttttcagtgatgagaatccacatttgtatttcaagataatgtagtttaaaaaaaaaaaaaagaaaaaaacttgatgtaaattcctccttttcctctggcttaatgaatatcatttattcagtataaaatctttatatgttccacatgttaagaataaatgtacattaaatcttgttaagcactgtgaaaaaaaaaaaaaaaaaaaaaa

SEQ ID NO: 11874 - DNA, 13493 bp, Homo sapiens
gcggcggcggcagcggcgtcggctcggggttctccgggagagggggagtgcgcggcggccgcagctgccacaaaccaggtgaagctttgttctaagaatatttgtttcatctagtttatgagtccaaatgatatagactgtaaatgtcacagcagtggtgaaagactgctcggtcatgagcaccgacagtaactcactggcacgtgaatttctgaccgatgtcaaccggctttgcaatgcagtggtccagagggtggaggccagggaggaagaagaggaggagacgcacatggcaacccttggacagtaccttgtccatggtcgaggatttctattacttaccaagctaaattctataattgatcaggcattgacatgtagagaagaactcctgactcttcttctgtctctccttccactggtatggaagatacctgtccaagaagaaaaggcaacagattttaacctaccgctctcagcagatataatcctgaccaaagaaaagaactcaagttcacaaagatccactcaggaaaaattacatttagaaggaagtgccctgtctagtcaggtttctgcaaaagtaaatgtttttcgaaaaagcagacgacagcgtaaaattacccatcgctattctgtaagagatgcaagaaagacacagctctccacctcagattcagaagccaattcagatgaaaaaggcatagcaatgaataagcatagaaggccccatctgctgcatcattttttaacatcgtttcctaaacaagaccaccccaaagctaaacttgaccgcttagcaaccaaagaacagactcctccagatgctatggctttggaaaattccagagagattattccaagacaggggtcaaacactgacattttaagtgagccagctgccttgtctgttatcagtaacatgaacaattctccatttgacttatgtcatgttttgttatctttattagaaaaagtttgtaagtttgacgttaccttgaatcataattctcctttagcagccagtgtagtgcccacactaactgaattcctagcaggctttggggactgctgcagtctgagcgacaacttggagagtcgagtagtttctgcaggttggaccgaagaaccggtggctttgattcaaaggatgctctttcgaacagtgttgcatcttctgtcagtagatgttagtactgcagagatgatgccagaaaatcttaggaaaaatttaactgaattgcttagagcagctttaaaaattagaatatgcctagaaaagcagcctgacccttttgcaccaagacaaaagaaaacactgcaggaggttcaggaagattttgtgttttcaaagtatcgtcatagagcccttcttttacctgagcttttggaaggagttcttcagattctgatctgttgtcttcaaagtgcagcttcaaatcccttctacttcagtcaagccatggatttggttcaagaattcattcagcatcatggatttaatttatttgaaacagcagttcttcaaatggaatggctggttttaagagatggagttcctcccgaggcctcagagcatttgaaagccctaataaatagtgtgatgaaaataatgagcactgtcaaaaaagtgaaatcagagcaacttcatcattcgatgtgtacaagaaaaaggcacagacgatgtgaatattctcattttatgcatcatcaccgagatctctcaggtcttctggtttcggcttttaaaaaccaggtttccaaaaacccatttgaagagactgcagatggagatgtttattatcctgagcggtgctgttgcattgcagtgtgtgcccatcagtgcttgcgcttactacagcaggcttccttgagcagcacttgtgtccagatcctatcgggtgttcataacattggaatatgctgttgtatggatcccaaatctgtaatcattcctttgctccatgcttttaaattgccagcactgaaaaattttcagcagcatatattgaatatccttaacaaacttattttggatcagttaggaggagcagagatatcaccaaaaattaaaaaagcagcttgtaatatttgtactgttgactctgaccaactagcccaattagaagagacactgcagggaaacttatgtgatgctgaactctcctcaagtttatccagtccttcttacagatttcaagggatcctgcccagcagtggatctgaagatttgttgtggaaatgggatgctttaaaggcttatcagaactttgtttttgaagaagacagattacatagtatacagattgcaaatcacatttgcaatttaatccagaaaggcaatatagttgttcagtggaaattatataattacatatttaatcctgtgctccaaagaggagttgaattagcacatcattgtcaacacctaagcgttacttcagctcaaagtcatgtatgtagccatcataaccagtgcttgcctcaggacgtgcttcagatttatgtaaaaactctgcctatcctgcttaaatccagggtaataagagatttgtttttgagttgtaatggagtaagtcaaataatcgaattaaattgcttaaatggtattcgaagtcattctctaaaagcatttgaaactctgataatcagcctaggggagcaacagaaagatgcctcagttccagatattgatgggatagacattgaacagaaggagttgtcctctgtacatgtgggtacttcttttcatcatcagcaagcttattcagattctcctcagagtctcagcaaattttatgctggcctcaaagaagcttatccaaagagacggaagactgttaaccaagatgttcatatcaacacaataaacctattcctctgtgtggcttttttatgcgtaagtaaagaagcagagtctgacagggagtcggccaatgactcagaagatacttctggctatgacagcacagccagcgagcctttaagtcatatgctgccatgtatatctctcgagagccttgtcttgccttctcctgaacatatgcaccaagcagcagacatttggtctatgtgtcgttggatctacatgttgagttcagtgttccagaaacagttttataggcttggtggtttccgagtatgccataagttaatatttatgataatacagaaactgttcagaagtcacaaagaggagcaaggaaaaaaggagggagatacaagtgtaaatgaaaaccaggatttaaacagaatttctcaacctaagagaactatgaaggaagatttattatctttggctataaaaagtgaccccataccatcagaactaggtagtctaaaaaagagtgctgacagtttaggtaaattagagttacagcatatttcttccataaatgtggaagaagtttcagctactgaagccgctcccgaggaagcaaagctatttacaagtcaagaaagtgagacctcacttcaaagtatacgacttttggaagcccttctggccatttgtcttcatggtgccagaactagtcaacagaagatggaattggagttacctaatcagaacttgtctgtggaaagtatattatttgaaatgagggaccatctttcccagtcaaaggtgattgaaacacaactagcaaagcctttatttgatgccctgcttcgagttgccctcgggaattattcagcagattttgaacataatgatgctatgactgagaagagtcatcaatctgcagaagaattgtcatcccagcctggtgatttttcagaagaagctgaggattctcagtgttgtagttttaaacttttagttgaagaagaaggttacgaagcagatagtgaaagcaatcctgaagatggcgaaacccaggatgatggggtagacttaaagtctgaaacagaaggtttcagtgcatcaagcagtccaaatgacttactcgaaaacctcactcaaggggaaataatttatcctgagatttgtatgctggaattaaatttgctttctgctagtaaagccaaacttgatgtgcttgcccatgtatttgagagttttttgaaaattattaggcagaaagaaaagaatgtttttctgctcatgcaacagggaactgtgaaaaatcttttaggagggttcttgagtattttaacacaggatgattctgattttcaagcatgccagagagtattggtggatcttttggtatctttgatgagttcaagaacatgttcagaagagctaacccttcttttgagaatatttctggagaaatctccttgtacaaaaattcttcttctgggtattctgaaaattattgaaagtgatactactatgagcccttcacagtatctaaccttccctttactgcacgctccaaatttaagcaacggtgtttcatcacaaaagtatcctgggattttaaacagtaaggccatgggtttattgagaagagcacgagtttcacggagcaagaaagaggctgatagagagagttttccccatcggctgctttcatcttggcacatagccccagtccacctgccgttgctggggcaaaactgctggccacacctatcagaaggtttcagtgtttccctgtggtttaatgtggagtgtatccatgaagctgagagtactacagaaaaaggaaagaagataaagaaaagaaacaaatcattaattttaccagatagcagttttgatggtacagagagcgacagaccagaaggtgcagagtacataaatcctggtgaaagactcatagaagaaggatgtattcatataatttcactgggatccaaagcgttgatgatccaagtgtgggctgatccccacaatgccactcttatctttcgtgtgtgcatggattcaaatgatgacatgaaagctgttttactagcacaggttgaatcacaggagaatattttcctcccaagcaaatggcaacatttagtactcacctacttacagcagccccaagggaaaaggaggattcatgggaaaatctccatatgggtctctggacagaggaagcctgatgttactttggattttatgcttccaagaaaaacaagtttgtcatctgatagcaataaaacattttgcatgattggccattgtttatcatcccaagaagagtttttgcagttggctggaaaatgggacctgggaaatttgcttctcttcaacggagctaaggttggttcacaagaggccttttatctgtatgcttgtggacccaaccatacatctgtaatgccatgtaagtatggcaagccagtcaatgactactccaaatatattaataaagaaattttgcgatgtgaacaaatcagagaactttttatgaccaagaaagatgtggatattggtctcttaattgaaagtctttcagttgtttatacaacttactgtcctgctcagtataccatctatgaaccagtgattagacttaaaggtcaaatgaaaacccaactctctcaaagacccttcagctcaaaagaagttcagagcatcttattagaacctcatcatctaaagaatctccaacctactgaatataaaactattcaaggcattctgcacgaaattggtggaactggcatatttgtttttctctttgccagggttgttgaactcagtagctgtgaagaaactcaagcattagcactgcgagttatactctcattaattaaatacaaccaacaaagagtacatgaattagaaaattgtaatggactttctatgattcatcaggtgttgatcaaacaaaaatgcattgttgggttttacattttgaagacccttcttgaaggatgctgtggtgaagatattatttatatgaatgagaatggagagtttaagttggatgtagactctaatgctataatccaagatgttaagctgttagaggaactattgcttgactggaagatatggagtaaagcagagcaaggtgtttgggaaactttgctagcagctctagaagtcctcatcagagcagatcaccaccagcagatgtttaatattaagcagttattgaaagctcaagtggttcatcactttctactgacttgtcaggttttgcaggaatacaaagaggggcaactcacacccatgccccgagaggtttgtagatcatttgtgaaaattatagcagaagtccttggatctcctccagatttggaattattgacaattatcttcaatttccttttagcagttcaccctcctactaatacttacgtttgtcacaatcccacgaacttctacttttctttgcacatagatggcaagatctttcaggagaaagtgcggtcaatcatgtacctgaggcattccagcagtggaggaaggtcccttatgagccctggatttatggtaataagcccatctggttttactgcttcaccatatgaaggagagaattcctctaatattattccacaacagatggccgcccatatgctgcgttctagaagcctaccagcattccctacttcttcactactaacgcaatcacaaaaactgactggaagtttgggttgtagtatcgacaggttacaaaatattgcagatacttatgttgccacccaatcaaagaaacaaaattctttggggagttccgacacactgaaaaaaggcaaagaggacgcattcatcagtagctgtgagtctgcaaaaactgtttgtgaaatggaagctgtcctctcagcccaggtctctgtcagtgatgtcccaaagggagtgctgggatttccagtggtcaaagcagatcataaacagttgggagcagaacccaggtcagaagatgacagtcctggggatgagtcctgcccacgccgacctgattacctaaagggattggcctccttccagcgaagccacagcactattgcaagccttgggctagcttttccttcacagaacggatctgcagctgttggccgttggccaagtcttgttgatagaaacactgatgattgggaaaactttgcctattctcttggttatgagccaaattacaaccgaactgcaagtgctcacagtgtaactgaagactgtttggtacctatatgctgtggattatatgaactcctaagtggggttcttcttatcctgcctgatgttttgcttgaagatgtgatggacaagcttattcaagcagatacacttttggtcctcgttaaccacccatcaccagctatacaacaaggtgttattaaactattagatgcatattttgctagagcatctaaggaacaaaaagataaatttctgaagaatcgtggattttccttgctagccaaccagttgtatcttcatcgaggaactcaagaattgttagaatgcttcatcgaaatgttctttggtcgacatattggccttgatgaagaatttgatctggaagatgtgagaaacatgggattgtttcagaagtggtctgtcattcctattctgggactaatagagacctctctatatgacaacatactcttgcataatgctcttttacttcttctccaaattttaaattcttgttctaaggtagcagatatgttgctggataatggtctactctatgtgttatgtaatacagtagcagccctgaatggattagaaaagaacattcccatgagtgaatataaattgcttgcttgtgatatacagcaacttttcatagcagttacaattcatgcttgcagttcctcaggctcacaatattttagggttattgaagaccttattgtaatgcttggatatcttcaaaatagcaaaaacaagaggacacaaaatatggctgttgcactacagcttagagttctccaggctgctatggaatttataaggaccaccgcaaatcatgactctgaaaacctcacagattcactccagtcaccttctgctccccatcatgcagtagttcaaaagcggaaaagcattgctggtcctcgaaaatttccccttgctcaaactgaatcgcttctgatgaaaatgcgttcagtggcaaatgatgagcttcatgtgatgatgcaacggagaatgagccaagagaaccctagccaagcaactgaaacggaacttgcgcagagactacagaggctcactgttttagcagtcaacaggattatttatcaagaatttaattcagacattattgacattttgagaactccagaaaatgtaactcaaagcaagacctcagttttccagaccgaaatttctgaggaaaatattcatcatgaacagtcttctgttttcaatccatttcagaaagaaatttttacatatctggtagaaggattcaaagtatctattggttcaagtaaagccagtggttccaagcagcaatggactaaaattctgtggtcttgtaaggagaccttccgaatgcagcttgggagactactagtgcatattttgtcgccagcccacgctgcacaagagagaaagcaaatttttgaaatagttcatgaaccaaatcatcaggaaatactacgagactgtctcagcccatccctacaacatggagccaagttagttttgtatttgtcagagttgatacataatcaccaaggtgaattgactgaagaagagctaggcacagcagaactgcttatgaatgctttgaagttatgtggtcacaagtgcatccctcccagtgcatcaacaaaagcagaccttattaaaatgatcaaagaggaacaaaagaaatatgaaactgaagaaggagtgaataaagctgcttggcagaaaacagttaacaataatcaacaaagtctctttcagcgtctggattcaaaatcaaaggatatatctaaaatagctgcagatatcacccaggcagtgtctctctcccaaggaaatgagagaaaaaaggtgatccagcatattagaggaatgtataaagtagatttgagtgccagcagacattggcaggaacttattcagcagctgacacatgatagagcagtatggtatgaccccatctactatccaacctcatggcagttggatccaacagaagggccaaatcgagagaggagacgtttacagagatgttatttaactattccaaataagtatctccttagggatagacagaaatcagaagatgttgtcaaaccaccactctcttacctgtttgaagacaaaactcattcttctttctcttctactgtcaaagacaaagctgcaagtgaatctataagagtgaatcgaagatgcatcagtgttgcaccatctagagagacagctggtgaattgttactaggtaaatgtggaatgtattttgtggaagataatgcttctgatacagttgaaagttcgagccttcagggagagttggaaccagcatcattttcctggacatatgaagaaattaaagaagttcacaagcgttggtggcaattgagagataatgctgtagaaatctttctaacaaatggcagaacactcctgttggcatttgataacaccaaggttcgtgatgatgtataccacaatatactcacaaataacctccctaatcttctggaatatggtaacatcaccgctctgacaaatttatggtatactgggcaaattactaattttgaatatttgactcacttaaacaaacatgctggccgatccttcaatgatctcatgcagtatcctgtgttcccatttatacttgctgactacgttagtgagacacttgacctcaatgatctgttgatatacagaaatctctctaaacctatagctgttcagtataaagaaaaagaagatcgttatgtggacacatacaagtacttggaggaagagtaccgcaaaggagccagagaagatgaccccatgcctcccgtgcagccctatcactatggctcccactattccaatagcggcactgtgcttcacttcctggtcaggatgcctcctttcactaaaatgtttttagcctatcaagatcaaagttttgacattccagacagaacttttcattctacaaatacaacttggcgactctcatcttttgaatctatgactgatgtgaaagaacttatcccagagtttttctatcttccagagttcctagttaaccgtgaaggttttgattttggtgtgcgtcagaatggtgaacgggttaatcacgtcaaccttcccccttgggcgcgtaatgatcctcgtctttttatcctcatccatcggcaggctctagagtctgactacgtgtcgcagaacatctgtcagtggattgacttggtgtttgggtataagcaaaaggggaaggcttctgttcaagcgatcaatgtttttcatcctgctacatattttggaatggatgtctctgcagttgaagatccagttcagagacgagcgctagaaaccatgataaaaacctacgggcagactccccgtcagctgttccacatggcccatgtgagcagacctggagccaagctcaatattgaaggagagcttccagctgctgtggggttgctagtgcagtttgctttcagggagacccgagaacaggtcaaagaaatcacctatccgagtcctttgtcatggataaaaggcttgaaatggggggaatacgtgggttcccccagtgctccagtacctgtggtctgcttcagccagccccacggagaaagatttggctctctccaggctctgcccaccagagcaatctgtggtttgtcacggaatttctgtcttctgatgacatatagcaaggaacaaggtgtgagaagcatgaacagtacggacattcagtggtcagccatcctgagctggggatatgctgataatattttaaggttgaagagtaaacaaagtgagcctccagtaaactttattcaaagttcacaacagtaccaggtgactagttgtgcttgggtgcctgacagttgccagctgtttactggaagcaaatgcggtgtcatcacagcctacacaaacagatttacaagcagcacgccatcagaaatagaaatggagactcaaatacatctctatggtcacacagaagagataaccagcttatttgtttgcaaaccatacagtatactgataagtgtgagcagagacggaacctgcatcatatgggatttaaacaggttatgctatgtacaaagtctggcgggacacaaaagccctgtcacagctgtctctgccagtgaaacctcaggtgatattgctactgtgtgtgattcagctggcggaggcagtgacctcagactctggacggtgaacggggatctcgttggacatgtccactgcagggagatcatctgttccgtggctttctccaaccagcctgagggagtatctatcaatgtaatcgctgggggattagaaaatggaattgtaaggttatggagcacatgggacttaaagcctgtgagagaaattacatttcccaaatcaaataagcccatcatcagccttacattttcttgtgatggccaccatttgtacacagcaaacagtgatgggaccgtgattgcctggtgtcggaaggaccagcagcgcttgaaacagccaatgttctattccttccttagcagctatgcagccgggtgaatgcgaatgaacttcacgttctccaaagcactttaactccaaactagatttgttgacttcaccagttttaggaggttgaacctaaagaaatggatgactggacaaaccatccaaataatgataaagtctattcatctgcacaaaattctgaagagtcacatgatcctaagaggaaagttctgttctattttagtgataatctggaagattgtgtcaatatgcactagccaacaagttttaagcctcgcatggtacattaaaatgatattcttaaaattttttcccaccaaggtattccaaagaaaatattaaggtctcccctttttctatgattccaaaaggaccagtagaatttaaattggttggttgattgtttatataaaacacactaaaattatattttaaaagtttactgccatgaaatactcctcccaccacacacacatgctccaaaagaggaaagaaaaaaagataatttttaggacttgataattgctttctttgagaagcaaattattcagtaggtgcctctgtaccaaatattttatggaatatctaaatactaaaataaactatgaatgaatctcaaaattaggcagtttttgccagttgctttcttagctcaaaggagaaccagaatttttttgacagccacaaacaagaatacaggtatcttggatttcagacacattctgtttcttcataaaaattttacttaaaatctgtaacgctagatattgactatccttagttgagtcactgaggtttaaacacaatggtaagtcttaaagtctgctatttacagagcattgaatctgtaccaatttgcaatagaaagccttcagtatgcaagaagtttgcatgggtattaagaacacagcctaaataaggcatttgatctaatctgcaggaagaattttcttccccaaaacagaattataaaagcttactttaaacaggaggcagaataattcttttaggaaaccatttcattctgtttctactaacctataccatctgagaattctaggaagaataataaaatctcgtgtattccacagcaaacttacataccataaagacagaattcctaaacatcttggagccgtctgtctctcccatatgatggctgtctgtatatttttacttggggtgctgctttattggctttgaaaacactgtcagataagctcagtaatatgttaccatgggataaaaatatgtatccctgcctaagaataacttgtgcatttgttatggaaatttaattcatatggtgtttacagtactacttttgtaacttccagactttctaaaacattctgcttaaaaaccatataaaatataattccaaagtctctgctgtcaagatagattcgagagaaagcacgtggccatgtatgctttaaccttaaactgcatacacatgtagtgatacctaggctgcatttagatcaccgtgtgctcaggccaggtgtgaatcctgaggtccatggaggtgcagagatgagattactcctattcacgttgaagtgatttgctttgttaacaaaaaattgcagctattgtctagctttcatttttttactgagaactttaaattagtcccctattagaatagggttgctactcatctttttttaaaaaccgaatttcatcatttatctaaagagaaaatatgcagaataactggtcttgttaagagtgcaatattatatttttatgtaaaaataaaaattaatttggggggattatttattcagcatgaaacctaatatgtatatgtttgaaatacttcataatgtgcatgttgtagcaaacatttctgtaaattatcacaagctctgttacctttatatacactgcctcttcaatttggaaataaatttcataaaaaaaaaaaaaaaaaaaa

SEQ ID NO: 11875 - DNA, 2794 bp, Homo sapiens
cttcaagattatcaataatcggagatacgtatattttatttgtaaagaaaacatggctgccctattcctacgtggttttgtccaaatagggaactgcaagactgggatatctaagtcaaaagaagcattcattgaagcagtggaaagaaagaagaaagatagactggtgctgtatttcaaaagtggaaaatatagcacttttcggctaagtgataatattcaaaatgtagtccttaaatcctatagaggaaaccaaaatcacctgcatttaactttacaaaataataatggcttgtttattgaaggattatcctccacagatgctgaacaattgaagatattcttggacagagttcatcaaaacgaggttcagccacctgtgagacctggtaagggtgggagtgtcttttctagcacaacacagaaggaaatcaacaaaacttcattccacaaagttgatgagaaatcaagtagcaaatcttttgagatagcaaaaggaagtgggacaggtgtccttcagaggatgcctttgcttacatcaaaattgacacttacttgcggagagttatcagaaaatcagcacaagaagaggaaaagaatgctctcatctagctcagagatgaatgaggaattcttgaaagaaaataattctgtagaatacaagaaatccaaggcagattgttcgaggtgtgtaagctataatcgagagaaacaattgaagttaaaagagttagaagagaataagaaattggaatgtgaatcttcatgcatcatgaacgccactggaaatccttacctagatgacattggtcttctccaagctctcactgagaaaatggttttggtatttctgttacaacaagggtatagtgacggttacacaaagtgggataaattaaaactattttttgaattatttccagagaaaatatgccacggcctccccaatttgggaaacacctgttatatgaatgcagtgttacagtctctactttcaatcccatcgtttgctgatgatttacttaatcagagtttcccatggggtaaaattccccttaatgctcttaccatgtgcttggcacggctacttttttttaaagatacctataatatagaaatcaaggagatgttactcttgaatcttaaaaaggccatttcagcagctgcagagatattccatggcaatgcacagaacgatgctcatgagtttttagctcactgtttagatcaactgaaagataacatggaaaaactcaacacaatttggaagcctaaaagtgaatttggggaagataattttcctaaacaggtttttgctgatgatcctgacaccagtgggttttcttgccctgtcattactaattttgagttagagttgttgcactccattgcttgtaaagcttgtggtcaggttattctcaagacagaactgaataattacctctccatcaaccttccccaaagaataaaagcacatccttcatctattcagtctacttttgatcttttttttggagcagaagagcttgagtataaatgtgcaaaatgtgagcacaagacttccgttggagtgcactcattcagtaggctacctagaatccttattgttcacctcaaacgctatagcttgaatgagttttgtgcattaaagaagaatgaccaggaagtcatcatttccaaatatttaaaggtgtcttctcattgcaatgaaggcaccagaccacctcttcccttgagtgaggatggagaaattacagatttccaattattaaaagttattcgaaagatgacttctggaaacatcagtgtatcatggcctgcaacaaaggaatccaaagatatcctggctccacacattggatcagataaggagtctgaacaaaaaaaaggccagacagtctttaaaggggcaagcagaagacagcagcaaaagtaccttggaaaaaattctaaaccaaatgagctagaatctgtatactcaggagatcgagcattcattgaaaaagaaccgttagctcacttaatgacgtatctggaagatacctcactttgtcagttccacaaagctggaggtaaacctgccagcagcccaggcacacctctctcaaaagttgactttcaaacagtgcccgaaaatccaaaacgaaagaaatatgtgaaaaccagtaagtttgtagcttttgataggattatcaatcctactaaagatttgtatgaagataaaaatatcagaattccagaaagattccaaaaagtgtctgaacagactcagcagtgtgacggtatgagaatctgtgaacaagcccctcagcaggcactgcctcaaagctttccaaagccaggcacccaggggcacacaaagaacctcctaagacctacaaaattaaatctacagaagtctaacaggaattccctacttgcactgggttccaataagaatccaagaaacaaagacattttagataagataaaatctaaagccaaggaaacaaaaagaaatgatgataagggagatcatacctaccggctcattagtgttgtcagccatcttgggaagactctaaagtcaggccattatatctgtgatgcctatgactttgagaaacagatctggttcacttacgatgatatgcgggtgttaggtatccaggaggcccagatgcaggaggataggcgttgcactgggtacatcttcttttacatgcataatgagatctttgaagagatgttgaaaagagaagagaatgcccagcttaatagcaaggaggtagaggagacccttcagaaggaataa

SEQ ID NO: 11876 - DNA, 1385 bp, Homo sapiens
gggaagtcctggcccttggcccaacctcctgctgtccccggtctgagggcccaagccccgcgtctccgccttgccgtccagcctgtccttggtgtggggtgcttggaagtgtgagcaccctctctggctctttgccggccccaagggtcgttgcggcggcccccgggcccagtcatcagccctcttttccggtgccggaactatcgtactggtgccctagtttcccagccggcaggcggagtgaggaggaagcggaggcgagaccgcgctcaacactggggaaaggaaggaggcgggccctgcgcgcagcattttgggaaagagtggaattctgggtgttaggcccgccattcgcttgactcacgccttcgccgtagcatctttcgcagcggaccgaagagaagaaaagtaggccagagccgaactctcttcctgccaagatgtctattggtgtgccgattaaagtactgcatgaggccgagggccacattgtgacatgtgagacgaacaccggtgaggtatatcgggggaagctcattgaagcagaggacaacatgaactgccagatgtccaacatcacagtcacatacagagatggccgagtggcacagctggagcaggtatacatccgtggcagcaaaatccgctttctgattttgcctgacatgctgaagaacgcacccatgttaaagagcatgaaaaataaaaaccaaggctcaggggctggccgaggaaaagctgctattctcaaggcccaagtggccgcaagaggaagaggacgtggaatgggacgtggaaacatctttcaaaagcgaagataattttctaagttgaacagaactttgtccttttttctttcaggttatctgagttcattggagtgggtgcttgtgcatatatgctaggtatcttttgccatctttctctttagatcaggggaaatgtttaagctaaataaatctggggggttttttgttctgttttgttttgttttctttgagaaaataaggactttgtgttcatttgaagtttgctttggctaaattttgacaccctgggggatgtcctgggagaatgccagtactttgaaatagcacagctattgatgagattttaagctgctgttcctggccagttgcaggttaagccccagaaaagttcaccttggagaagctccgagaacacacagattgtgtctcattcatcttcagacacaggcacatagtgtggcactttgttcagttaacatttgtggagctgtcatcagctcagctttaacaacacaggtgactctttcccttgataaagtcataggtaattcaggggctgggtgcggcggctcacgcatgtaatcccagcactttgggaggccaaggcgggcggat

SEQ ID NO: 11877 - DNA, 928 bp, Homo sapiens
gcaagctacctgcagccctctgtctgacatcatgtccttcaactgctccacaagaaattgctcttccaggcccattggaggacgctgcattgttccagtggcccaagttaccacgacttccaccactgatgctgactgcctgggcggcatctgtttgcccagttccttccagactggctcttggctcctggaccactgtcaagagacctgctgtgagcccactgcttgccagccaacctgttaccggcgaacttcatgtgtctccaacccttgccaggtgacttgctctcgacaaactacctgtatttccaacccctgctcaactacctacagccggccgctcacctttgtctctagtggatgtcagcccctgggaggcatctccagtgtctgccaaccagtgggcggcatctctactgtctgccaaccagtgggaggagtctctactgtctgccagccagcctgtggggtctccaggacgtatcagcagtcctgcgtgtccagctgccgaagaacctgctaagtgtgtaggagccagtgagcgaatcaagactccacgacctgccagctgtttccaggatcttccagcatgctgcttgtccctgaatagctcttcatagctgacccttcttgtgaccgcctgactgctggctactatccatgcacacgctgtctttagcactctaaaatttttctggccagccctaagcttgttttaagggttgctcactggtgctgtgtatgcctctggatgtgtccagaagctttaccatccacaccccagtctctgatgcttttgacatgttttcaccttgctgctgtatctcctggcctctgcttttgtgtctcacaaaaacagagcttgtctcaccatgtatttctcaataaacctgcattagttggcattgcaaaaaaaaaaaaaaaaaaa

SEQ ID NO: 11878 - DNA, 1727 bp, Homo sapiens
agccggcgcgcggcggcggcaggaagtctgtgcccgagaacagcagaaataagagccagggagggaccgcggccgcggcggcggcggcgagagcgaaagaggaaactgcagaggaggaagctgcgccgcagcccgagccgcccggcatccccgccgcctctgcgcccgcgccgcgcccccggcgccccctccccagcgcgcccccggccgctcctccgcgccgcgctcgtcggccatggcccgggagaacggcgagagcagctcctcctggaaaaagcaagctgaagacatcaagaagatcttcgagttcaaagagaccctcggaaccggggccttttccgaagtggttttagctgaagagaaggcaactggcaagctctttgctgtgaagtgtatccctaagaaggcgctgaagggcaaggaaagcagcatagagaatgagatagccgtcctgagaaagattaagcatgaaaatattgttgccctggaagacatttatgaaagcccaaatcacctgtacttggtcatgcagctggtgtccggtggagagctgtttgaccggatagtggagaaggggttttatacagagaaggatgccagcactctgatccgccaagtcttggacgccgtgtactatctccacagaatgggcatcgtccacagagacctcaagcccgaaaatctcttgtactacagtcaagatgaggagtccaaaataatgatcagtgactttggattgtcaaaaatggagggcaaaggagatgtgatgtccactgcctgtggaactccaggctatgtcgctcctgaagtcctcgcccagaaaccttacagcaaagccgttgactgctggtccatcggagtgattgcctacatcttgctctgcggctaccctcctttttatgatgaaaatgactccaagctctttgagcagatcctcaaggcggaatatgagtttgactctccctactgggatgacatctccgactctgcaaaagacttcattcggaacctgatggagaaggacccgaataaaagatacacgtgtgagcaggcagctcggcacccatggatcgctggtgacacagccctcaacaaaaacatccacgagtccgtcagcgcccagatccggaaaaactttgccaagagcaaatggagacaagcatttaatgccacggccgtcgtcagacatatgagaaaactacacctcggcagcagcctggacagttcaaatgcaagtgtttcgagcagcctcagtttggccagccaaaaagactgtgcgtatgtagcaaaaccagaatccctcagctgacactgaagacgagcctggggtggagaggagggagccggcatctgccgagcacctcctgtttgccaggcgctttctatacttaatcccatgtcatgcgaccctaggactttttttaacatgtaatcactgggctgggtgcagtggctcacgcctgtaatcccaacactttgggaggctgaggcaggaggactgtttgagttcaggagttttaagaccagcctgaccaacatggtgaaaccccatctctactaaaatataaaaattagccgggtgtggtggcgagcacctgtaatgtcagctacttgggaggctgaggcaggagaatcacttgaacccaggaagcggaggttgcaatgagctgagatcacaccactgcactccagcctgggtgacagattgagactccctctcaaaaaaa

SEQ ID NO: 11879 - DNA, 2242 bp, Homo sapiens
agccggcgcgcggcggcggcaggaagtctgtgcccgagaacagcagaaataagagccagggagggaccgcggccgcggcggcggcggcgagagcgaaagaggaaactgcagaggaggaagctgcgccgcagcccgagccgcccggcatccccgccgcctctgcgcccgcgccgcgcccccggcgccccctccccagcgcgcccccggccgctcctccgcgccgcgctcgtcggccatggcccgggagaacggcgagagcagctcctcctggaaaaagcaagctgaagacatcaagaagatcttcgagttcaaagagaccctcggaaccggggccttttccgaagtggttttagctgaagagaaggcaactggcaagctctttgctgtgaagtgtatccctaagaaggcgctgaagggcaaggaaagcagcatagagaatgagatagccgtcctgagaaagattaagcatgaaaatattgttgccctggaagacatttatgaaagcccaaatcacctgtacttggtcatgcagctggtgtccggtggagagctgtttgaccggatagtggagaaggggttttatacagagaaggatgccagcactctgatccgccaagtcttggacgccgtgtactatctccacagaatgggcatcgtccacagagacctcaagcccgaaaatctcttgtactacagtcaagatgaggagtccaaaataatgatcagtgactttggattgtcaaaaatggagggcaaaggagatgtgatgtccactgcctgtggaactccaggctatgtcgctcctgaagtcctcgcccagaaaccttacagcaaagccgttgactgctggtccatcggagtgattgcctacatcttgctctgcggctaccctcctttttatgatgaaaatgactccaagctctttgagcagatcctcaaggcggaatatgagtttgactctccctactgggatgacatctccgactctgcaaaagacttcattcggaacctgatggagaaggacccgaataaaagatacacgtgtgagcaggcagctcggcacccatggatcgctggtgacacagccctcaacaaaaacatccacgagtccgtcagcgcccagatccggaaaaactttgccaagagcaaatggagacaagcatttaatgccacggccgtcgtcagacatatgagaaaactacacctcggcagcagcctggacagttcaaatgcaagtgtttcgagcagcctcagtttggccagccaaaaagactgtctggcaccttccacgctctgtagtttcatttcttcttcgtcgggggtctcaggagttggagccgagcggagacccaggcccaccactgtgacggcagtgcactctggaagcaagtgactggccctggaggtggggcccggggtcggggctggggaaggggagccccagggtcgccagagccgcgagccactccagcgagaccccaccttgcatggtgccccttcctgcataggactggaagaccgaagtttttttatggccatattttctactgcaattctgaagtgttcatttctcacaaactgtactgactcgaggggcgctgatttcataggatctggtgctgtatatacgaatcttgcaaagctctaactgaacggaccttcttattcctctcccctaacaccatcgtttccactcttctcagtgtaggtaaccgtctatggtgtgttttttcattaatgacaaaaaaaaaaaggtttcaactggattatttaaatattggtaaatattgtgcattagggtttgtttttccttttaagaagtatgtcctttgtatctctaagttacatgacctatatcttttcctctttaatagtagttttatgttaacctttaagagatttgtttttcctcaaaggagaatttaaaggtattttttaaaattctaataagaggatcagccgggtgcaatgactcatgcctgtaatcccagcacgttgggaggccaagtcgggcggatcacaaggtcaggagatcaaggccatcctggccaacatggtgaaaccccacgtctactaaaaatacaaaaaattagccgggcgtggtggcacacacctgtagtcccggctactcgggaggctgaggcaggagaattgcttgaacccgggagacggaggttgcagtgagctgagatcgtgccactgcactccagcctgggtgacagagcaagactctgtctcaaaa

SEQ ID NO: 11880 - DNA, 9535 bp, Homo sapiens
gggttgtgactgaaacccgtcaatatggcggcgatcggccgcggccgctctctgaagaacctccgagtacgagggcggaatgacagcggcgaggagaacgtcccgctggatctgacccgagaaccttctgataacttaagagagattctccaaaatgtggccagattgcagggagtatcaaatatgagaaagctaggccatctgaataactttactaagcttctttgtgatattggccacagtgaagaaaaactgggctttcactatgaggatatcataatttgtttgcggttagctttattaaatgaagcaaaagaagtgcgagcagcagggctacgagcgcttcgatatctcatccaagactccagtattctccagaaggtgctaaaattgaaagtggactatttaatagctaggtgcattgacatacaacagagcaacgaggtagagaggacacaagcacttcgattagtcagaaagatgattactgtgaatgcttccttgtttcctagttctgtgaccaactcattaattgcagttggaaatgatggacttcaagaaagagacagaatggtccgagcatgcattgccattatctgtgaactagcacttcagaatccagaggtggtggcccttcgaggtggactaaacaccatcttgaaaaatgtgatcgattgccaattaagtcgaataaatgaggccctaattactacaattttgcaccttcttaatcatccaaagactcgacagtatgtgcgagctgatgtagaattagagagaattttagcaccctatactgattttcactacagacatagtccagatacagctgaaggacagctcaaagaagacagagaagcacgatttctagccagtaaaatgggaatcatagcaacattccgatcatgggcaggtattattaatttatgtaaacctggaaattctgggatccagtctctaataggagtactttgcataccaaatatggaaataaggcgaggtctacttgaagtgctttatgatatatttcgtcttcctctacctgttgtgactgaggagttcatagaagcactactcagtgtagatccagggaggttccaagacagttggaggctttcagatggctttgtggcagctgaggcaaaaactattcttcctcatcgtgccagatccaggccagacctcatggataattatttggcactgatactctctgcatttattcgtaatggacttttagagggtctagttgaagtgataacaaacagtgatgatcatatctcagttagagctaccatccttttaggagagcttttacatatggcaaacacaattcttcctcattcacatagccatcatttacactgcttgccaaccctaatgaatatggctgcatcctttgatatccccaaggaaaagagactgcgagccagtgcagccttgaactgtttaaaacgcttccatgaaatgaagaaacgaggacctaagccttatagtcttcatttagaccacattattcagaaagcaattgcaacacaccagaaacgggatcagtatctccgagttcagaaagatatatttatccttaaggatacagaggaagctcttttaattaaccttagagatagccaagtccttcaacataaagagaatcttgaatggaattggaatcttatagggaccattcttaagtggccaaatgtaaatctaagaaactataaagatgaacagttacacaggtttgtacgaagactactttatttttacaagcccagcagtaaattatatgccaacctggatctggattttgccaaggccaaacagctcacggttgtaggttgccagtttacagaatttcttcttgaatctgaagaggatgggcaaggctacttagaagatctagtaaaggatattgttcagtggctcaatgcttcatctggaatgaaacccgaaagaagtcttcaaaataatggtttattgaccacccttagtcaacactactttttatttattggaacactttcttgccaccctcatggagttaaaatgctggaaaaatgcagtgtatttcagtgtctccttaatctttgctccttgaaaaaccaagatcacttgctaaaacttactgtttctagcttggactatagcagagatggattggctagagtcatcctttccaaaattttaactgcagctactgatgcctgcagactctatgcaacaaaacatttaagggtattattgagagctaatgttgaattctttaataattggggaattgagttgttagtgacccagctacatgataaaaacaaaacgatttcctctgaagctcttgatatcctcgatgaagcatgtgaagacaaggccaatcttcatgctctcattcagatgaaaccagcgttatcccaccttggagacaagggtttgcttctcctgctgagatttctctccattccaaaaggattttcctatctgaatgaaagaggttatgtagcaaaacaattggaaaagtggcacagggaatacaactccaaatatgttgacttgattgaggaacaactcaatgaagcacttactacttaccggaagcctgttgatggtgataactatgttcgtcggagtaaccaaagattacagcgtcctcacgtctacctgcctatacacctttatggacaactagtacaccataaaacaggctgccatttgttggaagtacagaatattattacagaactctgtcgtaatgttcgtacaccagatttggataagtgggaagaaattaaaaaactgaaagcatctctttgggccttgggaaatatcggctcatcaaattggggtctcaatttgctacaggaagaaaacgtgattccagatatactaaaacttgcaaaacagtgtgaagttctttccatcagagggacctgtgtatatgtacttgggctcatagctaaaaccaaacaaggctgtgatattctaaaatgtcacaactgggatgctgtgaggcatagtcgcaaacatctgtggccagtggttccagatgatgtggaacaactctgtaatgaactttcatctatcccaagcactctaagtttgaactcggagtcaaccagctctagacataatagtgaaagtgaatctgtgccatcgagtatgttcatattggaggatgaccggtttggcagcagctctactagtacatttttccttgatatcaatgaagatacagagccaacattttatgaccgatctggacccataaaggataaaaattcattccctttctttgcttctagtaaacttgtgaagaatcgtatcttaaattcgcttactttgcctaacaaaaaacatcgtagtagcagtgatccaaaaggagggaaattatcatctgaaagtaagacaagcaacaggcgaatcagaacacttacggagcccagtgttgattttaatcatagtgatgattttacacccatatccactgtacagaaaacattacaattagagacttcatttatggggaataagcacattgaagacactggtagtacaccaagcattggagaaaatgacttaaaattcaccaagaattttggtacagagaatcacagagaaaatacaagccgagagaggttagtagtagaaagttcaacgagctcacatatgaagatacgtagccaaagtttcaatacagacactacaacaagtggcataagttcaatgagctcaagtccttcacgagagacagtaggtgtagatgctacaactatggacacagactgtggaagcatgagtactgtggtaagtactaaaactattaagacaagccactatttgacgccacagtctaaccatctgtctctctccaaatcaaattcggtgtccctggtgcctccaggttcttctcatacgcttcctagaagagcacagtcccttaaagcaccctctattgctacaattaaaagtctagcagattgtaactttagttacacaagttctagagatgcttttggctatgctacactgaaaagactacagcaacaaagaatgcatccatccttatctcactctgaagctttggcatctccagcaaaagatgtgctatttactgataccatcaccatgaaggccaacagttttgagtccagattaacaccaagcaggttcatgaaagccttaagttatgcatcattagataaagaagatttattgagtcctattaatcaaaataccctgcaacgatcttcctcagtgcggtccatggtgtccagtgccacatatgggggttcagatgattacattggtcttgctctcccggtggatataaatgatatattccaggtaaaggatattccctattttcagacaaaaaacataccaccacatgatgatcgaggtgcaagagcatttgcccatgatgcaggaggtcttccatctggaactggaggtcttgtaaaaaattcttttcacttgctacgacagcagatgagtcttacggaaataatgaattcaatccattcagatgcctctctgtttttagaaagtacagaagacactggactacaggaacatacagatgataactgcctttattgtgtctgtattgaaattctgggtttccagcccagcaaccaactgagtgcaatatgtagtcattcagactttcaagatattccatattctgattggtgtgagcagactatccataatcctttagaagtggttccctctaagttttcggggatttctggatgcagtgatggggtgtctcaagaaggctcagctagcagcaccaaaagcacagaattgttactaggtgttaaaacaattccagatgatacaccaatgtgccgtatactccttcgcaaagaagttctaagattagtcattaatttgagtagttcagtttcaactaaatgtcatgagactgggcttttaacaattaaggagaagtatcctcaaacatttgatgacatatgcctttactctgaggtttcccatttgctgtcacactgcacattcagacttccgtgtcggaggttcatacaagaattatttcaagatgtacagtttctacaaatgcatgaagaagcagaggctgtgttggcaacaccaccaaagcaacctatagttgatacatctgctgaatcctgacctcatatttatgatggatatagatacatactatatatattcatatttgtggatttcctaaaagcctcagaaaatacgactgactaggcagcaaagacaggagtatcttctgtacactgttccgcagttactggtacatgaacagttggaactgctgactttcctaaccaaaacaacttccttctctcctttgttgagccttttgaggggttcatgattcattaccacagttttaagagtttcagttaccattgtatgcaagagccaagcactgaatacctacataggttttctattttctttcattttaaaagcataatgacagtggaacaataatgggatatgcagaagcacccttcacaagttatttctgaatgatttttagggtaaataatacagatgccttgtttgttaactaacttgtggaaagcaggaatcagtgtctctaaggctgcatcctattaccacaatggggtgtgctataactgctggtattagagagggaactttggccctttcacgtttttcttaatgtttgtaacactacttcagaggtttataacctcaaagcagaagaagagcctcaacaacccgggacttataagttatttttatgttactagacttgcataaagattcttgttttccaactcttcattttgttgcaatgtgttattacaggatatatgaaccaattaaggtttttcactacagttcttgaataaaatttaaaaatcattttttattttaattaaaaatatttcccatttatagaatgcatatatttgcaatggacttccactttcatcaactttccatctcatcgctttaaacaggaacttgaacaagcactgttagtttagacctaaaggataggaaagcattaaataatactttggatctcctgaggaaaagataagtttgcttgcaatttacacattccatggggaaagaagagccatatttccttaaaaaaaacattaataaagcttgttattgagaaaaattgtagtgaaaagccttaagtaccaaattttaaagcagcagtaacttaatttttatatcagtgtttttgttttgcacaaactaaatgcagtggtaggtgggtttatgagtatattaattgcctttatccatttgtgaagttaagttgatgagggcaaggtttttgtttgtttaatttgtatatgtctaaaggtatttggaactttttacaggaattaaacatatatgcaaatttgtatataaaaatagcatggccatcatttgaatgcttgtaaatgaaaggattatcttttttgagatctatatataaatagaaatagaaaatccagctggactgattaggattcttttttaattcatttgtgtataacatttttattacaattacacatcagttttgacacagtcatagcaacattaatattttcccatgatgcagatcctttttgtaatgggcttgttctttgagatctctgtaaagaaccctgtgaactagaaaacataactcacagagatacttttttaaaaaatttatttactggaactgaaagttccagttgggatgaagcatttcatctcacttcataacacctctttgactgcacttcagtgaattgttcttatgtgcactgtgtagcaacttacattataacaaagcagataagggctgtaagctgctgcttatgttgaaaagtggttcttcagattttctctcataaaatccagttgaagataaataatttttttatactttatcactgaacccaagtgtttatttaaatgtcaacagtacttctaagaacgttgcctgtcatcgtggtctttggtcttggataactaaactgcctttccagagaaccaaatgtcagagttactagaccaaatagtggttaaaacctccaaaggaagtaatgtaatcttattcataatgggattaacatattttagacattcattttaaacactacctcagttaatatagagtataaaaatctgtggtttaatccctcaaaagttaacagtaattttttttttgtcttacacacacacacaccccctcccccaccatcactatccctgtaccctcaccttggtcatctatcctgaaataaggcttagttagtattggcctgaatgttttgtgtttttttttttgttttttttttttactgttactttgaaaaatatgtatgtataccttatcatatctgcctatatcacttactttggggagatactcagagctttgtggttatcagtatactaaaaaaaaaaaaaagtctacgcttaaatttatagtgctatttggtttctccatgatttcactgacaggtctaatacattttctttgagtacttgtttgtaaaaagtagactttatggtgaaaaatacatgcagtgccaagtgattaacttaagtgtttaaaaatattaaattatagcagaagaggttaggaatgatatcagcagtaatagaaataattgagaaaatcatctataaataatagatattacagactatagaataccaaaataatgtcaatactgtagtttttaaagattttaggattaatcttagtccatataaatttgtactattggtaattattgaataattgggaggaatctgggcagttgtgctggttgtaaactatgaatttctaatcgtaaagtgaattgttatttctaattgaactttttttcaagaacagatttcagcctcacatactaagtaaatactgataaataaggaaattagaaatttagtattcataattaaatatgctctaaaatttcctatacttttatttcctgtttattcttaggtagattggaagggggaaacagtctgttctccctaattaaattttttctaataacgattagtagaatatggacattctatatgacagtgacattaaaagaggctctttggaagtatatacattattaacataatgtgtacaagtccttttgaaatgacaactttaatgggtttcagctcttttatctagagcttgagataattcaagctgagtttttcagggcatatcacaacggccaagtgttcagcagtgggatatcaatgcttatttacattttcctactgctatttatataaaatgttattccattcagaggatgccttttatccccacattaaagcacagatcattaagcaataaaaaccaaattgtctgtcattcaaattataactgcagttatttttgcatggtaagagtgaggtgctaattttgtgtgagatgaactttgtaaactactttgggaaatgttctttggaagtaaggttttttctcctttagtcttatgcttccacttttgtctcagattcacaatccattaaaacatggggaaaaaagaaaaggtaaaattgagagacttttgttagaggagctatttggaatgaaccaacatttcagattttccaaaatgtaagttaggaagtctccattgtctctgcattaacaaaatacactgttactatcttaatctcaagagtgtcattacagtgagaatctcatttaaaagcataccagtgaaattaatagcagtgcttatcaaagaacactgaaatctgtgagaatctttctaggagcattcttttcttcttttagttccaagttccagggtatttttcattcctagtaggtttatatgactcacagaatgtggacttttttcctgtttggagtatttttgtaatgtaagtatcggatagctgcaccacagcatgcataaattgcacattttgttttactttctttatagaatatttaatttcaaaaatataatttatgccaaaaaaagcatacctttcaattttgctacttggttgatttagcacaaaatgcaaagtcttggggcagagagggggagtgaaaaaaattttataggtaattgttacaaaaatacctgtcagaaaccctaaagctgcattgtaaaacaaatggtgtaaactagttttgaaaagtggtaaggaattgtgaaaaaaatctcagacttaatgctctctaaccacatgagtttcttcttttttatttagtaatacgctgctacatatttggaggttctggtgtttgtaggtcactgaacagacattgaaatctgatttatattgtataactgtaacatagaaagaaaaagtatttatattttttctgtaagaatatttcattgagttgtgtataatttaaataagatttgtccccaaatggttttgctcaccttgattttttttgttgtgattttcttgtttttgtataatgtgtatagtttatgtcaagggcattaaaagcctcctgaagcataatcttatcaaagggatacattgttaataaaatgtacttaaaattcttaaa

SEQ ID NO: 11881 - DNA, 3937 bp, Homo sapiens
ataagttagcgccgctctccgcctcggcagtgccagccgccagtggtcgcacttggagggtctcgccgccagtggaaggagccaccgcccccgcccgaccatggccgaggagctggtcttagagaggtgtgatctggagctggagaccaatggccgagaccaccacacggccgacctgtgccgggagaagctggtggtgcgacggggccagcccttctggctgaccctgcactttgagggccgcaactacgaggccagtgtagacagtctcaccttcagtgtcgtgaccggcccagcccctagccaggaggccgggaccaaggcccgttttccactaagagatgctgtggaggagggtgactggacagccaccgtggtggaccagcaagactgcaccctctcgctgcagctcaccaccccggccaacgcccccatcggcctgtatcgcctcagcctggaggcctccactggctaccagggatccagctttgtgctgggccacttcattttgctcttcaacgcctggtgcccagcggatgctgtgtacctggactcggaagaggagcggcaggagtatgtcctcacccagcagggctttatctaccagggctcggccaagttcatcaagaacataccttggaattttgggcagtttgaagatgggatcctagacatctgcctgatccttctagatgtcaaccccaagttcctgaagaacgccggccgtgactgctcccgccgcagcagccccgtctacgtgggccgggtggtgagtggcatggtcaactgcaacgatgaccagggtgtgctgctgggacgctgggacaacaactacggggacggcgtcagccccatgtcctggatcggcagcgtggacatcctgcggcgctggaagaaccacggctgccagcgcgtcaagtatggccagtgctgggtcttcgccgccgtggcctgcacagtgctgaggtgcctgggcatccctacccgcgtcgtgaccaactacaactcggcccatgaccagaacagcaaccttctcatcgagtacttccgcaatgagtttggggagatccagggtgacaagagcgagatgatctggaacttccactgctgggtggagtcgtggatgaccaggccggacctgcagccggggtacgagggctggcaggccctggacccaacgccccaggagaagagcgaagggacgtactgctgtggcccagttccagttcgtgccatcaaggagggcgacctgagcaccaagtacgatgcgccctttgtctttgcggaggtcaatgccgacgtggtagactggatccagcaggacgatgggtctgtgcacaaatccatcaaccgttccctgatcgttgggctgaagatcagcactaagagcgtgggccgagacgagcgggaggatatcacccacacctacaaatacccagaggggtcctcagaggagagggaggccttcacaagggcgaaccacctgaacaaactggccgagaaggaggagacagggatggccatgcggatccgtgtgggccagagcatgaacatgggcagtgactttgacgtctttgcccacatcaccaacaacaccgctgaggagtacgtctgccgcctcctgctctgtgcccgcaccgtcagctacaatgggatcttggggcccgagtgtggcaccaagtacctgctcaacctcaacctggagcctttctctgagaagagcgttcctctttgcatcctctatgagaaataccgtgactgccttacggagtccaacctcatcaaggtgcgggccctcctcgtggagccagttatcaacagctacctgctggctgagagggacctctacctggagaatccagaaatcaagatccggatccttggggagcccaagcagaaacgcaagctggtggctgaggtgtccctgcagaacccgctccctgtggccctggaaggctgcaccttcactgtggagggggccggcctgactgaggagcagaagacggtggagatcccagaccccgtggaggcaggggaggaagttaaggtgagaatggacctgctgccgctccacatgggcctccacaagctggtggtgaacttcgagagcgacaagctgaaggctgtgaagggcttccggaatgtcatcattggccccgcctaagggacccctgctcccagcctgctgagagcccccaccttgatcccaatccttatcccaagctagtgagcaaaatatgccccttcttgggccccagaccccagggcagggtgggcagcctatgggggctctcggaaatggaatgtgcccctggcccatctcagcctcctgagcctgtgggtccccactcaccccctttgctgtgaggaatgctctgtgccagaaacagtgggagccctgaccttggctgactggggctggggtgagagaggaaagacctacattccctctcctgcccagatgccctttggaaagccattgaccacccaccatattgtttgatctacttcatagctccttggagcaggcaaaaaagggacagcatgccccttggctggatcagggaatccagctccctagactgcatcccgtacctcttcccatgactgcacccagctccaggggcccttgggacagccagagctgggtggggacagtgataggcccaaggtcccctccacatcccagcagcccaagcttaatagccctccccctcaacctcaccattgtgaagcacctactatgtgctgggtgcctcccacacttgctggggctcacggggcctccaacccatttaatcaccatgggaaactgttgtgggcgctgcttccaggataaggagactgaggcttagagagaggaggcagccccctccacaccagtggcctcgtggttattagcaaggctgggtaatgtgaaggcccaagagcagagtctgggcctctgactctgagtccactgctccatttataaccccagcctgacctgagactgtcggagaggctgtctggggcctttatcaaaaaaagactcagccaagacaaggaggtagagaggggactgggggactgggagtcagagccctggctgggttcaggtcccacgtctggccaggcactgccttctcctctctgggcctttgtttccttgttggtcagaggagtgattgaaccagctcatctccaaggatcctctccactccatgtttgcaatgcttttatatggcccagccttgtaaataaccacaaggtccactccctgctccacgaagccttaagccataggcccaggatatttctgagagtgaaaccatgactgtgaccaccttctgtccccagccctgtcctggttccttcctatgcccaggtaccacccttcagaccccagttctaggggagaagagccctggacacccctgctctacccatgagcctgcccgctgcaatgcctagacttcccaacagccttagctgccagtgctggtcactaaccaacaaggttggcaccccagctaccccttctttgcagggctaaggcccccaaacatagcccctgccccggaggaagcttggggaacccatgagttgtcagctttgactttatctcctgctctttctacatgactgggcctcccttgggctggaagaattggggattctctattggaggtgagatcacagcctccagggccccccaaatcccagggaaggacttggagagaatcatgctgttgcatttagaactttctgctttgcacaggaaagagtcacacaattaatcaacatgtatattttctctatacatagagctctatttctctacggttttataaaagccttgggttccaaccaggcagtagatgtgcttctgaaccgcaaggagcaaacactgaaataaaatagtttatttttcacactcaaaaaaaaaaaaaaaaaa

SEQ ID NO: 11882 - DNA, 1879 bp, Homo sapiens
ataagttagcgccgctctccgcctcggcagtgccagccgccagtggtcgcacttggagggtctcgccgccagtggaaggagccaccgcccccgcccgaccatggccgaggagctggtcttagagaggtgtgatctggagctggagaccaatggccgagaccaccacacggccgacctgtgccgggagaagctggtggtgcgacggggccagcccttctggctgaccctgcactttgagggccgcaactacgaggccagtgtagacagtctcaccttcagtgtcgtgaccggcccagcccctagccaggaggccgggaccaaggcccgttttccactaagagatgctgtggaggagggtgactggacagccaccgtggtggaccagcaagactgcaccctctcgctgcagctcaccaccccggccaacgcccccatcggcctgtatcgcctcagcctggaggcctccactggctaccagggatccagctttgtgctgggccacttcattttgctcttcaacgcctggtgcccagcggatgctgtgtacctggactcggaagaggagcggcaggagtatgtcctcacccagcagggctttatctaccagggctcggccaagttcatcaagaacataccttggaattttgggcagtttgaagatgggatcctagacatctgcctgatccttctagatgtcaaccccaagttcctgaagaacgccggccgtgactgctcccgccgcagcagccccgtctacgtgggccgggtggtgagtggcatggtcaactgcaacgatgaccagggtgtgctgctgggacgctgggacaacaactacggggacggcgtcagccccatgtcctggatcggcagcgtggacatcctgcggcgctggaagaaccacggctgccagcgcgtcaagtatggccagtgctgggtcttcgccgccgtggcctgcacagtgctgaggtgcctgggcatccctacccgcgtcgtgaccaactacaactcggcccatgaccagaacagcaaccttctcatcgagtacttccgcaatgagtttggggagatccagggtgacaagagcgagatgatctggaacttccactgctgggtggagtcgtggatgaccaggccggacctgcagccggggtacgagggctggcaggccctggacccaacgccccaggagaagagcgaagggacgtactgctgtggcccagttccagttcgtgccatcaaggagggcgacctgagcaccaagtacgatgcgccctttgtctttgcggaggtcaatgccgacgtggtagactggatccagcaggacgatgggtctgtgcacaaatccatcaaccgttccctgatcgttgggctgaagatcagcactaagagcgtgggccgagacgagcgggaggatatcacccacacctacaaatacccagaggggtcctcagaggagagggaggccttcacaagggcgaaccacctgaacaaactggccgagaaggaggagacagggatggccatgcggatccgtgtgggccagagcatgaacatgggcagtgactttgacgtctttgcccacatcaccaacaacaccgctgaggagtacgtctgccgcctcctgctctgtgcccgcaccgtcagctacaatgggatcttggggcccgagtgtggcaccaagtacctgctcaacctcaacctggagcctttctctggtaaagccctgtgttcctggagcatttgttgaccgccaactgacaacatgctaggtagtgacctaaccacttagcatgtgtgatttcaccccacagacacttacatggcgctgactctggggcaggccctgtcctaagcactttataaatatcaacccacttaa

SEQ ID NO: 11883 - DNA, 6157 bp, Homo sapiens
ggcggccgcagcctcggctacagcttcggcggcgaaggtcagcgccgacggcagccggcacctgacggcgtgaccgacccgagccgatttctcttggatttggctacacacttatagatcttctgcactgtttacaggcacagttgctgatatgtgttcaagatgagtgggatgggagaaaatacctctgacccctccagggcagagacaagaaagcgcaaggaatgtcctgaccaacttggacccagccccaaaaggaacactgaaaaacgtaatcgtgaacaggaaaataaatatatagaagaacttgcagagttgatttttgcaaattttaatgatatagacaactttaacttcaaacctgacaaatgtgcaatcttaaaagaaactgtgaagcaaattcgtcagatcaaagaacaagagaaagcagcagctgccaacatagatgaagtgcagaagtcagatgtatcctctacagggcagggtgtcatcgacaaggatgcgctggggcctatgatgcttgaggcccttgatgggttcttctttgtagtgaacctggaaggcaacgttgtgtttgtgtcagagaatgtgacacagtatctaaggtataaccaagaagagctgatgaacaaaagtgtatatagcatcttgcatgttggggaccacacggaatttgtcaaaaacctgctgccaaagtctatagtaaatgggggatcttggtctggcgaacctccgaggcggaacagccataccttcaattgtcggatgctggtaaaacctttacctgattcagaagaggagggtcatgataaccaggaagctcatcagaaatatgaaactatgcagtgcttcgctgtctctcaaccaaagtccatcaaagaagaaggagaagatttgcagtcctgcttgatttgcgtggcaagaagagttcccatgaaggaaagaccagttcttccctcatcagaaagttttactactcgccaggatctccaaggcaagatcacgtctctggataccagcaccatgagagcagccatgaaaccaggctgggaggacctggtaagaaggtgtattcagaagttccatgcgcagcatgaaggagaatctgtgtcctatgctaagaggcatcatcatgaagtactgagacaaggattggcattcagtcaaatctatcgtttttccttgtctgatggcactcttgttgctgcacaaacgaagagcaaactcatccgttctcagactactaatgaacctcaacttgtaatatctttacatatgcttcacagagagcagaatgtgtgtgtgatgaatccggatctgactggacaaacgatggggaagccactgaatccaattagctctaacagccctgcccatcaggccctgtgcagtgggaacccaggtcaggacatgaccctcagtagcaatataaattttcccataaatggcccaaaggaacaaatgggcatgcccatgggcaggtttggtggttctgggggaatgaaccatgtgtcaggcatgcaagcaaccactcctcagggtagtaactatgcactcaaaatgaacagcccctcacaaagcagccctggcatgaatccaggacagcccacctccatgctttcaccaaggcatcgcatgagccctggagtggctggcagccctcgaatcccacccagtcagttttcccctgcaggaagcttgcattcccctgtgggagtttgcagcagcacaggaaatagccatagttataccaacagctccctcaatgcacttcaggccctcagcgaggggcacggggtctcattagggtcatcgttggcttcaccagacctaaaaatgggcaatttgcaaaactccccagttaatatgaatcctcccccactcagcaagatgggaagcttggactcaaaagactgttttggactatatggggagccctctgaaggtacaactggacaagcagagagcagctgccatcctggagagcaaaaggaaacaaatgaccccaacctgcccccggccgtgagcagtgagagagctgacgggcagagcagactgcatgacagcaaagggcagaccaaactcctgcagctgctgaccaccaaatctgatcagatggagccctcgcccttagccagctctttgtcggatacaaacaaagactccacaggtagcttgcctggttctgggtctacacatggaacctcgctcaaggagaagcataaaattttgcacagactcttgcaggacagcagttcccctgtggacttggccaagttaacagcagaagccacaggcaaagacctgagccaggagtccagcagcacagctcctggatcagaagtgactattaaacaagagccggtgagccccaagaagaaagagaatgcactacttcgctatttgctagataaagatgatactaaagatattggtttaccagaaataacccccaaacttgagagactggacagtaagacagatcctgccagtaacacaaaattaatagcaatgaaaactgagaaggaggagatgagctttgagcctggtgaccagcctggcagtgagctggacaacttggaggagattttggatgatttgcagaatagtcaattaccacagcttttcccagacacgaggccaggcgcccctgctggatcagttgacaagcaagccatcatcaatgacctcatgcaactcacagctgaaaacagccctgtcacacctgttggagcccagaaaacagcactgcgaatttcacagagcacttttaataacccacgaccagggcaactgggcaggttattgccaaaccagaatttaccacttgacatcacattgcaaagcccaactggtgctggacctttcccaccaatcagaaacagtagtccctactcagtgatacctcagccaggaatgatgggtaatcaagggatgataggaaaccaaggaaatttagggaacagtagcacaggaatgattggtaacagtgcttctcggcctactatgccatctggagaatgggcaccgcagagttcggctgtgagagtcacctgtgctgctaccaccagtgccatgaaccggccagtccaaggaggtatgattcggaacccagcagccagcatccccatgaggcccagcagccagcctggccaaagacagacgcttcagtctcaggtcatgaatatagggccatctgaattagagatgaacatggggggacctcagtatagccaacaacaagctcctccaaatcagactgccccatggcctgaaagcatcctgcctatagaccaggcgtcttttgccagccaaaacaggcagccatttggcagttctccagatgacttgctatgtccacatcctgcagctgagtctccgagtgatgagggagctctcctggaccagctgtatctggccttgcggaattttgatggcctggaggagattgatagagccttaggaatacccgaactggtcagccagagccaagcagtagatccagaacagttctcaagtcaggattccaacatcatgctggagcagaaggcgcccgttttcccacagcagtatgcatctcaggcacaaatggcccagggtagctattctcccatgcaagatccaaactttcacaccatgggacagcggcctagttatgccacactccgtatgcagcccagaccgggcctcaggcccacgggcctagtgcagaaccagccaaatcaactaagacttcaacttcagcatcgcctccaagcacagcagaatcgccagccacttatgaatcaaatcagcaatgtttccaatgtgaacttgactctgaggcctggagtaccaacacaggcacctattaatgcacagatgctggcccagagacagagggaaatcctgaaccagcatcttcgacagagacaaatgcatcagcaacagcaagttcagcaacgaactttgatgatgagaggacaagggttgaatatgacaccaagcatggtggctcctagtggtatgccagcaactatgagcaaccctcggattccccaggcaaatgcacagcagtttccatttcctccaaactacggaataagtcagcaacctgatccaggctttactggggctacgactccccagagcccacttatgtcaccccgaatggcacatacacagagtcccatgatgcaacagtctcaggccaacccagcctatcaggccccctccgacataaatggatgggcgcaggggaacatgggcggaaacagcatgttttcccagcagtccccaccacactttgggcagcaagcaaacaccagcatgtacagtaacaacatgaacatcaatgtgtccatggcgaccaacacaggtggcatgagcagcatgaaccagatgacaggacagatcagcatgacctcagtgacctccgtgcctacgtcagggctgtcctccatgggtcccgagcaggttaatgatcctgctctgaggggaggcaacctgttcccaaaccagctgcctggaatggatatgattaagcaggagggagacacaacacggaaatattgctgacactgctgaagccagttgcttcttcagctgaccgggctcacttgctcaaaacacttccagtctggagagctgtgtctatttgtttcaacccaactgacctgccagccggttctgctagagcagacaggcctggccctggttcccagggtggcgtccactcggctgtggcaggaggagctgcctcttctcttgacagtctgaagctcgcatccagacagtcgctcagtctgttcactgcattcaccttagtgcaacttagatctctcctgcaaaagtaaatgttgacaggcaaatttcatacccatgtcagattgaatgtatttaaatgtatgtatttaaggagaaccatgctcttgttctgttcctgttcggttccagacactggtttcttgctttgttttccctggctaacagtctagtgcaaaagattaagattttatctgggggaaagaaaagaattttttaaaaaattaaactaaagatgttttaagctaaagcctgaatttgggatggaagcaggacagacaccgtggacagcgctgtatttacagacacacccagtgcgtgaagaccaacaaagtcacagtcgtatctctagaaagctctaaagaccatgttggaaagagtctccagttactgaacagatgaaaaggagcctgtgagagggctgttaacattagcaaatattttttccttgttttttctttgttaaaaccaaactggttcacctgaatcatgaattgagaagaaataattttcatttctaaattaagtcccttttagtttgatcagacagcttgaatcagcatctcttcttccctgtcagcctgactcttcccttcccctctctcattccccatactccctattttcattccttttttaaaaaataatataagctacagaaaccaggtaagccctttatttccttaaatgttttgccagccacttaccaattgctaagtattgaatttcagaaaaaaaaaatgcatttactggcaaggagaagagcaaagttaaggcttgataccaatcgagctaaggatacctgctttggaagcatgtttattctgttccccagcaactctggcctccaaaatgggagaaaacgccagtgtgtttaaattgatagcagatatcacgacagatttaacctctgccatgtgttttttattttgttttttagcagtgctgactaagccgaagttttgtaaggtacataaaatccaatttatatgtaaacaagcaataatttaagttgagaacttatgtgttttaattgtataatttttgtgaggtatacatattgtggaattgactcaaaaatgaggtacttcagtattaaattagatatcttcatagcaatgtctcctaaaggtgttttgtaaaggatatcaatgccttgattagacctaatttgtagacttaagactttttattttctaaaccttgtgattctgcttataagtcatttatctaatctatatgatatgcagccgctgtaggaaccaattcttgatttttatatgtttatattctttcttaatgaaccttagaaagactacatgttactaagcaggccacttttatggttgttttt

SEQ ID NO: 11884 - DNA, 3321 bp, Homo sapiens
gctgcgggctactgggcctgcgctgccgggctttgggttctgggcctctgccgctctctggccctaagtgctgagctgccgggaacggcagcttctgacgctgggccattggacgctgcggaaccaggcttcttcactttgagtttccgccgcgaagcgccagtccgggccgaggagggagcctttactacttctccctggtttcattcatgttctgaggagggtgtgagaaggaaccatggatcccacagccttggtggaagccattgtggaagaagtggcctgtcccatctgtatgaccttcctgagggagcccatgagcattgactgtggccacagcttctgccacagctgtctctctggactctgggagatcccaggagaatcccagaactggggttacacctgtcccctctgtcgagctcctgtccagccaaggaacctgcggcctaattggcagctggccaatgttgtagaaaaagtccgtctgctaaggctacatccaggaatggggctgaagggtgacctgtgtgagcgccatggggaaaagctgaagatgttctgcaaagaggatgtcttgataatgtgtgaggcctgcagccagtccccagagcatgaggcccacagtgttgtgccaatggaggatgttgcctgggagtacaagtgggaacttcatgaggccctcgaacatctgaagaaagagcaagaagaggcctggaagcttgaagttggtgaaaggaaacgaactgccacctggaagatacaggtggaaacccgaaaacagagtattgtatgggagtttgaaaaataccagcgattactagagaaaaagcagccaccacatcggcagctgggggcagaggtagcagcagctctggccagcctacagcgggaggcagcggagaccatgcagaaactggagttgaaccatagcgagctcatccagcagagccaggtcctgtggaggatgattgcagagttgaaagagaggtcgcagaggcctgtccgctggatgttgcaggatattcaggaagtgttaaacaggagcaaatcttggagcttgcagcagccagaaccaatctccctggagttgaagacagattgccgtgtgctggggctaagagagatcctgaagacttatgcagctgatgtgcgcttggatccagatactgcttactcccgtctcatcgtgtctgaggacagaaaacgtgtgcactatggagacaccaaccagaaactgccagacaatcctgagagattttaccgctataatatcgtcctgggaagccagtgcatctcctcaggccggcactactgggaggtggaggtgggagacaggtctgagtggggcctgggagtatgtaagcaaaatgtagaccggaaggaggtggtctacttatccccccactatggattctgggtgataaggctgaggaagggaaatgagtaccgagcaggcaccgatgagtacccaatcctgtccttgccggtccctcctcgccgggtgggaatcttcgtggattatgaggcccatgacatttctttctacaatgtgactgactgtggctcccacatcttcactttcccccgctatcccttccctgggcgcctcctgccctattttagtccttgctacagcattggaaccaacaacactgctcctctggccatctgctccctggatggggaggactaagaaagctaccaccctaaccacagaggcttggaattgggcctggcccccatggggcttggaggaccgagccactgacaggtatcccctgaaactgagctgagcccagtatccaaggattcctctgtctgatcctttggtctttgctaccaggctgaagtctgtcatgaaaccacttattttaaaaagcagaggcccagtcaaatgagcattgcatcccatgagggaagcacgacagggctgatggtgaggatcagagcagttctaaggtgactcgttggggtaaggatcaggactttgtccatgtagtagccaaccaccctcttccctgattcccgtccggtgtcacagttcagtcagtgaggatgatgaagtagatacagtcttcaggacaccattagatgggctttcccaataggccaaaaaaatgctgcgcatacccagagctggttgttgtgctgaggccagtcagaggatgcttcccctgaggtttgctataactaagcaacctttatgtgactctcaccttctgacctcctggcaagagaaattcagtgcagcagggggacacagacctgcccaagccaccccactgccgttccctctctgagcacaagctgggcaaatcactgtcccttggactccaggagaccagtgtcctagtcttgccttttttctctaagtggcaggatcagaaaacctgcgagctttagtttgtattttcactttatgaatgaggaaactgaaatggccttaagggagcaagttatttctttttttttgacacggagtctcactctgttgcccaggctggagtgcagtggcacgatctcggctcactgcaggctctgcctcctgggttcacgccattctcctgcctcagcttcccgagtagctgggactacaggcgcccaccacgacgcctggctcatttttttgtatttttagtagagacggagtttcaccatgttagctaggatggtctcgatctcctgacctcatgatccgccctcctcagcctcccacagtgctgggattagaggcatgagccactgcgcccggcccctggagcaagttatttcttacaaagctgctgaaggtaagattatcaaaattataaagcatttttcacactcaagtgaaacaaggttgacaaactcacttcgcaggtcacatgcctatacatcacttattatatttgggtctgaaacttctcacatgtttgggaggttttatgtgtcctcattgggaaaatgggtgtaattcagcataaaacctcatatgattgtcctgcctcatggagctgttgtatagatcccagatccatcccatgatttgttcctgtctgaggcatagaggcaggcaagccgtggattttgcacatggtgactttcccactgtgccatgatacagtctgcatcttatagcagtgcctttgtctcagggcctctgctggcagtctagaccttttgggcagaaaggagcttcaaatggctgtgataaggaatattaaaaattgtgtttctactttaattgtattggctgttcatgtatgtaggagttaaaataggccaaactggagaaataaacgcattctgtccaccatgaaaaaaaaaaaaaaaaaaaaa

SEQ ID NO: 11885 - DNA, 4170 bp, Homo sapiens
ctcttcccttaggtgtttaagttccgcgcgcaggccaggctgcaacctgacggccagatccctcgctgtcctagtcgctgctccttggagtcatgttcccagccgccccttctccgcggaccccgggtaccgggtcccgaaggggcccgctggccggactcgggcccggctccacgccccggacggctagcaggaagggtctgcccctggggtctgcagtcagctccccagtgctcttctcgccggtcggccggcgtagctcgctaagctcgcggggaacaccaacacgaatgttcccacaccactccataactgagtctgtgaactatgatgtgaaaacgtttggatcttctcttcctgttaaagtcatggaagccctaacattggctgaagtcgatgaccagctgaccattaacatagatgaaggtggatgggcttgtctggtgtgcaaagagaagctcattatttggaagattgctctgtcacctattactaagttatccgtttgcaaagaacttcagctgccacctagtgatttccactggagtgccgacttagtggctctttcttactcttctccctcaggtgaagcacattctactcaggctgttgctgtcatggttgccaccagagaaggatctatccgctattggccaagccttgctggtgaagatacctacacagaggcttttgtagattcgggaggtgataagacttacagtttcctaacagcagtgcagggaggaagttttattttgtcttcatcaggaagccaactaattcggttgatacctgagagctcaggaaagattcatcagcatatcctgcctcaggggcaaggcatgctttcaggaattggtcgaaaagtttcttctctttttggaattttatctcctagtagtgatctcacactttcaagtgttctctgggatagagagagatcaagcttttatagcctgacgagttcaaacatcagtaaatgggaattagatgattcttcagaaaagcatgcatacagttgggatataaatagagccctgaaggaaaacattaccgatgctatttggggatctgaaagtaactatgaagctattaaagaaggagtcaacattcgatatttggacttgaagcaaaactgtgatgggctggtgattttggcagcagcatggcactcagcagacaatccatgtctcatctattactctctgataacaatagaagataatggttgccaaatgtcagatgcagttactgtagaagtcactcaatataatccaccttttcagtctgaagacctgattttgtgtcagttgacggtcccaaacttttcaaaccagactgcctatctgtataacgaaagtgctgtctatgtgtgctccacaggaactgggaaattttctcttccccaggagaaaattgtctttaatgcacaaggagatagtgttttaggtgctggtgcctgtggtggtgttcctatcattttttctagaaacagtggactggtgtctattacttcaagggaaaatgtgtctatattggcagaagacttggaagggtctttagcatcttcagttgctggaccaaacagtgagagtatgatttttgagaccactacaaagaatgaaactatagcccaggaagataaaatcaagttgctgaaagctgcctttctgcaatactgcagaaaagatttaggtcatgctcaaatggtggttgatgagctcttttcctctcactctgatttggattctgattctgaactagacagggcagttacccaaatcagtgtagacctgatggatgactacccagcatctgacccacggtgggctgagtctgtccctgaggaagcacctgggttcagcaatacgtcactgattatccttcaccagctagaagacaagatgaaagctcactcttttcttatggactttattcatcaagttggcttatttggacgtctaggcagttttccagttagagggacaccgatggccactcgactgttgctctgtgagcatgccgaaaagctgtcagccgccattgttctcaagaaccaccactcccggctttctgaccttgtcaacacagccatattgattgctttgaacaagagggagtatgaaatcccatccaacctgactcctgcagatgtctttttcagggaggtatcccaagtagataccatctgtgagtgcttactggagcatgaggagcaagtcttgagggatgcacctatggattccattgaatgggctgaagtggtgatcaatgtgaacaatattctcaaggatatgctgcaggctgctagtcattatcgccaaaatagaaactctttgtatagaagagaagaatcactagaaaaagaacctgaatatgttccatggacggcaacaagtggtcctggtggcatccgaacggtaataatacgccagcatgagattgtcctgaaggtggcttatccacaggcagacagcaacctccgaaacatcgtgaccgagcagctggtagccctgatcgattgcttcctggatggttatgtttctcagcttaagtctgtggataaatccagtaatcgggaaagatatgacaatctggagatggaatacctacagaaaagatcagatctcttatctcctcttctttcactaggccagtacctgtgggctgcttctctagcagagaaatactgtgactttgatatattggtacaaatgtgtgagcagactgacaaccagagccgactccagcgctacatgacccagtttgctgatcagaatttttcagactttctcttccgttggtatctggagaaaggaaagcgaggcaaattattatctcagcccatttctcagcatggacagttggcaaattttttgcaagctcatgaacatctcagctggttacatgaaattaatagccaagaattagaaaaggctcatgcaacacttctgggtttggcaaatatggaaactcgttactttgcaaagaagaaaacccttcttggcttgagtaaattggctgcattagcttcagacttttcagaggatatgctacaagaaaaaattgaagaaatggctgagcaggagcgctttctactgcatcaggagaccctacctgaacagctgctggcggagaaacagctaaatctcagtgcgatgccagtattgactgcaccacaactcattggtctatatatctgtgaagaaaatagaagagctaatgaatatgatttcaagaaagctttggacttgttggaatatattgatgaggaagaagatataaatataaatgatctaaaactggaaatcctttgcaaagctcttcagagagataactggtccagttctgatggcaaagatgatccaattgaagtatctaaagacagtatatttgtgaagatcttacagaaacttttaaaagatggcattcagctcagtgagtacttaccggaggtgaaagacctgctacaagcggatcagcttggaagcttaaagtccaatccttacttcgagtttgttttgaaagcaaattatgaatattatgttcagggacaaatataactttttctaaaaatggccattgtttatgaaatctgtataagtgtgtccttatacaaattttaggccataaacaagtgtaagtttgtacaatttcataacatgtatagctgagtttttatactttatatgtaggaagctaatataaaatagttatgtaactgtgattttggttttcagttatgtgacttgttttttccacctgaaatgtgtcagttgttgttcctgtactcggtgccctttctttttactctcacgtggtcccaggttctggagttcttgtcctggttctagctgctcacatgtacaaatcacttctaggcctcagtttctgcgactatgaaaattactagattgcactagcttgtctctaaaattgctgtgactccagatactttgcactgaagagaatctagggtgtttgatatctgtttcagttagggctaatgggaaatgtctagtaagataaatgtcaacttttgctgacttattatgagatgaaaaaccaaaggagagtgggcctaactcatgtgagcttgataactgatgaactcattgggagcattttaaacttttctacataaataataaatgagcactaatgaaagta

SEQ ID NO: 11886 - DNA, 6251 bp, Homo sapiens
atttatattcattttttactcttttccatcaaaacataattttactaagtacgcatgttctgtgtccgtgttttgtcatcactgaagccacttttggagtcacctagtaatagcctttccactctatctagttctgtagcttttatgtgtgtaaattacttcaaatctgtttatgatcctattgctggaaactttatcccaagacacaaaaatcttttctattagaagttattaactttaaaacaattatttattttattttattttattttttgagacagagtctcgctttgtcacccaggctggagtgcagtggcacgatctcggctcactgcaagctccacctcccgagttcatgccattctcctgcctcagcctcccgagtagctgggactacgggcgtccgccaccatgcccagctaattttttttgtatttttggtagagacaaggtttcaccgtgttagccaggatggtcttgatctcctgacctcgtggtccacctgcctcggcctcccaaagcgctgggattataggcgtgagccaccgcacctggcctaaaacaattatttctttaaaaaaacataccctctattctattttgtgtcttcacaacacaatcacttactgtattgctttttaaagtgatctttaaagagtcttgcagaagagactacacagcaggcccgagaccatcctgagaggcctgtgtgcaaggctggccccccgctgtgtcaggacggtgcccaccaccctcaatgaagaggggctccctgtgcttagctgcttgtgtggggaacaagggcactgtttgaagaagcaaacatggtagcatcaagcattccttgaaatatggctccaagggaacaatgagacgtgctcttggtcttggaagctcatcagaatgtttagagctggggaggcctccaaacgcccattgcctgggccgtcgcccccaagggtgcggagtgtggaggttgcccgggggagggccggctacggattcacgctttcgggacaggcaccctgtgtgctcagctgcgtcatgagagggagccctgcggatttcgtgggcctccgagctggagaccagatacttgctgtcaatgaaatcaacgtgaaaaaagcatctcatgaagatgtagtgaaattaattgggaagtgctctggtgtccttcacatggtgattgctgaaggcgtcggccgcttcgaatcctgttccagtgatgaagaagggggactctatgaaggaaaaggctggctgaagcccaagctggattctaaagcactaggtataaacagagcagagcgagtcgtggaggaaatgcagtctggtggaattttcaatatgatttttgaaaacccgagcctttgtgcgagcaattcagagcccttgaaattgaaacaaagatccctttcagagtcggccgcaactcgatttgatgttggacatgaaagtataaataatccaaatcccaacatgctttctaaggaggaaatatcaaaagttattcatgatgattcggttttcagcattggactagaaagtcatgacgattttgcattggatgcaagtattttaaacgtggcgatgatcgtgggctacttaggctccattgagcttccttccacgagctccaacctggagtccgacagcttgcaagccatccgcggctgcatgcggcgcctgcgggcagagcagaaaatccactcgctggtgaccatgaagatcatgcacgactgtgtgcagctgagcactgacaaggctggagtcgtggccgagtacccggccgagaagctggccttcagcgccgtgtgcccggacgaccggcgatttttcgggttggttaccatgcagacgaatgacgacgggagcctggcccaggaggaggagggcgccctgcggacttcctgccacgtgttcatggtggacccagacttgtttaatcacaagatccaccaaggcattgctcggcggtttgggtttgagtgcacggccgacccagacaccaatggctgtctggaattcccggcgtcctccctccccgtcctgcagttcatctctgtcctgtaccgagacatgggtgagctgattgagggcatgcgggcccgcgcctttctggacggggacgccgatgcccaccagaacaacagcaccagcagcaacagtgacagcggcattgggaacttccaccaggaggagaagagcaaccgggtccttgtggtggacctgggtgggagctcgagcagacacggccccggaggcagcgcgtgggacggtgtgggtgggaggggtgcccagccctggggtgctccctggactgggcccttctgtccggaccccgaagggagccccccatttgaggccgctcatcagactgacaggttctgggacctaaacaagcacctagggccagcctctcctgtggaggtgcccccagcttccttgaggagctcagtccccccttccaagaggggcaccgtgggtgctggctgtggtttcaaccagcgctggctcccggtccacgtgctccgggagtggcagtgcggacacaccagcgaccaggactcttacacagattccaccgatggctggtccagcatcaactgcggcacactgccccctcctatgagcaagatccccgcagaccgctacagggtggagggcagcttcgcgcagcccccgctgaatgccccgaagagggagtggtccaggaaggcctttggaatgcaaagcatttttggtccccatcgaaatgttcgaaagactaaggaagataaaaagggctcaaaatttgggcggggaactggactcactcagccttctcaacgcacgtctgctcggagatcatttgggagatccaagagattcagtatcactcgctcccttgatgatcttgagtctgcaactgtgtctgatggcgagttgacgggcgccgacctgaaggactgcgtcagcaacaacagcctgagcagcaatgccagcctccccagcgtgcagagctgccggcgcctgcgtgagaggagggtcgccagctgggccgtgtcctttgagcgcctgctgcaggaccccgtcggtgtccgctacttctctgattttctaaggaaagaattcagtgaagaaaacattttattctggcaggcctgtgaatattttaatcatgttcctgcacatgacaaaaaggagctttcctacagggcccgggagattttcagtaagtttctctgcagcaaagccaccaccccggtcaacatcgacagccaggcccagctagcagacgacgtcctccgcgcacctcacccagacatgttcaaggagcagcagctgcagatcttcaatctcatgaagtttgatagctacactcgctttctgaagtccccgctgtaccaggaatgcatcctggcggaagtggagggccgtgcactcccggactcgcagcaggtccccagcagcccggcttccaagcacagcctcggttcagaccactccagtgtgtccacgccaaaaaagttaagtggaaaatcaaaatccggccgatccctgaatgaagagctgggggatgaggacagcgagaagaagcggaaaggcgcgtttttctcgtggtcgcggaccaggagcaccgggaggtcccagaaaaagagggagcacggggaccacgcagacgacgccctgcatgccaatggaggcctgtgtcgccgagagtcgcagggctctgtgtcctctgcggggagcctggacctgtcggaggcctgcaggactttggcacccgagaaggacaaggccaccaagcactgctgcattcatctcccggatgggacatcctgcgtggtggctgtcaaggcgggcttctccatcaaagacatcctgtccggactctgtgagcggcatggcatcaacggggcggccgcggacctcttcctggtgggcggggacaagcctctggtgctgcaccaagacagtagcatcttggagtcaagggacctgcgcctagaaaagcgcaccttgtttcggctggatcttgttccgattaaccggtcagtgggactcaaggccaagcccaccaagcccgtcacggaggtgctgcggcccgtggtggccagatacggcctggacctcagtggcctgctggtgaggctgagtggagagaaggagcccctggaccttggcgcccctatatcgagtctggacggacagcgggttgtcttggaggagaaggatccttccagaggaaaggcatccgcagataaacagaaaggtgtgccagtgaaacagaacacagctgtaaattccagctccagaaaccactcggctacgggagaggaaagaacactaggcaagtctaattctattaaaataaaaggagaaaatggaaaaaatgctagggatccccggctttcaaagagagaagaatctattgcaaagattgggaaaaaaaaatatcagaaaattaatttggacgaagcagaggagttttttgagcttatttccaaagctcagagcaacagagcagatgaccaacgtgggctgctaaggaaggaagacctggtgttgccagagttcctccgtttacctcctggttccacagaactcaccctccccactccagctgctgtggccaagggctttagcaagagaagcgccacaggcaacggccgggagagcgcctcccagcctggcgagcagtgggagccagtccaggagagcagcgacagcccgtccaccagcccgggctcagcctccagcccccctggacctcctgggacgaccccccccgggcagaagtctcccagcgggcccttctgcactccccagtcccccgtctccctcgcgcaggagggcaccgcccagatctggaagaggcagtctcaggaagtggaggccgggggcatccagacggtggaggatgagcacgtggccgagctgaccctgatgggggagggggacatcagcagccccaacagcaccttgctgccgccgccctccaccccccaggaagtgccaggaccttccagaccaggtacctccaggttctgatccctccaccttggccccgtaagcgtggtctgctcagcttccagtcagaaaggacagtgggcccccggctgccactgtttgctggtggtctccgtgaccccctcctcacctgctggttgggggcttccttggccctcttggaaaggaggggctcgtgtggccccaggccagtgtctgtcaggatggtccccccgaggcgctctgggcaggcatcctggtgtcctgagaggctcttgcaggaatgatacgtggcagtgcctgcagcgaggtctgggaacaccctgggtgaggcctgggggtttccgaaaatggaggcattcctttccaaatctggacagcgatcgtttttagtgtttctgtctcaagactggaaaacaatagcatttgtcttgagtgaggaagtgaagcccgctgtgttcatagcaggagagggctcccagacacaggcccgtcctcggaagagccttgagagtgcagctcggacccaccggcggcccccgtagcaggtggtgtgggtgctcgggagtggaggtgacgtcagcagcgctctctgaccgcgggtgtcacgggcatttctcaaaggaagcaggggattcagtgagtgtgaaggtgaacaggatggcctggcagcagggatgtttccgtgagccacaaataccagaaactgaggcgaggctcccagcagccggtagggaaaggtgtttccaggggtccgagggccgtggcctgcgtggccatcccctggagagaggagccgctcagggtgcgcgtcatggagtgtgctcaggggtgcgtggacacctctgctgtggtttgctgctgggggcgatgggagcgcctctccgtcctgtgccctggtccaggatgctgacagcagtgagaggcctgccgtgaggtttggtcttgtcagacctgtagcctggacctcgccgggggaccagggagtgcacgtctgtagatctgtacatatctgggcctttggaggccacgtgtggcatgggaggggctacctggtccctttcacagccaggacacgcctggatgagaaagcctgaggtgcctggcatgcccaccggtgccactctgcagcctccacccctggcctgagtccccctccatccgtcttggtggacacctgtgtggctctcacctgcgttttgagtctgttcttccaggagtaataaattctggacatcatcaaaaaaaaaaaaaaaaaa

SEQ ID NO: 11887 - DNA, 5492 bp, Homo sapiens
atttatattcattttttactcttttccatcaaaacataattttactaagtacgcatgttctgtgtccgtgttttgtcatcactgaagccacttttggagtcacctagtaatagcctttccactctatctagttctgtagcttttatgtgtgtaaattacttcaaatctgtttatgatcctattgctggaaactttatcccaagacacaaaaatcttttctattagaagttattaactttaaaacaattatttattttattttattttattttttgagacagagtctcgctttgtcacccaggctggagtgcagtggcacgatctcggctcactgcaagctccacctcccgagttcatgccattctcctgcctcagcctcccgagtagctgggactacgggcgtccgccaccatgcccagctaattttttttgtatttttggtagagacaaggtttcaccgtgttagccaggatggtcttgatctcctgacctcgtggtccacctgcctcggcctcccaaagcgctgggattataggcgtgagccaccgcacctggcctaaaacaattatttctttaaaaaaacataccctctattctattttgtgtcttcacaacacaatcacttactgtattgctttttaaagtgatctttaaagagtcttgcagaagagactacacagcaggcccgagaccatcctgagaggcctgtgtgcaaggctggccccccgctgtgtcaggacggtgcccaccaccctcaatgaagaggggctccctgtgcttagctgcttgtgtggggaacaagggcactgtttgaagaagcaaacatggtagcatcaagcattccttgaaatatggctccaagggaacaatgagacgtgctcttggtcttggaagctcatcagaatgtttagagctggggaggcctccaaacgcccattgcctgggccgtcgcccccaagggtgcggagtgtggaggttgcccgggggagggccggctacggattcacgctttcgggacaggcaccctgtgtgctcagctgcgtcatgagagggagccctgcggatttcgtgggcctccgagctggagaccagatacttgctgtcaatgaaatcaacgtgaaaaaagcatctcatgaagatgtagtgaaattaattgggaagtgctctggtgtccttcacatggtgattgctgaaggcgtcggccgcttcgaatcctgttccagtgatgaagaagggggactctatgaaggaaaaggctggctgaagcccaagctggattctaaagcactaggtataaacagagcagagcgagtcgtggaggaaatgcagtctggtggaattttcaatatgatttttgaaaacccgagcctttgtgcgagcaattcagagcccttgaaattgaaacaaagatccctttcagagtcggccgcaactcgatttgatgttggacatgaaagtataaataatccaaatcccaacatgctttctaaggaggaaatatcaaaagttattcatgatgattcggttttcagcattggactagaaagtcatgacgattttgcattggatgcaagtattttaaacgtggcgatgatcgtgggctacttaggctccattgagcttccttccacgagctccaacctggagtccgacagcttgcaagccatccgcggctgcatgcggcgcctgcgggcagagcagaaaatccactcgctggtgaccatgaagatcatgcacgactgtgtgcagctgagcactgacaaggctggagtcgtggccgagtacccggccgagaagctggccttcagcgccgtgtgcccggacgaccggcgatttttcgggttggttaccatgcagacgaatgacgacgggagcctggcccaggaggaggagggcgccctgcggacttcctgccacgtgttcatggtggacccagacttgtttaatcacaagatccaccaaggcattgctcggcggtttgggtttgagtgcacggccgacccagacaccaatggctgtctggaattcccggcgtcctccctccccgtcctgcagttcatctctgtcctgtaccgagacatgggtgagctgattgagggcatgcgggcccgcgcctttctggacggggacgccgatgcccaccagaacaacagcaccagcagcaacagtgacagcggcattgggaacttccaccaggaggagaagagcaaccgggtccttgtggtggacctgggtgggagctcgagcagacacggccccggaggcagcgcgtgggacggtgtgggtgggaggggtgcccagccctggggtgctccctggactgggcccttctgtccggaccccgaagggagccccccatttgaggccgctcatcagactgacaggttctgggacctaaacaagcacctagggccagcctctcctgtggaggtgcccccagcttccttgaggagctcagtccccccttccaagaggggcaccgtgggtgctggctgtggtttcaaccagcgctggctcccggtccacgtgctccgggagtggcagtgcggacacaccagcgaccaggactcttacacagattccaccgatggctggtccagcatcaactgcggcacactgccccctcctatgagcaagatccccgcagaccgctacagggtggagggcagcttcgcgcagcccccgctgaatgccccgaagagggagtggtccaggaaggcctttggaatgcaaagcatttttggtccccatcgaaatgttcgaaagactaaggaagataaaaagggctcaaaatttgggcggggaactggactcactcagccttctcaacgcacgtctgctcggagatcatttgggagatccaagagattcagtatcactcgctcccttgatgatcttgagtctgcaactgtgtctgatggcgagttgacgggcgccgacctgaaggactgcgtcagcaacaacagcctgagcagcaatgccagcctccccagcgtgcagagctgccggcgcctgcgtgagaggagggtcgccagctgggccgtgtcctttgagcgcctgctgcaggaccccgtcggtgtccgctacttctctgattttctaaggaaagaattcagtgaagaaaacattttattctggcaggcctgtgaatattttaatcatgttcctgcacatgacaaaaaggagctttcctacagggcccgggagattttcagtaagtttctctgcagcaaagccaccaccccggtcaacatcgacagccaggcccagctagcagacgacgtcctccgcgcacctcacccagacatgttcaaggagcagcagctgcagatcttcaatctcatgaagtttgatagctacactcgctttctgaagtccccgctgtaccaggaatgcatcctggcggaagtggagggccgtgcactcccggactcgcagcaggtccccagcagcccggcttccaagcacagcctcggttcagaccactccagtgtgtccacgccaaaaaagttaagtggaaaatcaaaatccggccgatccctgaatgaagagctgggggatgaggacagcgagaagaagcggaaaggcgcgtttttctcgtggtcgcggaccaggagcaccgggaggtcccagaaaaagagggagcacggggaccacgcagacgacgccctgcatgccaatggaggcctgtgtcgccgagagtcgcagggctctgtgtcctctgcggggagcctggacctgtcggaggcctgcaggactttggcacccgagaaggacaaggccaccaagcactgctgcattcatctcccggatgggacatcctgcgtggtggctgtcaaggcgggcttctccatcaaagacatcctgtccggactctgtgagcggcatggcatcaacggggcggccgcggacctcttcctggtgggcggggacaagcctctggtgctgcaccaagacagtagcatcttggagtcaagggacctgcgcctagaaaagcgcaccttgtttcggctggatcttgttccgattaaccggtcagtgggactcaaggccaagcccaccaagcccgtcacggaggtgctgcggcccgtggtggccagatacggcctggacctcagtggcctgctggtgaggctgagtggagagaaggagcccctggaccttggcgcccctatatcgagtctggacggacagcgggttgtcttggaggagaaggatccttccagaggaaaggcatccgcagataaacagaaaggtgtgccagtgaaacagaacacagctgtaaattccagctccagaaaccactcggctacgggagaggaaagaacactaggcaagtctaattctattaaaataaaaggagaaaatggaaaaaatgctagggatccccggctttcaaagagagaagaatctattgcaaagattgggaaaaaaaaatatcagaaaattaatttggacgaagcagaggagttttttgagcttatttccaaagctcagagcaacagagcagatgaccaacgtgggctgctaaggaaggaagacctggtgttgccagagttcctccgtttacctcctggttccacagaactcaccctccccactccagctgctgtggccaagggctttagcaagagaagcgccacaggcaacggccgggagagcgcctcccagcctggcgagcagtgggagccagtccaggagagcagcgacagcccgtccaccagcccgggctcagcctccagcccccctggacctcctgggacgaccccccccgggcagaagtctcccagcgggcccttctgcactccccagtcccccgtctccctcgcgcaggagggcaccgcccagatctggaagaggcagtctcaggaagtggaggccgggggcatccagacggtggaggatgagcacgtggccgagctgaccctgatgggggagggggacatcagcagccccaacagcaccttgctgccgccgccctccaccccccaggaagtgccaggaccttccagaccaggaagtgggacccatggcagccgagacctcccagtcaacagaatcatcgatgtggatcttgtaactggctcggcgcccgggcgggatggtggcatagcgggggcacaggctggccctgggaggtcgcaggccagtggtgggcctcctacatcagacctccctggcttgggccccgtcccgggtgagcctgctaagcccaagaccagcgctcaccacgccaccttcgtctgagctgccctggcctggccaactctcctgtggacatgtcggggtggggcagcccaggtggattctgtgggcctcaggggggccaccctggccaccacaccctcaggagcccagccaggagggcagggggtgacctcgctggaggcactggccccggacattcgccatgctggccatggggctccctggccctggcctcctgctgcccaataaagcatttctgaggacccaaaaaaaaaaaaaaaaaa

SEQ ID NO: 11888 - DNA, 1745 bp, Homo sapiens
ttccgcttccggcagcgcgagataaatcacgagaggaagcttaaatctgtcgtttgaatttaggaccacctcggttcacaatggtccgtagtggaaaaaatggggaccttcatcttaaacagattgcatattacaaacgaactggtgaatatcattcaactacactgccaagtgagagaagtggcataagaagagcagcaaaaaaatttgtcttcaaagaaaaaaagctgttttatgttggaaaagacagaaaacaaaatcgtttggtaattgtttcagaagaggaaaaaaagaaagtcttaagagaatgccatgaaaatgacagtggagctcatcatggtatatccaggaccctcactctggtagaatccaattattattggacatctgtgaccaatgatgccaaacagtgggtatatgcttgtcagcattgccaagtggcaaaaaatacagttattgtagcaccgaaacagcaccttctcaaggtggaaaatccatggagtttagttactgttgatctgatggggccttttcatacaagcaacagaagtcatgtatatgctataatcatgacagatttgttcaccaaatggattgtgattttgcctctatgtgatgtttcagcatcagaagtttctaaagctattatcaatatatttttcttatatggacctcctcagaaaataataatggaccaaagagatgaattcattcaacagatcaatattgaactgtacagattgtttggcataaagcaaattgtaatttctcacacctctggaactgttaacccaatggaaagtacacctaacacaatcaaagcatttctctccaaacactgtgctgaccacccaaacaattgggatgatcacctatcagctgtttcatttgccttcaatgtaactcacttggaacctactaaaaatacaccatattttcaaatgtttagtcgaaatccttatatgcctgagacttcagatagtcttcatgaagtggatggtgataatacaagtatgtttgccaaaattctagatgcaattaaagaagctgataaaataatggagaataagacaacttcactgggccagatggagaacaacaatttggatgaactaaataaaagcaagatcattgttaaaaagaaacccaaacaattaaatccatttcatttaaaagtgggtcatgaagttttaagacaaaggaaaattggtggaaggatggtcgttttcagtctgaatgggttggtccttgtgtcatagactatattacagaaagtggatgtgctgtcctgagagacaacactggggttagactgaaaagacctatcaaaatgtcccaccttaagccctacataagagaatccagtgaacaagaaagtctttatctcttgcaaggttcagtagtggcagatcatgactacattggattgcctgaaattccgattggagcatatcaagcaaatattctggtggaagatgcaactattggtatagtcgataatgaattactgacatcaagcaaggatcgtgaactattagaatatagaaatacgaaaatctctccattgatagacgatcatagttctcttgaaaagcagactttcagtctgttggactcttcaaaccaggttcttgaatacttaagttagtaaataccaaaatttatttaaagtgcttgtttagaatataaattcttaatgatatcttattcattaaaaacgttgtatagaaaaaaaaaaaaaaaaa

SEQ ID NO: 11889 - DNA, 2590 bp, Homo sapiens
cggcgccagggcccctcgggccgggaagaggggaaggggagcgaggttgatgcccggcggaggggcgagcgcggcgtctggccggcttctcaccgccgcggagcaaagagggtcccgggaagcggcagggtcggcgtccaggagcggcttcgggggctccggcggcggcagaggcggagcaagcggccccgggtccgggagcggaggccctgggggccccgcgggcaggatgagcttgaccccgaaggagctctcgagcctgctgagcatcatatcggaggaggcgggcggcggcagcaccttcgagggcctgtccaccgccttccaccactacttcagcaaggccgaccacttccgcctgggctcggtgctcgtcatgctgctccagcagcccgacctgctgcctagcgcggcgcagcgcctcacggcgctctacctgctctgggagatgtaccgcaccgagccgctggccgccaaccccttcgccgccagcttcgcgcacctgctcaaccccgcgccgcccgcccgcggcggccaggaacccgaccgccctccgctctcaggatttttacctcctataactccaccagaaaagttttttctttcccagctgatgctggcacccccacgggaactcttcaaaaagacgcctcgccagattgcactgatggacgttggaaacatgggccagtctgtggacattagtgggcttcagttagccttggccgaacgccaatctgaattgccaacgcaaagcaaagcgagcttccccagtattctcagtgacccagacccggattcttctaattctggatttgacagctcagttgcctctcagatcacagaagctttagtcagcggaccaaagccacctattgaaagccattttcgaccagagtttattcgtccaccgcctccactccacatttgtgaggatgaacttgcttggctaaaccccacggagcctgaccacgcgatccagtgggataaatcgatgtgtgttaagaatagcactggtgtggagatcaaacgaataatggccaaagccttcaaaagccccttatcctctccccaacaaacacagctacttggtgagttggaaaaagaccccaaacttgtctaccatattggcctcaccccagccaaacttcctgaccttgtggaaaacaaccctttagtcgctatagaaatgttgctgaaattaatgcagtcaagccagatcactgagtatttctctgtcctggtcaatatggacatgtctttacattcaatggaagttgtaaatcgactaactacagctgttgatctacctcctgaatttattcacctttatatatcaaattgcatctctacttgtgaacagattaaggataaatatatgcagaatcggttggtgcgtcttgtgtgtgtgtttctccaatccttgatccgtaacaaaattattaatgtacaggatttgtttatagaagtgcaggcattctgtattgaattcagtaggatacgagaagctgctggtcttttccggttgttgaagacattggatactggggaaacaccttctgagaccgaaatgtcaaaataatacctcatcagaaccatcccatccattcactgttcagctgtactgtgatttagtttttacaccgttaaaaccctgagtggattgcttggtttaatgcatataaacagtactttatctacttaaagcaaagttttgctttcttgaatgactttttctgtgagatgaatttttgataagaactagggaaaacatgtcttttaggtgtcttgctgatgactatccataggaggaatggctatcccaaaaaaagttccgcaaaaaagtagatgagtttcttttttttttaagcactaaagaacaaaatgcatttttcattaatacaggcttctgatgaaccaggaatcctgttttcgtaaagttccaatgttgatgagagtaaattcttaagcatttgtcctagaggtgaaagcagctgaatgtttctgaaccatcaagaggcaaacaaacaggagtttgtttcttgaacctgcttatgcacacagctcttaactcctcatgaggcacacagctcttaactcctgatgaaccaaggatttactcataactttctccttgtcatggaggcttaatagacaacagaataaatgcatttcttgggcctcttataaacttgggaattcttagaaagctgcttctattaccaggctgtaatagctggtatagtttttttttttttctcttaagatgttctgttattagtctgagacagccatttttttgttttaaggaaaaatatcagtcagtgctccgggaggtaatttcctgtggggtctgcaccctcctgtctgggtggtggatgtgggtttgagaagtaggagagcagggtggtaccgtgtgggctcttaccctttatgtgattttggacaacagtgccttccattaaagttctttttatcaactgtaaaaaaaaaaaaaaaaaaaaaaaaaaaaaaaaaaaaaaaaaaaaaaaaaaaaaaaaaaaaaaaaaaaaaaaaaaaaaaaaaaaaaaaaaaaaaaaaaaaaaaaaaa

SEQ ID NO: 11890 - DNA, 8519 bp, Homo sapiens
cggcggcggagccaggacccagacatctgggactgttgttctctcgcggcgcgaccgcctcagtcacttcgcccagagacccggacctggtccgctggggagcaggcggccataaaccccctctctcccggttccctgacgccgcggcaggagctgttacaaacaccctgcggttggtctccgatgcccttcagtgaggtggggacgcctggaccctggtgagcgaaccccaagccaccccccaccccaactcagtgtcttcgccggcccccggcccgtacgcctgtctggtcgccatggctgaaaacacagagggggatctgaactccaacctgctccacgccccctaccacaccggggaccctcagctggacacggccatcgggcagtggctccgctgggataagaatcccaaaacaaaagagcagattgaaaacctgttacggaatgggatgaacaaggagctgcgagatcgtctttgttgccgaatgacttttgggactgcaggacttcgttctgccatgggggcagggttttgctatattaatgaccttacagtaatacagtcaacacaggggatgtacaaataccttgagagatgtttctcagacttcaagcagagaggctttgtggttgggtatgacactcggggtcaagtaactagcagctgcagcagccagaggcttgctaaactcactgctgcagtcttgctggccaaagatgttcctgtgtaccttttttcaagatatgttcctacaccttttgtaccatatgcagttcagaagctcaaagcagttgcaggtgtgatgattactgcctctcacaaccgcaaggaagacaatggatacaaggtttactgggaaactggtgctcagatcacatctcctcatgataaagaaattctaaaatgtatagaagaatgtgtggaaccctggaatggttcctggaatgataatttagtggataccagcccgctgaagagagaccctctgcaggacatttgcaggagatacatggaagatctgaaaaagatctgtttttacagggagttaaactcgaagaccaccttgaaatttgtgcacacatcttttcatggggtcggacatgactatgtgcagttggcttttaaagtgtttggttttaagcctccaattccagtaccagaacaaaaagatcctgatccagacttttctaccgttaaatgtccaaatcctgaagaaggagaatctgtgctggaactttccttgagactggcagagaaagaaaatgcccgggtagtgctagccacagatcctgatgcagacagactggcagcagcagaacttcaggagaatggttgttggaaagttttcacagggaatgagttggcagctttgtttggatggtggatgtttgattgctggaagaaaaataaatcaagaaatgctgatgtgaagaacgtttatatgttagccaccacagtctcttctaaaattctgaaggcaattgcacttaaagaaggatttcattttgaagaaacattaccaggttttaaatggattggaagtaggataatagacctcctggaaaatgggaaagaagtcctttttgcatttgaagagtctattggttttctctgtggaacttcagttttggataaagatggggtgagtgcagctgttgtggttgctgagatggcatcttacctggaaaccatgaatataacattgaaacagcaactggttaaggtttatgaaaaatatggttatcatatttcaaaaacttcctatttcttgtgttatgaaccacctaccatcaaaagtatatttgaaaggcttcgtaattttgattctccaaaagaatatccaaaattttgtggaacatttgctatattgcatgtacgggacgttaccactggatatgacagtagccagcctaataagaaatcagtgctgcctgtgagtaaaaacagccaaatgattacatttacttttcaaaatggctgtgttgctacccttcggacaagtggaacagaaccaaagataaagtattatgcagagatgtgtgcgtcacctgaccagagtgacactgctttactggaggaagaactgaagaaactcattgatgctctgatagagaattttcttcagcctagtaagaatggactgatctggcgttctgtttaggggtacaccaatatgtcatgacactgtgtgggcatatggaacagagcaaccgagaactgcatacattgaaccttgtgttagcattctctctctatctcatctggccgagtatctttttccttttattttctttctttttggtcaactggctagactaaacaaagtataagtttgaaatgaaatggtctagagggaaatgattcaaattttttcataattcaaacaaaagttattacactaaaagtattatagtaacgtattgtccttccgttaacagaaacatcacaattcaaaagtgagttttcttattatagtgtgattaagcctagttctgtatctcgtaattgtgtatagcatggtaaaagaaaaaaaaaaagacaggtaaatgttatataattgtagggttagttaaggaaattagtccataaaattggcaagaaaatggtactttccttgattgttatgaaaaagtgtcattgtgacatcacaggtattaatttacaaattagagtatttgaaataggatatttagcatttctgtagtttagaacagatgttacagtgtgtggttttggcatgtctgtttcaggtgcccttggtgcagtataaatttactgtatgtatttaaaattctgatgtttactgaacataaaacaatagtggcaacactcctattggctttgttcttatcaaatttctcagtgccttctcagggtctggtatgaacagaaaaaacagtgttcctgcatttaccataatttaatcagtcaatttgcagatagctaaggaaaatcttccaaaatctgtaggtgcttcctctatatcaagtgagtttgctgattttaaaatcttaggaatataaataaagatcttaataaaagcaagcttaatgtagttaaggatcttcatattagaattgtgtcatttatcaaaccttttattacagaaaaaaatctgaactgagaaaggagctctgaatttatttgacagtctaacttttgaattacatttttgtaagtagatttattcttttattttatgaagtaatgttaattttactaagaataaaacatccaaattttaagtattatgaaatactaaaactacatgttttaaaacagaggtccagtttattctaacatcttgctgacttctgtagaatttctgattgcatgactattatttatcttcttttagtgtagaaaataattttttacaaaaagtcacttttgggctgggcgcagtggctcacgcctgtaatcccagcactttgggaggctgaggcaggtggatcacaatgtcaggagtttgagactagcctggccaatatggtgaaaccctgtctctactaaaaatacaaaaattagccgggtgtggtggtgggcacctgtagtcccagctactcgggaggctgaggcaggagaattgcttgaacctaggaggctgagattgcagtgagccgaaatcacgccactacactccagcctgggcaacagagggagactccatctcaaaaaaaaaaaaagtcacttttggctaatcatgcagtcttctgaaaaggtttaatagagaaatgctgtttaggctgggcttggtggctcacatctgtaataccagcgctttgggaggctgaggcaggaggattgcttgaggccaggagtttaagttacagaactatgatcacactgccgcactgaagcctggatgacagagtgagaccttatctcaaaaaaaaaaaaaaaaagagagagagagagaaaaagaaatgctgtgtttaatcttcttaaaatgtatcttgtcctacatagttctcagaatacatatggggtatagttaggagataacaataacaagacctaaacaaattgcttatgggagatagcactgtaattagagaatttatttcatataaaataataatataaagtttgaactgattagaatgttccttaaatcatggtttcgtttgttgcagctgtcagctaacatttggttgagctcatataatccaaacctaattgtccaactattgtattgccactattgttaatttgttccttccttactttcttattgttggatcttatatgactgtatgactgtagataatagacagctagctaaatgtagagcaccatttttctcaatgagtttgttttcaaaggctttgcactggagaagatatgtgtagaatttttgttttatttttaaaatgtgtaaaacatcttttgttttatatgcttttaagaatgtagattgtaatttaggaaatggcatatattctgcaaagtggtataatgttgtatatatgaaaaacaggtatatttggtttagttctgtgtttcagtgactgataaacaaaaatgaagctaaaatgaatcaacggctcattcatagttactaaagccatgtcatgactgtcattctattatgaagaaaacagttttatttgagtgctttaatataatgcaacatttaagtcatcttaaggtgaaaagttattgaagtgttcttctctcaagttaacaaaattttacaaatgttcctgaagtgtatcgattgagggaattattttattctagcctgtcatgagtctgtctgagcatgatacttaacatgaacttgatgtagtaggtgcacatttgcctaacaggataaattcagtgatagcccaagctggtcaggagagacagaagtgctggctaggaggtctcagcctcgggcactacaatgtttatctttttctttttgaacaatattgtgaaaatgattgcattctcattgagcatgaaagtcaaaactggaattttctaaagctttggagaaaaggagagaattagtagggcaagatcaaagcatacattggaaataaacagtagaaataagcaaacaatataaagagacacgggaaatgcttctcgtgaagggcaaatgtaacaccataacagtagggaataaactgtgtcccacctgtttacttgtgtttatttgttgttatgatgagtatgcacctaccattttcctttattgtgatcactaaaatgaggccaaggtttaggaggtgagaaaaagtatcccttttacggattcagttcctgctaggatgttgtatcagaatcatgtgagaactcaggaagaggtagagcagaaataaaaaggaagaaaatgtagattagaaaataagacttctgagaaaaagttcaaggaataaagattgtttgactctggagaggagaaagctgttgagatagtttgctaagtttgctaataaagctttattgagtcttttattgaagggttcaaagtaagaaatactatgccatagtgttctccatctctagtgaagacagaaccagagggaataaggatcttttttttaaagacagcatggaaagtttaagatttaggaacttcttgagaaatcttcataatatcttctattcaaaatcttttttttatttttaagggaataaaaattttaaaaattaagagatatacagatgactttttaagggtccttctttccagcacattttttttaaaaactcaggttagaataaaaatgtcataaagggcactaaaagtaacatttgggtttcactccatatctagaagaatttagctcacaaaacaatttttgtgtgttttgagtaactgatgcataagtgcaatgaataattttcctgcttcactgttatttttaatttaacctggcaaattaagtgagacttgaacaaaattttgttcatcttgaagaatgtatagtggcttaggttatttgaggttttcgttttgaatatatatgttgttattttgatgtagatacgttagcagatggagaggttctaagagattggatactttggaatgtctttatataggaaatagacctcccatttcttaagcaagttgcttctggaattgatgcaacagggatattagctgtagtttaatggataagttgttctatgagctgctgctatcagtacttttttccacattttccattgatatttgtgatgcttgaaaaatccaaacttcacttggatacatttaattttatgcctttttctctctacctcccacttttcctaggcacccttgcacattttgttactgtgaaggactattgccctgttacctcactgataagaaatctcaactgtattcattcagaatgctttaagcttagtcataaactacatttgcctatggacctttggttattttgttaatgttgtcattatatttaagacttattgtaggaagtaattttaaatctatttcataacctgttttgatctgtctgcatactgctatatgttaatttattacggccttttacaattcacttgtcatctgagattgttctagaaactgatgaggaaagagtcgtactaaccaaaatgaatgggcaattgacataacattctatttcaggtttccttgtacttggggagccaaagcacaagatctaaggaaatcttattcacatttgtccctcagagcatcttaccctaagccatagaggtataaatagtaagatgagaattgctcattgtctgactccttgcacagcatgaatttaattctagttggaaacaaagttagtgttgactactggttaccttaaagtattcaccatactatatatttattagaccatctttcctctttgtttattcaagactatgtacttataaaagagaacctataagaatgtgtagagtgaccaaatagggacaaagtgacatacctagagtttgctgctcaaatttttccactagcgtaaccctaaagcagaggggcatgatgaagggggaaggggttctgagagcaaaatcagaatcagcctaccactgacatgaagtgtgttctgtctttaaaatgtaagtgaattttgcattctttataataaaacttttaatataaaaatgatatgtttaatctttactgaaacttatgccaccacaaaggagcaccatgttcatcacgtggctgctcagttttctcccccagtgccctcacccccagtggaggcaagtccttgagctacacacactggctgtagtgcaagatatataaacataggccgggctcggtggctcatgcctgtaatcctagcactttgggaggccgaagcaggtggatcatctgaggtcgggagattgagactagcctgaccgacatggagaaaccctgtgtccactaaaaatacaaaattagccgggtgtggtggcacatgcctgtaatcccagctactcgggaggctgaggcaggagaatcacttgaacccaggaggtggaggttgtggtgagccaagatcgcgccgttgcactccagcctgggcaacaagagtgaaactccatctcaaaaaaaaaaaaaaaagatatataaacatagaacatatccagactatttcctgcccttggaatctgaccttcagaaggattaatgccaaactaaactgacctgaaacagttttgttactattggcattccttgactaaaaaggaccacctgatgctcagtcccgagagtaggaatcgtggtttattatttttcatatccataccacctagttcagtacctgttatagagtgtttaattgctgatactaggaattaagggattttttaaaagtagcaaatagtttaaggaacaatcaaaaaatgaattttctaattcagttttttcaatgaagtcccatcactgaactttataatgtaatgtttattaagcagacatccccttaaatactcagtttctttggagagagcaaagcatatctctctgtggaaattatatataatgcctggtattttacactcaaagcaaggtgttggccaggaaggtaaagaaatggtgtctatgtagacttaatatcactagtctaagtgtcattttgagcctagtagcactaccttccaagtgagtcacaacaaatttgatcctatttggtatgtttttgtccactgttatgattcatcatgtatcttacaagagccactcaagcaagactctgcttctatgtatggtgaggccttgttgttctaggctagaataaactctttgtatgcctcattgaatatgccaggtaaaatatatgcagtcaagaatgaattatttttctgactaaagtgtgtagcagtagttcaaaattgtgcccttgttttaacagtttctgtcaacatcttctcatttttccctacaaaaacaccagggtgtattataagtactgcctgtgagaatttgcactttatgtatttgtgtgtggatttcttgtggttttagccaaatgaagtgttatcagtaataaacaggtctcttcataggaaaaaaaaaaaaaaaaaa

SEQ ID NO: 11891 - DNA, 1843 bp, Homo sapiens
gggcacgagggcagagccagttcctagcgcagagccgcgcccgccatgagggagatcgtgcacatccaggcgggccagtgcgggaaccagatcggcaccaagttttgggaagtgatcagcgatgagcacggcatcgacccggccggaggctacgtgggagactcggcgctgcagctggagagaatcaacgtctactacaatgagtcatcgtctcagaaatatgtgcccagggccgccctggtggacttagagccaggcaccatggacagcgtgcggtctgggccttttgggcagcttttccggcctgacaacttcatctttggccagacgggtgcagggaacaactgggcgaaagggcactacacggagggcgcggagctggtggacgcagtgctggacgtggtgcggaaggagtgcgagcactgcgactgcctgcagggcttccagctcacgcactcgctgggcggcggcacgggctcaggcatgggcacgctgctcatcagcaagatccgtgaggagttcccggaccgcatcatgaacaccttcagcgtcatgccctcgcccaaggtgtcggacacggtggtggagccctacaatgccacactgtcggtgcaccagctggtggagaatacagacgagacctactgcatcgacaacgaggcgctctatgacatctgcttccgcactctgaagctgacaacgcccacctacggggacctcaaccacctggtgtccgccaccatgagtggggtcaccacctcgctgcgcttcccgggccagctcaatgctgacctgcgcaagctggcggtgaacatggtgcccttcccgcgcctgcacttcttcatgcctggcttcgcgccgctcaccagccgcggcagccagcagtaccgggccctgaccgtgcccgagctcacccagcagatgttcgacgccaggaacatgatggccgcctgcgatccgcgccatggccgctacctgaccgtggccaccgtgttccgcgggcccatgtccatgaaggaggtggacgagcagatgctggccatccagagtaagaacagcagctacttcgtggagtggattcccaacaacgtgaaggtggccgtgtgcgacatcccgccccgcggcctgaagatggcctccaccttcatcggcaacagcacggccatccaggagctgttcaagcgcatctccgagcagttctcagccatgttccggcgcaaggccttcctgcactggttcacgggtgagggcatggatgaaatggagttcaccgaggcggagagcaacatgaacgacctggtatccgagtaccagcagtaccaggatgccaccgccaatgacggggaggaagcttttgaggatgaggaagaggagatcgatggatagtcggaatagagccgccccaactcagatcctacaacacgcaagttccttcttgaaccctggtgcctcctaccctatggccctgaatggtgcactggtttaattgtgttggtgtcggcccctcacaaatgcagccaagtcatgtaattagtcatctggaacaaagactaaaaacagcagagaattgcgggttctacccagtcagaagatcacaccatggagactttctactagaggacttgaaagagaactgaggggccacaaaataaacttcaccttccattaagtgttcaagcatgtctgcaaattaggagggagttagaaacagtctttttcatcctttgtgatgaagcctgaaattgtgccgtgttgccttatatgaatatgcagtatgggactttgaaataatgattcataataaaatactaaacgtgtgtcttcaaaaaaaaaaaaaaaaaaa

SEQ ID NO: 11892 - DNA, 1703 bp, Homo sapiens
ttgggcgccacaccttgcgcgccccggggcccaaggagacgaccctgaagaggagcctggctacttttgcctcagacgagtccggagcgccgggttaaccggtctgaagtcccaggggctttctgggactgctcagccaccggcagcttccggcaccaggggacgccggacgccgtccggacattcggcgcgcttgccacgatcttggacgggtctcgggcctcgacctttgaattccccgctccggctccaagatgtcagcaacgctgatcctggagcccccaggccgctgctgctggaacgagccggtgcgcattgccgtgcgcggcctggccccggagcagcgggttacgctgcgcgcgtccctgcgcgacgagaagggcgcgctcttccgggcccacgcgcgctactgcgccgacgcctgcggcgagctggacctggagcgcgcacccgcgctgggcggcagcttcgcgggactcgagcccatggggctgctctgggccctggaacccgagaagcctttttggcgcttcctgaagcgggacgtacagattccttttgtcgtggagttggaggtgctggacggccacgaccccgagcctggacggctgctgtgccaggcgcagcacgagcgccacttcctcccgccaggggtgcggcgccagtcggtgcgagcgggccgggtgcgcgccacgctcttcctgccgccaggacctggacccttcccagggatcattgacatctttggtattggagggggcctcttggaatatcgagccagcctccttgctggccatggctttgccacgttggctctagcttattataactttgaagatctccccaataacatggacaacatatccctggagtacttcgaagaagccgtatgctacatgcttcaacatccccaggtaaaaggcccaggcattgggcttttgggcatttctctaggagctgatatttgtctctcaatggcctcattcttgaagaatgtctcagccacagtttccatcaatggatctgggatcagtgggaacacagccatcaactataagcacagtagcattccaccattgggctatgacctgaggagaatcaaggtagctttctcaggcctcgtggacatcgtggatataaggaatgctctcgtaggagggtacaagaaccccagcatgattccaatagagaaggcccaggggcccatcctgctcattgttggtcaggatgaccataactggagaagtgagttgtatgcccaaacagtctctgaacggttacaggcccatggaaaggaaaaaccccagatcatctgttaccctgggactgggcattacatcgagcctccttacttccccctgtgcccagcttcccttcacagattactgaacaaacatgttatatggggtggggagcccagggctcattctaaggcccaggaagatgcctggaagcaaattctagccttcttctgcaaacacctgggaggtacccagaaaacagctgtccctaaattgtaatgcatttgtctgttgttgacatgagagattcaagatcagattctagtgttcagtaaccctatgtgaatcagatgtctcctggataacattaaagccatgtctttgtcattaaaaaaaaaaaaaaaaaaaaaaaaaaaaaaaaaaaaaaaaaaaaaaaaaaaaaaaaaaaaaaaaaaaaaaaaa

SEQ ID NO: 11893 - DNA, 492 bp, Homo sapiens
atggttaaccccaccgtgttcgacatcgctgtcgacggcaagcccttgggccgcgtgtccttcgagccgtttgcagacaaggttccaaaggcagcagaaaactttcgtgctctgagcaatgtagagaaaggatttggttataaaggttcctgctttcacagaattattccagggtttatgtgtcagggtggtgacttcacatgccataatggcactggtggcaagtacacctgcggggagaaatttgatgacgagagcttcgtcctaaagcatacacatcctggcatcttgtccatggcaaatgctggacccaacacaaatggttcccagtgtttcatctgcactgccaagactgagtggctggatggcaatcctgtggtctttggcaaggtgaaagaaggcatgaatattgtggaggccatggggcactttgggtccgagaatggcaagaccagcaagaagatcaccattgctgactgtggacaactctaa

SEQ ID NO: 11894 - DNA, 3219 bp, Homo sapiens
cagaaacctcatacttctcgggtcagggaaggtttgggaggatgctgaggcctgagatctcatcaacctcgccttctgccccggcggtttccccgtcgtcgggagaaacccgctcacctcagggtccccgctacaatttcggactccaggagactccacagagccgcccttcggtccaggtggtctctgcatccacctgtcctggcacgtcaggagctgcgggcgaccggagcagcagcagcagcagccttccctgccccgcgccaaactcccggccagctcaaggttcatactttggaaacaaaagagcttatgcagaaaacacagttgcatcaaattttacttttggtgcaagctcatcttctgcacgagatactaattatcctcaaacacttaaaactccattgtctactggaaatcctcagagatcaggttataagagctggacaccacaagtgggatattcagcttcatcctcatctgcgatttctgcacactccccatcagttattgtagctgttgtagaagggagaggacttgccagaggtgaaataggaatggcaagtattgatttaaaaaacccccaaattatactatcccagtttgcagacaacacaacatatgcaaaggtgatcactaaacttaaaattttatcacctttggaaataataatgtcaaatactgcttgtgctgtggggaattccaccaagttgttcactctgatcacagaaaatttcaagaatgttaatttcactactatccaaaggaaatacttcaatgaaacaaaaggattagagtacattgaacagttatgcatagcagaattcagcactgtcctaatggaggttcagtccaagtattactgccttgcagctgttgcagctttgttaaaatatgttgaatttattcaaaattcagtttatgcaccaaaatcactgaagatttgtttccagggtagtgaacagacagccatgatagattcatcatcagcccaaaaccttgaattgttaattaataatcaagactataggaataatcacactctctttggtgttctaaattatactaagactcctggagggagtagacgacttcgttctaatatattagagcctctagttgatattgaaaccattaacatgagattagattgtgttcaagaactacttcaagatgaggaactattttttggacttcaatcagttatatcaagatttcttgatacagagcagcttctttctgttttagtccaaattccaaagcaagacacggtcaatgctgctgaatcaaagataacaaatttaatatacttaaaacataccttggaacttgtggatcctttaaagattgctatgaagaactgtaacacacctttattaagagcttactatggttccttggaagacaagaggtttggaatcatacttgaaaagattaaaacagtaattaatgatgatgcaagatacatgaaaggatgcctaaacatgaggactcagaagtgctatgcagtgaggtctaacataaatgaatttcttgacatagcaagaagaacatacacagagattgtagatgacatagcaggaatgatatcacaacttggagaaaaatatagtctacctttaaggacaagttttagctctgctcgaggatttttcatccagatgactacagattgtatagccctacctagtgatcaacttccttcagaatttattaagatttctaaagtgaaaaattcttacagctttacatcagcagatttaattaaaatgaatgaaagatgccaagaatctttgagagaaatctatcacatgacttatatgatagtgtgcaaactgcttagtgagatttatgaacatattcattgcttatataaactatctgacactgtgtcaatgctggatatgctactgtcatttgctcatgcctgcactctttctgactatgttcgaccagaatttactgatactttagcaatcaaacagggatggcatcctattcttgaaaaaatatctgcggaaaaacctattgccaacaatacctatgttacagaagggagtaattttttgatcataactggaccaaacatgagtggaaaatccacatatttaaaacagattgctctttgtcagattatggcccagattggatcatatgttccagcagaatattcttcctttagaattgctaaacagatttttacaagaattagtactgatgatgatatcgaaacaaattcatcaacatttatgaaagaaatgaaagagatagcatatattctacataatgctaatgacaaatcgctcatattaattgatgaacttggcagaggtactaatacggaagaaggtattggcatttgttatgctgtttgtgaatatctactgagcttaaaggcatttacactgtttgctacacatttcctggaactatgccatattgatgccctgtatcctaatgtagaaaacatgcattttgaagttcaacatgtaaagaatacctcaagaaataaagaagcaattttgtatacctacaaactttctaagggactcacagaagagaaaaattatggattaaaagctgcagaggtgtcatcacttccaccatcaattgtcttggatgccaaggaaatcacaactcaaattacgagacaaattttgcaaaaccaaaggagtacccctgagatggaaagacagagagctgtgtaccatctagccactaggcttgttcaaactgctcgaaactctcaattggatccagacagtttacgaatatatttaagtaacctcaagaagaagtacaaagaagattttcccaggactgaacaagttccagaaaagactgaagaataatcacaattctaatgtaataatatatcttaattcaaggaacctagaatttatttttctccttagagataaggaaaataacatttgccaaatttcatattttaattgaaaattacattatattaacatcacaattgtcatctatatattctatatgaaaaatatttattataacttaacaaatgagaactacttaaaggaatggtttttatgttaggagaaaatacaatacaccacttttttctcacaaaaattcacattattaagacctaagttcatttatacttacaagttatagtttaaaatattattgtaaataccctagtttaataaacacctttctttttaggtctgaaaaaaaaaaaaaaaa

SEQ ID NO: 11895 - DNA, 6492 bp, Homo sapiens
tcatttgctgattgtgttggggatgagctgccgtggggatgggaagcagggtttgaccctcagattggtgtctactacatcgatcgcatcaacaaaaccacgcagatagaagatccaagaaaacaatggaggggggaacaggagaagatgctcaaggactacctctctgtggcacaggatgccctccggacacagaaggaactgtaccatgtgaaggagcagaggctggcgctggccctggatgaatacgtgcgattaaatgatgcctataaggaaaagtcaagttctcacacaagcttattctcaggatcttcatccagtactaaatatgatcccgatattttaaaagctgagatctccactacaagattaaggaattgataaaaaaatgtctggaggccagagcgggtatgaactcagtgaagccaaagccattctaacagaactaaaatctatcagaaaggcaattagctcaggagaaaaagaaaaacaagatctgatgcagagtcttgctaagctgcaggagcggtttcatttggatcagaacattggcagatctgagccagatttgagatgtagtcctgtgaactctcatttatgtctctccagacagacccttgatgctgggtcacaaacaagcatttccggagatattggagtaagaagtagatcaaatttagctgaaaaggtcaggctaagcctacagtatgaagaagccaaaagaagtatggccaacttaaaaattgaactgtcaaaattggacagtgaggcctggcctggggcactggatattgagaaggaaaaactgatgctgattaatgaaaaagaagaacttttgaaagagcttcagttcgtcaccccacagaaacgtacccaagatgaattagaacgcctagaagctgaaaggcagcggctggaagaagagttgctgtctgtgaggggaacaccaagcagagctctggccgagagattgagattggaagagagaagaaaagagctgctacagaaacttgaagaaactactaaattaactacttatttgcattcacaacttaaaagcctctctgccagcaccctgtccatgtcatctgggagcagcctgggttccctggcatcgagtcggggctctctgaacacctccagcagagggtcactcaactccctcagttccaccgaactctattacagcagtcaaagtgatcagatagatgtggattatcagtataaactggacttccttctgcaagagaaaagcggttacattccttctggacccatcaccaccatccatgaaaacgaggtggtcaagtcccctagccagcctggccagagtggactctgtggagtggcagctgcagcaacaggccacactcctccactggctgaggccccgaagtctgtggcctccctgtcctcgaggtcctccctttcctccttgtctcctccaggctctcccttggttttggaaggcacgtttcccatgtcttcttctcatgatgcctctctccatcagttcactgctgactttgaagactgtgagttgagtagccattttgcagatatcagcctcatcgaaaatcagattttgctggattctgattcaggaggagcctcccagtctctttcagaggataaagaccttaatgaatgtgctagggagccattatatgaaggaactgcagatgtggaaaaatcattaccaaaaagaagagtgatccacttgcttggggagaaaaccacttgtgtgtcggctgctgtgtctgatgagtctgtggctggagacagtggggtctatgaagctttcgtgaaacaacctagtgaaatggaagatgtcacatacagtgaagaggatgtagccattgtagagaccgcccaggttcagataggactcagatacaatgcaaaaagttcaagtttcatggtgattatagcacagctccgaaaccttcatgccttcttgatacctcatacttcaaaagtatattttagggttgccgttcttccttcctcaactgatgtcagctgtctgtttcgcacaaaagttcatccgcccacagaatccattttattcaatgatgtgttcagagtcgccatttcccaaacagccttacaacagaagacactgagggtagacctttgctctgtcagtaaacaccgaagggaagaatgcctggctggaactcagatcagcctggcagatttaccattttccagtgagtttttcactctatggtataacttgcttccttccaagcaaatgccttgcaaaaagaatgaagaaaatgaggactctgtatttcaaccaaaccagccgttagtagattctatagacttggatgcagtgtcagccttacttgcaagaacatcagctgagttgttagctgtggaacaagaattagcacaagaagaagaagaagaatcaggacaagaagagccaaggggcccagatggagactggctaacaatgctaagagaggcctctcatgaaattgtggctgaaaaagaggctgaagttaaattgccagaggacagtagctgtacagaagatttaagttcatgcactagtgtgcctgagatgaatgaagacgggaacaggaaagaaagcaactgtgccaaagacctcagaagtcagccacctactagaataccaacactggttgacaaagagacaaacacttatgaagccgctaatgacaatatggcagttcgccccaaagagcgcagcagcctgagctctagacagcatccgtttgtgaggagcagtgtgatagtgcgctcacagaccttttctccaggagagcggaaccagtacatctgcaggttaaatcggagtgacagtgacagttcaaccctggctaaaaaatcactgtttgtgagaaactccaccgaacgccgcagtttgagggtcaaaaggacggtttgccagtcagtccttagaagaacaacacaggaatgcccagtgcggacatctctagacttagaactggaccttcaggcatctctgacccggcagagccgcctcaatgatgagctgcaggcgctgagggacttgcggcagaagctggaggaactgaaagctcagggagagactgaccttccaccaggcgtgctggaggatgagaggttccagaggcttctgaagcaagctgagaagcaggctgaacagtccaaagaagagcagaagcaaggtctgaatgcagagaagttgatgaggcaagtctccaaggacgtgtgtcggctccgggagcagagccagaaggtgcctcggcaggtgcagtccttcagggagaagattgcctacttcaccagagcaaagataagcatcccatccctgccagctgatgatgtgtgattacatgacttaagaaattattttttcatctgttcactttcttagggagggtaaaagactgaagatttgtgtttttgttttggtgtttggttttttttggtaacgtaactgtcaactcttgaagaacttttatttcacatcagattttcaacacattaatttgtaaagtaccttgagtgtaatttttatatgcttaaaaaagaaaaaatcatataagaaagatgggataacctggtacacaaatgttgcccagtatgtgcgcattgccagtggacttcattttgtaaaaatggaatagaggcagtaccccaccatgtgtactgttgagccggctgttgagaaacaacttggttcagccggtggttttgcttctcctttgtgttcctgtgagtaggctgtgccgatggcagcagcgccacgtggtatctgtgcgctggcgaggagaggagcgctttccatttggaggcagtgtgagcacacgctggagtgcagcgttccaaagtccgcccgaaatggatgctgcgtccacggccatcacctgtgcgggaacacctggtttccttaagacaatttcctttttgtccttttatatttttctaaagaaaactaagatataaactaccaagtgctcttaagaataaaaataagaataagaatacaaaggagcactactcttggctacacgaaagatcttgggattcatgacactgagggcagggagaagaaagaacaccagccacgcagagatacaaataagctcatcaaatgagcagctggtttgtctcactcagcctgaatttgcattaagtgttcaaaagtgggtttctggcttgcactagtgttttgccctaaatctaaggatggtgcctagtggtggccctgtgttctgaggacagagagagctggaggggtggagggaaatgcatcggcactcatttggtgtaaccaagaagagggggaaagatgtcttgatagaatcaaagttgccaaaaacaaagaagagtttatcaagcagatttctaacatttagtggaaactacttcatagctctcatttttagggggttctatctataatttatggtaaatagttgggaggcaaagggaagaatgtgtgtgggaggattattaatttgaagtataagctaaattgtttattaaaaagcctattttggatgaacaagtttagagagataaactgactaatgtgtcctccagtttagaatttcaccttacccgacccaggcacttcttaaaaacacagatcctcagtgcagctctgccagcatcaaggcttttaaaatatgtagtatttaggccatttaaaccatacttattactcaataacccaagaaacaattttgggttagccatctaatatagcaaataaaatagattttttaaagaaatccaaaattgtcttaaaggaatggaccccttgaagaaaaaaaaaaaaagttttgttcctcagttagaatgctcactagctcactagcaagaatttttattttcttgaaagcaattatatatattttggaaagttcatgttattggaattgaagttcaaattaagcaacttctgagcctagaactttaattactttttcctaaatgtcccaacacttacatacaaatttctttgaagacataactggacatggcagacactgctttgaacaaaaaccagcctagtgaattgactgagtacagtcctttaaggctgcccagttcattctattagatgactaaggaaaactagaaaaagaatacagttcacccttgtcaaggtgaaatgtgaaagacagaagtttatttaatgtagaggtaaatgaaggtgagctgttttcagcatcttagtttgaccatgaaaatgtctatagaattatgtgtagttgttccgtacgattttattttcttcatttatttatttacagtcttatttatgttctgtttaatatatagtttgattctggccattttaaatatttgacacagaagagactatattggaatatttacagctttataagtctttcatcagattagctgttgactttttgtaatacaaaaagtttcagacaagtattaaagaataaaatctgtctcaggctggtagttagcagttgtgaccaagatgcttttggttgttgtatttcacaaaatttcctcatttctaacatgagagatgaacttattttaatataatcctttttctacactttaaaagtcagcaatagtgttatgtatttataggcagcttttaataatcttgtcatatttgtactaacccaaatgattcacagtgacaaaacattttaataacttgatcacaaaaccatatggacaaatatgaattttaatattataaatactatttttaaaaggtagaatttattcgcacagggtaaaaagaatgtaatatttagttctcaagtttgaattatcagtatattattacaattttgtatatcagaatcttaagtgttacaggtacaaaaagaatattgctagccaaatgaacaaagtttagctaaatctctgtagcatgcaaatcaaataaattaaaattttttgctattgctttatctatattgtcttaaatatcaaaagctcaggactgaacttaatatttaatcaggttaaattctgaacatgtttctgttttaatttgtcttgtttgtaaacgtatgcaaatacatcacatagattaactggtttctgcgctttccatgtgtttgtgggtggaaaaaaattcagtggtttttttttaaaaaaaaaagcaaaaacaaagctacatattgcctaatactctatttcagtgtcgtttattgttcagtttatttccctgattggcacaaacacaagagtttccttgaaccatgtaccaagcaaatacaaaatatttcatgaagaaatccccaggctggcagtttgtgatgaatagttcttgttggaactatatgtattgctgataaaaaaggacgaagtattttcattgagcaaataaaatgaagggctccagaaaaaaaaaaaaaaaaaaaaaaaaaaaaaaaaaaaaaaaaaaaaaaaaaaaaaaaaaaaaaaaaaaaaaaaaaaaaaaaaaaaaaaaaaaaaaaaaaaaaaaaaaaaaaaaaaaaaaaa

SEQ ID NO: 11896 - DNA, 2816 bp, Homo sapiens
tgcgcagcaatgccatcggttaaagcgcatgcgcaagatgagctattgcggaagtgaggggagggagaggccgagagaaatttcggtactgcgcatgaaccgagcgtgacgttgaggtttgaaataaccggcaaagagtaaaggctgaaactagcttcctgaaagcttcgtagggcccgagccctgtgagcccaggttctgcgcccactaggaggtgtcatgctgactgctttttttaaagccctagaatcttggcttcggcgtttggggtaagctccgttctcgttctcaagcgcgtttccgcgaactctcgcgggattgacgggccgtctcgagagccggcatctcctaggagctagtcctggtcctcggctaggcggcttggggtcgcggcgtaactggggagccagcctgacgccggcggaccccgcctgtgatcctggcaacgatggatgatgacttgatgttggcactgcggcttcaggaggagtggaacttgcaggaggcggagcgcgatcatgcccaggagtccctgtcgctagtggacgcgtcgtgggagttggtggaccccacaccggacttgcaggcactgtttgttcagtttaacgaccaattcttctggggccagctggaggccgtcgaggtgaagtggagcgtgcgaatgaccctgtgtgctgggatatgcagctatgaagggaagggtggaatgtgttccatccgtctcagcgaaccccttttgaagttgaggccaagaaaggatcttgtagagaccctcctgcatgaaatgatacatgcctatttatttgtcactaataacgacaaagaccgagaagggcatggtccagaattttgtaaacatatgcatcgcatcaacagcctgactggagccaatataacggtataccatacttttcacgatgaggtggatgagtatcggcgacactggtggcgctgcaatgggccgtgccagcacaggccaccgtattacggctatgtcaaacgagctactaacagggaaccctctgctcatgactattggtgggctgagcaccagaaaacctgtggaggcacttacataaaaatcaaggaaccagagaattactcaaaaaaaggcaaaggaaaggcaaaactaggaaaggaaccagtattggccgcagagaataaagataaacccaacagaggtgaggcccagctagtaatcccttttagtgggaaaggatatgttctaggagaaacaagcaatttaccttcacctgggaaactgatcacttcacatgccattaataaaacccaagatcttttaaatcaaaaccattcagcaaatgctgtaagacctaattctaaaatcaaggtgaaatttgaacagaatggttcaagtaaaaattctcatctggtctcccctgctgttagtaacagtcaccaaaatgttctaagcaactactttcctagagtatcatttgccaaccaaaaggctttcagaggtgtgaatggatctccaaggataagtgtaacagttggcaacatccctaaaaactcagtctcttctagttctcagagaagggtttcatcttctaagatatccctaagaaattcttcaaaagtaacggaatcagcatctgtgatgccatcccaggatgtgagtgggtctgaagatacattcccaaataaacgacctaggctagaagataagactgtttttgacaatttttttatcaagaaagagcaaataaaaagcagtggtaatgatccaaagtatagtacaaccacagctcagaattccagcagttcatccagtcagagcaaaatggttaattgcccagtttgtcagaatgaagttctggagtctcagattaatgagcacttggactggtgccttgaaggtgacagcatcaaagtcaaaagcgaagaaagtctttgaaaaaggtttcaaagtctcaagtaccacctgtattatctcactaatgtgctatgtcagccagtcaggaagttctggttaatactaagatttgtaggttataatctagttcacataaccaatagaaagtgtcctattttatatatacgcatataagattgtaattttaagatgttttgtgtctcagggtgctacattcactcttgccttaggtatactgtaacccaggttctgcctgtcgtgtataagttttagatacttttgttctttcttgctcttaaggattttaaaaacctgttaatctttttatttgtatactttcctaaaaatattcatatggggaatcctgtcaggtgtttggttatattgactatttattaatagtattagaactcattccctgaactgatgtaaatcttcatagtgtcagacatactgaccaaaaccacaatctagactacaaagtatattgttttagagtactcaaattgtattatttattaatttttttgtttgcaaaatcttaacaggaactgtattttctatattttaaagaattttatttgtcccacttttactaaacagtggcagcagattttaagttaaagaatatggaatatagtaaaataagtaaatttcttttggaatatttttagtaacaaatagccactataattctgtaggccaaattttatattgagtttagctgttttctcaaaatttagcagagtggttaaaattctgtgctgataagtaactgatacatataacataaacataacaaagttgcctagttgatgtaacagtggaaagttatctggaaatagtattttgaactttaagccaagtttaaaacattataataaaaggaataccatttgtgcaaaaaaaaaaaaaaaaa

SEQ ID NO: 11897 - DNA, 4874 bp, Homo sapiens
gcgaccccgcccctcccgctggggcccggggcgctagagcgctccgggaggctaggggagctgaattctgcgtcttcctttaggctgcggcgagacaatccccagagccccgcggcccggcctcggggcagccatggactcgcaggaattgaagactttgattaattactattgtcaagagagatatttccatcatgtattactggttgccagtgaaggaattaagaggtatggaagtgatccagtcttcaggttttatcatgcctatggcacattaatggaaggtaaaactcaagaagctcttcgagaatttgaggctattaaaaataaacaagatgtatcactttgttctctacttgcactgatatatgcccataaaatgagtcctaatccagatagagaagctattctggaatcagatgccagagtgaaggaacaacgtaaaggagctggagagaaagccttataccatgcaggcttatttttatggcacattggtcgccatgataaagcaagggaatatattgacagaatgatcaaaatatcagatggtagtaaacagggacacgttttgaaagcatggcttgatattacaagaggaaaagagccttacactaaaaaagcactgaagtattttgaagagggactccaagatgggaatgatacttttgctctgctgggtaaggcacaatgccttgagatgcgccagaattattcaggtgccctggagactatgaaccagataatcgtgaattttccgagcttccttcctgcttttgttaagaaaatgaaattacaactagccttgcaggattgggaccagacagttgagacagcacaaaggttgctgctccaagatagccaaaatgtggaagcactgagaatgcaggcactctactatgtgtgtagagagggggatatagagaaggcttccaccaagctggaaaacttgggaaatgcattggatgccatggaaccacagaatgctcaacttttctataacattacactcgccttcagcagaacttgtggacgtagtcaacttattcttcaaaaaattcaaacgttacttgagagagcttttagtttaaaccctcagcaatcagaatttgctacagaacttggataccaaatgattttacaaggaagagttaaagaggcactgaagtggtataagaccgccatgacacttgatgagactagtgtgtctgccctagttggatttatccaatgtcagttgatagaagggcaattacaggatgcagatcagcagctagaatttttaaatgaaatccagcaatccattggaaaatctgcggaattaatctatttacatgcagttcttgccatgaagaaaaataaacgacaagaagaagttattaatttgttaaatgatgtcctggacactcacttttcacaattagaaggtttgcctcttggcatacagtattttgaaaagctaaatcctgatttcttgttagaaattgttatggagtatctgagcttctgtccaatgcagcctgcaagtcctgggcaacctctttgtccacttctcaggcgttgcatctcagtcctggagactgtagtaagaactgttccaggtcttctgcaaacagtcttcctaatagcaaaagtgaaatatttgtcaggtgatattgaagcagctttcaataaccttcagcactgcttagaacacaatccctcttatgctgatgctcatctgctgctagctcaggtttacttgtctcaagaaaaagtcaaattgtgttctcagtctcttgaactttgtctgagctatgattttaaggtgagagactatcctttataccatttgataaaagctcagtcacaaaagaaaatgggagaaatagcagacgcaattaaaacactgcatatggcaatgagtttaccaggaatgaaaagaattggagcttccacaaaatcaaaagacagaaaaactgaagttgatacaagccatcgtttatcgatctttcttgaattgatagacgttcaccgcttaaatggagagcagcatgaggcaaccaaagttttacaagatgccatccatgaattttctggaacatctgaagaagtgcgggttaccattgctaatgcagaccttgctctagcccaaggagatattgaacgggctttaagcatccttcagaatgttacagccgaacagccttattttatagaggccagagaaaaaatggcagatatttatctgaagcacagaaaagataaaatgttatatatcacttgttttagagaaattgctgaaagaatggctaaccctcggtcttttcttctccttggtgatgcatacatgaatattctagagcctgaagaagccatagtagcatatgagcaagcattaaatcagaacccgaaagatggaacattggcaagcaaaatgggcaaagcacttatcaaaactcataactactcaatggcaatcacttactatgaagctgctctgaaaactggacaaaagaattatctttgctatgacctggctgagctcttattaaaattgaaatggtatgacaaagcagaaaaagttcttcagcatgctctggctcatgaacctgtaaatgaactgtcagctctcatggaggatggacgttgtcaagttcttctagcaaaagtttatagtaaaatggaaaaacttggtgatgcgatcactgcattacaacaggctcgagaattacaagctcgggtactaaaacgtgttcagatggaacagccagatgcagttcctgcacagaaacatttagcagctgaaatttgtgcagagattgcaaaacattctgttgctcagcgagactatgaaaaagcaattaagttttatagagaggctctggttcactgcgaaacagataataagattatgttggaactggcacgattatacctggcacaagatgaccctgattcctgcctgcggcagtgtgctctactgcttcagagtgaccaggataacgaagctgctaccatgatgatggctgatctcatgttcagaaaacaagactatgaacaagcagtgtttcatttacagcagcttttagaacgtaagccagataattatatgacattatctcgtttgattgatctcctaagaagatgtggaaaactcgaggatgtcccaagatttttctcaatggctgagaaacgtaactccagagcaaaattggaaccaggatttcagtattgtaaaggactgtatctttggtacactggagaaccaaatgatgcccttcgacattttaataaagctcggaaagatcgtgactggggccaaaatgccctttataatatgatagagatctgtttgaatccagataatgaaactgttggaggtgaagtatttgaaaacctggatggagacctgggtaattcaactgagaagcaagaatctgtgcaactggcagtaagaacagcagaaaaacttcttaaggaactaaaacctcagactgttcagggtcacgtacagcttcgcataatggaaaactattgcttaatggctaccaaacagaaatctaatgttgaacaagcattaaataccttcactgaaatagcagcatctgagaaggagcatatcccagcgctcttgggaatggcaacggcttatatgatcttgaaacagactccacgagccagaaaccagctgaagcgtattgcgaaaatgaattggaatgctattgatgctgaagagtttgagaagagttggctgctacttgctgatatttacattcaatcagcaaaatatgacatggcagaagacctgttaaaacggtgcctgcgtcataatagatcttgctgcaaagcttatgaatatatgggatacattatggaaaaagagcaagcatatacagatgctgccttgaactatgagatggcatggaaatatagcaatcggacaaatccggcagtaggatacaaactggcatttaattacttaaaagcaaaaagatatgtggattcaattgacatatgtcaccaggttcttgaagcacatccaacttatccaaaaatcagaaaggatatacttgataaggcccgtgcgtctttaagaccttgaaaataattttaacttaggtgttggtttaacaggaaatgaaagaaatctaactttcagttcttcctgttcaaaacaggtttgagctcagtgctttgttattagaagtatacccttttttctccagcagaggttgctgctgtacatcaagagaagtactatgtgaaattggtgtttcctaatggagttgaatgagagctggtctatttgactctgttttgattgggtacagatttggtgactctgtggtaaagactataattatttctataaagaatattttgttaaaatctaggtaattaaataccctgtatcttttctaaggaatattatttcaggaaatatatttaaaatgcattgttctcttttaaagtgtttttgttatattcttttatttatttatttatttttaaagacagagcctgggcgacagagcgagaccccatctcaaaaaacaaacaaacaaacaaaaaacatggaagccttggcaactggaataatgttgccaatgtgctgagaaaataactgtcttcctagaattttatatacagaaaaacctttccagaccttgatagaacacaaaagctgaaagacagtattcctagcaatacacattaagaaaacttcaagggatgtatttgttgcagaagaaaaattattccaggtggaaggtttgagatgtatgaagaaatagaaaagtcactggagactatgcacataaataggaatagttattgtctagttgcctacataaaagcaataaaaatgtctaatttcgaaaaaaaaaaaaaaa

SEQ ID NO: 11898 - DNA, 4022 bp, Homo sapiens
gtacgtgcgcgtctccctgccgccgccgccgcccgccgcgggccgccccggggccgccgtcgccgacgacgcgcgggaggaggaggaggaggccgccccgccgccgccgccgccgccgccgccccggctcgccgccgcccgcccgccgggctcgcagccccggcccccggccgcaggcgaggcccaggccgcggccgacatgaaccaccagcagcagcagcagcagcagaaagcgggcgagcagcagttgagcgagcccgaggacatggagatggaagcgggagatacagatgacccaccaagaattactcagaaccctgtgatcaatgggaatgtggccctgagtgatggacacaacaccgcggaggaggacatggaggatgacaccagttggcgctccgaggcaacctttcagttcactgtggagcgcttcagcagactgagtgagtcggtccttagccctccgtgttttgtgcgaaatctgccatggaagattatggtgatgccacgcttttatccagacagaccacaccaaaaaagcgtaggattctttctccagtgcaatgctgaatctgattccacgtcatggtcttgccatgcacaagcagtgctgaagataataaattacagagatgatgaaaagtcgttcagtcgtcgtattagtcatttgttcttccataaagaaaatgattggggattttccaattttatggcctggagtgaagtgaccgatcctgagaaaggatttatagatgatgacaaagttacctttgaagtctttgtacaggcggatgctccccatggagttgcgtgggattcaaagaagcacacaggctacgtcggcttaaagaatcagggagcgacttgttacatgaacagcctgctacagacgttatttttcacgaatcagctacgaaaggctgtgtacatgatgccaaccgagggggatgattcgtctaaaagcgtccctttagcattacaaagagtgttctatgaattacagcatagtgataaacctgtaggaacaaaaaagttaacaaagtcatttgggtgggaaactttagatagcttcatgcaacatgatgttcaggagctttgtcgagtgttgctcgataatgtggaaaataagatgaaaggcacctgtgtagagggcaccatacccaaattattccgcggcaaaatggtgtcctatatccagtgtaaagaagtagactatcggtctgatagaagagaagattattatgatatccagctaagtatcaaaggaaagaaaaatatatttgaatcatttgtggattatgtggcagtagaacagctcgatggggacaataaatacgacgctggggaacatggcttacaggaagcagagaaaggtgtgaaattcctaacattgccaccagtgttacatctacaactgatgagatttatgtatgaccctcagacggaccaaaatatcaagatcaatgataggtttgaattcccagagcagttaccacttgatgaatttttgcaaaaaacagatcctaaggaccctgcaaattatattcttcatgcagtcctggttcatagtggagataatcatggtggacattatgtggtttatctaaaccccaaaggggatggcaaatggtgtaaatttgatgacgacgtggtgtcaaggtgtactaaagaggaagcaattgagcacaattatgggggtcacgatgacgacctgtctgttcgacactgcactaatgcttacatgttagtctacatcagggaatcaaaactgagtgaagttttacaggcggtcaccgaccatgatattcctcagcagttggtggagcgattacaagaagagaaaaggatcgaggctcagaagcggaaggagcggcaggaagcccatctctatatgcaagtgcagatagtcgcagaggaccagttttgtggccaccaagggaatgacatgtacgatgaagaaaaagtgaaatacactgtgttcaaagtattgaagaactcctcgcttgctgagtttgttcagagcctctctcagaccatgggatttccacaagatcaaattcgattgtggcccatgcaagcaaggagtaatggaacaaaacgaccagcaatgttagataatgaagccgacggcaataaaacaatgattgagctcagtgataatgaaaacccttggacaatattcctggaaacagttgatcccgagctggctgctagtggagcgaccttacccaagtttgataaagatcatgatgtaatgttatttttgaagatgtatgatcccaaaacgcggagcttgaattactgtgggcatatctacacaccaatatcctgtaaaatacgtgacttgctcccagttatgtgtgacagagcaggatttattcaagatactagccttatcctctatgaggaagttaaaccgaatttaacagagagaattcaggactatgacgtgtctcttgataaagcccttgatgaactaatggatggtgacatcatagtatttcagaaggatgaccctgaaaatgataacagtgaattacccaccgcaaaggagtatttccgagatctctaccaccgcgttgatgtcattttctgtgataaaacaatccctaatgatcctggatttgtggttacgttatcaaatagaatgaattattttcaggttgcaaagacagttgcacagaggctcaacacagatccaatgttgctgcagtttttcaagtctcaaggttatagggatggcccaggtaatcctcttagacataattatgaaggtactttaagagatcttctacagttcttcaagcctagacaacctaagaaactttactatcagcagcttaagatgaaaatcacagactttgagaacaggcgaagttttaaatgtatatggttaaacagccaatttagggaagaggaaataacactatatccagacaagcatgggtgtgtccgggacctgttagaagaatgtaaaaaggccgtggagcttggggagaaagcatcagggaaacttaggctgctagaaattgtaagctacaaaatcattggtgttcatcaagaagatgaactattagaatgtttatctcctgcaacgagccggacgtttcgaatagaggaaatccctttggaccaggtggacatagacaaagagaatgagatgcttgtcacagtggcgcatttccacaaagaggtcttcggaacgttcggaatcccgtttttgctgaggatacaccagggcgagcattttcgagaagtgatgaagcgaatccagagcctgctggacatccaggagaaggagtttgagaagtttaaatttgcaattgtaatgacgggccgacaccagtacataaatgaagacgagtatgaagtaaatttgaaagactttgagccacagcccggtaatatgtctcatcctcggccttggctagggctcgaccacttcaacaaagccccaaagaggagtcgctacacttaccttgaaaaggccattaaaatccataactgatttccaagctggtgtgttcaaggcgaggacggtgtgtgggtggccccttaacagcctagaactttggtgcacgtgccctctagccgaagtcttcagcaagaggattcgctgctggtgttaattttattttattgaggctgttcagtttggcttctctgtatctattgactgccctttttgagcaaaatgaagatgtttttataaagcttggatgccaatgagagttattttatggtaaccacagtgcaaggcaactgtcagcgcaatgggggagaagaggttagtggatcgggggtccctggctcaaggtctctgggctgtccctagtgggcacgagtggctcggctgccttcctggggtcccgtgcaccagccctgcagctagcaagtcttgtgtttaggctcgtctgacctatttccttcagttatactttcaatgaccttttgtgcatctgttaaggcaaaacagagaaactcacaacctaataaatagcgctcttcccttcaaaaaaaaa

SEQ ID NO: 11899 - DNA, 1584 bp, Homo sapiens
acagagatggcactgatgcaggaactgtatagcacaccagcctccaggctggactccttcgtggctcagtggctgcagccccaccgggagtggaaggaagaggtgctagacgctgtgcggaccgtggaggagtttctgaggcaggagcatttccaggggaagcgtgggctggaccaggatgtgcgggtgctgaaggtagtcaaggtgggctccttcgggaatggcacggttctcaggagcaccagagaggtggagctggtggcgtttctgagctgtttccacagcttccaggaggcagccaagcatcacaaagatgttctgaggctgatatggaaaaccatgtggcaaagccaggacctgctggacctcgggctcgaggacctgaggatggagcagagagtccccgatgctctcgtcttcaccatccagaccagggggactgcggagcccatcacggtcaccattgtgcctgcctacagagccctggggccttctcttcccaactcccagccaccccctgaggtctatgtgagcctgatcaaggcctgcggtggtcctggaaatttctgcccatccttcagcgagctgcagagaaatttcgtgaaacatcggccaactaagctgaagagcctcctgcgcctggtgaaacactggtaccagcaggcccatcatcctggatccggccgaccccaccctcaacgtggcagaagggtacagatgggacatcgttgctcagagggcctcccagtgcctgaaacaggactgttgctatgacaacagggagaaccccatctccagctggaacgtgaagagggcacgagacatccacttgacagtggagcagaggggttacccagatttcaacctcatcgtgaacccttatgagcccataaggaaggttaaagagaaaatccggaggaccaggggctactctggcctgcagcgtctgtccttccaggttcctggcagtgagaggcagcttctcagcagcaggtgctccttagccaaatatgggatcttctcccacactcacatctatctgctggagaccatcccctccgagatccaggtcttcgtgaagaatcctgatggtgggagctacgcctatgccatcaaccccaacagcttcatcctgggtctgaagcagcagattgaagaccagcaggggcttcctaaaaagcagcagcagctggaattccaaggccaagtcctgcaggactggttgggtctggggatctatggcatccaagacagtgacactctcatcctctcgaagaagaaaggagaggctctgtttccagccagttagttttctctgggagacttctctgtacatttctgccatgtactccagaactcatcctgtcaatcactctgtcccattgtctactgggaaggtcccaggtcttcaccagttttacaatgagttatcccaggccagacgtggtagctcacacctgtaatcccagaactttgggaggccgaggtgggaggagcgcttgagccgaggagttcaagaccagcctgggtatcacagggagaccccgtctctacaaaataaaaaaataattcactgggaaaaaa

SEQ ID NO: 11900 - DNA, 1826 bp, Homo sapiens
acagagatggcactgatgcaggaactgtatagcacaccagcctccaggctggactccttcgtggctcagtggctgcagccccaccgggagtggaaggaagaggtgctagacgctgtgcggaccgtggaggagtttctgaggcaggagcatttccaggggaagcgtgggctggaccaggatgtgcgggtgctgaaggtagtcaaggtgggctccttcgggaatggcacggttctcaggagcaccagagaggtggagctggtggcgtttctgagctgtttccacagcttccaggaggcagccaagcatcacaaagatgttctgaggctgatatggaaaaccatgtggcaaagccaggacctgctggacctcgggctcgaggacctgaggatggagcagagagtccccgatgctctcgtcttcaccatccagaccagggggactgcggagcccatcacggtcaccattgtgcctgcctacagagccctggggccttctcttcccaactcccagccaccccctgaggtctatgtgagcctgatcaaggcctgcggtggtcctggaaatttctgcccatccttcagcgagctgcagagaaatttcgtgaaacatcggccaactaagctgaagagcctcctgcgcctggtgaaacactggtaccagcagtatgtgaaagccaggtcccccagagccaatctgccccctctctatgctcttgaacttctaaccatctatgcctgggaaatgggtactgaagaagacgagaatttcatgttggacgaaggcttcaccactgtgatggacctgctcctggagtatgaagtcatctgtatctactggaccaagtactacacactccacaatgcaatcattgaggattgtgtcagaaaacagctcaaaaaagagaggcccatcatcctggatccggccgaccccaccctcaacgtggcagaagggtacagatgggacatcgttgctcagagggcctcccagtgcctgaaacaggactgttgctatgacaacagggagaaccccatctccagctggaacgtgaagagggcacgagacatccacttgacagtggagcagaggggttacccagatttcaacctcatcgtgaacccttatgagcccataaggaaggttaaagagaaaatccggaggaccaggggctactctggcctgcagcgtctgtccttccaggttcctggcagtgagaggcagcttctcagcagcaggtgctccttagccaaatatgggatcttctcccacactcacatctatctgctggagaccatcccctccgagatccaggtcttcgtgaagaatcctgatggtgggagctacgcctatgccatcaaccccaacagcttcatcctgggtctgaagcagcagattgaagaccagcaggggcttcctaaaaagcagcagcagctggaattccaaggccaagtcctgcaggactggttgggtctggggatctatggcatccaagacagtgacactctcatcctctcgaagaagaaaggagaggctctgtttccagccagttagttttctctgggagacttctctgtacatttctgccatgtactccagaactcatcctgtcaatcactctgtcccattgtctactgggaaggtcccaggtcttcaccagttttacaatgagttatcccaggccagacgtggtagctcacacctgtaatcccagaactttgggaggccgaggtgggaggagcgcttgagccgaggagttcaagaccagcctgggtatcacagggagaccccgtctctacaaaataaaaaaataattcactgggaaaaaa

SEQ ID NO: 11901 - DNA, 4700 bp, Homo sapiens
ggtgtctcggacaacgagtgtacgcagttaccacacagttaccaagcagttacctcagagccgcggcgcagacgtaggcctcaggtctcgggcctcaggtctcgggcctcagagccagaccccgccatctcacgatgtcagagaggacccaggaacaggattttgttattataactgtcgacgacagtgatgataacaatgattgcagtattgagatggtggaagtttctgaaacagcagataattccactaatgacatagcagatgattccacttatgtcacagcagataatcccactgatgacacagccacacaaccaaattttccaggcggcaatgatggccatcaccgtccactccaaatgtcatatgggtctggctctgtcacccaggctggagtgcagtggcatgatcacagctcactgcagcctcaacctcttggactcaagcaattcttccacctcagccttcccagtagctgggatgacaggcgcacgccaccatgcccagtagcccatggtgaccaaatagtttcacagataaaccacccagtacatttaagaagatacagttacaactcagaggaagtggattttccaaaaagaggaagattctatactccagaggtacagtctagcatatcaccaccagcggaaaggcaggaaacccatgcctgggccagccctgctgtaacatctcttgagtcagcagcatgtcatgaactgcaggaagcagacctcagtgagagtttatcatatcccagaattgtctcctcaagttcattacagcagtatgtcgcacaaggtggctcatttccttgtttcggtatgccatggaactttatcagtggaggtgctgaaagtaccaatgctgtcatctcatttgccaatgctactacagcagtacctatggcagttctgtcacgaagagaatccagtctggcaaataaccctggtgtggtgaattactctgctctaccagaaaatgaaaatgtgggcccaggtagagccttgtcatctttctgcttccatcccaatttggaaatgccagaaagaccagcaaacagcagtaaaaacagcactgagacagcgaattatccaactttaatgggaaattacaatggccaaaatactgcctctttatctgtcttcatccctccctattttgctgagaaaattatacttactgaaatgccaggaacaacagaaaccaacgtggaaaataactctcagacagtgtattacccagctttatcgggaaatacgagtgccccatatccagcctcttcatatcttcccatcacttctaattttgaatctggcccacaaatgagttatgggacaatgagttactcaactgaaatgaaaaataactgtgaccaagatgatgcttcagcatctgcctgcctcactcccgattttgcactgttacctctgaatattttggtaaaagtagacaccaacacggaaaacagcgtcaacacaatgaatcgctcaactttattggacagtgacagtggccaggattcttcctcatcatctgtctgtatccctcccaagtatggctatcttggtgatccaaaaagaaatgtcagagtacttaaaatccatttgctggccgtacaaaatatggccaaacctaagcaagcagcctgctacttggttcgtattttgttctccaaggaaatcctgattagcagctcagtggatatccatttgaaagacagccaatccctcgacccgaacaaaatggctgcattgagagaatatctggcaacaacttttcccacctgtgatttgcatgaacatggaaaagactggcaggactgtatttctggtatcaattctatgatctactgtttatgttctgaaggcaagagtactccaaaaactgttcgcaaaaataaaaaacgtaccaaccgtgttgcatcggcatctgcagatagaaatgaccaaaggggcagagatggtggtgaaggctgttcttggatgtttcagccaatgaataactccaaaatgagagtaaagaggaacttgcagccaaacagtaatgctatccctgaaggaatgcgagaaccttccactgataatccagaggaacctggtgaagcatggagctattttggaagaccatggagaaatatacggatgccatgttcagtactgactttggcaaaaactaagtcttgcgcaagcctgtcggctagataccttattcagaaactcttcacaaaagatgtcctggtccaaagtaacgtctatggcaatctgaagcatggcctgtgtgcccttgaccccaataagattagtgctctccgagagttcctccaagaaaactacccaatttgtgatctctcggaaaatggaagagactggaagtcgtgtgtgacctccatcaacagcggtatccgtagccttagacatgacgtcagaagggctgaagccaggtctcagtcgcttccagcagtgacccctccagagctggagcaggagtcaaagccaggagatcccgacgccactgacccaagcacctgaacggcagctgccaaacttttttttttttttaactgttaagactattttgtaagtttctcaagttctaattccaaaatcagcctgctgtactggcagagtagtttgcattgacacctgtagtaatcgccaaacctctttttctgctcataaaggaggtagaatcacattaggaagatacgtaatgtttcatctgtggatttgatgacaacctctgattgagggaatggtggtaaactcctcatgggcttgtgacccatggctttgacttagataattgacattaatatactttgtttttttgataaggtagagaaagaaattcaatagaaagtaaggagccactcagtcaaataatataattcgtataaaacttgacaagtctttttatttttgtgacttgtgagatagtttaagatatttttatgtgaccaatttgtagaatgaatacatattttcaaagttatcttttcaaaattcaacttttagagtattttagcaaaatatatgtatagtttataatatagaagtatagctttataaagatattaaggatttattttttaaaataattctctgaatagtttgctgtagtagttgccttcagcttaataaaaccatagtacttctacatacatctttataagttaggctatgcctacaaaggtcttaaaaagtagataatttaccgggtgtagtggctcacacctgtaatcccagcactttgggaggccgagacgggtggatcacctgaggtcaggggttcgagaccagcctggccaacatgacgaaaccccatctctactaaaaatacaaaaaaagtagccaggcatggtggcaagcacctgtagtcccagttactcgggtggctgaggcaggagaatcacttgaacctgggaggtggagactgcagtgagccgagattgtgccactgcactcgagcctgggtgacagagtgagactccgtctcgggaaaagaaaaaaaagaagtagataattaaaaaaatcttgcataaaaaaaaatcttccataaagggcaaaaaggctttaacttccattattcagatttaatccaactaagatagtctttggcttcattcactgttcagtttcacaagttttttacaactactagtaacagagctaatacagaatagtaatccacattataaacatagatcaaaataccacatcataccccataaatacatgcagttattatttgtcaattaaaaataaaatttttttaaaagaaaagtacagttcgaccctaggcaagaagaaatttcaaattgtatatgcatattttgaattttggtttatattttgtggtatctgaaatattccctggactagaagcaaaaccacagaaacaaaactttacatttagaaaaaaatttcaagacttctattgctaactttattacattagtggtttttagaagttatttagagcagtcttgtctgatagaactttccaccatgatggaaatgtaaataaatataccacattaaaaatataaatttgcaatgtccaataggctcgtatggctattgagcatttaagatgtaattaattagacagaggaagtaaatttaacattttctctcattttagctaattagaatttaaagtgaaatagccacaagtggatagtggctactgtgttggatggcacagttcaaaatgcctcttatttataaaaaaaagtgtttaaaagtggttcccatggcttgaagaggaataatatacacataacttctttaaaatcacattttgtttgagatggagatcttgctatattgcccaggcttatctggaactcctgggctcaagagggaggatcacatttgactggacaaaatacattttataaaggtgttttgtattttatgttaaagtggaattgtgtcttcaaaattgtgtcttcaaaatttcacaagttaatactattactgtattagtccaatgttaaacattttaaatgcctgctcataagactcatttttgataaataaatgtatctttaatgttttgtttcccaaatagatacaataaataaacatttaaaatgccttaaaaaaaaaaaaaaaaaaaaaaaaaaaaaaaaaaaaaaaaaaaaaaaaaaaaaaaaaaaaaaaaaaaaaaaaaaaaaaaaaaaaaaaaaa

SEQ ID NO: 11902 - DNA, 1398 bp, Homo sapiens
agcggaggggcgccctaacgaacccgggatacggtctgttcctagtccgctccggaaatgcaactgcgtacgggctggccgcgtaatcgtgacgacagcgcgccagcgccggctagccggacgccctaggcttccgcgagatcttcggtgggggtacgggtgttttacgccaggacgctgatgcgtttgggttctcgtctgcagaccctctggacctggtcacgattccataatgtaccacaacagtagtcagaagcggcactggaccttctccagcgaggagcagctggcaagactgcgggctgacgccaaccgcaaattcagatgcaaagccgtggccaacgggaaggttcttccgaatgatccagtctttcttgagcctcatgaagaaatgacactctgcaaatactatgagaaaaggttattggaattctgttcggtgtttaagccagcaatgccaagatctgttgtgggtacggcttgtatgtatttcaaacgtttttatcttaataactcagtaatggaatatcaccccaggataataatgctcacttgtgcatttttggcctgcaaagtagatgaattcaatgtatctagtcctcagtttgttggaaacctccgggagagtcctcttggacaggagaaggcacttgaacagatactggaatatgaactacttcttatacagcaacttaatttccaccttattgtccacaatccttacagaccatttgagggcttcctcatcgacttaaagacccgctatcccatattggagaatccagagattttgaggaaaacagctgatgactttcttaatagaattgcattgacggatgcttaccttttatacacaccttcccaaattgccctgactgccattttatctagtgcctccagggctggaattactatggaaagttatttatcagagagtctgatgctgaaagagaacagaacttgcctgtcacagttactagatataatgaaaagcatgagaaacttagtaaagaagtatgaaccacccagatctgaagaagttgctgttctgaaacagaagttggagcgatgtcattctgctgagcttgcacttaacgtaatcacgaagaagaggaaaggctatgaagatgatgattacgtctcaaagaaatccaaacatgaggaggaagaatggactgatgacgacctggtagaatctctctaaccatttgaagttgatttctcaatgctaactaatcaagagaagtaggaagcatatcaaacgtttaactttatttaaaaagtataatgtgaaaacataaaatatattaaaacttttctattgttttctttccctttcacagtaactttatgtaaaataaaccatcttcaaaagagctagaataaaaaaaaaaaaaa

SEQ ID NO: 11903 - DNA, 3830 bp, Homo sapiens
ggtgtttataagaatggaagtgttgtttccttgcccgattccttcatgctatatctcatgaacctctgtaatcttgggggagagactatatttaatgatgacaaacctgtcaccagtgtagcaacaacagtgtgaggacaaaagcaaataaaaattaagaagcgttcaaatttatattcaacaaggaagtcatttcaatcaacaacttctgctgcattatttttccaagatgaaccgatacacaaccatgagacagttgggggacggcacgtatgggagtgtgcttatgggcaagagtaatgaatccggggagctggtggccatcaaaaggatgaagagaaagttctattcttgggatgaatgcatgaacttgagagaagttaagtctctgaagaaacttaatcatgccaatgttattaaattgaaagaagttatcagagaaaatgaccatctttattttatatttgaatatatgaaagaaaacctctatcaattaatgaaagacagaaacaagttgttccctgaatcagtcatcagaaatattatgtatcaaatattgcaagggctggcttttatccataaacatggcttttttcatagggacatgaaaccagaaaacttgctttgtatgggtccagagcttgtgaaaattgctgattttggacttgcaagagaattaaggtcacagccaccatacactgattatgtatctaccagatggtatcgtgcccctgaagttttactgagatcttcagtttatagttctcccattgatgtgtgggctgttggaagtatcatggctgaactctatatgttaaggccacttttcccagggacaagtgaggtcgatgaaatctttaaaatttgccaagttttagggactcccaaaaaaagtgactggccagaaggataccagctggcatcctctatgaacttccgttttccccagtgtgttcctataaacttaaaaactcttattcccaatgccagtaatgaagctattcagctcatgaccgaaatgttgaattgggatccaaagaaacgaccgacagcaagccaggcattgaaacacccatattttcaagttggtcaggtattaggcccttcgtcaaatcatctggaatcaaaacagtctttaaataagcagctgcaaccattagaatcaaagccatctttagttgaggtagagcctaagcctctgccggatataatcgatcaggttgttggacaaccccagccaaaaactagccagcagccactgcagcccattcagccgccacagaacctgagcgtccagcaacctccaaagcaacagagtcaggagaaaccgccacaaacgctattcccgagcatcgtcaaaaacatgccaactaagccaaatggcacactgagtcataaaagtggtaggaggcgttggggtcagactatcttcaagtctggagatagctgggaagagttggaggactatgatttcggagcctcccattccaagaagccaagcatgggtgtttttaaagaaaaaaggaaaaaagattctccatttcggcttccagagccagtaccctcaggctccaaccactcgacaggggaaaacaagagcttacctgctgttacttccctaaaatctgattccgaattgtcaactgctccaacctctaaacagtactacttgaaacaatcaagatatcttccaggtgtgaatcccaagaaggtgtccttgatagccagtggaaaggaaataaacccccacacttggagcaaccagttattccccaagtcactgggacccgttggggcagaacttgctttcaaaaggagcaatgcaggaaatcttggaagttatgctacttacaatcagtcaggatatattccttcctttctcaaaaaagaagtgcagtcagctggccagaggatccacttagcacctctcaatgcaacggcttcagaatatacctggaacacaaaaactggtcgggggcagttttcaggacgtacttataatcctacagcaaaaaacctaaatattgtgaaccgtgcacagcccattccctcagtgcatgggaggacagactgggtggccaagtatggaggccaccggtaggagtctatggtgtgaaaccctacagcattgctccgtagagtacgtgcaagttccttgaccctgggaaatgtctacaaatgtctatttctactgagttctggaagaaatatgcaaaagtgggtacttggaagggcaaaaatcatcccctattttacttatttccaagaaatgcattttcttagcatcattgcccacagtgttgatatatgggtaggatgttacaaagtattgaataaactatttgccaaagtatgaagtatttgatctacaatttaataaatagtaaatccaataagaacccttaaaaaaaaacaacttccagaaaatgtttagagtgttttagttttcatttgttgtatgtgcccaaatggtttagtagttcttcactttgctgtggttggcttaagaggtttgtcttttgtttttgtacagcagttgggccaacctttgctggctgtcagctgtggttcttatttgactaaggctctgcgctgccattttgtcaatgacagaaagattgcaattatttgtttttctactttgaagctatgggagcgatggtaatttcaatcttgagcaggatatctttttttttttttttgaggcgatgtttcactcttgtgtccaggctggagtgcagtggcactatcttggcttactgcaacctccacctcctgggttcaagtgattctcctgcctcagcctcccgagtagctgggattagaggcgtgtgccaccatgcctggctaatttttgtagtattagtagagacagggtttcaccatgttggtcaggctcaggctggtctcaaactcctgacctcaggtgatccacctgcctcggcctcccaaagtgcagggcttacaggtgtgagccacagtgcccagctttttttttttttttttagaaataaatttatctttaacatagagaatatcaaagttatgccacttgattttagtggacggcttgtgttttgatcttgaccagtacagttcccatgaattcaaggtgacaatcaagcccaatggcttgatgacttcaatagtaaccaagtcaaggttctcttggctggacatcattaagaaagttctggaaactgtgtttgtttgatgctggttcattggacttttcaaattgttttgtttctgtgtccctaccagacacaaagatgaagtgtgccagctggttcccccaagccagctcatgctgctgaccactgactcagctctgaccttcacatttgctctgaagcaagtgcgttcagctgctggggcagtgatatcacatagtacatatattatttccttagtttatttccaaactggtattttaaatagacacttcgaactttgggctactctgtttaaatctgccactttctggactggaccttagtactgtaaattctttttaaagaataataatgttaccaactgctgagatttttatgtattttgtgactttgtaacaactgctattgtaataagtgtcatcttgtgggcattatacaaaggcatattataaaataataatgatatttttgtatagaagagtcaactgttcagatgtaagatgttgaaaaatgttaaaatctaaagagtaatttatcctagtggtaatggttatatgtatttgtacagtttaaattaatgtctcaaagctgtgcagtcttttgttactgggacacttttaaactctgaataggcattaaaaaaaatatggctaa

SEQ ID NO: 11904 - DNA, 2092 bp, Homo sapiens
ggccttcgtcgaagatgtctccgacgccgccgctcttcagtttgcccgaagcgcggacgcggtttacgaagtctaccagagaggccttgaacaacaaaaacatcaagccattgttaagtaccttcagccaggtacctggcagtgaaaatgaaaaaaaatgtacccttgaccaagctttcagaggtattctagaagaagaaattataaatcattcatcatgtgaaaacgttttagctattatttctcttgctattgggggagtaactgaaggtatttgtaccgcatctacaccttttgtattgttgggagatgttttggattgtcttcctttggatcagtgtgacacaatattcacttttgtcgaaaaaaatgttgctacttggaaatcaaataccttctatgctgctgggaaaaattacttactacgtatgtgcaatgatctcctaagaagattgtctaaatcccagaatacagtcttctgtggacggattcagctctttttggccaggcttttccctctgtctgagaaatcaggtcttaacttgcagagtcagtttaatctggaaaatgtcactgttttcaatacaaatgagcaggaaagcaccctgggtcagaagcacactgaagatagagaagaaggaatggatgtagaagaaggcgaaatgggagatgaggaagctccaacaacgtgctctattccaattgattacaacctgtatcgaaaattctggtcacttcaggattacttcaggaaccctgtgcaatgctatgagaagatttcatggaaaacttttctcaagtattctgaagaagttttagctgtttttaagagttataaattagatgatactcaggcctcaagaaaaaagatggaagaattgaaaacaggaggagaacatgtatattttgcaaaatttttaacaagtgaaaagctgatggatttacaactgagtgacagtaactttcgtcgacacatcctgttgcagtatctcattttattccaatatctcaaggggcaggtcaaattcaaaagttcaaactatgttttaactgatgagcaatcactttggattgaagatactacaaaatcagtttatcaactactatctgaaaacccccccgatggagaaagattttcaaagatggtagagcatatattaaacactgaagaaaactggaactcgtggaaaaatgaaggttgcccaagttttgtgaaagaaagaacatcagataccaaacctacgagaataattcggaagagaacagcacccgaggacttcctagggaaaggacccaccaaaaaaattctgacgggaaatgaggagttaacaaggctttggaatctttgccctgataatatggaagcctgtaaatcagagacaagggaacacatgcccactttggaggaattctttgaagaagccattgaacaggcagaccctgaaaatatggcggaaaatgaatataaggctatgaacaattcaaattatggttggagagccctgaaactattagcacggagaagccctcacttcttccagccaaccaaccagcagtttaaaagtttacaagaatatcttgaaaatatggtaataaagctagccaaggaattaccgcctccttctgaagaaataaaaacaggtgaggatgaagatgaggaagataatgatgctctactgaaggaaaatgaaagtcctgatgttcggcgagacaaacctgtaacaggagaacaaatagaggtatttgccaacaagctgggtgaacaatggaagattctggctccctacttggaaatgaaagactcagaaattaggcagattgagtgtgacagtgaagacatgaagatgagagctaagcagctcctggttgcctggcaagatcaagagggagttcatgcaacacctgagaatctgattaatgcactgaataagtctggattaagtgaccttgcagaaagtctaactaatgacaatgagacaaatagttagcttcttttttttttctttttattaaaactgtgatagattttgttaccaagcagcatttgataagaggtccactggttttggtaaacaataaacatttttataac

SEQ ID NO: 11905 - DNA, 4943 bp, Homo sapiens
attgtcgggggctattctctctcccaggaacatggcggcgagtcagggaggaggcggtaacagtgggggcggcggttgtggtggaggtggaagtagcggtggctgtggcacggctggagggggaggtggcggggctggagggggaggcggcggcggcggcgggaccctggtggtccccatcccggtaccgactcttttcggtcagccgttccccaacgggccgccgtggaacccggggagcctgcagcctcagcacaccgtgaggagcctggaccgggccctggaagaggcgggcagctccggcatcctgagcctcagtggtcggaaactccgagacttcccgggcagcggctacgacctgacggacaccacccaagcagatctttccagaaatcgttttacagaaattccttctgatgtctggttatttgcaccccttgaaacattaaatttatatcataattgcatcaaaaccattcctgaagccattaaaaatctgcagatgttaacataccttaacattagccgaaatcttttatcaacattgccaaaatacctatttgatcttccccttaaagttttggtcgtcagtaataataaactggtatccattccagaagaaattgggaagttaaaagatttaatggaattggatattagctgcaatgagattcaagtccttccccaacaaatgggaaaattacattcacttagagagctaaatataagaagaaataatcttcatgttttgccagatgaattaggagaccttcccttagtcaagctggatttctcttgtaataaagtgaccgaaattccagtttgttacagaaagctgcatcatttacaagtaataattttggataacaatccattgcaagtaccaccagcacagatatgtttaaagggtaaggtgcacatatttaagtacttaaatattcaagcatgttgcagaatggataagaaaccagattccctggatcttccatcattgagtaaacgaatgccctcacagcctctcacagacagtatggaagatttttatccaaataaaaatcatggccctgactctggaattggaagtgataatggagagaaacgattatccacaacagaaccatcagatgatgacacagtcagccttcattctcaagtctcagaatcaaatagagagcagacatcaagaaatgacagtcacataataggaagtaagactgattctcagaaagaccaggaggtatatgattttgttgaccccaacacagaagatgtagcagttcctgaacagggaaatgcacatattggatcatttgtatcattctttaagggaaaagaaaaatgttctgaaaaatctcggaaaaatgaagaattaggagatgaaaaaagacttgagaaagaacagttactggcagaggaagaggatgatgatttgaaggaagtaactgatttgaggaaaatagctgctcagttattgcagcaagaacagaagaacaggattcttaatcattcaacttctgtgatgagaaacaagccaaaacaaactgtggaatgtgaaaagagtgtctcagcagatgaagttaattcaccattatcacccctcacctggcagcccttagaaaatcagaaggatcaaatagatgaacaaccgtggccagaatctcaccctataatctggcagagtgaagaaaggaggcggagcaaacagattagaaaagaatatttcaagtataaatcaatgaggaagagttcaagtggcaatgaaaatgatgagcaagacagtgataatgctaatatgtcaacacaatctccagtatcatctgaggaatatgacagaactgatggtttttcacacagtccctttggcttgaagcctagatcagcttttagccgctcatctcgccaagaatatggggcagcagatccaggatttacaatgagaagaaagatggaacatttacgggaagagcgagagcaaatacgacaacttcgcaacaatcttgaatccaggttaaaagtaattttgcctgatgacattggagctgcactgatggatggggttgttctttgccatttagccaatcatataaggccacgttctgttgctagtattcatgtaccatcaccagcagtgcccaaactgagcatggcaaaatgtcgaagaaatgtagaaaattttcttgatgcttgtaaaaagttgggtgtctcacagaggaaagactttgtttgcctcatcatattttggaagaacgaggacttgtgaaagttggtgtcacagttcaggcgctccttgaattaccaacaaccaaggcatctcagctttctgtggcttaatataacattttaaaattctaagtgtatagtttcatttatttgaagtgatttcaaatatttcaaattcatgaataagaatattccgtcaaaaatagtttgccttaggtcacgccttaggattttaaaaaaattacattgaaacatcaaacttaaacattgaattgcccgaacttctttgggggaaaactggattaacttaataagagtatttgataaactcaaattctctttttactaagtcagttgataatcttgattatttttcagaaagcagactgatactaaatttaaaatgtagtttcaatttaataatcacattaggtttaatttttttacatcatagcatattagtaaacatctggataaaggtaattttttttagcaatttagagcaattctatatttgagttatttaatacacttctaattctagtttatacacaatttcttcaatctttggtcttagttttctagaaaaaaggagtagaaaaaacaattctggctttatattaaattcttttagtattataggttggtgccaaaatattttcagttgtactgtagattgtttacatgtgaagtgcctgtgtaattgatgactcttacatagtcttaagcatttttgcaattttttaaatgtattaatagagtcaatggaactttaaaatattttagtagattttgtaaagtcagtaatatgtgaggatttaaatgagcctcacattgtgacatttgtggttttttagttagtccattgcagtttcccttaaattggttatttcatgttgtcaaaaataccaatgttaatatgattaatttatgctatttaattttgtgaaacttaatcatcttttaaaatgtattatttgaagagtattttatttctgtattgaaaatgttacacaaagcagtaaagtttttgagaactagtgaagtactaattatcaaggacattttgataaaactgccaaagtttgggtttatatcttccctttgagcagcattctatcagtgctgcctttagctatactcagagagcagcagttgaggaataggtttttactcaaaatctggccatttgtgaatcctgtaaaccttgtgatcttcaattactttgatgttaaattaaacacagactcttctataaatattttcatgagatactgtgttacacaaagtccttgttttaacttaggtatgggtaaatttacattggtggtattgcaggaatttttcaaaaacattactgtaatgaataactgagtttcctatagaagaacctgaataattacttttgtagtaaccaagcaagcatcatatcttaagtatgtgatcatttgcacttgttacctcttaatatggatgcaacttattaaaaatgttggcctgggtatttcaaagggtatatataaaaggtaaaaaactagtgtgccaaatggtataggaacaactgtactttttttgatcagttggcatgaagccatagaattaaattttggctttagaatacagatgtgttcattacattccccaagggtcaaattggagcttttaaagaattaaagcttctatgagtatatggtttaagaattaaattattagtaatttattattttaaatatttgacctcattagttgttaattttttagttggataaaaaaaaaactcgctgacataatctccctagtgaaaacttgggtaatatatgtaagaaatggcaaataaataccttagttaatgactttttatgtagaaatttgacagcattacaaattaagtgaccattaaaaacacagcaatcattcatactgctttcataggtgttatgatagtctctgattaatcaatctagtatgaattattttacaagtgttgtcctgtttcatatctttgaagtagtagtgaaattgtaggccattttcttataacatttcagttacttttcagttaattattcctttaaaaagaaaatacagcagaacctcactgtagcattctttactgcagagcaaaattcaatttaagatgggcttctctgaggtccacatcatggcagttcatttactcttgtgccaaatggcaacaccacgtctaaagcagtttcacagcatggtcccctacaatgttataccaaggctctgatgtatttcttttagtagtttctaagtgtaaaatttattctaaatgtttttatggctattatctatttcatcagttattgaattaagaatgattttcattacttgagtgggatttgtgatttaatgacagttgaataatcaaaaatattttattaggcccccaaaatttaatagatatctatttctgttacattttattactgtatggcacaagaaagaagtgacattgggtatgttagaaatgaaataaggagtaaaaatgcattaccatttgtttaataattatctttacagaatgctagtttaatgacttttttaactgaattttttgaataaatcagaaatgtttgtattggtcacagatctatcataattgcttttctgatgcatttaaaaataaatggaacacttaaatgtatattaccgatgcaaactgtggataaagttgaaagaaaaaaaaaaaaaaaaaa

SEQ ID NO: 11906 - DNA, 6496 bp, Homo sapiens
tatgatccaagtaacacagaagaaattgcaaatgggttgctttttcttaattcaagtcatatttatgaaaaacaagacagatgttgccacaagacagtgcattccatggcatcaaagttcacggatggtgacctgaacaatgatggtcctcatgatgaaggcttacgctctagtcagcaaaatcccaaagtacagaaatacattagcttcagcctcccgctatctgaggcaactgcacacatttacccaggtgacagtgccgtggccaacaaacaacccagcccacagctttccagtgaagactctgacagtgactatgaactttgcccagagataaccctaacctacaccgaggagttttcagatgatgacctggagtatctggaatgttctgatgttatgacggattactctaatgcagtttggcaaaggaacctgctggggactgagcatgtttttttattagaaagcgatgacgaagagatggaattcggtgagcattgcctgggtgggtgtgagcatttcctcagtggaatgggttgtgggtctcgggtgtcgggtgacgctgggcctatggttgccactgctggcttctgtggtcatcactcacaaccccaagaagttggggtgaggagcagcagagtctccaagcacggtccctcatccccacaaacagggatgactctcattttgggacctcaccaggatggaacgtcttcagtgacagaacaggggagatataaactccccactgctcccgaggctgctgaaaatgattatccaggaattcaaggagaaaccagagacagccaccaagcaagagaggaatttgccagtgacaatctgctcaacatggatgaatcagtaagagagacagagatgaagctcttgtctggtgagtcagaaaactcagggatgagccagtgttgggagacggcagctgacaagagagtggggggaaaggacttatggagcaagaggggttcaaggaaatctgccagggtgaggcagccgggaatgaagggaaatcccaagaagccgaatgccaacctgagagaaagtacaacagaaggtacccttcatctctgctctgccaaagaatctgctgagcccccactaacccagagtgataaaagagagacttctcacaccacagcagcagcgactggtcggagttcccatgctgatgcaagagaatgtgctatttcaacccaggcagagcaagaagcaaaaacccttcaaacttcaacagactcagtctccaaagaaggcaacacaaattgcaagggagaaggcatgcaagttaatactctatttgaaacaagccaggttccagactggagtgatcctcctcaggtacaagttcaggaaacagtcagagagacaatctcttgcagccagatgccagctttctcagagcctgctggggaggagtccccattcactgggaccacaacaatttccttctcaaacttaggaggggtccacaaggaaaatgcatcattagctcaacactcggaggtcaaaccctgtacctgtggtccacagcatgaagaaaaacaagacagagatggcaacatacctgacaatttcagggaagacctaaaatatgagcagagcatctcagaagccaatgatgagactatgtccccaggtgtgttctcaaggcatctccccaaggatgctcgtgctgacttcagggagcctgtggctgtctctgttgcttcccctgaacccacagatactgccctcaccctggaaaatgtgtgtgatgagccaagggacagagaagcagtgtgtgcaatggagtgttttgaggctggtgaccaaggaacgtgttttgataccatagattctcttgttgggagaccagttgataaatattcgcctcaagaaatttgctctgtagatacggaactggcagaaggtcaaaacaaagtatctgatttatgttcttctaatgacaagacactggaagtcttttttcagacacaagtgtctgagacttcagtgtctacgtgcaaaagcagcaaggacggcaactcagtcatgtcccctctttttatcagtactttcaccttgaacatttcacacacagctagtgaaggtgccacaggagaaaatctagccaaggtggagaattccacctacccactggcctccacagtacatgctggccaggagcagccaagccccagcaactcaggagggcttgatgaaacacagctcctttcttctgagaacaatcctttagtgcaatttaaagaaggaggtgacaagagccccagtcctagtgccgcagacaccacagccacaccagccagttatagttcaattgtgagttttccttgggagaagccaacaacattaactgctaataatgagtgctttcaagcgaccagggagactgaggacacatcaactgttaccattgccaccgaagtccacccagccaaataccttgctgtgtcaattcctgaggacaagcatgcaggtggcactgaggagaggttccctcgtgcatcccatgaaaaggtttcccaatttccttcccaagtgcaggtggatcatattttaagtggtgctaccatcaaatctacaaaagagctactttgcagggcacccagtgtgccaggagtcccacaccatgtcctgcagctcccagagggagagggtttctgcagtaattcccctcttcaggttgataacctgtctggagataagagccagactgtggacagagcagactttaggagctatgaagagaatttccaagaaagaggaagtgaaacaaagcagggggtccagcagcagagcctgtcccagcagggttctctttctgcacctgatttccaacaaagtttgcctacgacatctgctgcacaagaggaaagaaacttggtgcccacggccccctcaccagcaagctctagggaaggagcagggcagcgctcaggttgggggacgagggtctccgtggtggctgaaactgctggggaagaagacagtcaggctctgagcaacgttccatctctctctgatatccttttggaagagtctaaagaatatagacctggaaattgggaggcaggcaacaagctgaagattataactctagaggcttccgcttctgaaatctggccaccacgacaactgacaaattctgagagcaaggcatcagacggtggtctcataattcctgacaaggtctgggctgtacctgatagtctaaaggcagatgctgttgtgcctgaattggccccctctgaaatagcagcattggctcacagtccagaggatgctgagtcagcccttgctgatagcagagaaagccataaaggcgaagagcccaccatcagtgtacactggagaagtctttcttcccggggtttcagccaaccgagactcctggagtcatccgtggaccctgtagatgaaaaggagttatctgtcacagattcactgtcagcggcttctgaaactggagggaaggaaaatgttaacaatgtgagtcaagaccaggaggaaaaacaactcaagatggatcacactgccttctttaaaaagtttctgacctgccctaaaatcctagagtcctctgtagatcccattgatgagataagtgtgatagagtacaccagggctggaaaaccagagccctctgaaaccacaccacagggcgccagagaagggggtcaatcaaatgacggaaacatgggccacgaagcggaaatccagccggccattttgcaagttccatgtctccagggaaccattctgagtgaaaatagaatcagcagaagccaagaaggcagtatgaagcaggaggcagaacaaattcaacctgaggaggcaaaaactgccatttggcaagtcctgcaacccagcgaaggcggtgaaagaattccaagtggatgtagcataggccaaatacaagaaagcagtgatgggagcttaggggaggctgagcaaagcaaaaaggacaaagcagaattgatttcccccacttcacctctttctagttgtcttccaataatgactcacgcttctcttggggttgacacgcacaactccacaggccaaattcatgacgtccctgaaaatgacatagttgagcccagaaagcgtcagtatgtgtttcctgtttcacagaaaaggggaactattgagaatgagcgtgggaaacctttgccctcttctcctgatcttaccaggttcccttgtacttcatctcctgaaggaaatgtcacagactttttgataagccacaaaatggaggaacctaaaatagaggtgcttcaaattggggaaaccaaacccccaagctcatctagctcctcagcgaagaccttggcatttatttcaggagaacgtgagttagagaaagcccctaagttactgcaggatccatgtcaaaagggcaccctgggctgtgcgaaaaagtccagggagagagagaagtccctggaagcccgagcaggcaaatcgccagggaccctcacagcagtgacggggtcagaggaggtcaagaggaagccagaagccccaggcagtggacatttagctgagggagtaaagaagaaaattttgtccagggtggcagcactgaggctgaaactggaagaaaaggaaaatatcagaaagaactcagcctttcttaaaaagatgcccaaactcgaaacatcattatcacacacagaagagaaacaagacccaaaaaagccatcttgcaaaagagaaggaagagctccagtattactgaaaaagatccaagctgagatgttccctgaacactctggaaatgtaaaattaagctgccaatttgcagaaattcatgaagattctactatctgctggacaaaagattcaaagtccatagcccaagtgcagagaagtgcaggggacaactccactgtttcctttgccatcgtgcaagccagtccgaaggaccagggactctattactgctgcatcaagaacagctacggaaaagtgactgctgaatttaacctcacagctgaagttctcaaacagctgtcaagtcgccaggatactaaaggatgtgaagagattgaattcagccaactcatcttcaaagaagacttcctccatgacagctactttgggggccgcctgcgtggtcagatcgccacggaggagctgcactttggagaaggggttcaccgcaaagccttccgcagcacagtgatgcacggcctcatgcctgtcttcaaacctggccatgcctgtgtgcttaaggtgcacaatgccattgcctatgggaccagaaataatgatgagctcatccaaaggaactacaaactcgctgcccaggaatgctatgttcaaaatactgccaggtattatgccaagatctacgctgctgaagcacagcctctggaaggctttggagaagtacctgagatcattcctatttttcttatccatcggcctgagaacaatatcccgtatgctacagtggaggaggagctgattggagaatttgtgaagtattccatcagggatgggaaagaaataaacttcttgagaagagaatcagaagctggtcagaaatgttgcaccttccagcactgggtgtaccagaaaacaagtggctgcctcctggtgacggacatgcaaggtgtaggaatgaagctaactgacgttggcatagcaacgctggctaaagggtacaagggatttaaaggcaactgttccatgaccttcattgatcagtttaaagcactacaccagtgtaacaagtattgcaaaatgctgggactgaaatcccttcaaaacaacaaccagaaacagaagcagccgagcattgggaaaagcaaagttcaaacaaactctatgacagtaaagaaggcagggcctgagaccccaggcgaaaagaaaacctaacgtccctgggtaacctaatggccactggctagcagcacacaatctcgccagggaaaatctgaggccacacaggagagaatatacagcctgcagagagtgcgtggcaatccttactcccagccgactgtgcgccaagatgcttctaaacccatcacctgctgtcttcactcaaatgatttcagaacaggatttgcgaccaggtttatggggagattgaatcaacgattggtctcaaagacagtccattctttatatacacgtttagcatttttaccaacctcacatcatgtgtatatttgtgtatttgcacatggttgtgctgtcgaggacctggtgctgagaagagtctgttcacagccaaaattcttcccactgtcattcctaacctgggatttctagacacatcctgctgtgatgtaaacagaaatcacgaattcgctcactggatcaagttgttccactggtgtctaatacgctattgttgccggaggtgggttctgtgacgtgaagccatttcccatcattcaacagccagttacaattttctgtttaattaaattcatatttaaacaaaaaaaaaaaaaaaaaa

SEQ ID NO: 11907 - DNA, 5182 bp, Homo sapiens
cacaactcgcggctctagggaaggccacagacctcagctgtacgagcggaacctggactagaggaactttcctcaggactcagggcacacagcccctcggccactactgtctgcgagcccgaggcgcaggggagcgccagcggctgcaggtacgctgcgcacccgcactggggcctgggcggtgcagcggcggcgggagggtcctgggaaccgcagccgccgaggccagtgtgtgagccggccggccgcggcaagccgcatcccccggccgcccctcgcagccccttgctccccggcagccgccgccgccctcaggcagcccagccgggcgctcgcgccaggacttccccgccgcccgcctcggcccggaacatggctgcgcgccctgctgccaccctcgcctggtcgctactgctcctctcctcagccctgctccgcgaaggctgccgagcgcgcttcgtcgccgagcgggactcggaggacgacggagaggagccggtggttttcccggagtcgcccctgcagagccccacggtgctcgtggcggtcctcgcccgcaacgcggcgcacacgctgccgcacttcctcggctgcctggagcggctggactaccccaagagcaggatggccatctgggcagccactgatcacaatgtggataatacaacagaaatattcagggagtggttgaaaaatgtacagagactctatcactatgtggagtggaggcctatggatgaaccagagtcttaccctgatgaaattggaccaaagcactggccaacctcccggtttgcccatgtgatgaaactacgacaggcagcccttcgaactgcgagggaaaaatggtcagactacattctgttcatagatgttgacaatttcctgactaatccacagaccctcaatctactgattgcagaaaacaaaactattgtggcccccatgctggagtctcggggcctgtattctaatttctggtgcggaatcacccctaagggcttctataagaggaccccagactacgttcagattcgagaatggaagaggacaggctgcttccccgtccccatggtccactccaccttcctaattgacctcaggaaggaggcctcggacaagctgactttctaccccccacaccaggactacacctggacctttgatgacatcattgtctttgccttctccagcaggcaagcaggcatccagatgtacctctgcaacagagagcactatggctacctgcccatccccctgaagccccatcagacactgcaggaagacatcgagaacctcatccatgtgcagattgaagcaatgattgaccgtcctccaatggaaccctcccagtatgtctcagttgtccctaaatatccagacaagatgggatttgatgagattttcatgataaacctcaaacgcagaaaggacaggcgggaccggatgctgcgcacactgtatgaacaggagattgaggtcaagattgtcgaggctgtggatggaaaggcactcaacacaagccagctgaaggcactgaatattgaaatgctgcctggctatcgagatccctattcctccaggcctctaacaaggggtgaaatcggctgctttctcagccactactcagtctggaaagaggtaattgatcgagagctagagaagactcttgtaattgaagacgatgtgcgttttgagcatcagtttaagaagaagctgatgaagctgatggataacattgaccaggctcagctggactgggaactgatttatattggtaggaagaggatgcaagtaaaggagccagagaaagcagtgcccaatgtggcaaacctggtcgaagccgactattcctactggaccctgggctacgtcatctctctggaaggagcacagaagctggttggagccaatccttttgggaagatgctgccagtggatgagtttctgccagtcatgtacaacaagcatcccgtagccgagtacaaggagtattatgaatccagggacctgaaagccttctctgcagaacccttgctcatctaccctacgcactacacaggccagccggggtacctgagtgacacggagacctccaccatctgggacaatgagacagtggccaccgactgggataggacacatgcctggaagtcccggaagcaaagccgcatctacagcaatgccaagaacacagaggccctgccaccgccaacctccctggacactgtgccttcaagggatgagctatgaaggctccctgggagtgtggcccacatcagttcaacatcctctggtttttctaaagggctattcatctgtttgctccagttttctgttttgttttgttcttagtggtcacagtcatctaaccaaagtgatctagtgtgatagatcgaaattaacatatttttgaccatggaaggaaataaggaaattcaacccaaatttcccaagacggctgaaagacaggttttttggaaactgttaagataaactgtaatccagacacctaattcttcagttcactactcatgtgatactgattcccacattaaggttgaacaacatggctcagagtcttgttcaagagaaagtgatcaccgagctgtcacatcagcaaatatgtagtcaaggcagccaggccaactagaccacacttattggtctagtttgtccgttttatatgacattgaaaacttgtgtgtgcaacttttgggggacaggaatcacttaaaatcatatttatttggctttttatttaaaggattctgtcacaagtcttattgaaaagtagattttttaaaaaaaaaaaatcttagtccctgttatccagtaggggtgggtatttgggtccgactgagacttggcctgtgaccatcatggcagttggagttctcatatagaggtgaccagtttgccatgtggatataatttagtagatatttgacagtttgtgtaggtatttgagggaaaaaactcaatgtttggcttttttattatggccactcgagtcaggatgctctatttataaagataaatgtaatatataaagggtgaggactggctgtgcatcctgccctgtcccgggtttgcgcgctgctacagagcttcacgctctccgctccaccccttagcctgggaacccaccgcaggtgtgagttctgtgagtcactgctaagagacagagcacattttcaggccagcaactatccttgccagagttttttcattatattttgaattatttattttacaaaatgggcgaagatattgtctttaggataaggcagagaaacagatgttgcagacttccacggcacccgggggagtggtgggtgtggacacattggttcggcaatctgattctcctgaatttcccagccaggctcttgtggggaggcctgtggatggggggatttgaactatttggaaacaaatgattctctatctcaggtgagaaacctggtcagaaacaaagggctggtcacctgatttaggccagcaaccagggaagctcttagaatcccaggcggacaccctttctcaaaagatatcccctaagagtcctttctgctttcttcacagattgattttatgtaaaatgcagagttggactacacgatttcttcccactccacaatctgtcatcctagtatagatcatggtggtttccctcaagtttatgttctcatgccctcaatctgtaaatttttgtctccagaaaaaccctcccaggcatcccataccagcaccgttcctcatcactgtccatgcaccatgcagccatatggggggccgtgcacaccccaaaccctgagcttcacacttaaactcatggggagggcccttcagagcagagtccacaggcgggtggtgctacatacacaagcttagtgtacgagtgtaagatacactttaagccagacacctaattcttcagttcactgcccatgtgatactgattgccacattaaggttgaacagcatggctcagagtctagagaaagtgatcaccaagctgtctcatcaccaaataggtagtcaaggcagcctcatctccccaggtgaggggcgggtccccactttaggacaagaggcagcttgccttccaccagacgccagcctcggccttccttcccgactcactgtgggtacccttctacactgaccagcaagctaggccgctggaggaaagggaactcacccaactctaaattgtgccgcttagacttagctgtcagtgtgacttcctttcccacccacccccagaaaaacagaaagagcatctggggagcgagtgaaaattccttaggtgattcctaagatttccttgggtatctggtttttgttttcatatttgagtgtgtgcatgtgtgcatgactttaatgacttttttaatggggtgggaggtggctggggtgctggggttgaaggaagtttgggttgatttttgtggtgttttgtttaatagagaattttttttttcctgttcccctgtcagctggtctgacagatttaagaactctcattcttaaaagactttggacttaaattctagcattttagactaggactgttctactgtgaagaaagttctgtctcctttagcccggtttgtttctccctgctcaggtctagaatcccaagcagtgttcttttctggtgaacactgtgagccgcagatgtgactttttttttaaagtcatctcttcagcaatccagaggttccttgacctcattatttgtcctatctctcccttatagtcctaagccaagacatttgacctttgacatttgacctttgcagtgtcatgtgagggcgtcagtatagaggcctttgcatctgggcctggcacccgctctctgcctctggaggctaaaccctgtctggatttctcttgggatctaacgtgggatcttctggacagacaaccgtgacatcagcagtgctggtgctgctgtgtgtggactgaacacctgcactttgcagaggacacgctgcatgggccccgcttgcggttcattcaggcctgctgcaggagctctgagaacaagaaagagtggacacccgttcccctgcatcatctgtcttgcgtgctatttcagagtggggaagtgataaactatttgccttctggagctctttgtgaaaaattaaaaaaaaacttagctcaaaga

SEQ ID NO: 11908 - DNA, 2461 bp, Homo sapiens
tgagaaggaaagaacggccgctatagccctatcggctgctacaacaccaaaacgcatccacctaactggctgacgctacaccttggtctttccgggtccttgcacgcttcgctccaactcctgcagagctgagccggaggggaatccggaagggacacgctgaacaggtctgactcccgggcagcacagcccgctcacgattccggccacggtgatgacgagtctccgtcaacctcgtctggcacagctgggacctcctctgtgccagagctacctgggttttactttgaccctgaaaagaaacgctacttccgcttgctccctggacataacaactgcaaccccctgacgaaagagagcatccggcagaaggagatggagagcaagagactgcggctgctccaggaagaagacagacggaaaaagattgccaggatgggatttaatgcatcttccatgctacgaaaaagccagctgggttttctcaacgtcaccaattactgccatttagcccacgagctgcgtctcagctgcatggagaggaaaaaggtccagattcgaagcatggatccctccgccttggcaagcgaccgatttaacctcatactggcagataccaacagtgaccggctcttcacagtgaacgatgttaaagttggaggctccaagtatggtatcatcaacctgcaaagtctgaagacccctacgctcaaggtgttcatgcacgaaaacctctacttcaccaaccggaaggtgaattcggtgtgctgggcctcgctgaatcacttggattcccacattctgctatgcctcatgggactcgcagagactccaggctgtgccaccctgctcccagcatcactgttcgtcaatagtcacccaggaatagaccggcctggcatgctctgcagtttccggatccctggtgcctggtcctgtgcctggtccctgaatatccaagcaaataactgcttcagtacaggcttgtctcggcgggtcctgttgaccaacgtggtgacgggacaccggcagtcctttgggaccaacagtgatgtcttggcccagcagtttgctctcatggctcctctgctgtttaatggctgccgctctggggaaatctttgccattgatctgcgttgtggaaatcaaggcaagggatggaaggccacccgcctgtttcatgattcagcagtgacctctgtgcggatcctccaagatgagcaatacctgatggcttcagacatggctggaaagatcaagctgtgggacctgaggaccacgaagtgcgtaaggcagtacgaaggccacgtgaatgagtacgcctacctgcccctgcatgtgcacgaggaagaaggaatcctggtggcagtgggccaggactgctacacgagaatctggagcctccacgatgcccgcctactgagaaccataccctccccgtaccctgcctccaaggccgacattcccagtgtggccttctcgtcgcggctggggggctcccggggcgcgccggggctgctcatggctgtcgggcaggacctttactgttactcctacagctaattctgcagggcacagcccagagccatgtggatttgacttacgggagtaaagcgtaactttttactgcatctaatgagggtgttttaagtgacactcagtgtacacagatcccatcctctggctgctaggagagaagtgctgaatgttccgtgtggagatgctcaggaaagttatttgagttaaattgctggctgagagagcttggaagtccttttcataaaaggtacctctttccttttcttattgaattcttagaacttagttaaccctccctgccttttcttaacaaaaaggacttttctaaggactgaagattggcaaaaacgaaaagcttcttcctccaagagcccattgaagaagcccagtgatgagacggtgagatggtttgagtcctcggtgcctgggtagcaggaagaaagacctgcatcctgcatctgtacttggggaagccagcggagaggacggggaggttacttctctaagtttctgcagaaatattgaaggctggagtttggaatccttaaacttggccttctcaaactcagcagcagatctccgggattctgctgttattatccaaaggcgttggaaggaaagatggatcttcttacatgctagaagttttaaacggtccttaacatgcctttgttcaagcaccttccagaatgtaaggttcagcagctctggtttctattacggtgacttgaatgtcagattcaagggcccggcgtcaaaggaaattggttttgactttttgtaatctaggagcgacagttcgtgagatgtttattcagtgttaaagagcctgtttttctaccaaacaataaaaccaagagaagaatcaaaaaaaaaaaaaaaaaaaaaaaaaaaaaaaaaaaaaaaaaaaaaaaaaaaaaaa

SEQ ID NO: 11909 - DNA, 2563 bp, Homo sapiens
tgagaaggaaagaacggccgctatagccctatcggctgctacaacaccaaaacgcatccacctaactggctgacgctacaccttggtctttccgggtccttgcacgcttcgctccaactcctgcagagctgagccggaggggaatccggaagggacacgctgaacaggaacagaaatgaataaaagtcgctggcagagtagaagacgacatgggagaagaagccaccagcagaacccttggttcagactccgtgattctgaagacaggtctgactcccgggcagcacagcccgctcacgattccggccacggtgatgacgagtctccgtcaacctcgtctggcacagctgggacctcctctgtgccagagctacctgggttttactttgaccctgaaaagaaacgctacttccgcttgctccctggacataacaactgcaaccccctgacgaaagagagcatccggcagaaggagatggagagcaagagactgcggctgctccaggaagaagacagacggaaaaagattgccaggatgggatttaatgcatcttccatgctacgaaaaagccagctgggttttctcaacgtcaccaattactgccatttagcccacgagctgcgtctcagctgcatggagaggaaaaaggtccagattcgaagcatggatccctccgccttggcaagcgaccgatttaacctcatactggcagataccaacagtgaccggctcttcacagtgaacgatgttaaagttggaggctccaagtatggtatcatcaacctgcaaagtctgaagacccctacgctcaaggtgttcatgcacgaaaacctctacttcaccaaccggaaggtgaattcggtgtgctgggcctcgctgaatcacttggattcccacattctgctatgcctcatgggactcgcagagactccaggctgtgccaccctgctcccagcatcactgttcgtcaatagtcacccaggaatagaccggcctggcatgctctgcagtttccggatccctggtgcctggtcctgtgcctggtccctgaatatccaagcaaataactgcttcagtacaggcttgtctcggcgggtcctgttgaccaacgtggtgacgggacaccggcagtcctttgggaccaacagtgatgtcttggcccagcagtttgctctcatggctcctctgctgtttaatggctgccgctctggggaaatctttgccattgatctgcgttgtggaaatcaaggcaagggatggaaggccacccgcctgtttcatgattcagcagtgacctctgtgcggatcctccaagatgagcaatacctgatggcttcagacatggctggaaagatcaagctgtgggacctgaggaccacgaagtgcgtaaggcagtacgaaggccacgtgaatgagtacgcctacctgcccctgcatgtgcacgaggaagaaggaatcctggtggcagtgggccaggactgctacacgagaatctggagcctccacgatgcccgcctactgagaaccataccctccccgtaccctgcctccaaggccgacattcccagtgtggccttctcgtcgcggctggggggctcccggggcgcgccggggctgctcatggctgtcgggcaggacctttactgttactcctacagctaattctgcagggcacagcccagagccatgtggatttgacttacgggagtaaagcgtaactttttactgcatctaatgagggtgttttaagtgacactcagtgtacacagatcccatcctctggctgctaggagagaagtgctgaatgttccgtgtggagatgctcaggaaagttatttgagttaaattgctggctgagagagcttggaagtccttttcataaaaggtacctctttccttttcttattgaattcttagaacttagttaaccctccctgccttttcttaacaaaaaggacttttctaaggactgaagattggcaaaaacgaaaagcttcttcctccaagagcccattgaagaagcccagtgatgagacggtgagatggtttgagtcctcggtgcctgggtagcaggaagaaagacctgcatcctgcatctgtacttggggaagccagcggagaggacggggaggttacttctctaagtttctgcagaaatattgaaggctggagtttggaatccttaaacttggccttctcaaactcagcagcagatctccgggattctgctgttattatccaaaggcgttggaaggaaagatggatcttcttacatgctagaagttttaaacggtccttaacatgcctttgttcaagcaccttccagaatgtaaggttcagcagctctggtttctattacggtgacttgaatgtcagattcaagggcccggcgtcaaaggaaattggttttgactttttgtaatctaggagcgacagttcgtgagatgtttattcagtgttaaagagcctgtttttctaccaaacaataaaaccaagagaagaatcaaaaaaaaaaaaaaaaaaaaaaaaaaaaaaaaaaaaaaaaaaaaaaaaaaaaaaaaa

SEQ ID NO: 11910 - DNA, 1333 bp, Homo sapiens
acattttctaatgtttacagaatgaagaggaacagtttatctgttgagaataaaattgtccagttgtcaggagcagcgaaacagccaaaagttgggttctactcttctctcaaccagactcatacacacacggttcttctagactgggggagtttgcctcaccatgtagtattacaaatttttcagtaacttcctttactagatcgggcctgtgcatcttctgtatgtaggaggtggaatgaagtttttcatatttctgacctttggagaaagtttgaatttgaactgaaccagtcagctacttcatcttttaagtccactcatcctgatctcattcagcagatcattaaaaagcattttgctcatcttcagtatgtcagctttaaggttgacagtagcgctgagtcagcagaagctgcctgtgatatactctctcagctggtaaattgttccatccagaccttgggcttgatttcaacagccaagccaagtttcatgaatgtgtcggagtctcattttgtgtcagcacttacagttgtttttatcaactcaaaatcattatcatcaatcaaaattgaagatacaccagtggatgatccttcattgaagattcttgtggccaataatagtgacactctaagactcccaaagatgagtagctgtcctcatgtttcatctgatggaattctttgtgtagctgaccgttgtcaaggccttagagaactggcgttgaattattacatcctaactgatgaacttttccttgcactctcaagcgagactcatgttaaccttgaacatcttcgaattgatgttgtgagtgaaaatcctggacagattaaatttcatgctgttaaaaaacacagttgggatgcacttattaaacattcccctagagttaatgttgttatgcacttctttctatatgaagaggaattcgagacgttcttcaaagaagaaacccctgttactcacctttattttggtcgttcagtcagcaaagtggttttaggacgggtaggtctcaactgtcctcgactgattgagttagtggtgtgtgctaatgatcttcagcctcttgataatgaacttatttgtattgctgaacactgtacaaacctaacagccttgggcctcagcaaatgtgaagttagctgcagtgccttcatcaggtttgtaagactgtgtgagagaaggttaacacagctctctgtaatggaggaagttttgatccctgatgaggattatagcctagatgaaattcacactgaagtctccaaatacctgggaagagtatggttccctgatgtgatgcctctctggtaatgggctg

SEQ ID NO: 11911 - DNA, 632 bp, Homo sapiens
ctctcggctttcggctcggaggaggccaaggtgcaacttccttcggtcgtcccgaatccgggttcatccgacaccagccgcctccaccatgccgccgaagttcgaccccaacgagatcaaagtcgtatacctgaggtgcaccggaggtgaagtcggtgccacttctgccctggcccccaagatcggccccctgggtctgtctccaaaaaaagttggtgatgacattgccaaggcaacgggtgactggaagggcctgaggattacagtgaaactgaccattcagaacagacaggcccagattgaggtggtgccttctgcctctgccctgatcatcaaagccctcaaggaaccaccaagagacagaaagaaacagaaaaacattaaacacagtgggaatatcacttttgatgagattgtcaacattgctcgacagatgcggcaccgatccttagccagagaactctctggaaccattaaagagatcctggggactgcccagtcagtgggctgtaatgttgatggccgccatcctcatgacatcatcgatgacatcaacagtggtgctgtggaatgcccagccagttaagcacaaaggaaaacatttcaataaaggatcatttgacaactggtga

SEQ ID NO: 11912 - DNA, 813 bp, Homo sapiens
ttctcgggaggcagtctgggtccttccaccatggcacctaagaaagcaaagaagagagccgggggcgccaactccaacgtgttctccatgttcgaacagacccaaatccaggaatttaaggaggccttcactatcatggaccagaacagggatggcttcattgacaagaacgatctgagagacacctttgctgcccttgggcgagtgaacgtgaaaaatgaagaaattgatgaaatgatcaaggaggctccgggtccaattaactttactgtgttcctctcaatgtttggggagaaacttaagggagcggaccctgaggaaaccattctcaacgcattcaaagtgtttgaccctgaaggcaaaggggtgctgaaggctgattacgttcgggaaatgctgaccacgcaggcggagaggttttccaaggaggaggttgaccagatgttcgccgccttcccccctgacgtgactggaaacttggactacaagaacctggtgcacatcatcacccacggagaagagaaggactaggagggggctcgctcgtggaccctgggctcgtctttgcagagtggtccctgccctcatctctctcccccgagtaccgcctctgtccctaccttgtctgttagccatgtggctgccccatttatccacctccatcttctttgcagcctgggtggctatgggtacttcgtggccgcacatcctacagttggaaatccatccagaggccatgttccaataaacaggaggtcgtgtatttggtcacgacatttctctgaaaaaaaaaaaaaaaaaaaaaaaaaaaaa

SEQ ID NO: 11913 - DNA, 3627 bp, Homo sapiens
ctgggtagggcagggggaaccgacaggccggtgtccccagccgcaaaagagctgctgaactgtccgtttaaatgctgctgggagactcgtaaaaaaatcatcgtggacctggaggatgagaggggcgagctttatttcggtcggattgcggtgtggtggtttagctgcaaggggatgccgcagccccagttgagggggaaaatagttcttaaaaagcatatgcccccctaaggaatgtctctaaagaaccaaatcaaagctgctctttggaaggtatgaatagaatttaaaaaaaaaagatttctatggagcttaaagttcacagccattctgtgtagacaagagctaagaaaaatgtgagaattatacagaaaaccattaatcacttcttttctttaaatacgtatcctctctcctttgttattattcaacagcaaatctccttggaccggctgttgggggaaaaaagtgttagccgtctctcccggatctgcaagggggaaaaaatttggaaccataaagttgaaaacttttttctctcagtttggaagaagcccttcgtcatgaatgggatctgcagagttcgggcgagaggaggcgagaggcgcaaaggaggggagatttgtcgcctgccgctcgctctggggctcgatgtgaatatatattatgtctgcctgttctcccctcgtcggtggctaaggtcagccgcttggaacagaccccggaggaggggggcagagaggggaggtggggggggggggtccggcgtgtcacgtgacccccagggttgccaatgtccggtcctgagggtatcaggcctttccaagttgccacccactgcccaggcctcacccagcgatgcagaaagccacctactacgacaacgccgcggctgctctcttcggaggctattcctcgtaccctggcagcaatggcttcggcttcgatgtccccccccaacccccatttcaggccgccacgcacctggagggcgactaccagcgctcagcttgctcgctgcagtccctgggcaacgctgccccacatgccaagagcaaggagctcaacggcagctgcatgaggccgggtctggcccccgagcccctgtcggccccgcctggctcacccccgcccagtgccgcacctaccagtgccactagcaacagcagtaatgggggcgggcccagcaaaagtggtcccccaaagtgcggtcccggcaccaactccaccctcaccaaacagatattcccctggatgaaagagtcgaggcaaacgtccaagctgaaaaacaactcccccggcacagcagagggctgtggtggcggcggcggtggcggcggcggcggaggcagtggtggcagcgggggcggtggcggcggcggcgggggaggggacaagagccccccggggtcggcggcgtccaagcgggcgcggacggcgtacacgagcgcgcagctggtggagctggagaaggagttccattttaaccgctacctgtgccggcctcgccgtgtagagatggccaacctgctgaacctcagcgagcggcagatcaagatctggttccagaaccggcgcatgaagtacaagaaggaccagaaggccaagggattggcctcgtcgtcggggggcccatctccagccggcagccccccgcagcccatgcagtccacggccggcttcatgaacgccttacactccatgacccccagctacgagagcccgtccccacccgccttcggtaaagcccaccagaatgcctacgcgctgccctccaactaccagccccctctcaaaggctgcggcgccccgcagaagtaccctccgaccccggcgcccgagtatgagccgcacgtcctccaagccaacgggggcgcctacgggacgcccaccatgcagggcagtccggtgtacgtgggcgggggcggctacgcggatccgctgccgccccctgccggcccctccctctatggcctcaaccacctttcccatcacccttccgggaacctggactacaacggggcgccccctatggcgcccagccagcaccacggaccctgcgaaccccaccccacctacacagacctctcctctcaccacgcgcctcctcctcagggtagaatccaagaagcgcccaaattaacacacctgtgatgggaaagggcgaacgaggattaggggatggggaggaagagagagactgtggagctctggggggcaacctggaggtctgaaaagaggagccagagaaggtggtacccaggcttcctggtcagaaccggcctggagctccttcccttccccctggcctgagaggttgcttttaagtcttccaccccttgttccatctgcctgccaacccatcggaaaggaatccacatcatattggagatgaccccatcaaccccagggctccagcactaccaagttggaattccacgcccgggagtggggtagaggaagacgagacaggacgaggcagaaaagcacattttaaaaaccagacaagatggctaggccatcaccaaccaacggacttaccttacatctttgtaggtaattccccccaaatcttgatttttttttttcctcaattatcctttaaaaaataagaaaacacatttcaaacccaaaaggcacaaaacacgttcccttccaactttcccaaaacctcaaatttgttcccatttgaggtttattgaggtacacttctagcccccggtttttctgctctagaacattcatatctatacatcccacccccatcaattacagtttttagagggctcagggatggtgagagatcctgaaagagctgcctatattataaattatatacatttttttttaaggaaaagtgtggaggctagggcaggcaggttgttaggactgaaggtttgcccattctgctgcctccatctcagctccagctccatccccctctccacagaaagcagttggtgacacgaggttctatacttttcttctgttgctctcttgacttaacgtgaaaacagggtatatttgaacaaactgtcccaggcaggggctgggcagggcctgtgtgccttgctcagcctcctgacaggacacttttgttgcacttagaatttacattttaatggatgtaaaaacaactgtgagagatgtctgggcctgcagaagtccagcattgctcaaaaaagcgtgtgttctagtgaacattttcatatatatttattggttatagcctgttaaaatattttcttttttgtattatttatccccctacattatgtatttatatgagggaaaaaaaggaaaaaattgtacttttttagtatttacctgttacaaaggacattgtgtttcctgtcatgtaaaaccagctattttagttactattgtactctagaaaagagctgtagatttatgttaaactcgtacttacgaacaattgtaattagttctaaaaggcatgaactcagctcctaatcgtcactgtatagtcctgaatttgtagaactagagttaattccctcttggaactttctttgttcttcagtagttacttttttccttacctaaaagggttgtctgtcaaacaattcttgaataaactttctgttatcaattttaaaaaaaaaa

SEQ ID NO: 11914 - DNA, 4817 bp, Homo sapiens
gaccccgcggcttggggtccgcgcacgcgggtgccggcccagctaggcggagaatcgaggaggggttcccgggctcatcgcagaggattggaagggcctagattactgcccaatgacaaaagtgtgggcttaatgtcctcactcttcagggagagaatgtggactttagcatttgaactgaatatttgagattgaagatttctgaataggatttaatgtgcaaaatggcgattataccagactggcttaggtcgcatcctcacacacgaaaatttacacattcaagaccccattcttcaccgtgtagagtatattcaaggaatggttccccaaataagttcagatcttcttcaaccacagctgttgcaaatccaacactgtcctccttagatgttaaacggattttatttcaaaaaattaccgacagaggggatgagttgcaaaaagcctttcagctgctggatactggtcagaacttgactgtgtcaaaaagtgaactgagaagaatcatcacagacttcctgatgccgctcacacgagaacagtttcaggacgtgttggctcagatcccccttagcacctctggtactgtaccgtaccttgcctttctgtccaggtttggtggaattgacctatatataaatggtataaagaggggaggtgggaatgaaatgaattgctgccgcacattaagagaacttgaaatccaagtgggagaaaaggttttcaaaaacattaagactgttatgaaagcctttgagctcattgatgttaacaagactggactggttcgaccgcaggagctaagaagggttctggagaccttctgtatgaagttaagagacgaggaatacgaaaagttttcgaaacactacaacatccacaaggatactgcagtagattacaacgtgtttttgaagaatctcagcataaataacgacttgaaccttagatattgtatgggaaatcaagaggtctcattggagaatcaacaagccaaaaattccaaaaaggaacgtttgctaggttctgcatcatctgaagatatctggagaaactactccttggatgaaattgagaggaacttttgtctacaactttcgaagtcttatgaaaaggttgaaaaggccctcagtgcaggggacccctgtaaaggtggctacgtgtcttttaattatctaaagattgtcctcgacacttttgtataccaaataccaagaagaatttttatccagttaatgaaaagatttggacttaaagccaccactaaaatcaattggaagcaatttctaacatcatttcatgagcctcaggggttgcaagttagcagtaaaggtcccctgacaaaaagaaatagcatcaactctagaaatgaatctcacaaggaaaacatcatcacaaagttatttagacacactgaagatcactctgcgtcactgaagaaagcattactgataatcaacactaaacccgatggaccgataacaagagaagaatttcgatatattctaaattgcatggctgtaaaactaagcgattcagaattcaaagaactaatgcaaatgcttgaccctggggacactggagtggtcaacaccagcatgtttattgatctgattgaagagaactgtaggatgagaaagacatctccctgtacagatgctaagacacctttcctcctggcctgggattcagtggaagaaattgttcatgatacaattactaggaacctacaagctttttataacatgctacgctcatatgaccttggagacacagggcgcattggccgaaataatttcaagaaaatcatgcacgtcttctgtccatttttaacgaatgcacatttcataaaactctgcagtaagattcaggacattggttcaggaagaatcctttacaagaaacttttggcatgcataggaattgatggcccacccactgtctctccagttcttgttccaaaggatcagctgttaagtgaacatttacaaaaagatgaacagcagcagccagatctttctgagagaaccaagctcacggaggataaaaccaccctgaccaagaagatgaccacagaagaagtgattgaaaaattcaaaaagtgtatacagcagcaggacccggcattcaaaaaacgatttcttgacttcagcaaggagcctaatggaaaaattaacgtgcatgactttaagaaggtactggaagacactgggatgcccatggacgatgatcagtatgccctgctgaccactaaaataggcttcgagaaggaagggatgagctatcttgattttgcagcaggatttgaagatcctccaatgagagggccggaaaccactccgccgcagcctccaactccttcaaaaagttacgtgaacagccactttatcaccgcagaagaatgcctgaagcttttccctaggaggctgaaggagtcattccgggacccctactctgccttctttaaaacagatgctgacagggatggcataatcaacatgcatgaccttcacagactgctcctgcatctactgcttaatctcaaagacgacgagtttgagcgcttccttggccttcttggcttgagacttagtgtcactttaaattttcgggaatttcaaaatttgtgtgagaagagaccatggagaacagatgaagcgcctcaaagactcattagaccaaaacagaaggttgcggattcagaactagcttgtgagcaggctcatcagtatcttgttaccaaagcaaaaaacagatggtcagacttgtctaagaattttctagaaaccgataatgagggcaatggcattcttcgacgccgggacataaagaacgcactgtacggttttgatattcccctcacaccaagagagtttgaaaagctttgggcaagatacgacaccgagggaaaagggcacattacttaccaggaatttttacagaaattgggtattaactattcgcctgctgtccatcggccctgtgcagaggattatttcaacttcatgggtcattttacaaagccacagcagctacaggaagagatgaaggagctgcagcagagcacagagaaggctgtggcagccagggataagcttatggaccgccatcaagatatcagcaaagcattcaccaaaactgatcaatccaaaaccaactacatatccatatgcaagatgcaggaagtgctggaagaatgtggatgttctcttaccgaaggggagctgacccatctgctaaacagttggggagtcagccggcatgataatgctatcaattacctcgacttcctgagagcagtggagaacagcaagtcaacaggagctcagcccaaggaaaaagaagagagcatgccaatcaattttgcaacgctgaatccacaggaggctgtgaggaagatccaggaagtagttgagtcctcccagctggctttgtccacggcattttctgcattggataaagaggatacaggatttgtaaaggctacagaattcggacaagttcttaaggatttctgttacaaactaacggacaatcagtatcattattttttgaggaaactaagaattcatctaaccccctatataaattggaaatattttctccagaactttagctgtttccttgaggagacagctgatgagtgggctgagaaaatgcccaaaggcccgccgcctacctctcccaaggccacagccgacagagacatcctggctcgcctccacaaagcagtgacttcccattaccatgccatcacccaggagtttgagaattttgacaccatgaaaacgaacaccatctccagagaggagtttagggccatttgtaatcgccgcgtccaaatcctgacggacgaacagtttgacagactctggaacgagatgccagtcaatgccaaggggaggctgaaatacccggacttcctgagcaggttcagttccgagacagcagccacaccaatggccactggtgactcggccgtggcccagagagggagcagtgtccctgacgtctcggaaggcaccagatctgccctctcattgcccactcaggagctgagaccagggtcaaagtcgcagagccacccctgtactccagcgagcaccaccgtgatcccgggcactccacccttgcagaactgtgatcccatagagagcaggctccggaagagaatccagggctgctggcgccagctcctgaaagaatgcaaggagaaggacgtggccagacagggggacatcaacgcctccgatttcctggctcttgtggagaaattcaacctggacataagcaaagaggagtgtcagcagctcattataaaatacgacttaaagagcaacgggaaatttgcatactgtgacttcattcagagctgtgtcctcctgctaaaagcaaaggaaagctcactgatgcacaggatgaagatccagaatgcacacaagatgaaagaagccggcgcggagacgccatctttttactctgctctgctgcgtattcagcccaaaattgtgcactgctggaggccaatgcggcgcacgttcaaaagctatgatgaggctggaacagggctgctaagcgtcgcagatttcaggacggtcctgagacagtacagcatcaacctctctgaggaagagttcttccatattctggagtattacgataagacgctgtcttcaaaaatctcctacaacgacttcctccgggcattcctccagtagacacccctgctgtgtgcccagcgggacgacagccacagggcctgtttcaaggctaataaaatcctataatttgggggttaaaaaaaaaaaaaaaaa

SEQ ID NO: 11915 - DNA, 4459 bp, Homo sapiens
gaccccgcggcttggggtccgcgcacgcgggtgccggcccagctaggcggagaatcgaggaggggttcccgggctcatcgcagaggattggaagggcctagattactgcccaatgacaaaagtgtgggcttaatgtcctcactcttcagggagagaatgtggactttagcatttgaactgaatatttgagattgaagatttctgaataatcccccttagcacctctggtactgtaccgtaccttgcctttctgtccaggtttggtggaattgacctatatataaatggtataaagaggggaggtgggaatgaaatgaattgctgccgcacattaagagaacttgaaatccaagtgggagaaaaggttttcaaaaacattaagactgttatgaaagcctttgagctcattgatgttaacaagactggactggttcgaccgcaggagctaagaagggttctggagaccttctgtatgaagttaagagacgaggaatacgaaaagttttcgaaacactacaacatccacaaggatactgcagtagattacaacgtgtttttgaagaatctcagcataaataacgacttgaaccttagatattgtatgggaaatcaagaggtctcattggagaatcaacaagccaaaaattccaaaaaggaacgtttgctaggttctgcatcatctgaagatatctggagaaactactccttggatgaaattgagaggaacttttgtctacaactttcgaagtcttatgaaaaggttgaaaaggccctcagtgcaggggacccctgtaaaggtggctacgtgtcttttaattatctaaagattgtcctcgacacttttgtataccaaataccaagaagaatttttatccagttaatgaaaagatttggacttaaagccaccactaaaatcaattggaagcaatttctaacatcatttcatgagcctcaggggttgcaagttagcagtaaaggtcccctgacaaaaagaaatagcatcaactctagaaatgaatctcacaaggaaaacatcatcacaaagttatttagacacactgaagatcactctgcgtcactgaagaaagcattactgataatcaacactaaacccgatggaccgataacaagagaagaatttcgatatattctaaattgcatggctgtaaaactaagcgattcagaattcaaagaactaatgcaaatgcttgaccctggggacactggagtggtcaacaccagcatgtttattgatctgattgaagagaactgtaggatgagaaagacatctccctgtacagatgctaagacacctttcctcctggcctgggattcagtggaagaaattgttcatgatacaattactaggaacctacaagctttttataacatgctacgctcatatgaccttggagacacagggcgcattggccgaaataatttcaagaaaatcatgcacgtcttctgtccatttttaacgaatgcacatttcataaaactctgcagtaagattcaggacattggttcaggaagaatcctttacaagaaacttttggcatgcataggaattgatggcccacccactgtctctccagttcttgttccaaaggatcagctgttaagtgaacatttacaaaaagatgaacagcagcagccagatctttctgagagaaccaagctcacggaggataaaaccaccctgaccaagaagatgaccacagaagaagtgattgaaaaattcaaaaagtgtatacagcagcaggacccggcattcaaaaaacgatttcttgacttcagcaaggagcctaatggaaaaattaacgtgcatgactttaagaaggtactggaagacactgggatgcccatggacgatgatcagtatgccctgctgaccactaaaataggcttcgagaaggaagggatgagctatcttgattttgcagcaggatttgaagatcctccaatgagagggccggaaaccactccgccgcagcctccaactccttcaaaaagttacgtgaacagccactttatcaccgcagaagaatgcctgaagcttttccctaggaggctgaaggagtcattccgggacccctactctgccttctttaaaacagatgctgacagggatggcataatcaacatgcatgaccttcacagactgctcctgcatctactgcttaatctcaaagacgacgagtttgagcgcttccttggccttcttggcttgagacttagtgtcactttaaattttcgggaatttcaaaatttgtgtgagaagagaccatggagaacagatgaagcgcctcaaagactcattagaccaaaacagaaggttgcggattcagaactagcttgtgagcaggctcatcagtatcttgttaccaaagcaaaaaacagatggtcagacttgtctaagaattttctagaaaccgataatgagggcaatggcattcttcgacgccgggacataaagaacgcactgtacggttttgatattcccctcacaccaagagagtttgaaaagctttgggcaagatacgacaccgagggaaaagggcacattacttaccaggaatttttacagaaattgggtattaactattcgcctgctgtccatcggccctgtgcagaggattatttcaacttcatgggtcattttacaaagccacagcagctacaggaagagatgaaggagctgcagcagagcacagagaaggctgtggcagccagggataagcttatggaccgccatcaagatatcagcaaagcattcaccaaaactgatcaatccaaaaccaactacatatccatatgcaagatgcaggaagtgctggaagaatgtggatgttctcttaccgaaggggagctgacccatctgctaaacagttggggagtcagccggcatgataatgctatcaattacctcgacttcctgagagcagtggagaacagcaagtcaacaggagctcagcccaaggaaaaagaagagagcatgccaatcaattttgcaacgctgaatccacaggaggctgtgaggaagatccaggaagtagttgagtcctcccagctggctttgtccacggcattttctgcattggataaagaggatacaggatttgtaaaggctacagaattcggacaagttcttaaggatttctgttacaaactaacggacaatcagtatcattattttttgaggaaactaagaattcatctaaccccctatataaattggaaatattttctccagaactttagctgtttccttgaggagacagctgatgagtgggctgagaaaatgcccaaaggcccgccgcctacctctcccaaggccacagccgacagagacatcctggctcgcctccacaaagcagtgacttcccattaccatgccatcacccaggagtttgagaattttgacaccatgaaaacgaacaccatctccagagaggagtttagggccatttgtaatcgccgcgtccaaatcctgacggacgaacagtttgacagactctggaacgagatgccagtcaatgccaaggggaggctgaaatacccggacttcctgagcaggttcagttccgagacagcagccacaccaatggccactggtgactcggccgtggcccagagagggagcagtgtccctgacgtctcggaaggcaccagatctgccctctcattgcccactcaggagctgagaccagggtcaaagtcgcagagccacccctgtactccagcgagcaccaccgtgatcccgggcactccacccttgcagaactgtgatcccatagagagcaggctccggaagagaatccagggctgctggcgccagctcctgaaagaatgcaaggagaaggacgtggccagacagggggacatcaacgcctccgatttcctggctcttgtggagaaattcaacctggacataagcaaagaggagtgtcagcagctcattataaaatacgacttaaagagcaacgggaaatttgcatactgtgacttcattcagagctgtgtcctcctgctaaaagcaaaggaaagctcactgatgcacaggatgaagatccagaatgcacacaagatgaaagaagccggcgcggagacgccatctttttactctgctctgctgcgtattcagcccaaaattgtgcactgctggaggccaatgcggcgcacgttcaaaagctatgatgaggctggaacagggctgctaagcgtcgcagatttcaggacggtcctgagacagtacagcatcaacctctctgaggaagagttcttccatattctggagtattacgataagacgctgtcttcaaaaatctcctacaacgacttcctccgggcattcctccagtagacacccctgctgtgtgcccagcgggacgacagccacagggcctgtttcaaggctaataaaatcctataatttgggggttaaaaaaaaaaaaaaaaa

SEQ ID NO: 11916 - DNA, 3104 bp, Homo sapiens
ctagtcatgctccgtcccggcgcgcagctgctgcggggcctcctgctgcggagctgcccgctgcagggctcccccgggcgcccgcgctctgtctgcggccgggaaggagaggaaaaaccacccttatctgcagaaacacaatggaaagacagagcagaaacagtgataattggaggtggctgtgttggtgtgagtctggcttatcacctggccaaagcagggatgaaagatgtggtcctgctggagaaatcagagctcacggctggatctacctggcacgcagcaggtttaacaacttactttcatcctggaataaacttgaagaaaatacattatgatagcatcaaactttatgagaaactggaagaagaaactggtcaggtggtgggattccatcagccaggtagtatcagacttgctaccacccctgtaagggtagatgaatttaaatatcaaatgactcggactggctggcatgcaacagaacagtatctcattgaacctgaaaaaattcaagagatgttccctttactcaacatgaataaggttttagctggattgtataatcctggagatggtcacattgatccttattctctaactatggcactggctgctggggctaggaaatgtggtgcccttttaaaatatcctgcaccagtaacttctctgaaagccaggtcagatggaacatgggacgttgaaacaccacaggggtctatgagagcaaatagaattgtgaatgctgcaggattttgggctcgtgaagtaggtaaaatgattggactagaacatcctctcattccggttcaacatcaatatgttgttacatcgactatatctgaagtgaaagctttgaaacgagaactgcctgtgctccgtgacctggaaggatcatattatctccgacaggaaagggatgggcttttgtttggtccatatgaaagtcaagagaaaatgaaagttcaggactcctgggtcaccaatggagttcctccaggttttggaaaggaactctttgagtctgatctagatcgaatcatggaacacatcaaagctgccatggaaatggttcctgtcttgaaaaaggctgacatcatcaatgttgtcaatggtcctatcacgtattctcctgacattctgcctatggtggggccccatcagggggtcagaaactactgggtggctataggctttggatatggcataatccacgctggtggggtagggaaatatctcagtgactggatcctgcatggagaacctccttttgatctgatagaattggatcctaatcgctatggcaaatggacaacaacccagtacactgaggccaaagcaagagaatcatatggattcaacaatattgttggttatcctaaagaagaacggtttgctgggaggccgactcaacgagtcagtgggctctatcaaaggctggagtctaagtgttccatggggttccatgctggctgggagcagccgcactggttctacaaaccaggccaggacactcagtacaggccaagttttcgccgcacaaactggtttgagcctgtgggctcggagtataaacaggttatgcaaagagtagcggtaactgacctatcaccatttggcaagtttaacatcaaaggccaagattccattagactactggaccatctctttgcaaatgtcattccaaaggtgggttttacaaatataagtcacatgttaacacccaagggtcgagtgtatgctgagctgactgtttctcaccaatctcctggggagtttcttttaattactggctctggatcagaacttcatgatcttagatggattgaagaagaagcagtcaaaggtggatatgatgttgaaattaaaaacataactgatgagcttggagttcttggagttgctgggccacaggcaagaaaggtccttcagaaactgacctctgaagatcttagtgatgatgttttcaagtttcttcaaaccaagtccttaaaggtttccaacattcctgtcactgctattaggatatcttatactggtgagctgggttgggagctgtatcacagaagagaagattctgtggcgctgtatgacgctatcatgaatgcaggccaggaggagggaatcgacaattttggaacctatgccatgaatgccttacgcctggagaaagccttcagagcctgggggttagagatgaactgtgatacaaatcctttggaagctggactggaatattttgtgaagttaaataagccagcagacttcataggaaagcaagcactgaaacagattaaagccaaggggctgaaacgaagactggtctgcctcaccttggcaacggatgatgttgatccagagggaaatgaaagcatctggtacaatggcaaggtggttggcaacacgacatctggaagctatagctacagcatccagaagagtctggctttcgcatatgtccctgtacaactaagtgaagtgggacagcaagtggaagttgaactattaggcaaaaattacccagcagtcatcatacaagaacctttggtattgaccgaaccaaccagaaaccggcttcagaaaaaaggtggaaaggacaaaacttgaaaaaagaccttcagcagtcaactgaattagagttgctaatgactgtccttgaaattattataactggctcccaggggaatagaggaaaccaggaattcatttcaaaatcatcaaagtctaaatttagaatcttaatgaaacctttctgttaagtgttttctaagcaagacagaataatagataaatgatttacattgttcttttaaatgaagaaatttgaaatgaatgtttttttatttaccccacattacccaatcagtaaaacatttaggtgtttgctaatatacacaatcattactataacctaattaagggacattttataattttagtaacaaatgcattcggttcttgacagctgaaaacaaattaataaattatcttttacataaaaacatgtacaatattgtttatggatttacttctttgagaaatctttccttagatgaataaatgaaagttttaatttttcatgaaaaaaaaaaaaaaaaaaaaaa

SEQ ID NO: 11917 - DNA, 1923 bp, Homo sapiens
cttcctcctcctggccgcttagtctcacacccgccgggccgttgttcccgagacgttgttgagtcccctgtgtcctcttctgggtggaggaactgcaatgtctggtggagaacagaaaccagagaggtactatgtgggtgtggacgttggaacaggcagtgtccgtgcagctctggtggaccagagtggggtcctgttggcttttgcagaccagccaattaagaattgggagccccagttcaaccaccatgagcagtcctccgaggacatctgggctgcgtgctgtgttgtcacaaagaaagttgtacaagggattgatttaaaccaaattcgaggacttgggtttgatgccacgtgttctctggttgttttggataagcagtttcacccattaccagtcaaccaggaaggggattcccatcgaaacgtcatcatgtggctggaccatcgagcagtcagtcaagttaacaggatcaatgagaccaagcacagtgtcctccagtacgtcgggggggtgatgtctgtggaaatgcaggccccgaaacttctgtggctgaaagagaacttgagagagatttgctgggataaggcgggacatttctttgatctcccggacttcttatcgtggaaggcaacaggtgtcacagcacggtctctctgctccctggtgtgtaagtggacatattcagcagagaaaggctgggacgacagtttctggaaaatgattggtttggaagactttgttgcagataattacagcaaaataggaaaccaagtgctacctcctggagcttctcttggaaatgggctcacaccagaggcagcaagagaccttggccttctccctgggattgcggtcgcagcttcactcattgatgcccatgcaggaggactaggagtgattggggcagatgtgagagggcacggcctcatctgtgaggggcagccagtgacgtcacggctggctgtcatctgtggaacgtcttcttgtcacatggggatcagcaaagacccgatttttgtaccaggcgtctgggggccttatttctcagccatggtacctgggttctggctgaatgaaggtggtcagagcgttactggaaaattgatagaccacatggtacaaggccatgctgcttttccagaactacaagtaaaggccacagccagatgccagagtatatatgcatatttgaacagtcacctggatctgattaagaaggctcagcctgtgggtttccttactgttgatttacatgtttggccagatttccatggcaaccggtctcccttagcagatctgacactaaagggcatggtcaccggattgaaactgtctcaggaccttgatgatcttgccattctctacctggccacagttcaagccattgctttggggactcgcttcattatagaagccatggaggcagcagggcactcaatcagtactcttttcctatgtggaggcctcagcaagaatcccctttttgtgcaaatgcatgcggacattactggcatgcctgtggtcctgtcgcaagaggtggagtccgttcttgtgggtgctgctgttctgggtgcctgtgcctcaggggatttcgcttctgtacaggaagcaatggcaaaaatgagcaaagttgggaaagttgtgttcccgagactacaggataaaaaatactatgataagaaataccaagtattcctgaagctggttgaacaccagaaggagtatttggcgatcatgaatgatgactgaacagggcttgcaggtgctgatgccagaagcttctgtgccattgcattaaagacttctgtcatttgatccatgttcaagacccttgaggtattgtttcatcatttctgtattgtctttcaataaagaaaacaaacatgtgcaaccaaaaaaaaaaaaaaaaaaaaaaaaaa

SEQ ID NO: 11918 - DNA, 5445 bp, Homo sapiens
aacctgtggcgcgctccgcggttccggcgcctgaagttttagctgcggtggcggcggcagtcgggaccgactgcaaggcaggttgagatgatggatctgaggcttgcagctcgcagtcccaacgagccttagggaccagggctaccaaaagggtggggagaacggtggtggcatctgtctgttgcctgggatccaggcgcccggttggggaatccttacttcaggaagcgcagccgcggctctgtgttttgagagtgcaaatgtcatttgtcagagtgaaccgctgtggtccccgagttggtgtaagaaagacaccgaaagtaaagaagaagaaaacttcagtgaaacaagaatgggataataccgtgactgatctaaccgttcatcgggcaactcctgaagatctggtacgccgtcatgaaatacacaaatcgaagaatagagcattagtacactgggaactccaagaaaaagctttgaagagaaaatggaggaagcagaaaccagaaactttaaatcttgagaaaagaagattgtctatcatgaaggagattctttctgatcaataccagatgcaagatgtgttggagaaatctgatcatctaatagctgcagcaaaagagctgtttcctcgtaggcgcacagggtttccaaatgtaacagtggctcctgattcctctcagggtcccattgtggtaaatcaagaccctatcacccaatctatctttaatgagtctgtcatagaacctcaggctcttaatgatgtagatggtgaagaagaaggaactgttaatagccagtcaggagaaagtgagaatgagaatgagttggataactctctaaactctcagtctaacacgaatacagacaggtttctccaacaactaacagaagagaattttgagttaattagtaagttgtggactgacattcagcagaaaatagcaacccagtcacaaataactcctccaggaacgccatcatctgctctttcatcaggggagcaaagagctgctctgaatgctaccaatgctgtcaagagactccaaaccaggcttcagcctgaagaatctactgagactctagactcaagctacgttgtgggacacgtgctgaactcaaggaagcaaaaacagctgttaaataaagtgaaaaggaaaccgaatttgcatgctctttccaagccgaagaaaaacatatcatcaggtagcacaacctctgcagacttaccaaataggactaattccaacctggatgtcctcaaacacatgatacatgaagtggaacatgaaatggaagaatatgagcggtggacaggtcgcgaggtcaagggtctgcagagcagtcagggtcttacaggcttcactttgtcgctggtgagctccctctgtcgcctggttcggtaccttaaagagagtgagatccagctacgtaaagaagtagagacaaggcaacaactggaacaagtattaggtgatcatcgagagctcattgatgctctgacagctgaaattcttcgtcttagagaagaaaacgctgctacacaggcaagacttcagcagtacatggtcacaacagatgagcaactgatatcactcacacatgctattaagaactgtcctgtgataaataacagacaagaaattcaggcatcagaaagcggagccacaggtagaagagttatggacagtccagagcgtccagttgtaaatgccaatgtctcagtgccattgatgttcagagaggaagtggctgaattcccacaggaagagttgcctgttaaactgtctcaggtgccagaccctccagataacatgaatctggccaagaattttccagcacatatttttgagccagctgtgttgttaacaccacccaggcagaagagcaacttaaaattctctcctcttcaggacgtattgagaaggactgttcaaactcgtcctgctccacgacttcctccaactgtggaaataattgagaaggaacaaaattgggaagagaagaccttacctattgatacagacattcagaattcaagtgaagagaatcgtctcttcactcagagatggagagtctctcacatgggagaagatttggagaacaaaactcaggctccttttgttaacctctcacagcccctctgcaattcccattccaacactcaacagtcaagaagccccacattctcagaagagctcccagtactgggagatgggcagcagctgagaacaaatgagtcattaatacaaagaaaggacataatgacacgaattgctgatttgacattgcagaattcggctatcaaggcacatatgaataatattattgagcccagaggagagcaaggggatggactccgggagttgaacaaacaagaaagtgcaagtgacatgacttctacttttccagtagcacagtctctaacaccaggtagtatggaggaacggattgcagaattgaatcgacaaagtatggaggctcgtggaaaactactgcagttgatagagcagcagaaacttgttggtttgaatctttctccaccaatgtcacctgttcagttacctctcagagcatggactgaaggagcaaagaggacaattgaggtatctattccaggagcagaagccccagaaagctcaaaatgtagtactgtctctcccgtcagcgggataaatacaagaagatcttccggggctactggtaattcttgttctccactaaatgccacctcaggaagtgggagattcacacctcttaatccaagagcaaagattgagaaacagaatgaagaaggctggtttgctctttctacccatgtatcataagtgaagtcaagtctcactgagtttgttcttaataatttattactcccctttccctgctctgacttttaagtttttatatccttctttcagataaaacctacaaagatcctgtgaattagtactaatgaaacagagaaataaagcaattattttttgactttctcaaataagttttcaacaaccaactgacctacagctccctgtgaatgaaactttgactgtagagaagttaaagttttgtattttaatactttcttaagtattttaagggttttttttattaatacatttttacctttatctttattcagggttttttgaggtttagtatatcttagttgatccatttatttatttattttcctgaagaactaatttgctttgcatgtaacttacaataaaattcctctgtgtgattagagtctggctttcaggaatatgtaacacccacttttctttcttttttcttgggaagtcattgctgttcatcactttttccatcaagtgaaatatacagccttaaaaacaataggcctgggagtgtttgtttatatttgcttaagcaggtaagagtggttgcatttattataaaatcttatgtagtttttaaatgtgaaaatgtcatcaataatggtaatgcaaatcaaataaatatgattctagagctcaaatgcctaaatgtggtaacattgatttaatggtatatttaatgcttcaaacaattaaatagaaaaagttgctattaattttcccagccctgaatttaagcagatctttcagggtagatttctctcttttttttttttgagacagagtcttgctttattgcccaggctggagtgcagttgtataatctggttcactgccacctcagtctcctgggttcaagcaatcctcttacctcagcctcctgagtagctaggattataggttcatgccaccacgcccagctaatttgtgtattttcagtagagacggggtttcaccatgttggccaggctgatctcgaactcctgacctcaaatgatccacctgccttggtttcccaaagtgccgggattacaggtgtgagccactgcacccggctcaggatagatttttcagggtacccttttggttctgagatgtttatttctattttaaacttgttttttgaatgatctctgctccctggctctatgataggaattctcaacctgagtgaacaattcaaactgagattacttgtgtttagactcatatattttgataacatatgacttctccagtatgccccagaaagctgctaataacttgctcaacctgaaatttacagttttccaaattacaggttggcagagatactggattgataacaacatccacagttatcatataatcattcttatgctgtaaacaaaattattttggttagcagaatttaataattaactgttaactacatactaggcaatattgtagccactttatgtgcttcatgacaccttatgggataggtactattatcctcattttgcagatgaggaaactgaggtacaaggaggtattttctcaaggtcacacaactagggagtggtggcattagaatgggaacataggcagtctttctccaaagcctatgctgtgctgcctcttgttggagagtaaacctgttttacagtgtgtgtagtatggaagcagcataataataagaatagctgttccttattgagccattactgtggcagacaccgtactataagctgtggtatcaccattatctcatttgaatctcatagtagacctatcagttagaggtatgtaaatgcttcctcctctcccagcacctttacagatgaggatgctgagccctagaggtgaagaaagttgtctaatgacagagtgcttgtaagaggtaaagccaagacttgaagctctttcttgcagttactggatttctcctaatttacgggaactaatacagtacagtagctaaggatgcaagtactgaaaccagaaatcttgcctcaaatgccatttctgccacttgagctgcgtactttggacaaattaatctcatctttcccatttgaaagtcagacataatgtcttccctagaggcttgtgaggattaagtgaggcaagtgtatgtaaatgggctgagatcagagcttggctcacaacactcagtaatgatcactgccaattttttttggtatataaataaataaatacactatttcccccatgtttccaatttttaagacattgtatagtgaatttattgtatctttctcagattaacaattgcacacagtgcttgaaatttagaggtatttcacctgaaaagatgtctagagattgaaagaaaacatgctgggcatatgatttgaaaatataaataacatgctatttaaaaataagtttaccctatgttttctatcttttctggcacctagatataccatttaataagtaatagcaaggataatcatttttttaagccctggaaaatcttgattaaagaggacatttcagtattgcaaataaatgcatggtatttgtgtaacattgtggaaactaataaacacaaattgtattataaaaaaaaaaaaaaagaaaaaaaaaaaaaaaaaaa

SEQ ID NO: 11919 - DNA, 5858 bp, Homo sapiens
ccttccagccatgtgggttcagcggaaagagaagcaaaaccactcttcctaaaatgttagaagctgctcttcgcttaccttggggcctttgcattgggagctgtttttcacatcaaagaatatgtgctgaatggaattttagtattttgctgtcgttttaatattttcgtctggtcttcctcagttcttccagacgctttctgagagaatgggggcaggagctctagccatctgtcaaagtaaagcagcggttcggctgaaagaagacatgaaaaagatagtggcagtgccattaaatgaacagaaggattttacctatcagaagttatttggagtcagtctccaagaacttgaacggcaggggctcaccgagaatggcattccagcagtagtgtggaatatagtggaatatttgacgcagcatggacttacccaagaaggtctttttagggtgaatggtaacgtgaaggtggtggaacaacttcgactgaagttcgagagtggagtgcccgtggagctcgggaaggacggtgatgtctgctcagcagccagtctgttgaagctgtttctgagggagctgcctgacagtctgatcacctcagcgttgcagcctcgattcattcaactctttcaggatggcagaaatgatgttcaggagagtagcttaagagacttaataaaagagctgccagacacccactactgcctcctcaagtacctttgccagttcttgacaaaagtagccaagcatcatgtgcagaatcgcatgaatgttcacaatctcgccactgtatttgggccaaattgctttcatgtgccacctgggcttgaaggcatgaaggaacaggacctgtgcaacaagataatggctaaaattctagaaaattacaataccctgtttgaagtagagtatacagaaaatgatcatctgagatgtgaaaacctggctaggcttatcatagtaaaagaggtctattataagaactccctgcccatccttttaacaagaggcttagaaagagacatgccaaaaccacctccaaaaaccaagatcccaaaatccaggagtgagggatctattcaggcccacagagtactgcaaccagagctatctgatggcattcctcagctcagcttgcggctaagttatagaaaagcctgcttggaagacatgaattcagcagagggtgctattagtgccaagttggtacccagttcacaggaagatgaaagacctctgtcacctttctatttgagtgctcatgtaccccaagtcagcaatgtgtctgcaaccggagaactcttagaaagaaccatccgatcagctgtagaacaacatctttttgatgttaataactctggaggtcaaagttcagaggactcagaatctggaacactatcagcatcttctgccacatctgccagacagcgccgccgccagtccaaggagcaggatgaagttcgacatgggagagacaagggacttatcaacaaagaaaatactccttctgggttcaaccaccttgatgattgtattttgaatactcaggaagtcgaaaaggtacacaaaaatacttttggttgtgctggagaaaggagcaagcctaaacgtcagaaatccagtactaaactttctgagcttcatgacaatcaggacggtcttgtgaatatggaaagtctcaattccacacgatctcatgagagaactggacctgatgattttgaatggatgtctgatgaaaggaaaggaaatgaaaaagatggtggacacactcagcattttgagagccccacaatgaagatccaggagcatcccagcctatctgacaccaaacagcagagaaatcaagatgccggtgaccaggaggagagctttgtctccgaagtgccccagtcggacctgactgcattgtgtgatgaaaagaactgggaagagcctatccctgctttctcctcctggcagcgggagaacagtgactctgatgaagcccacctctcgccgcaggctgggcgcctgatccgtcagctgctggacgaagacagcgaccccatgctctctcctcggttctacgcttatgggcagagcaggcaatacctggatgacacagaagtgcctccttccccaccaaactcccattctttcatgaggcggcgaagctcctctctggggtcctatgatgatgagcaagaggacctgacacctgcccagctcacacgaaggattcagagccttaaaaagaagatccggaagtttgaagatagattcgaagaagagaagaagtacagaccttcccacagtgacaaagcagccaatccggaggttctgaaatggacaaatgaccttgccaaattccggagacaacttaaagaatcaaaactaaagatatctgaagaggacctaactcccaggatgcggcagcgaagcaacacactccccaagagttttggttcccaacttgagaaagaagatgagaagaagcaagagctggtggataaagcaataaagcccagtgttgaagccacattggaatctattcagaggaagctccaggagaagcgagcggaaagcagccgccctgaggacattaaggatatgaccaaagaccagattgctaatgagaaagtggctctgcagaaagctctgttatattatgaaagcattcatggacggccggtaacaaagaacgaacggcaggtgatgaagccactatacgacaggtaccggctggtcaaacagatcctctcccgagctaacaccatacccatcattggttccccctccagcaagcggagaagccctttgctgcagccaattatcgagggcgaaactgcttccttcttcaaggagataaaggaagaagaggaggggtcagaagacgatagcaatgtgaagccagacttcatggtcactctgaaaaccgatttcagtgcacgatgctttctggaccaattcgaagatgacgctgatggatttatttccccaatggatgataaaataccatcaaaatgcagccaggacacagggctttcaaatctccatgctgcctcaatacctgaactcctggaacacctccaggaaatgagagaagaaaagaaaaggattcgaaagaaacttcgggattttgaagacaactttttcagacagaatggaagaaatgtccagaaggaagaccgcactcctatggctgaagaatacagtgaatataagcacataaaggcgaaactgaggctcctggaggtgctcatcagcaagagagacactgattccaagtccatgtgaggggcatggccaagcacagggggctggcagctgcggtgagagtttactgtccccagagaaagtgcagctctggaaggcagccttggggctggccctgcaaagcatgcagcccttctgcctctagaccatttggcatcggctcctgtttccattgcctgccttagaaactggctggaagaagacaatgtgacctgacttaggcattttgtaattggaaagtcaagactgcagtatgtgcacatgcgcacgcgcatgcacgcacacacacacacagtagtggagctttcctaacactagcagagattaatcactacattagacaacactcatctacagagaatatacactgttcttccctggataactgagaaacaagagaccattctctgtctaactgtgataaaaacaagctcaggactttattctatagagcaaacttgctgtggagggccatgctctccttggacccagttaactgcaaacgtgcattggagccctatttgctgccgctgccattctagtgacctttccacagagctgcgccttcctcacgtgtgtgaaaggttttccccttcagccctcaggtagatggaagctgcatctgcccacgatggcagtgcagtcatcatcttcaggatgtttcttcaggacttcctcagctgacaaggaattttggtccctgcctaggaccgggtcatctgcagaggacagagagatggtaagcagctgtatgaatgctgattttaaaaccaggtcatgggagaagagcctggagattctttcctgaacactgactgcacttaccagtctgattttatcgtcaaacaccaagccaggctagcatgctcatggcaatctgtttggggctgttttgttgtggcactagccaaacataaaggggcttaagtcagcctgcatacagaggatcggggagagaaggggcctgtgttctcagcctcctgagtacttaccagagtttaatttttttaaaaaaaatctgcactaaaatccccaaactgacaggtaaatgtagccctcagagctcagcccaaggcagaatctaaatcacactattttcgagatcatgtataaaaagaaaaaaaagaagtcatgctgtgtggccaattataatttttttcaaagactttgtcacaaaactgtctatattagacattttggagggaccaggaaatgtaagacaccaaatcctccatctcttcagtgtgcctgatgtcacctcatgatttgctgttacttttttaactcctgcgccaaggacagtgggttctgtgtccacctttgtgctttgcgaggccgagcccaggcatctgctcgcctgccacggctgaccagagaaggtgcttcaggagctctgccttagacgacgtgttacagtatgaacacacagcagaggcaccctcgtatgttttgaaagttgccttctgaaagggcacagttttaaggaaaagaaaaagaatgtaaaactatactgacccgttttcagttttaaagggtcgtgagaaactggctggtccaatgggatttacagcaacattttccattgctgaagtgaggtagcagctctcttctgtcagctgaatgttaaggatggggaaaaagaatgcctttaagtttgctcttaatcgtatggaagcttgagctatgtgttggaagtgccctggttttaatccatacacaaagacggtacataatcctacaggtttaaatgtacataaaaatatagtttggaattctttgctctactgtttacattgcagattgctataatttcaaggagtgagattataaataaaatgatgcactttaggatgtttcctatttttgaaatctgaacatgaatcattcacatgaccaaaaattgtgtttttttaaaaatacatgtctagtctgtcctttaatagctctcttaaataagctatgatattaatcagatcattaccagttagcttttaaagcacatttgtttaagactatgtttttggaaaaatacgctacagaatttttttttaagctacaaataaatgagatgctactaattgttttggaatctgttgtttctgccaaaggtaaattaactaaagatttattcaggaatccccatttgaatttgtatgattcaataaaagaaaacaccaagtaagttatataaaataaattgtgtatgagatgttgtgttttcctttgtaatttccactaactaactaactaacttatattcttcatggaatggagcccagaagaaatgagaggaagcccttttcacactagatcttatttgaagaaatgtttgttagtcagtcagtcagtggtttctggctctgccgagggagatgtgttccccagcaaccatttctgcagcccagaatctcaaggcactagaggcggtgtcttaattaattggcttcacaaagacaaaatgctctggactgggatttttcctttgctgtgttgggaatatgtgtttattaattagcacatgccaacaaaataaatgtcaagagttatttcataagtgtaagtaaacttaagaattaaagagtgcagacttataattttc

SEQ ID NO: 11920 - DNA, 4104 bp, Homo sapiens
gtgagagagtgagcgagacagaaagagagagaagtgcaccagcgagccggggcaggaagaggaggtttcgccaccggagcggcccggcgacgcgctgacagcttcccctgcccttcccgtcggtcgggccgccagccgccgcagccctcggcctgcacgcagccaccggccccgctcccggagcccagcgccgccgaggccgcagccgcccggccagtaaggcggcgccgccgcccggccaccgcgcgccctgcgcttccctccgcccgcgctgcggccatggcgcggcgctgactggcctggcccggccccgccgcgctcccgctcgccccgacccgcactcgggcccgcccgggctccggcctgccgccgcctcttccttctccagccggcaggcccgcgccgcttaggagggagagcccacccgcgccaggaggccgaacgcggactcgccacccggcttcagaatggcagaagatgatccatatttgggaaggcctgaacaaatgtttcatttggatccttctttgactcatacaatatttaatccagaagtatttcaaccacagatggcactgccaacagcagatggcccataccttcaaatattagagcaacctaaacagagaggatttcgtttccgttatgtatgtgaaggcccatcccatggtggactacctggtgcctctagtgaaaagaacaagaagtcttaccctcaggtcaaaatctgcaactatgtgggaccagcaaaggttattgttcagttggtcacaaatggaaaaaatatccacctgcatgcccacagcctggtgggaaaacactgtgaggatgggatctgcactgtaactgctggacccaaggacatggtggtcggcttcgcaaacctgggtatacttcatgtgacaaagaaaaaagtatttgaaacactggaagcacgaatgacagaggcgtgtataaggggctataatcctggactcttggtgcaccctgaccttgcctatttgcaagcagaaggtggaggggaccggcagctgggagatcgggaaaaagagctaatccgccaagcagctctgcagcagaccaaggagatggacctcagcgtggtgcggctcatgtttacagcttttcttccggatagcactggcagcttcacaaggcgcctggaacccgtggtatcagacgccatctatgacagtaaagcccccaatgcatccaacttgaaaattgtaagaatggacaggacagctggatgtgtgactggaggggaggaaatttatcttctttgtgacaaagttcagaaagatgacatccagattcgattttatgaagaggaagaaaatggtggagtctgggaaggatttggagatttttcccccacagatgttcatagacaatttgccattgtcttcaaaactccaaagtataaagatattaatattacaaaaccagcctctgtgtttgtccagcttcggaggaaatctgacttggaaactagtgaaccaaaacctttcctctactatcctgaaatcaaagataaagaagaagtgcagaggaaacgtcagaagctcatgcccaatttttcggatagtttcggcggtggtagtggtgccggagctggaggcggaggcatgtttggtagtggcggtggaggagggggcactggaagtacaggtccagggtatagcttcccacactatggatttcctacttatggtgggattactttccatcctggaactactaaatctaatgctgggatgaagcatggaaccatggacactgaatctaaaaaggaccctgaaggttgtgacaaaagtgatgacaaaaacactgtaaacctctttgggaaagttattgaaaccacagagcaagatcaggagcccagcgaggccaccgttgggaatggtgaggtcactctaacgtatgcaacaggaacaaaagaagagagtgctggagttcaggataacctctttctagagaaggctatgcagcttgcaaagaggcatgccaatgcccttttcgactacgcggtgacaggagacgtgaagatgctgctggccgtccagcgccatctcactgctgtgcaggatgagaatggggacagtgtcttacacttagcaatcatccaccttcattctcaacttgtgagggatctactagaagtcacatctggtttgatttctgatgacattatcaacatgagaaatgatctgtaccagacgcccttgcacttggcagtgatcactaagcaggaagatgtggtggaggatttgctgagggctggggccgacctgagccttctggaccgcttgggtaactctgttttgcacctagctgccaaagaaggacatgataaagttctcagtatcttactcaagcacaaaaaggcagcactacttcttgaccaccccaacggggacggtctgaatgccattcatctagccatgatgagcaatagcctgccatgtttgctgctgctggtggccgctggggctgacgtcaatgctcaggagcagaagtccgggcgcacagcactgcacctggctgtggagcacgacaacatctcattggcaggctgcctgctcctggagggtgatgcccatgtggacagtactacctacgatggaaccacacccctgcatatagcagctgggagagggtccaccaggctggcagctcttctcaaagcagcaggagcagatcccctggtggagaactttgagcctctctatgacctggatgactcttgggaaaatgcaggagaggatgaaggagttgtgcctggaaccacgcctctagatatggccaccagctggcaggtatttgacatattaaatgggaaaccatatgagccagagtttacatctgatgatttactagcacaaggagacatgaaacagctggctgaagatgtgaagctgcagctgtataagttactagaaattcctgatccagacaaaaactgggctactctggcgcagaaattaggtctggggatacttaataatgccttccggctgagtcctgctccttccaaaacacttatggacaactatgaggtctctgggggtacagtcagagagctggtggaggccctgagacaaatgggctacaccgaagcaattgaagtgatccaggcagcctccagcccagtgaagaccacctctcaggcccactcgctgcctctctcgcctgcctccacaaggcagcaaatagacgagctccgagacagtgacagtgtctgcgacagcggcgtggagacatccttccgcaaactcagctttaccgagtctctgaccagtggtgcctcactgctaactctcaacaaaatgccccatgattatgggcaggaaggacctctagaaggcaaaatttagcctgctgacaatttcccacaccgtgtaaaccaaagccctaaaattccactgcgttgtccacaagacagaagctgaagtgcatccaaaggtgctcagagagccggcccgcctgaatcattctcgatttaactcgagaccttttcaacttggcttcctttcttggttcataaatgaattttagtttggttcacttacagatagtatctagcaatcacaacactggctgagcggatgcatctggggatgaggttgcttactaagctttgccagctgctgctggatcacagctgctttctgttgtcattgctgttgtccctctgctacgttcctattgtcattaaaggtatcacggtcgccacctggcattccttctgaccacagcatcattttgcattcaaattaagggttaagaaaagagatattttaaaatgagagtcacttgatgtgccattttaaaaaaaaaggcatattgctttttctaatgtggttatttctctgatttgcaaaaaaaaaaaaaaaaaaaaaatacttgtcaatatttaaacatggttacaatcattgctgaaaatggtattttcccccttttctgcattttgctattgtaaatatgttttttagatcaaatactttaaaggaaaaaatgttggatttataaatgctattttttattttacttttataataaaaggaaaagcaaattgatgacctcaaaaaaaaaaaaaaaaaa

SEQ ID NO: 11921 - DNA, 2232 bp, Homo sapiens
ggcgcgctttcaaacgctcaggtttcctaccttccggctgcttgggaacttctttcttgcccgccaagcccgcagccacccgggcgcggcgggactcctagacccggcgctgcgatgaagaggacccgcgacgaggtggatgcgacgctgcagatcgccaagctgaatgcggccgagctgctgccggcggtgcactgcctgggcttcggccctggggccagcggcgctgcagccggcgacttctgcctgctggagctggagcccacgctgtgccagcagctggaggatggacacagtcttgtgattcgtggtgataaagacgagcaagctgtgctgtgcagtaaagacaaaacatacgacttgaagatagcagacacttccaatatgttgcttttcattcctggttgtaaaactccggaccagttgaagaaggaagattcacactgtaacattattcacactgagatctttggtttttctaataattattgggaattaagaagacgtagacccaagttaaagaagctaaagaaacttttgatggaaaatccatatgaaggacctgacagtcaaaaagagaaggattcaaatagctcaaaatatacaactgaagatttgcttgatcaaattcaggcaagtgaggaagaaataatgacccaattacaagttctaaatgcctgtaagattggaggttattggaggattcttgaatttgattatgagatgaaacttctgaatcatgtaactcagcttgtggattctgaatcatggtcttttggtaaagttcctttgaacacatgccttcaggaactcggaccattggagccagaggaaatgatagaacactgtcttaaatgttatgggaagaaatatgtagatgaaggcgaagtttattttgagttggatgctgataaaatatgtagagcagcagcacgaatgctacttcagaatgcggtgaaattcaatctcgctgagtttcaagaagtgtggcagcagagtgttcctgaaggaatggtaactagtcttgatcagcttaagggtttagcgctggtggatagacactcgagaccagaaatcatatttttgctgaaagtagatgatttacctgaggataatcaggaacgttttaatagccttttctctctaagggagaagtggacagaagaagatattgctccatatattcaagatttgtgtggagagaagcaaaccataggtgcattactcactaaatattctcgttcttcgatgcaaaatggtgttaaagtttataattcgagaagacccatttcttaaaagaacaacagtcttttcttcaggactcaagttgctttataaagttgctggatacaagaaaaataacttgtacttttatttctgacttttagaaacctagtcttctaaggcatttttctcctcatcttaagcattttgaaactactgttatttcttaaatgttataggatgtagctttaaaattatatttgtactatgtacacagtgtaaacaaggacaaaagaattctttcctatattatgtctgaggtctctatgatttatttaaagtttggctttttatatttaaaatgtcatttctttacttaggatttgatgttctaatcattaatacacttaagttttccagagaactaaatagtaatagtttcatagaagagaactatttattcacttaaatatcatttctcaagtgagtgagttcccctctacttttagccttccacccaaactggaagcctctaggtgctatcaattatttatatccatcgtttacatccatgaaattggctgaataattactcctctgcctggcgtagacatgtgctttgggaaaaaaacgagtttataatcctataatgaagaatactggcacaggcaatgctcactcgaaaacttcaagtaatttctagttggttttggaatgcttgataaagttcctttacagctttattttcctgatttgttttggtttagatcaaagttcaaattaattttaacttagctaatgaactcatcaccaggacagttggagggggtaggccgaggttaaatggtccacgtttcaaaaatgttaatggctaatccataattaaagaaggtttaactgttactgaagtttacaagttttattgtcatgaacatgaaatacaaacacgatggcttcgaaatgtctttcaataaatgtttctgcatttaaaaaaaaaaaaaaaaaaaa

SEQ ID NO: 11922 - DNA, 1210 bp, Homo sapiens
agccatggcagtcaccgcccaggcagcccgcagaagggagcgcgtcctctgcctgtttgacgtggacgggaccctcacgccggctcgccagaaaattgaccctgaggtggccgccttcctgcagaagctacgaagtagagtgcagatcggtgtggtgggcggctctgactactgtaagatcgctgagcagctgggtgacggggatgaagtcattgagaagtttgattatgtgtttgccgagaacgggacggtgcagtataagcacggacgactgctctccaagcagaccatccagaaccacctgggggaggagctgctgcaggacttgatcaacttctgcctcagctacatggccctgctcaggctgcccaagaagcgtggaaccttcatcgagttccggaatggcatgctgaacatctcgcccatcggccggagctgcaccctggaggagaggatcgagttctccgaactggacaagaaagagaagatccgggagaagttcgtggaagacctgaaaacagagtttgctggcaaagggctgaggttctctcgaggaggcatgatcagctttgacgtcttccccgagggctgggacaagcgctactgcctggatagcctggaccaggacagcttcgacaccatccacttctttgggaacgagactagccctggtgggaacgactttgagatctttgccgacccccggactgttggccacagcgtggtgtctcctcaggacacggtgcagcgatgccgggagattttcttcccagagacagctcatgaggcgtgaccggggcccacatctgtgtgtcgtgacttctgaagagtttggcctaggcctaaagagaggtcctggtgttggatagatgccagggcccctcctctggcccaggacgcctgctgcaagcccacccagatggggccagagtctgtgtggacaaccgtccccagccagtctgctcctagtggcactggcttcgtcctcccagggcccagagtgttccccatgctccacctggtgccccaggccacagctgctgcttgtatttcggtacagaagaggtttctttctgcaccaggaggaggcgtgctcaagtatcggtacgagatctagcctgccctgcctgcctgccctgggcgatgaggtacggtggggaaggtgcctattttagagaactttgtcacagtattaaagttccctcgtgcc

SEQ ID NO: 11923 - DNA, 3959 bp, Homo sapiens
aaggcttccgggcatgcgcacagcgttgtgcaaatgaatgccttccactgaaccgaggcactgttatagaagaatggaagaagatacagattatagaatcaggtttagttctttgtgtttctttaatgatcacgttggatttcatggcactataaaaagctcaccaagtgactttattgttattgaaattgatgaacagggacagttagttaataagaccatcgatgagcctattttcaagattagtgaaatacaacttgagccaaataattttcccaaaaaaccaaaactagatcttcaaaatctgtccttagaagatggaagaaaccaagaagttcatactttgattaagtacactgatggtgaccaaaatcatcagtctggttcagaaaaggaagatactatcgttgatggaacttccaaatgtgaagaaaaagctgatgttttaagctcctttttggatgaaaaaactcatgagttactgaataattttgcctgtgatgtaagagagaagtggctttctaaaacagagctaattggactacctcctgaattctcaataggcagaatcgttgacaaaaaccagagggctagtttacacagtgccattaggcagaaatttccatttttagtaactgtaggaaaaaacagtgaaattgttgtaaaaccaaatcttgaatataaagaactttgtcatttggtatctgaagaggaagcatttgacttttttaaatatttggatgcaaagaaagaaaattccaaatttacctttaaacctgatacaaacaaagaccacagaaaagctgtccaccattttgtcaacaaaaagtttggaaaccttgtggaaaccaaatctttttctaaaatgaattgcagtgctggtaatccgaatgtggtggtaacagtaagatttcgggaaaaagcacacaaacgtgggaaaaggcctctttctgaatgccaagaaggaaaagttatatatacagcttttaccctacgaaaggaaaacctggaaatgtttgaagcgattggttttttagctatcaaacttggtgttattccttcggattttagttatgcaggccttaaagacaagaaagccatcacctatcaagcaatggttgttagaaaagtgactccagagaggttgaaaaatattgaaaaagaaattgaaaagaaaagaatgaatgtctttaatattcggtctgtagatgattccctgagacttggtcagctcaaaggaaatcactttgatattgtcattagaaatttaaaaaaacaaataaatgattctgcaaacctgagggagagaattatggaagcaatagaaaatgttaagaaaaaaggctttgtgaattactatggaccacagagatttgggaagggaaggaaagttcacacagaccaaattggactagctttgctgaagaatgaaatgatgaaagccataaaattgtttcttacaccagaagacttggatgatcctgtaaatagagcaaagaagtattttcttcaaactgaggatgctaaaggcacactttcattgatgcctgaattcaaagtgcgtgagagagcattgttggaggcattgcaccgctttggcatgaccgaggaaggttgtatccaggcatggttctctttaccccattccatgcgcatattctatgttcacgcatataccagcaaaatttggaatgaggcagtatcttacagacttgaaacctatggagcaagagtagtgcagggtgatttggtctgtttggatgaagacattgatgacgagaatttccaaaatagtaaaattcacctggtaactgaagaggagggatcagctaatatgtatgcaatacatcaggtggttcttccagtacttggatacaatattcagtacccgaagaacaaagtagggcagtggtaccatgacatacttagcagagatggactacagacatgtaggtttaaagtacctactctgaaactgaatataccaggttgctatagacagattttgaaacatccctgtaatctctcataccaactaatggaagatcatgacattgatgtcaaaacgaaaggttcccacattgatgaaacagctttgtctcttttgatctcttttgatcttgatgcttcatgctatgctaccgtttgtctgaaggaaataatgaagcatgacgtttaaaactgatacccttggtataaccatatatatgtcactctttgaaggaaagggggctaaaatgtcttaagcaccttccatgtgttaggaacttcataattgttatctcttttaattttcacagcatcctgagaagttaggatttgatactgtaattttatagaggatatgtaagtgtcagggtccaaatttaaggtccatgtgaccccaaagcctgtgttttttttctattatatgtttcagtgacctttattctgtgtcataaagttacaatcttttaaaaccattaggaatatatataatactgcaagataacatttaagaaaaaaagttgtgaatattcatatcctccagctccttgcttagaacactagtaaaattaggtcgcagtgaagcaaatgttggagagaaagatagatgaagcattttgctaattattattgtccccctttcctgtttttgaaattattgatcagaacaatatacaagggaaatgccatacctctgtttgtgatagataccccagagtagttattacctctttgtgagataagtaatctttgatgaagattgaaatacaatttctcatccaatttttatatcttggcatacgctgaccctcttgaccatttgtaattttttcatattatctaaaacaggtgttagagtcagacagattcattcttagattctagctctgacacttactagtgattttgagtatgttgttgatttttttgtgtgtggttactgatagaatcaagacaattacaacttcataaatgacaaataataggattatctccacattttctgttgctggaggaacaaaacattgtgcccatttgaaaattttaatttttgttggtttaactatcccacattataaatcatccttcaccattttatatcagttaaatatgggtgtgttggggaggaatgactggcatgtagacatgtattgatttaggaagatctgagcatttctttcattgttggtaagatataatgatgaaatttaaaaagcagtatggagcattatatatcagtaatgtgatatatatacttaagccagtttaaccattttgggaaatgttagcattaggaaataaaatccaaaagaaggaagagaagctatatgcaatgcaaaatttgcttattgcaatattttcatatacagacactaaaaacagttttcaaagtccagcattacgtaactaaagtaagtaaaatgatgtgtatcaacttgatggtaaaatatgtagttatttaaaaaagcaatgaacaatttagtttcatgagaaaatgttgccccctaaaagtagaacacatatgttacaactgcaataatactctgaattcatctttcacaaataagagacatgttagcatagtgattaaaagcacagatattggagacaaactaacccagtttgaaccctggcactgccacgtatagcactgcagccttgggaaagttatttaaactcatgggcttcagtttcaacatctgtaaaatgggcatgttaacattgcctacctcataggattactgtgagaattttctaagttaatatatgtaaagcaactttaaaaagtgcctggcacttagttattgttaagtaagtgtctgcagatgcaagtttggaagagaaaagcaaataaatgaaaatcccttcctgttaagatgatggggtatttggatttttttttaatactaaaaagttttttttgttatatgttttggcaataaataattctcaatacaaaaaaaaaaaaaaaa

SEQ ID NO: 11924 - DNA, 4726 bp, Homo sapiens
cctgctgtccggtggccgcgctgtggccgccggtggccgttaggctacctgaggccgttccttctggtctctctctcctgggccgcggagagaccgtctccctgccgttacagcaggccccatcccagcgcccagccgtacttggggaaaggccggttgcgattccggggctttcccgccagagctgggtcttctctggggagagctgttttcaccgggaagctcggctttctgtggtaccggcttcatctcccgccttccttgagacccgagtgatatttcttgactacttctgcgtctcacgtaaacatttctccaactctcctactctgtggtatctccctgagatgtgatatcgctagtgccaccatcagaaagaaacgtctggaccctcctgctcaggactttgtatctttgctaaagtcagtgatgtgaaaagacttgaaatggatgatattgctgataggatgaggatggatgctggagaagtgactttagtgaaccacaactccgtattcaaaacccacctcctgccacaaacaggttttccagaggaccagctttcgctttctgaccagcagattttatcttccaggcaaggacatttggaccgatcttttacatgttccacaagaagtgcagcttataatccaagctattactcagataatccttcctcagacagttttcttggctcaggcgatttaagaacctttggccagagtgcaaatggccaatggagaaattctaccccatcgtcaagctcatctttacaaaaatcaagaaacagccgaagtctttacctcgaaacccgaaagacctcaagtggattatcaaacagttttgcgggaaagtcaaaccatcactgccatgtatctgcatatgaaaaatcttttcctattaaacctgttccaagtccatcttggagtggttcatgtcgtcgaagtcttttgagccccaagaaaactcagaggcgacatgttagtacagcagaagagacagttcaagaagaagaaagagagatttacagacagctgctacagatggtcacagggaaacagtttactatagccaaacccaccacacattttcctttacacctgtctcgatgtcttagttccagtaaaaatactttgaaagactcactgtttaaaaatggaaactcttgtgcatctcagatcattggctctgatacttcatcatctggatctgccagcattttaactaaccaggaacagctgtcccacagtgtatattccctatcttcttataccccagatgttgcatttggatccaaagattctggtactcttcatcatccccatcatcaccactctgttccacatcagccagataacttagcagcttcaaatacacaatctgaaggatcagactctgtgattttactgaaagtgaaagattcccagactccaactcccagttctactttcttccaggcagagctgtggatcaaagaattaactagtgtttatgattctcgagcacgagaaagattgcgccagattgaagaacagaaggcattggccttacagcttcaaaaccagagattgcaggagcgggaacattcagtacatgattcagtagaactacatcttcgtgtacctcttgaaaaggagattcctgttactgttgtccaagaaacacaaaaaaaaggtcataaattaactgatagtgaagatgaatttcctgaaattacagaggaaatggagaaagaaataaagaatgtatttcgtaatgggaatcaggatgaagttctcagtgaagcatttcgcctgaccattacacgcaaagatattcaaactctaaaccatctgaattggctcaatgatgagatcatcaatttctacatgaatatgctgatggagcgaagtaaagagaagggcttgccaagtgtgcatgcatttaatacctttttcttcactaaattaaaaacggctggttatcaggcagtgaaacgttggacaaagaaagtagatgtattttctgttgacattcttttggtgcccattcacctgggagtacactggtgtctagctgttgtggactttagaaagaagaatattacctattacgactccatgggtgggataaacaatgaagcctgcagaatactcttgcaatacctaaagcaagaaagcattgacaagaaaaggaaagagtttgacaccaatggctggcagcttttcagcaagaaaagccagattcctcagcagatgaatggaagtgactgtgggatgtttgcctgcaaatatgctgactgtattaccaaagacagaccaatcaacttcacacagcaacacatgccatacttccggaagcggatggtctgggagatcctccaccgaaaactcttgtgaagactgtctcacttagcagaccttgaccatgtgggggaccagctctttgttgtctacagccagagaccttggaaacagctgctcccagccctctgctgttgtaacacccttgatcctggaccaggccctggcgagatgcattcacaagcacatctgcctttccttttgtatctcagatactatttttgcaaagaaactttggtgctgtgaaaggggtgagggacatccctaagctgaagagagagactgcttttcacttcttcagttctgccatcttgttttcaaagggctccagcctcactcagtccctaattatgggactgagaaaagcttggaaagaatcttggtttcatataaattcttgttgttaggccttactaagaagtaggaaagggcatgggcaaaaggtagggataaaaaccaccagcatatacatggacatacacacacacccacacacacaaacacacacacacacacaattttcacgatgtatggtcaggaatgtgactgtaaactggactttggggcccaggcataagtcccttcctccaggacctttcctatttatatgtccctatacaaaatccatctgcttttatacgtagctgttttatcatctgtagcttcatcctatccggaggcacagcacatgagccctggacaggtcccaaagttccaagcagtcctttccgtaaaagcaggggtttgcatgtgctaccaacacatgatacggggaagacccacccagggagcggtttcagtggcgcaacaaagcaccacttttactgttgcctacttctgaccaagaagaaaaaggaccttagtatttagcataaaattccagcgctggatgaatgcagatctagtttggtctgtggctagtttaaatatgtttctaaccacagagaatttcatatatatatacatatatatatacacatacatatatatatatatatatgtatgtataaaatttcacagggatatgcttttttttttaaagactgaatgtgttcaccatttagcctgtagatttatttccattttccaaattccagcacacagagatcccagcccctatgagtagggtgtttgtggactacctaatggaatatttttgaggcctggatgaactttgccatatgggtagaggttacagagggaggtgatattttcagctaaaaaaaaaaacgggtggagtttggactgatcaacttgagatttaaaaactgctattccttttgttctttctagcatctctccccaccctctgagagctcctcaggcttagatagtgaagtgatcaaatgccagtgtcattttgtacttaagttccaaagtaggaacattttatacttttttctgtattgtaataggtagttttgtatgaaatcttttctcctctcccgttgtaccgcattctttccagcattgtgctttttccctgggcttatttgaaaattttactgttttatacaagctcgtttagtacatttttctatgttttaccacaagttacaatttgaaaagaaaactattttttttaaatattccattgttaactgaatgttactgtttccactccagcaactacatgtcctcccttcaactgcctgccttttggggaaagaccaccttttgtgtgtttgttttttctctctctttctttccctttctctttctatctctctttatttttctttctttttctttgtttttgagttttctataggaaataaatagctttctatatatgagttgctggggaccttcacattctcttttagaaagctgtggcatgcagtctcattgcaggactcctggaatattgtctggttcttggtatttactgtatgtaagcaacaacttgaaaggtggcaatatggtgtcgatttggactatgaatcaaaagacctttttcaggttctttcactattgtctgggggactcagaacaagattgttctctgtatttattgtttgtccatttaggtaacatctgtcttaccttcctcacagactttgtacagaccaaagcaacaaatatttattgccatgtatagcagaaaatgaaacatgcaacaaaagcactttgaaaaatatataaggaattgttgagcctgtctgaatttgggccccctttctgactaatgcagttttgcacaaggtagaagttagtgaccctgagaccatcttaccaccctggacctggtccaaatacagacttacacagtggaccattctttcctgagctagccaacaagagcaggagtagtatctggaaactttcccctttgtttaggggtaggctttgatgaccaggaaaaaaaaaaaggtatttctgca

SEQ ID NO: 11925 - DNA, 2798 bp, Homo sapiens
ccgcgagccgcccggcactcccgcagtccagccggctcctctagcccggccacggctccgctgcgggccacccaggattactcgcgtctggctccaggcgccgagaaggcgcgctgggcgcccgtggccgccgcgccagctcctcctcctcccgctgctcctgctcccggggcgagcgcgcagccccgagcccgccccgcgcctcccggagccctcccccccgctgctcccatgcgcgcgggtgggtcatgagcacagcgccctcgctttctgccctaagaagcagtaagcacagcggcggcggcggcggcggaggcggaggcggcggtgcagaccctgcctggaccagcgcgctctctggaaatagctccggccccggcccaggctcgtccccggccggcagcaccaagccttttgtgcacgccgtgcccccctctgaccccctgcgccaggccaaccgcctgccaatcaaggtgctgaagatgctgacggcacgaactggccacattttgcaccccgagtacctgcagcccctgccttccacgccggtcagccccatcgagctcgatgccaagaagagcccgctggcgctgttggcgcaaacatgttcgcagatcgggaagcccgacccctcgccctcctccaaactctcctcggttgcctccaacgggggcggcgcgggcggtgccggcggcggtgctgcgggcgacaaggacaccaaatcgggccccctgaagctgagcgacatcggcgtggaggacaagtcgagtttcaagccgtactccaaacccggctcggataagaaggagccgggaggcggcggtggaggcggtggcggtggcgggggcggcggcgggggtgtttcgtcggagaagtcgggattccgggtaccgagcgccacctgccagccattcacgcccaggacaggcagcccgagctccagcgcctcggcctgctcgccgggaggtatgctgtcctcggccgggggtgccccggagggcaaggacgacaagaaagacaccgacgtgggcggcggtggcaagggcaccgggggcgcctcggccgaagggggacccacggggctggcacacggccggattagctgcggcggcgggattaatgtggatgtgaaccagcatccggatgggggcccgggaggcaaggctctgggctcggactgcggcggttcatcgggctccagctccggctccggccccagcgcgcccacctcctcctcagtgttgggctctgggctggtggctcccgtgtcaccctacaagccgggccagacagtgttccctctgcctcccgcgggtatgacctacccaggcagcctggccggggcctacgccggctacccgccccagttcctgccacacggcgtggcacttgaccccaccaagccgggcagcctggtgggggcgcagctggcggcggccgcggccgggtctctgggctgcagtaagccggccggctccagtcctttggccggagcgtctccgccgtccgtgatgacagccagtttgtgccgggacccttactgcctcagctaccactgcgctagccacctggcaggggcggcggccgccagcgcttcttgcgcacatgatccggctgctgcggctgcggcgctgaagtccggatacccgctggtgtaccccacgcacccgctgcacggtgtgcactcctcgctaacggccgccgcggctgctggcgccacaccgccctccctggccggccaccccctctacccctacggctttatgctccctaacgacccactcccccacatctgcaactgggtgtcggccaacgggccgtgcgacaagcgcttcgccacgtccgaagagctgctgagccacttgcggacccatacggcatttcccgggacagacaaactgctgtcgggctaccccagctcgtcgtctctggccagcgctgccgcggccgccatggcttgccacatgcacatccccacctcgggcgcaccgggcagccctgggacgctggcgctgcgcagcccccaccacgcgctgggactcagcagccgctaccacccctactccaagagcccgcttcccacgcctggcgcccccgtgccggtgcccgccgccaccggaccgtactactccccctacgccctctacggacagagactgaccaccgcctcggcgctggggtatcagtgagggcggccgggagggcgagcgagggagaggagggagagggggaggggaggagtccagggagaggcgggatcacggcccaggctgctgacacccgcgcgtggggaggactcgggccacgaaaggaaagaaatgtataccgtatctatctacccgacagcagcgaccgagacccggtgggacactccccttctccccactttcacctccccacccaaactttataaaagttgaaaaaatatcatttgactttttatagaaaaaaaaaggaaaaaataattgagaaagtgttcatctgaggactgcatcggtggacactggtatttatttatgttagctccaagcggaccggtggttcaaaagtgcattatttagtttgagctctgtaggtaaaaaggaggtgggaaaaattttaaaacttgagggtaaaaatgtggaaaacaaaccctcccatcccttgtagattataaataaaagcaaaaccgccacagaactagaggtcttctctttaatgttactttaaaattgctatgattgtattgtacgttatttaatgtctgattgaaacacaaatttacatgcatgtttgttacaaaaaaaaaaaaaaaaaaa

SEQ ID NO: 11926 - DNA, 4519 bp, Homo sapiens
cagccagggccaccccaggggctataagagcaactagatttctggagcagctcggggatgggtgccatttgagcccagcttggctccccctcctggctggcctccttcctgcccttctgcctgcctgtgtctgctgagattctgcaaagaggaacgttggcaccatgtctctgctcaaccctgtcctgctgccccccaaggtgaaggcctatctgagccaaggggagcgcttcatcaaatgggatgatgaaactacagttgcctctccagttatcctccgtgtggatcctaagggctactacttatactggacgtatcaaagtaaggagatggagtttctggatatcaccagcatccgggatactcgctttgggaagtttgccaagatgcccaagagccagaagctccgggacgtcttcaacatggactttcctgataacagtttcctgctgaagacactcacggtggtgtccggcccggacatggtggacctcaccttccacaacttcgtctcctacaaggagaacgtgggcaaggcctgggctgaggacgtactggccctagtcaaacatccgctgacggccaacgcctcccgcagcaccttcctggacaagatccttgtgaagctcaagatgcagctcaactctgaagggaagattccggtgaagaactttttccagatgtttcctgctgaccgcaagcgggtggaagctgctctcagtgcctgccacctccccaaaggcaaaaatgacgccatcaatcctgaggacttcccagaacctgtctacaagagtttcctcatgagcctctgtcctcggccagaaatagatgagatcttcacttcttaccatgctaaggccaaaccctacatgacgaaggagcacctgaccaaattcatcaaccagaaacagcgggactcccggcttaactccctgctgttcccgccagcacggcctgaccaggtgcagggcctcatcgacaagtatgagcccagtggcatcaatgcacagaggggccagctgtcacctgaaggcatggtctggtttctctgtgggccagagaacagcgtgctggcccaggacaagctgctgctccaccacgacatgacgcagccactcaatcattacttcatcaactcgtcccacaacacctacctgacagccggccagttctcaggcctctcctcggctgagatgtaccgccaggtgctgctctctggctgccgttgcgtggagctagactgctggaaggggaaaccccctgacgaggagcccattatcacccatggcttcaccatgaccacagacatcttcttcaaagaagcaattgaggctattgcagaaagtgcctttaagacctccccctatcccatcatcctgtcgtttgagaaccatgtggactcaccccgccagcaggctaagatggctgagtattgccggacgatctttggggatatgctgctcacagagcccctggaaaagttcccactaaaaccaggtgtccccctgcccagccctgaggatctcaggggcaagatcctcatcaagaacaagaagaaccagttttctggccccacctcctccagtaaggataccggtggggaggctgagggcagcagcccacccagtgcccctgcagtgtgggctggcgaggaagggactgagctggaggaggaggaggtggaagaggaagaggaggaggagtcaggaaacctggatgaagaagagattaagaagatgcagtcggatgagggcacagcgggcctggaagtgacggcttatgaggagatgtccagcctagtcaattacatccagcccaccaagttcgtctcctttgagttctctgcccaaaagaaccgaagttatgtcatctcgtccttcacagagctcaaggcatatgacctgctctccaaggcctcggtgcagtttgtggactacaacaagcgccagatgagccgcatttaccccaagggaacccgcatggactcctccaactacatgccccagatgttctggaatgctggatgccagatggttgccctcaacttccagacgatggacttgcccatgcagcagaacatggcagtatttgagttcaacgggcagagcggctacctcctcaagcatgagttcatgcgccggccggacaagcagttcaaccccttctcagtggaccgcatcgacgtggtggtggccaccaccctttccattacggtgatctctgggcagttcctgtcagaacgcagcgtgcgcacctatgtagaagtggagctgtttggccttcctggggaccccaagaggcgctatcgaactaagctgtcacccagtactaactccatcaatcctgtctggaaggaggagccctttgtctttgagaagatcttgatgcctgagctggcctccctcagagtggctgtgatggaggaaggcaacaagtttcttggacaccgcatcatccccatcaatgccctaaattctgggtaccaccacctgtgcctgcacagtgagagcaacatgcccctcaccatgcctgcgctcttcatcttcctggagatgaaggactacatacctggtgcttgggcagatctcactgtggccctcgccaaccccattaagttcttcagtgcccatgacacgaagtctgtgaagctcaaggaggccatgggaggtctgcctgagaagcccttcccactggcgagtccagttgccagccaggtcaatggggcgttggccccaacgagcaatgggtcaccagcagccagggccggggccagggaagaggctatgaaagaagctgcggagccgcggaccgccagcctggaggagctccgggagctaaagggcgtggtgaagctgcagcggcggcacgagaaggagctgcgagagttggagcggcgcggagcgcggcgctgggaggagctgctgcagcggggcgcggcgcagctggcggagctcgggccaccgggcgtggggggcgtcggggcctgcaagctcggtcccggcaagggctctcgcaagaagaggagcctgccccgcgaggagagcgccggagccgcgccgggcgagggccctgagggcgtggacgggcgcgtgcgggagctgaaagacaggctggagctggagctgctgcggcagggcgaggagcagtacgagtgcgttctgaagcgcaaggagcagcacgtggccgagcaaatctccaaaatgatggagctggccagagagaaacaggcggcagagctgaaggccctgaaggagacgtcggagaacgacaccaaagagatgaagaaaaagctggagacaaagagactggagcggatccagggcatgaccaaagtcaccacagacaagatggcccaggagaggttgaagagagagattaacaactcccacatccaggaagtagtgcaggtgatcaagcagatgacggagaacttggagaggcaccaggagaagctggaggagaagcaggcggcttgcctggaacagatacgggagatggaaaagcagttccagaaggaggcgctggcagagtacgaggccaggatgaagggtctggaggcagaggtgaaggagtcggtgagggcctgcctcaggacctgctttccctccgaggccaaggacaagcctgagagggcctgcgagtgccccccagagctgtgtgagcaggacccactcatagcaaaggcagatgcccaggagagccgcctctgatgcccccatcccactgggacatttagcaaggaggttcagccccttctctgggatgtggttctattcccccaggaaaaaggagccccagccttctgaggctgtgggaacctgtggctgccttggacgctgcagccccctcctcaacggccaggccagagtctgagacaggacccaggcaccctcacggcagggcctctctggggcctagaagtcttctcaagctgacttcctacctccccctccatctctagataagtgtcatatatttgttgagggcaaaagactatggactggaaggcagaaagtgggatcctggccccactctgcctttcctattgagcaaccagctctgggctcagtttcctcacctggagggttggacccactcacctccactctagccccgaaccctcctgccccaggcttccaggccccatcaggcctgccctgagttggccttgtccactccttgaggcagatcctggcactacctcacagctccctggggacggccactccctggctgagggccctcccctcccctctgcctgtccggaacgggaggctgaaatggaaaagctgccttggccctgcttggctgagtcacaaggggcagtgggctcttgggtgctgttccaccctgaccctggctcacccctcttcctaggcctgggggcaggcagttcctaccatgtacccctctcaggctgcctgcctgacaaggtcagcatcatttgctctcctgaatttatgaggtttatttatttttctctttcctactcctattaaagaacctcgtcccagtgaaa

SEQ ID NO: 11927 - DNA, 5936 bp, Homo sapiens
gctgtcctggccgcgcccctgtcccgccgcctcccgctcctcgcctggcggatgtaggttgttggcctgaggggagctacgtagccgaggtttgcgctgccgccgccaggcccggtccggttccagcctctgcccggacgctagccggcctggccatggctgaccgcgggtgcccgctggaggcggcgccgctgcctgccgaggtgcgggagagcctggctgagctggagctggagctgtcggaaggtgacatcactcaaaaaggatatgaaaagaaaagggcaaagctgcttgcacgttatataccgcttattcaaggaatagacccatctctgcaagcagagaatagaattcctgggccctcacaaaccacggccgctgcacccaagcagcagaagtctcggcccaccgcctcgagggatgagcgcttccggtcagatgtccacactgaagccgtgcaagcagctttggccaaatacaaagagaggaagatgcctatgccttcgaagagacgttctgtccttgtgcattcgtctgtggaaacctacacccctccagacacgtcgtctgcctcagaagatgagggctctttacggcgacccgggcgactcacctccactccgctccagagccattccagcgtcgagccctggctcgaccgggtcattcagggctcgtccacctcatcctctgcatcctccacctcatctcacccgggagggagacccaccactgctcccagtgctgcagccacgccgggggccgccgctaccactgcactcgcaggcctcgaggcccacacccacatagatctgcattctgcccctcctgatgtcaccacgggcctcgtggagcattcgtactttgagcgtccacaggtggcttctgtgagaagtgttcctcgggggtgcagcgggagcatgctggaaacagcagatggtgtccctgtgaacagcagagtgtcctccaaaatccagcagcttctgaacaccctgaagaggccaaagcgccctccactgaaggagttctttgtggatgattttgaggaattgttggaagttcagcaaccagatccaaatcagccaaagcctgagggaagcgagacgagtgtgctgagaggggagcctctcactgcaggtgtcccccgaccgccgtcgctgttggccaccttgcagcgctggggcacaacacagcccaaatccccctgtctgactgccttggatacaactgggaaagccgtctacactctcacctatggtaaactttggagtcggagtttaaaactagcttatactctacttaataaactgacaagtaagaatgaacctctacttaaacctggagacagagtggcgctcgtgtttccgaatagtgaccctgtgatgttcatggttgcattttatgggtgtctcctggcagagctggttcctgtccccatagaagtgccattaacaagaaaggatgcaggcagccagcaggttgggtttctgctgggcagctgtggagtcttcttggccctgaccacagacgcttgtcagaaaggcctccccaaggcacagacaggagaggtggcagctttcaaaggttggcccccgctctcctggctagtgattgatgggaagcatctagccaagcccccaaaggactggcaccctctggcccaggacacagggactgggactgcctacattgagtataaaaccagcaaagaaggcagtacggtgggggtcacagtgtcccacgcatccctgctggcacagtgccgggctctgacccaggcgtgcgggtactcagaagctgaaacattaacaaacgtgctggatttcaaaagggatgctggtctgtggcatggcgtgttaacaagcgtcatgaacaggatgcacgtggtcagcgtcccctacgcgctgatgaaggcgaacccactctcctggatccagaaagtgtgcttctataaagctcgggccgcgctggtgaagtcgcgagacatgcactggtctctcctagctcagcggggccagagggacgtcagcctcagctcactgcgcatgctgattgtggccgatggtgccaacccgtggtcgatctcctcctgtgacgccttcctcaacgtcttccagtccagaggtctgaggccagaggtcatctgtccttgtgcaagttctcctgaggcgctgactgtcgccatccgcaggccacctgatctgggaggaccacctccaagaaaagcagtcctgtcgatgaacggtctaagttatggtgttatcagagtggatactgaagaaaagttgtcagtccttactgttcaggacgttggtcaggtgatgcctggagctaatgtatgtgttgtgaagttagaaggtaccccttatctttgtaaaactgatgaagtgggagaaatatgcgtcagttccagtgcaactggcacagcgtactatggattgcttggaatcacgaagaatgtgtttgaggcagttccggtcaccacaggaggagcacccatctttgacaggccattcaccaggacaggcctgctgggcttcatcgggcctgacaacctggtcttcatcgtgggcaaactggacgggctgatggtcactggagttcgcagacacaatgcagatgacgttgtggccaccgcactggccgtggagcccatgaagtttgtctacagaggcaggatcgctgtgttctctgtgaccgtgctgcacgacgaccggattgtcctggtggctgagcagcggccggatgcctcggaggaggacagcttccagtggatgagccgtgtgctgcaggccattgatagcatccaccaggtgggcgtgtactgtctggccctggttcctgccaacaccttgcccaaggctcctctcggagggattcacatttctgaaaccaaacagcgctttctggaagggacgctgcacccgtgtaatgtgctgatgtgccctcacacctgtgttaccaacctccccaaacctcgtcagaaacaaccagaggttggaccagcctcaatgatcgtggggaacctggttgctgggaagagaatcgctcaggcttccgggagagagctcgcccacctggaggacagcgaccaggcacggaagttcctgttcctggctgacgtgctgcagtggcgtgcccacaccactcctgaccacccgctgttcttgctgctgaacgccaagggcaccgtcacaagcactgcaacctgtgtccagctgcacaaaagggctgagagagtggccgcggctctgatggagaagggaagactgagtgttggggaccatgtggctctggtctacccaccaggggtggacctcattgccgcgttctatggctgcttgtactgtggctgcgtgcctgtcaccgtgcggcccccgcaccctcagaacctcggcaccacactgcccaccgtcaagatgatcgtggaggtcagcaagtctgcatgcgtcctcaccacgcaggctgtcacacggctgctcaggtccaaggaggctgctgctgccgtggacatcaggacctggcccaccatcctagacacagatgacatcccaaaaaagaagatagcaagcgttttcaggcccccctcccccgatgtcctcgcatacttggacttcagcgtgtcaaccactgggatattagcgggagtgaagatgtcgcacgcggccacaagcgccttatgccgctccataaagctgcagtgtgagctgtacccctcgcggcagatcgccatctgcctcgacccctactgtggccttggttttgccctgtggtgtctgtgcagtgtctactcgggacaccaatcagtgctggtgcccccgctggagctggagagcaacgtgtccctgtggctgtcggccgtcagccagtacaaggcccgcgtcaccttctgctcctactctgtgatggagatgtgcaccaagggcctaggcgcacagacgggtgtcctcaggatgaagggggtgaacctgtcatgtgtgcgcacgtgcatggtggtcgccgaggagcggcccaggattgcgctgacccagtccttctccaagctcttcaaggacctgggcctgccggcccgcgccgtaagcaccacgttcgggtgcagggtcaacgtggccatctgcctccagggcacagctggcccggaccccacaaccgtctacgtggacatgcgggcactgcgccatgacagggttcgtttggtagaacggggttctccgcacagcctgccattgatggagtctggaaagatcctccccggcgtgaaggtcatcatcgcacacaccgagaccaaaggacccttgggagactcacacctgggagagatctgggtaagcagcccccacaatgccaccgggtactacaccgtttacggggaggaggcgcttcatgccgaccacttcagtgcccggctgagttttggagacacacagaccatctgggcaaggaccggctaccttggcttccttcggcgaacagagctcactgatgccagtggagggcggcacgatgcactgtatgtggttgggtctctggatgaaactctggagctcagaggcatgcggtaccaccccatcgacattgagacctctgtcatccgagcacacaggagcatcgctgagtgtgccgtattcacctggaccaacctgctggtggtggtggtggagctggatgggctagagcaggatgccctggacctggtggccctggtgaccaacgtggtgctggaggagcactacctggtcgtgggagtggtggtcatcgtggacccaggggtgatccctatcaactctcggggtgagaagcagcgcatgcacctgcgggacggcttcctggctgaccagctggaccccatctatgtcgcctacaacatgtgagcgcagcacaccggcccaggtgccggagatgaatgagccccagcagtccaaggtgtgatgtgggaagacaccgcagagctcactcaccgggactcgcccttcctgtgctcttacagatccctctcaacaatccccgcatctccttttagaaagcacttcctgaattatttaaagaaatattttgaatctgccaagtacatttacaaaaacacggatgctggtattttaacagatggagagacaaggaaaggaaaggaaaggcctggcatgggcattgtgaggaatcacaggcaccgaggttgttctctgctgtactgcaagtttgcactttctttaggctaaaaatatagttcctgatttttaaaattcagttatttattcccacttcaaatgacaagttcatatatagaatttacgggagaaacttgagaccatttacggggagaaacttgattctgggaagatagcagagtacaaaccagctgcctcacttctgtttcacagggaggctgatggaaaaaggaagcaagctggacccatcctccctgctcacagagggcactgtggtcacacacagtgcctcctctgccagttcctttattgaaagaggtgtgctggctggccacggtggcttacacctgtaatcccagcactttgggaggccgaggcgagcagatcacgaggtcaggagaccgagaccatcctggctaacatggtgaaaccctgtctctactaaaaatacaaaaaattagccgggtgtggtggtgggcgcctgtagtcccagctacttgggaggctgaggcaggagaatggtatgaaccagggaggcggagcttgcagtgagccgagatcacgctactgcactccagcctgggtgacagcacgagatgccgtcttaaaaaaacaaaaaagaggtgtgctgcttgtcagcatgtattgtcacggacactcaataagtgccattttggactgtcaaatttagatgctttgtttcagaaagataagccagcatttagttttaaatcactttcctggtttgtaacttgatgctgtttagttaaattg

SEQ ID NO: 11928 - DNA, 2903 bp, Homo sapiens
gattgtgagatgtgtcagaacttcttcattgacagctgtgctgcccatgggccccctacatttgtaaaggacagtgcagtggacaaggggcaccccaaccgttcagccctcagtctgcccccagggctgagaattgggccatcaggcatccctcaggctgggcttggagtatggaatgaggcatctgatctgccgctgggtctgcactttggcccttatgagggccgaattacagaagacgaagaggcagccaacaatggatactcctggctggtaagaagagcctgccatttcaccaaggggagaaactgctatgagtatgtggatggaaaagataaatcctgggccaactggatgaggtatgtgaactgtgcccgggatgatgaagagcagaacctggtggccttccagtaccacaggcagatcttctatagaacctgccgagtcattaggccaggctgtgaactgctggtctggtatggggatgaatacggccaggaactgggcatcaagtggggcagcaagtggaagaaagaggaaccaaagccagagatccatccatgtccctcatgctgtctggccttttcaagtcagaaatttctcagtcaacatgtagaacgcaatcactcctctcagaacttcccaggaccatctgcaagaaaactcctccaaccagagaatccctgcccaggggatcagaatcaggagcagcaatatccagatccacacagccgtaatgacaaaaccaaaggtcaagagatcaaagaaaggtccaaactcttgaataaaaggacatggcagagggagatttcaagggccttttctagcccacccaaaggacaaatggggagctgtagagtgggaaaaagaataatggaagaagagtccagaacaggccagaaagtgaatccagggaacacaggcaaattatttgtgggggtaggaatctcaagaattgcaaaagtcaagtatggagagtgtggacaaggtttcagtgttaaatcagatgttattacacaccaaaggacacatacaggggagaagctctacgtctgcagggagtgtgggcggggctttagctggaagtcacacctcctcattcaccagaggatacacacaggggagaagccctatgtctgcagggagtgtgggcggggctttagctggcagtcagtcctcctcactcaccagaggacacacacaggggagaagccctatgtctgcagggagtgtgggcggggctttagccggcagtcagtcctcctcactcaccagaggagacacacaggggagaagccctatgtctgcagggagtgtgggcggggctttagccggcagtcagtcctcctcactcaccagaggagacacacaggggagaagccctatgtctgcagggagtgtgggcggggctttagctggcagtcagtcctcctcactcaccagaggacacacacaggggagaagccctatgtctgcagggagtgtgggcggggctttagctggcagtcagtcctcctcactcaccagaggacacacacaggggagaagccctatgtctgcagggagtgtgggcggggctttagcaataagtcacacctcctcagacaccagaggacacacacaggggagaagccctatgtctgcagggagtgtgggcggggctttcgcgataagtcacacctcctcagacaccagaggacacacacaggggagaagccctatgtctgcagggagtgtgggcggggctttagagataagtcaaacctcctcagtcaccagaggacacacacaggggagaagccctatgtctgcagggagtgtgggcggggctttagcaataagtcacacctcctcagacaccagaggacacacacaggggagaagccctatgtctgcagggagtgtgggcggggctttcgcaataagtcacacctcctcagacaccagaggacacacacaggggagaagccctacgtctgcagggagtgtgggcggggctttagcgataggtcaagcctctgctatcaccagaggacacacacaggggagaagccctacgtctgcagggaggatgagtaagtcattagtaataaaacctcatctcaatagccacaaaaagacaaatgtggtcaccacacacttgcacaccccagctgtgaggtggcttcagcggaagtctgctgaccccttatattccccgagagtataaagagatcggaaataactgattaaacaaatccgccactttcatgactagagatgaggaagaacaagggatagttctgtaagtgttcgggggacatcagcatgtgtggttctttcccgcactgatcccctccattttttgtttgtttttttgcctcctgttctaataaattttgtctccatacaaatctgaaccccaagtgtgtacctcattcttcccttatcactgaaggcaagaagagtccagaagggccacagagaactcatgtgttcagctcaagactccacaggaattcaacccccagaaagacataaacttggagtccgtctggtttaattattggagaatcgattcccaagtccaggaagagaaatgtaagattctagaaagtcgcagcaggaaagggagttccctggtctcctgggaagtgtggcttcttctcctaatggacacctctcctctgctgccatactctcccttggctccccagtctcctctcctgatctcctccaatctctgtagcccaagatgtgaaagccagacaagaacacgcgtgtgtgtatatatgtgttcgggtgtgggggtatgtgccctccgtgtaggtaactgtgtgagtgtggggggtttcaagggtgtgttaggaacaacgctcaaaatcctaaggaaactgaacactcgaacgaaggattcttagcaa

SEQ ID NO: 11929 - DNA, 2504 bp, Homo sapiens
atcattcccttactcgaatgaattaaagtacaggattggggctaaataatgtgagtgccacgctctttctgaagctcttatatcaaggaacatgcattacaactttcctaatccctgcttccctcacttccagattgtgagatgtgtcagaacttcttcattgacagctgtgctgctcatgggccccctacatttgtaaaggacagtgcagtggacaaggggcatcccaaccgttcagccctcagtctgcccccggggctgagaattgggccatcaggcatccctcaggctgggcttggagtatggaacgaggcatctgatctgccactgggtctgcactttggcccctatgagggccgaattacagaagacgaagaggcagccaacagtggatattcctggctaatcaccaaggggagaaactgctatgagtatgtggatggaaaagataaatcctcggccaactggatgagaaccaaagccagagatccatccatgtccctcatgctgtctggccttttcaagtcaaaaatttctcagtcaacatgtggaacgcaatcactcctctcagaacttcccaggaccatctgcaagaaaacttctccaaccagagaatccctgcccaggggatcagaatcaggagcggcaatattctgatccacgctgctgtaatgacaaaaccaaaggtcaagagatcaaagaaaggtccaaactcttgaataaaaggacatggcagagggagatttcaagggccttttctagcccacccaaaggacaaatggggagctctagagtgggagaaagaatgatggaagaagagtccagaacaggccagaaagtgaatccagggaacacaggcaaattatttgtgggggtaggaatctcaagaattgcgaaagtcaaatatggagagtgtgggcaaggtttcagtgataagtcagatgttattacacaccaaaggacacacacaggggggaagccctacgtctgcagagagtgtgggagggctttagccggaagtcagacctcctcagtcaccagaggacacacacaggggagaagccttatgtctgcagagagtgtgagcggggctttagccggaagtcagtcctcctcattcaccagaggacacacaggggagacgccccagtctgcaggaaggatgagtaagtcattagtaataaaaccttatctcaatagccacaagaagacaaacgtgatcaccacacacttgcacaccccagctctgaggtggcttcagcgaaagtctgctaaccccttacattccccgagagtgtaaagagatcggaaataactaattaaacaaatccgccactttcatgactagagttgaggaagaacaggggatagttctgtaagtgttcgggggacgtcaacatgtgtggttgtttcccgcactgatcccctccattttttgtgttttgcctcctgttctaattaattttgtctccatacatatctgaaccccaagtgtgtacctcattcttcccttatcactgaaggaaggaagagtccagaagggccacagagaactcaaacgttcagttcaagtctccacaggaattcaaccccagaaagacataaacttggagtccatctggtttaattattggagaatcgattcccaagtccaggaagagaaatgtagggttttacagagtcgcagcaggaaagagagctccctggtctcctgggaagtgtgacctcttctaatggacccctctcctctgctgccatactcccccttggctccccctgtctcctctcctgatttcctccaatctctgtagccccagaagtgaacgccagacaggaacacgcatgtgtgtatatatgtgttcacgtgtgctatgtgtgttaagcctgcatgcatgggtgtgggggtatgtgccctctgtgtacgtatctgtgtgagtgtgggggtttcaagggtgtattaggaataacgctcaaaatcctaaggaaattgaatactctgagagaagagagacagaccctctcatactgttttatattgttttatactcagaaaaggaaaaagaagcaaaactaaaggcaggtagcctggcgcctaggaaccagacctgaaaccaaggaaccagacccgaaaccaggcctgggccggcctgacctaagcctggtagttaaaattcgacccctgacctagcaactgatgttatctatagattatagaaagacattgtgaaacttcccggtctgttctgttccactctgaccatcggtgcatgcagcccctgtcacctaccccctgcttgctcaatcgatcacgaccctctcacgtggacccccttagagttgtgagcccttaaaagggacaggaattgctcactcggggagctcggctcttgagacagcagtcttgctgatgctcctggccgaataaaccgcttccttctttaaaaaaaaaaaaaaaaaaaaaaaaaaaaaaaaaaaaaaaaaaaaaaaaaaaaaaaaaaaaaaaa

SEQ ID NO: 11930 - DNA, 2788 bp, Homo sapiens
gcggtagccacttcagaggaagctcggcggctgtggccgcggcgaacaggccggacgcctcgtcgctggcgggcttcccttggagctgacgaaggcggggtccgcggtccaggctgctgccgcgacggggccggcggcggggcagctgccaggaacgagggtagcagctgcatccagatctcattatgcatcagaaaaatgaaaaaacagaggaaaattctatggaggaaaggaatccacttagccttttctgagaaatggaatactgggtttggaggctttaagaagttttattttcaccaacacttgtgcattctgaaagctaagctgggaaggccagttacttggaatagacagttgagacatttccagggtagaaagaaagctcttcaaatccagaaaacgtggatcaaggatgaacacctttgtgctaagaccaagttcaatgtggctactcaaaatgttagtactttgtcctctaaagtgaaaagaaaggacgctaaacacttcatttcctcctcaaagactctcctgagactccaagcagagaagctgttgtcatcagcaaagaattctgaccatgaatactgcagagagaaaaatctcttgaaggcagttactgactttccatcaaatagtgctttaggtcaggccaatggtcacagacctaggacagacccacaaccttctgactttcccatgaagttcaatggggagagccaaagtccaggtgagagtggcacgattgtggtcaccttgaacaaccataagagaaagggcttttgttacggctgctgccaagggccggagcaccacaggaatgggggacccttgattccaaaaaagttccaacttaaccaacatagaaggataaaattatctcctcttatgatgtatgagaaattatccatgattagatttcggtacaggattctcagatcccagcacttcagaaccaaaagcaaggtttgcaagctaagaaaagcccagcgaagctgggtacagaaagtcactggggaccatcaagagacccgtagggagaacggtgagggtggcagttgcagcccatttccttccccagaacctaaagacccttcttgtcggcatcagccgtactttccagatatggacagcagtgctgtggtgaaggggacgaactctcatgtgcctgattgccacactaaaggaagctctttcttgggcaaggagcttagtttagacgaagcattccctgaccaacagaatggcagtgccacaaacgcctgggaccagtcatcctgttcttctcctaagtgggagtgtacagagctgattcatgacatccccttaccagaacatcgttctaataccatgttcatttcagaaactgaaagagaaattatgactctgggtcaggaaaatcagacaagttctgtcagtgatgacagagtaaaactgtcagtgtctggagcagatacatctgtgagtagcgtagatgggcctgtgtcccaaaaggctgttcaaaatgagaactcataccagatggaggaggatggatctctcaagcagagcattcttagttctgagttgctggaccacccttactgtaaaagtccactggaggctcccttggtgtgcagtggactcaaactagaaaatcaagtaggaggtggaaagaacagtcagaaagcctctccagtggatgatgaacagctgtcagtctgtctttctggattcctagatgaggttatgaagaagtatggcagtttggttccactcagtgaaaaagaagtccttggaagattaaaagatgtctttaatgaagacttttctaatagaaaaccatttatcaatagggaaataacaaactatcgggccagacatcaaaaatgtaacttccgtatcttctataataaacacatgctggatatggacgacctggcgactctggatggtcagaactggctgaatgaccaggtcattaatatgtatggtgagctgataatggatgcagtcccagacaaagttcacttcttcaacagcttttttcatagacagctggtaaccaaaggatataatggagtaaaaagatggactaaaaaggtggatttgtttaaaaagagtcttctgttgattcctattcacctggaagtccactggtctctcattactgtgacactctctaatcgaattatttcattttatgattcccaaggcattcattttaagttttgtgtagagaatataagaaagtatttgctgactgaagccagagaaaaaaatagacctgaatttcttcagggttggcagactgctgttacgaagtgtattccacaacagaaaaacgacagtgactgtggagtctttgtgctccagtactgcaagtgcctcgccttagagcagcctttccagttttcacaagaagacatgccccgagtgcggaagaggatttacaaggagctatgtgagtgccggctcatggactgaaactcagcagggactctgggaagtctgaccaagttggagcagatggtttgttacttgaatctccaaacacttagttgaatttttacagatatttcagatcagtggtgttgggccactattgttacctcaaatttattttttgcccttattcatttctccagctaccatgtactattgtttaatgttcagtttggtttcatttttaattttatggttctgtgcgtcccccatatttaatatttattattcaaacgcatgcatatagacagagcatgcagtgaagagtattaaaaaaaaaagcttagcaaaaaaaaaaaaaaaa

SEQ ID NO: 11931 - DNA, 1114 bp, Homo sapiens
ctcagcctccagagtagctgggattacaggcgcacgtcaccacacctggctaatttttgtatttttagtagagacggggtttctccatgttggtcaggctggtctcgaactcctgacctcgtgatccgcccgcctcggcctcccaaagtgctgggattacaggcgtgagccaccgtgcccggccgggaggtcactttaaggagggctgtccaactgcaaggagccgcaagcaggaagtgaaaccacagcacttcaaaaaaagagggagactgggacaagcgtatctaagaggctgaacatgaatccacagatcagaaatccgatggagcggatgtatcgagacacattctacgacaactttgaaaacgaacccatcctctatggtcggagctacacttggctgtgctatgaagtgaaaataaagaggggccgctcaaatctcctttgggacacaggggtctttcgaggcccggtactacccaaacgtcagtcgaatcacaggcaggaggtgtatttccggtttgagaaccacgcagaaatgtgcttcttatcttggttctgtggcaaccgactgcctgctaacaggcgcttccagatcacctggtttgtatcatggaacccctgcctgccctgtgtggtgaaggtgaccaaattcttggctgagcaccccaatgtcaccctgaccatctctgccgcccgcctctactactaccgggatagagattggcggtgggtgctcctcaggctgcataaggcaggggcccgtgtgaagatcatggactatgaaggtgagaggtgcaggggtcaggggagcatgacggggaggaacagcctcagagatggatggatctgcaatgccatggctgggggtgttccagggcagcctgcaggggtggggctggcactgattgcaactgacagccaggagaccaggcctgggagggcaggcccagggtcaggggagagcctgagtgcttcccacctcttcatctcagactttgcatactgctgggaaaactttgtgtgcaatgaaggtcagccattcatgccttggtacaaattcgatgacaattatgcatccctgcaccgcacgctaaaggagattctcaggtga

SEQ ID NO: 11932 - DNA, 6541 bp, Homo sapiens
agccgtttccggagtctgcgctgcgcccggttccgccattgcggctctcctggcccctggagcctccgcccccgacccgagctctttcgtctgcctgccagtttcctgcgtccccggagaggatcctgctgagcccagcctcccccctccccttctcctcctctcccttggagagcccgggcagccactgccccgcagccccagtgacaggaggagaccataacccccgacagcgccatggcccagattctgccaattcgttttcaggagcatctccagctccagaacctgggtatcaacccagcaaacattggcttcagtaccctgactatggagtctgacaaattcatctgcattagagaaaaagtaggagagcaggcccaggtggtaatcattgatatgaatgacccaagtaatccaattcgaagaccaatttcagcagacagcgccatcatgaatccagctagcaaagtaattgcactgaaagctgggaaaactcttcagatttttaacattgaaatgaaaagtaaaatgaaggctcataccatgactgatgatgtcaccttttggaaatggatctctttgaatacggttgctcttgttacggataatgcagtttatcactggagtatggaaggagagtctcagccagtgaaaatgtttgatcgccattctagccttgcagggtgccagattatcaattaccgtacagatgcaaaacaaaagtggttacttctgactggtatatctgcacagcaaaatcgtgtggtgggagctatgcagctatattctgtagataggaaagtgtctcagcccattgaaggacatgcagctagctttgcacagtttaagatggaaggaaatgcagaagaatcaacgttattttgttttgcagttcggggccaagctggagggaagttacatattattgaagttggcacaccacctacagggaaccagccctttccaaagaaggcagtggatgtcttctttcctccagaagcacaaaatgattttcctgttgcaatgcagatcagtgaaaagcatgatgtggtgttcttgataaccaagtatggttatatccacctctatgatcttgagactggtacctgcatctacatgaatagaatcagtggagaaacaatttttgttactgcacctcatgaagccacagctggaataattggagtaaacagaaagggacaagttctgtcagtgtgtgtggaagaagaaaacataattccttacatcaccaatgttctacaaaatcctgatttggctctgagaatggctgtacgtaataacttagccggtgctgaagaactctttgcccggaaatttaatgctctttttgcccagggaaattactcggaggcagcaaaggtggctgctaatgcaccaaagggaattcttcgtactccagacactatccgtcggttccagagtgtcccagcccagccaggtcaaacttctcctctacttcagtactttggtatccttttggaccagggacagctcaacaaatacgaatccttagagctttgtaggcctgtacttcagcaagggcgaaaacagcttttggagaaatggttaaaagaagataagctggaatgttctgaagaactgggtgatcttgtgaaatctgtggaccctacattggcacttagtgtgtacctaagggctaacgtcccaaataaagtcattcagtgctttgcagaaacaggtcaagtccaaaagattgttttatatgctaaaaaagttggatacactccagattggatatttctgctgagaaatgtaatgcgaatcagtccagatcagggacagcagtttgcccaaatgttagttcaagatgaagagcctcttgctgacatcacacagattgtagatgtctttatggaatacaatctaattcagcagtgtactgcattcttgcttgatgctctgaagaataatcgcccatctgaaggtcctttacagacgcggttacttgagatgaaccttatgcatgcgcctcaagttgcagatgctattctaggcaatcagatgttcacacattatgaccgggctcatattgctcaactgtgtgaaaaggctggcctactgcagcgtgcattagaacatttcactgatttatatgatataaaacgtgcagtggttcacacccatcttcttaaccctgagtggttagtcaactactttggttccttatcagtagaagactccctagaatgtctcagagccatgctgtctgccaacatccgtcagaatctgcagatttgtgttcaggtggcttctaaatatcatgaacaactgtcaactcagtctctgattgaactttttgaatctttcaagagttttgaaggtctcttttattttctgggatccattgttaactttagccaggacccagatgtgcactttaaatatattcaggcagcttgcaagactgggcaaatcaaagaagtagaaagaatctgtagagaaagcaactgctacgatcctgagcgagtcaagaattttcttaaggaagcaaaactaacagatcagctaccacttatcattgtgtgtgatcgatttgactttgtccatgatttggtgctctatttatatagaaataatcttcaaaagtatatagagatatatgtacagaaggtgaatccaagtcgacttcctgtagttattggaggattacttgatgttgactgttctgaagatgtcataaaaaacttgattcttgttgtaagaggtcaattctctactgatgagcttgttgctgaggttgaaaaaagaaacagattgaaactgcttctgccttggctagaggccagaattcatgagggctgtgaggagcctgctactcacaatgccttagccaaaatctacatagacagtaataacaacccggagagatttcttcgtgaaaatccctactatgacagtcgcgttgttggaaagtattgtgagaagagagatccacatctggcctgtgttgcttatgaacgtggccaatgtgatctggaacttattaatgtttgcaatgagaattccctcttcaaaagtctttctcgctacctggtacgtcgaaaggatccagaattgtggggcagcgtgctgctggaaagcaatccttacaggagacccctaattgaccaggttgtacaaacagctttgtctgagactcaggaccctgaagaagtgtcagtaactgtaaaggctttcatgactgcagaccttcctaatgaactcattgaactgctggagaaaattgtccttgataactctgtattcagtgaacacaggaatctgcaaaacctccttatcctcactgcaattaaggctgaccgtacacgtgttatggagtatattaaccgcctggataattatgatgccccagatattgccaatatcgccatcagcaatgagctgtttgaagaagcatttgccattttccggaaatttgatgtcaatacttcagcagttcaggtcttaattgagcatattggaaacttggatcgggcatatgagtttgctgaacgttgcaatgaacctgcggtctggagtcaacttgcaaaagcccagttgcagaaaggaatggtgaaagaagccattgattcttatatcaaagcagatgatccttcctcctacatggaagttgttcaggctgccaatactagtggaaactgggaagaactggtgaagtacttgcagatggcccgtaagaaggctcgagagtcctatgtggagacagaactgatattcgcactggctaaaacaaaccgccttgcagagttagaagaatttatcaatggaccaaataatgctcatatccaacaagttggtgaccgttgttatgatgaaaaaatgtatgatgctgctaagttgttgtacaataatgtttccaattttggacgtttggcatctaccctggttcacctgggtgaatatcaggcagctgttgatggggctaggaaagctaacagtactcgaacatggaaagaggtctgcttcgcctgtgtagatgggaaagaattccgtcttgctcagatgtgtggacttcatattgttgtacatgcagatgaattagaagaacttatcaactactatcaggatcgtggctattttgaagagctgatcaccatgttggaagcagcactgggacttgagcgagctcacatgggaatgtttactgaattagctattctatactctaaatttaagcctcagaaaatgagggagcacctggagctgttctggtctagagtgaatattcccaaggtgctaagagctgcagaacaagctcatctttgggcagaactggtgtttttgtatgacaagtatgaagaatatgataatgccataattaccatgatgaatcatccaactgatgcctggaaagaagggcaattcaaagatatcattaccaaggttgccaatgtggaactatactacagagcaatacagttctacttagaattcaagcctctgttgttaaatgatttgctgatggtgctgtctccacggttggatcacactcgtgcagtcaattatttcagcaaggttaaacagctaccactggtgaaaccgtatttgcgttcagttcagaaccataacaacaaatctgtgaatgaatcattgaacaatctttttattacagaagaagattatcaggctctgcgaacatcaatagatgcttatgacaactttgacaatatctcgcttgctcagcgtttggaaaaacatgaactcattgagttcaggagaattgctgcttatctcttcaaaggcaacaatcgctggaaacagagtgtagagctgtgcaagaaagacagcctttacaaggatgcaatgcagtatgcttctgaatctaaagatactgaattggctgaagaactcctgcagtggtttttgcaggaagaaaaaagagagtgctttggagcttgtctgtttacctgttacgatcttttaaggccagatgtcgtcctagaaactgcatggaggcacaatatcatggattttgccatgccctatttcatccaggtcatgaaggagtacttgacaaaggtggataaattagatgcttcagaatcactgagaaaagaagaagaacaagctacagagacacaacccattgtttatggtcagccccagttgatgctgacagcaggacccagtgttgccgtccctccccaggcaccttttggttatggttataccgcaccaccgtatggacagccacagcctggctttgggtacagcatgtgagatgaagcgctgatcctgtagtcacctattttcgtactgaaacatcgtctttacccacttctcagtttataatgggggaaaacaggcaacgtgttcttgtaacctttatttcatgaaggacttctttttgtttctaactataaacttggatcacctatgttaaaaccttatttcacattccacatcattttagaatttattttcgaaggggaatagtttcaatgttttattcacttgggctttttttcttccccctctttctttaaagaactgctcaatattcaatctgttgtgaagaacctgatttgcactctgtagtgtttaaagaaacaaagaaactctaatattgaatctcttaaatttagtgtatgtaaacagcttacaaatacgtattgtctaaatgcatttaaatctgttttattcaaagaaaagctaaagcaaaaacactggcatatgaccatgcaagactgtcagtgccaacaaagacaacactaatcagcacatcgtacactggattgcagtgcttcccagattattgaaaaatgttacagacaacttgcctgatttttaaatgagcgtaaaaggccctctaacctatgcaggtttccccattatgcatatagaaaatgctagtatgttttgctcacttcatatgtaacaggtgcccttatgttgtgctgtatcctgtgctttttctgtgggaccattccattcaggagcaaagagcaccatgattccaatcttgtgtgtgtttactaacccttccctgaggtttgtgtatgttggatattgtggtgttttagatcactgagtgtacagaagagagaaattcaaacaaaatattgctgttcttcagttttgtttgtggaatttgaaattactcaaatttaaaataaattactggactgtggaaataacatagaattgaagttttaattaaataccactcaaacgaaaagaacagtagtttttgtagttttatattggatactgaggcattagggaggcatgaaaggaagaggaatgaggattgagacatgtgaagacattgtgcattatatcaatgtgcattcctgtagttcattaacaaggtacatgcaatagtctaaagaaccagagtcactactatagtggcttaacatttaatctgtctccaatattttaaccaagtgacaccgaggtttttatcgaagcatttcacttaaatgaacaaatcatggctgttatattaacttgaaataaaatatatttaaacatgtaaaaaaaaaaaaaaaaa

SEQ ID NO: 11933 - DNA, 4253 bp, Homo sapiens
tcagacatggcggcggatctaaacctggagtggatctccctgccccggtcctggacttacgggatcaccaggggcggccgagtcttcttcatcaacgaggaggccaagagcaccacctggctgcaccccgtcaccggcgaggcggtggtcaccggacaccggcggcagagcacagatttgcctactggctgggaagaagcatatacttttgaaggtgcaagatactatataaaccataatgaaaggaaagtgacctgcaaacatccagtcacaggacaaccatcacaggacaattgtatttttgtagtgaatgaacagactgttgcaaccatgacatctgaagaaaagaaggaacggccaataagtatgataaatgaagcttctaactataacgtgacttcagattatgcagtgcatccaatgagccctgtaggcagaacttcacgagcttcaaaaaaagttcataattttggaaagaggtcaaattcaattaaaaggaatcctaatgcaccggttgtcagacgaggttggctttataaacaggacagtactggcatgaaattgtggaagaaacgctggtttgtgctttctgacctttgcctcttttattatagagatgagaaagaagagggtatcctgggaagcatactgttacctagttttcagatagctttgcttacctctgaagatcacattaatcgcaaatatgcttttaaggcagcccatccaaacatgcggacctattatttctgcactgatacaggaaaggaaatggagttgtggatgaaagccatgttagatgctgccctagtacagacagaacctgtgaaaagagtggacaagattacatctgaaaatgcaccaactaaagaaaccaataacattcccaaccatagagtgctaattaaaccagagatccaaaacaatcaaaaaaacaaggaaatgagcaaaattgaagaaaaaaaggcattagaagctgaaaaatatggatttcagaaggatggtcaagatagacccttaacaaaaattaatagtgtaaagctgaattctctgccatctgaatatgagagtgggtcagcatgccctgctcagactgtgcactacagaccaatcaacttgagcagttcagagaacaaaatagtcaatgttagcctggcagatcttagaggtggaaatcgccccaatacagggcccttatacacagaggccgatcgagtcatacagagaacaaattcaatgcagcagttggaacagtggattaaaatccagaaggggaggggtcatgaagaagaaaccaggggagtaatttcttaccaaacattaccaagaaatatgccaagtcacagagcccagattatggcccgctaccctgaaggttatagaacactcccaagaaacagcaagacaaggcctgaaagtatctgcagtgtaaccccttccactcatgacaagacattaggacccggagcggaggagaaacggaggtccatgagagatgacacaatgtggcagctctacgaatggcagcagcgtcagttttataacaaacagagcaccctccctcgacacagtactttgagtagtcccaaaaccatggtaaatatttctgaccagacaatgcactctattcccacatcaccttcccacgggtcaatagctgcttatcagggatactcccctcaacgaacttacagatcggaagtgtcttcaccaattcagagaggagatgtgacaatagaccgcagacacagggcccatcaccctaagcatgtctatgtgcctgacagaaggtcagtgccagctggcctgactttacagtctgttagtccccagagcctccaagggaaaacgctgtcacaagatgaaggtagaggcacattatacaaatacagacctgaagaagtagatattgatgccaagttaagccgattatgtgaacaagataaagtggtgcatgctctggaagagaaacttcagcaactccacaaggagaaatacacgcttgagcaagctttgctatcagccagccaagagatagaaatgcatgcagataacccagcagccattcagacagtggtgttacaaagggatgatttacaaaatggactgcttagtacgtgtcgagaactttctcgagccactgccgaattggaacgagcatggagagaatatgataagttagaatacgatgtaactgttaccaggaaccagatgcaagagcagctggatcaccttggtgaagttcagacggaatcagcaggaattcagcgtgcacagattcagaaagaactttggcgaattcaggatgtcatggaagggctgagtaaacataagcagcaaagaggtactacagaaataggtatgataggatcaaagcctttctcaacagttaagtacaaaaatgagggtccagattatagactctacaagagtgaaccagagttaacaacagtggcagaagttgatgaatctaatggagaagaaaaatcagaacctgtttcagagatagaaacttcagttgttaaaggttcccactttcctgttggagtagtccctccaagagcaaaatcaccaacacccgaatcttcgacaatagcttcctatgtaaccttgaggaaaactaagaagatgatggatctaagaacggaaagaccaagaagtgcagtggaacagctctgtttggctgaaagtactcgaccaaggatgactgtggaagagcaaatggaaagaataagaagacatcaacaagcgtgcctgagggagaagaaaaaagggttaaatgttatcggtgcttcagaccagtcacccttacaaagcccttcaaatttaagggataatccatttaggactactcagactcgaaggagggatgataaggaactggacactgccattagagaaaatgatgtaaagccagaccatgaaactcctgcaacagaaattgttcaactaaaagaaaccgaaccccaaaatgtggacttcagcaaagagttaaaaaaaactgaaaacatttcatatgaaatgctttttgaacctgagccaaatggagtaaattctgtggaaatgatggataaagaaagaaacaaagacaaaatgcctgaggatgttacattcagccctcaagatgaaacacagaccgcaaatcataaaccagaagagcatcctgaagaaaatacaaagaacagtgttgacgaacaggaagaaactgttatttcttacgaatcaactcctgaggtttctagaggaaatcaaacaatggcagtgaaaagtctgtccccatctcctgagtcctcggcatcgccagttccatccactcagccgcagctcacagaaggatcacatttcatgtgtgtgtagtcttagaagaactatactgacttctgttgaaaccattcaaagctaaagacatggaccttcagcagtgtaagaagatattgtacagtatattttaaatctatgaaattcatagttctgatgcttttggtcacagagcatcattttatcacttctggaaaatgtttattccaaaacagctttaatggcccatatgtacacttcgtaatctcaaggttattattctgacaccagcttgctgctatgatttcagagcacataagtaaaggtgctttttaatgtgcagtctatttccagagcttacttagttgctgatttccagatttcgatgtttcttaagtctaggtgaatttatatatatatttttttgcttttcattttctaaagttagttattatttccattgaagcttgttttctttttttcttcccattttagctactgcagtgcttttgtttcacacttgatttgtaaaaattttatatatatgtatttaaaatgtgccattttattgctaagtgaagtatgtcctgttttctgctataattctttctcggtcagattgcaatgtcagcagttactgccacactcctgtcagcttaaacacaaatgttactgcttatcttttcttaaaaaaaaaaaaaacaaagtgtaggtattttgaagtactgggcttatatttcattggaatacatgtgtacagcaataagcaggtttccaaatccggtacttagtttgtgtacaaatgtaattatgttcattgtgtatatattatacaatgagcacatgtaatgtattaaaggctacttactattgtttaaatgcaaatgttcatatctcatttctttttttatcatgttaaataaatgttgatgttcttaaaaaaaaaaaaaaaaaaa

SEQ ID NO: 11934 - DNA, 3531 bp, Homo sapiens
aaaaacttattagagctttctcaacctgcagccctcatctccgccggcgagtagggccaggtgttgggagctcccacgtgggacaagatggtgtcttcggcgcagatgggcttcaacctgcaggctctcctggagcagctcagccaggatgagttgagcaagttcaagtatctgatcacgaccttctccctggcacacgagctccagaagatcccccacaaggaggtagacaaggctgatgggaagcaactggtagaaatcctcaccacccattgtgacagctactgggtggagatggcgagcctccaggtctttgaaaagatgcaccgaatggatctgtctgagagagcaaaggatgaagtcagagaagcagctttgaaatcctttaataaaaggaaacctctatcattagggataacacggaaagaacgaccacctctagacgtggacgaaatgctggagcgcttcaaaacagaagcacaagcgtttacagaaacgaaaggaaatgtcatctgcctgggtaaagaagtctttaaaggaaaaaagccagacaaagacaataggtgcaggtatatattgaagacgaagttccgggagatgtggaagagctggcctggagatagcaaagaggtccaggttatggctgagagatacaagatgctgatcccattcagcaaccccagggtgcttcccgggcccttctcatacacggtggtgctgtatggtcctgcaggccttgggaaaaccacgctggcccagaaactaatgctagactgggcagaggacaacctcatccacaaattcaaatatgcgttctacctcagctgcagggagctcagccgcctgggcccgtgcagttttgcagagctggtcttcagggactggcctgaattgcaggatgacattccacacatcctagcccaagcacggaaaatcttgttcgtgattgacggctttgatgagctgggagccgcacctggggcgctgatcgaggacatctgcggggactgggagaagaagaagccggtgcccgtcctcctggggagtttgctgaacagggtgatgttacccaaggccgccctgctggtcaccacgcggcccagggccctgagggacctccggatcctggcggaggagccgatctacataagggtggagggcttcctggaggaggacaggagggcctatttcctgagacactttggagacgaggaccaagccatgcgtgcctttgagctaatgaggagcaacgcggccctgttccagctgggctcggcccccgcggtgtgctggatcgtgtgcacgactctgaagctgcagatggagaagggggaggacccggtccccacctgcctcacccgcacggggctgttcctgcgtttcctctgcagccggttcccgcagggcgcacagctgcggggcgcgctgcggacgctgagcctcctggccgcgcagggcctgtgggcgcagacgtccgtgcttcaccgagaggatctggaaaggctcggggtgcaggagtccgacctccgtctgttcctggacggagacatcctccgccaggacagagtctccaaaggctgctactccttcatccacctcagcttccagcagtttctcactgccctgttctacaccctggagaaggaggaggaagaggatagggacggccacacctgggacattggggacgtacagaagctgctttccggagtagaaagactcaggaaccccgacctgatccaagcaggctactactcctttggcctcgctaacgagaagagagccaaggagttggaggccacttttggctgccggatgtcaccggacatcaaacaggaattgctgcgatgcgacataagttgtaagggtggacattcaacggtgacagacctgcaggagctcctcggctgtctgtacgagtctcaggaggaggagctggtgaaggaggtgatggctcagttcaaagaaatatccctgcacttaaatgcagtagacgttgtgccatcttcattctgcgtcaagcactgtcgaaacctgcagaaaatgtcactgcaggtaataaaggagaatctcccggagaatgtcactgcgtctgaatcagacgccgaggttgagagatcccaggatgatcagcacatgcttcctttctggacggacctttgttccatatttggatcaaataaggatctgatgggtctagcaatcaatgatagctttctcagtgcctccctagtaaggatcctgtgtgaacaaatagcctctgacacctgtcatctccagagagtggtgttcaaaaacatttccccagctgatgctcatcggaacctctgcctagctcttcgaggtcacaagactgtaacgtatctgacccttcaaggcaatgaccaggatgatatgtttcccgcattgtgtgaggtcttgagacatccagaatgtaacctgcgatatctcgggttggtgtcttgttccgctaccactcagcagtgggctgatctctccttggcccttgaagtcaaccagtccctgacgtgcgtaaacctctccgacaatgagcttctggatgagggtgctaagttgctgtacacaactttgagacaccccaagtgctttctgcagaggttgtcgttggaaaactgtcaccttacagaagccaattgcaaggaccttgctgctgtgttggttgtcagccgggagctgacacacctgtgcttggccaagaaccccattgggaatacaggggtgaagtttctgtgtgagggcttgaggtaccccgagtgtaaactgcagaccttggtgctttggaactgcgacataactagcgatggctgctgcgatctcacaaagcttctccaagaaaaatcaagcctgttgtgtttggatctggggctgaatcacataggagttaagggaatgaagttcctgtgtgaggctttgaggaaaccactgtgcaacttgagatgtctgtggttgtggggatgttccatccctccgttcagttgtgaagacctctgctctgccctcagctgcaaccagagcctcgtcactctggacctgggtcagaatcccttggggtctagtggagtgaagatgctgtttgaaaccttgacatgttccagtggcaccctccggacactcaggttgaaaatagatgactttaatgatgaactcaataagctgctggaagaaatagaagaaaaaaacccacaactgattattgatactgagaaacatcatccctgggcagaaaggccttcttctcatgacttcatgatctgaatccccccgagtcattcattctccatgaagtcatcgattttccaggtgttggtgaactgcctgtgactcctctcctccccggcccctacccctcagggataatgagttcattgctgggctagatgttttagccatgattctgcctctgttttatacctgcacacatccttatctttgttacatatgaaatatctgtatcacgggtatattgagagaaataaaggtgagagcattcacaaaaaaaaaaaaaaaaaa

SEQ ID NO: 11935 - DNA, 3138 bp, Homo sapiens
cccgtgttctgcgttgccggccgtgggtgctctggccacagtgagttaggggcgtcggagcgggtttctccaaccgcaatcggctccgctcaaggggaggaggagagtcccttctcggaaggcctaaggaaacgtgtcgtctggaatgggcttgggggccacgcctgcacatctccgcgagacagagggataaagtgaagatggtgctgttattgttacctcgagtgccacatgcgacctctgagatatgtacacagtcattcttactatcgcactcagccattcttactacgctaaagaagaaataattattcgaggatatttgcctggcccagaagaaacttatgtaaatttcatgaactattatatccgttttcctcggagtgagagaaaactctttttagatatcatctgagaggtagttaatttggcaccatggggatacagggattgctacaatttatcaaagaagcttcagaacccatccatgtgaggaagtataaagggcaggtagtagctgtggatacatattgctggcttcacaaaggagctattgcttgtgctgaaaaactagccaaaggtgaacctactgataggtatgtaggattttgtatgaaatttgtaaatatgttactatctcatgggatcaagcctattctcgtatttgatggatgtactttaccttctaaaaaggaagtagagagatctagaagagaaagacgacaagccaatcttcttaagggaaagcaacttcttcgtgaggggaaagtctcggaagctcgagagtgtttcacccggtctatcaatatcacacatgccatggcccacaaagtaattaaagctgcccggtctcagggggtagattgcctcgtggctccctatgaagctgatgcgcagttggcctatcttaacaaagcgggaattgtgcaagccataattacagaggactcggatctcctagcttttggctgtaaaaaggtaattttaaagatggaccagtttggaaatggacttgaaattgatcaagctcggctaggaatgtgcagacagcttggggatgtattcacggaagagaagtttcgttacatgtgtattctttcaggttgtgactacctgtcatcactgcgtgggattggattagcaaaggcatgcaaagtcctaagactagccaataatccagatatagtaaaggttatcaagaaaattggacattatctcaagatgaatatcacggtaccagaggattacatcaacgggtttattcgggccaacaataccttcctctatcagctagtttttgatcccatcaaaaggaaacttattcctctgaacgcctatgaagatgatgttgatcctgaaacactaagctacgctgggcaatatgttgatgattccatagctcttcaaatagcacttggaaataaagatataaatacttttgaacagatcgatgactacaatccagacactgctatgcctgcccattcaagaagtcatagttgggatgacaaaacatgtcaaaagtcagctaatgttagcagcatttggcataggaattactctcccagaccagagtcgggtactgtttcagatgccccacaattgaaggaaaatccaagtactgtgggagtggaacgagtgattagtactaaagggttaaatctcccaaggaaatcatccattgtgaaaagaccaagaagtgcagagctgtcagaagatgacctgttgagtcagtattctctttcatttacgaagaagaccaagaaaaatagctctgaaggcaataaatcattgagcttttctgaagtgtttgtgcctgacctggtaaatggacctactaacaaaaagagtgtaagcactccacctaggacgagaaataaatttgcaacatttttacaaaggaaaaatgaagaaagtggtgcagttgtggttccagggaccagaagcaggtttttttgcagttcagattctactgactgtgtatcaaacaaagtgagcatccagcctctggatgaaactgctgtcacagataaagagaacaatctgcatgaatcagagtatggagaccaagaaggcaagagactggttgacacagatgtagcacgtaattcaagtgatgacattccgaataatcatattccaggtgatcatattccagacaaggcaacagtgtttacagatgaagagtcctactcttttgagagcagcaaatttacaaggaccatttcaccacccactttgggaacactaagaagttgttttagttggtctggaggtcttggagatttttcaagaacgccgagcccctctccaagcacagcattgcagcagttccgaagaaagagcgattcccccacctctttgcctgagaataatatgtctgatgtgtcgcagttaaagagcgaggagtccagtgacgatgagtctcatcccttacgagaaggggcatgttcttcacagtcccaggaaagtggagaattctcactgcagagttcaaatgcatcaaagctttctcagtgctctagtaaggactctgattcagaggaatctgattgcaatattaagttacttgacagtcaaagtgaccagacctccaagctatgtttatctcatttctcaaaaaaagacacacctctaaggaacaaggttcctgggctatataagtccagttctgcagactctctttctacaaccaagatcaaacctctaggacctgccagagccagtgggctgagcaagaagccggcaagcatccagaagagaaagcatcataatgccgagaacaagccggggttacagatcaaactcaatgagctctggaaaaactttggatttaaaaaattctgaaaagcttcctccttgtaagaaacccctgtccccagtcagagataacatccaactaactccagaagcggaagaggatatatttaacaaacctgaatgtggccgtgttcaaagagcaatattccagtaaatgcagactgctgcaaagcttttgcctgcaagagaatctgatcaatttgaagtccctgtttgggaatgaggcacttatcagcatgaagaattttttctcattctgtgccattttaaaaatagaatacattttgtatattaactttaaaaaaaaaaaaaaaaaaa

SEQ ID NO: 11936 - DNA, 3140 bp, Homo sapiens
cccgtgttctgcgttgccggccgtgggtgctctggccacagtgagttaggggcgtcggagcgggtttctccaaccgcaatcggctccgctcaaggggaggaggagagtcccttctcggaaggcctaaggaaacgtgtcgtctggaatgggcttgggggccacgcctgcacatctccgcgagacagagggataaagtgaagatggtgctgttattgttacctcgagtgccacatgcgacctctgagatatgtacacagtcattcttactatcgcactcagccattcttactacgctaaagaagaaataattattcgaggatatttgcctggcccagaagaaacttatgtaaatttcatgaactattatatccgttttcctcggagtgagagaaaactctttttagatatcatctgagaggtagttaatttggcaccatggggatacagggattgctacaatttatcaaagaagcttcagaacccatccatgtgaggaagtataaagggcaggtagtagctgtggatacatattgctggcttcacaaaggagctattgcttgtgctgaaaaactagccaaaggtgaacctactgataggtatgtaggattttgtatgaaatttgtaaatatgttactatctcatgggatcaagcctattctcgtatttgatggatgtactttaccttctaaaaaggaagtagagagatctagaagagaaagacgacaagccaatcttcttaagggaaagcaacttcttcgtgaggggaaagtctcggaagctcgagagtgtttcacccggtctatcaatatcacacatgccatggcccacaaagtaattaaagctgcccggtctcagggggtagattgcctcgtggctccctatgaagctgatgcgcagttggcctatcttaacaaagcgggaattgtgcaagccataattacagaggactcggatctcctagcttttggctgtaaaaaggtaattttaaagatggaccagtttggaaatggacttgaaattgatcaagctcggctaggaatgtgcagacagcttggggatgtattcacggaagagaagtttcgttacatgtgtattctttcaggttgtgactacctgtcatcactgcgtgggattggattagcaaaggcatgcaaagtcctaagactagccaataatccagatatagtaaaggttatcaagaaaattggacattatctcaagatgaatatcacggtaccagaggattacatcaacgggtttattcgggccaacaataccttcctctatcagctagtttttgatcccatcaaaaggaaacttattcctctgaacgcctatgaagatgatgttgatcctgaaacactaagctacgctgggcaatatgttgatgattccatagctcttcaaatagcacttggaaataaagatataaatacttttgaacagatcgatgactacaatccagacactgctatgcctgcccattcaagaagtcatagttgggatgacaaaacatgtcaaaagtcagctaatgttagcagcatttggcataggaattactctcccagaccagagtcgggtactgtttcagatgccccacaattgaaggaaaatccaagtactgtgggagtggaacgagtgattagtactaaagggttaaatctcccaaggaaatcatccattgtgaaaagaccaagaagtgcagagctgtcagaagatgacctgttgagtcagtattctctttcatttacgaagaagaccaagaaaaatagctctgaaggcaataaatcattgagcttttctgaagtgtttgtgcctgacctggtaaatggacctactaacaaaaagagtgtaagcactccacctaggacgagaaataaatttgcaacatttttacaaaggaaaaatgaagaaagtggtgcagttgtggttccagggaccagaagcaggtttttttgcagttcagattctactgactgtgtatcaaacaaagtgagcatccagcctctggatgaaactgctgtcacagataaagagaacaatctgcatgaatcagagtatggagaccaagaaggcaagagactggttgacacagatgtagcacgtaattcaagtgatgacattccgaataatcatattccaggtgatcatattccagacaaggcaacagtgtttacagatgaagagtcctactcttttgagagcagcaaatttacaaggaccatttcaccacccactttgggaacactaagaagttgttttagttggtctggaggtcttggagatttttcaagaacgccgagcccctctccaagcacagcattgcagcagttccgaagaaagagcgattcccccacctctttgcctgagaataatatgtctgatgtgtcgcagttaaagagcgaggagtccagtgacgatgagtctcatcccttacgagaaggggcatgttcttcacagtcccaggaaagtggagaattctcactgcagagttcaaatgcatcaaagctttctcagtgctctagtaaggactctgattcagaggaatctgattgcaatattaagttacttgacagtcaaagtgaccagacctccaagctatgtttatctcatttctcaaaaaaagacacacctctaaggaacaaggttcctgggctatataagtccagttctgcagactctctttctacaaccaagatcaaacctctaggacctgccagagccagtgggctgagcaagaagccggcaagcatccagaagagaaagcatcataatgccgagaacaagccggggttacagatcaaactcaatgagctctggaaaaactttggatttaaaaaagattctgaaaagcttcctccttgtaagaaacccctgtccccagtcagagataacatccaactaactccagaagcggaagaggatatatttaacaaacctgaatgtggccgtgttcaaagagcaatattccagtaaatgcagactgctgcaaagcttttgcctgcaagagaatctgatcaatttgaagtccctgtttgggaatgaggcacttatcagcatgaagaattttttctcattctgtgccattttaaaaatagaatacattttgtatattaactttaaaaaaaaaaaaaaaaaaa

SEQ ID NO: 11937 - DNA, 3245 bp, Homo sapiens
cccgtgttctgcgttgccggccgtgggtgctctggccacagtgagttaggggcgtcggagcgggtttctccaaccgcaatcggctccgctcaaggggaggaggagagtcccttctcggaaggcctaaggaaacgtgtcgtctggaatgggcttgggggccacgcctgcacatctccgcgagacagagggataaagtgaagatggtgctgttattgttacctcgagtgccacatgcgacctctgagatatgtacacagtcattcttactatcgcactcagccattcttactacgctaaagaagaaataattattcgaggatatttgcctggcccagaagaaacttatgtaaatttcatgaactattatatccgttttcctcggagtgagagaaaactctttttagatatcatctgagagaactagtgaatcccagtcactgagtggagttgagagtctaagaacctctgaaatttgagaactgctggaccagagcctttagagctctgataaggtgtcaacagggtagttaatttggcaccatggggatacagggattgctacaatttatcaaagaagcttcagaacccatccatgtgaggaagtataaagggcaggtagtagctgtggatacatattgctggcttcacaaaggagctattgcttgtgctgaaaaactagccaaaggtgaacctactgataggtatgtaggattttgtatgaaatttgtaaatatgttactatctcatgggatcaagcctattctcgtatttgatggatgtactttaccttctaaaaaggaagtagagagatctagaagagaaagacgacaagccaatcttcttaagggaaagcaacttcttcgtgaggggaaagtctcggaagctcgagagtgtttcacccggtctatcaatatcacacatgccatggcccacaaagtaattaaagctgcccggtctcagggggtagattgcctcgtggctccctatgaagctgatgcgcagttggcctatcttaacaaagcgggaattgtgcaagccataattacagaggactcggatctcctagcttttggctgtaaaaaggtaattttaaagatggaccagtttggaaatggacttgaaattgatcaagctcggctaggaatgtgcagacagcttggggatgtattcacggaagagaagtttcgttacatgtgtattctttcaggttgtgactacctgtcatcactgcgtgggattggattagcaaaggcatgcaaagtcctaagactagccaataatccagatatagtaaaggttatcaagaaaattggacattatctcaagatgaatatcacggtaccagaggattacatcaacgggtttattcgggccaacaataccttcctctatcagctagtttttgatcccatcaaaaggaaacttattcctctgaacgcctatgaagatgatgttgatcctgaaacactaagctacgctgggcaatatgttgatgattccatagctcttcaaatagcacttggaaataaagatataaatacttttgaacagatcgatgactacaatccagacactgctatgcctgcccattcaagaagtcatagttgggatgacaaaacatgtcaaaagtcagctaatgttagcagcatttggcataggaattactctcccagaccagagtcgggtactgtttcagatgccccacaattgaaggaaaatccaagtactgtgggagtggaacgagtgattagtactaaagggttaaatctcccaaggaaatcatccattgtgaaaagaccaagaagtgcagagctgtcagaagatgacctgttgagtcagtattctctttcatttacgaagaagaccaagaaaaatagctctgaaggcaataaatcattgagcttttctgaagtgtttgtgcctgacctggtaaatggacctactaacaaaaagagtgtaagcactccacctaggacgagaaataaatttgcaacatttttacaaaggaaaaatgaagaaagtggtgcagttgtggttccagggaccagaagcaggtttttttgcagttcagattctactgactgtgtatcaaacaaagtgagcatccagcctctggatgaaactgctgtcacagataaagagaacaatctgcatgaatcagagtatggagaccaagaaggcaagagactggttgacacagatgtagcacgtaattcaagtgatgacattccgaataatcatattccaggtgatcatattccagacaaggcaacagtgtttacagatgaagagtcctactcttttgagagcagcaaatttacaaggaccatttcaccacccactttgggaacactaagaagttgttttagttggtctggaggtcttggagatttttcaagaacgccgagcccctctccaagcacagcattgcagcagttccgaagaaagagcgattcccccacctctttgcctgagaataatatgtctgatgtgtcgcagttaaagagcgaggagtccagtgacgatgagtctcatcccttacgagaaggggcatgttcttcacagtcccaggaaagtggagaattctcactgcagagttcaaatgcatcaaagctttctcagtgctctagtaaggactctgattcagaggaatctgattgcaatattaagttacttgacagtcaaagtgaccagacctccaagctatgtttatctcatttctcaaaaaaagacacacctctaaggaacaaggttcctgggctatataagtccagttctgcagactctctttctacaaccaagatcaaacctctaggacctgccagagccagtgggctgagcaagaagccggcaagcatccagaagagaaagcatcataatgccgagaacaagccggggttacagatcaaactcaatgagctctggaaaaactttggatttaaaaaagattctgaaaagcttcctccttgtaagaaacccctgtccccagtcagagataacatccaactaactccagaagcggaagaggatatatttaacaaacctgaatgtggccgtgttcaaagagcaatattccagtaaatgcagactgctgcaaagcttttgcctgcaagagaatctgatcaatttgaagtccctgtttgggaatgaggcacttatcagcatgaagaattttttctcattctgtgccattttaaaaatagaatacattttgtatattaactttaaaaaaaaaaaaaaaaaaa

SEQ ID NO: 11938 - DNA, 6882 bp, Homo sapiens
gggagatttggacgctccggcctgggaggtgcgtcagatccgagctcgccatccagtttcctctccactagtccccccagttggagatctgggaccaacaaggcaccatggcgcagaagggccaactcagtgacgatgagaagttcctctttgtggacaaaaacttcatcaacagcccagtggcccaggctgactgggccgccaagagactcgtctgggtcccctcggagaagcagggcttcgaggcagccagcattaaggaggagaagggggatgaggtggttgtggagctggtggagaatggcaagaaggtcacggttgggaaagatgacatccagaagatgaacccacccaagttctccaaggtggaggacatggcggagctgacgtgcctcaacgaagcctccgtgctacacaacctgagggagcggtacttctcagggctaatatatacgtactctggcctcttctgcgtggtggtcaacccctataaacacctgcccatctactcggagaagatcgtcgacatgtacaagggcaagaagaggcacgagatgccgcctcacatctacgccatcgcagacacggcctaccggagcatgcttcaagatcgggaggaccagtccattctatgcacaggcgagtctggagccgggaaaaccgaaaacaccaagaaggtcattcagtacctggccgtggtggcctcctcccacaagggcaagaaagacacaagtatcacgggagagctggaaaagcagcttctacaagcaaacccgattctggaggctttcggcaacgccaaaacagtgaagaacgacaactcctcacgattcggcaaattcatccgcatcaacttcgacgtcacgggttacatcgtgggagccaacattgagacctatctgctagaaaaatcacgggcaattcgccaagccagagacgagaggacattccacatcttttactacatgattgctggagccaaggagaagatgagaagtgacttgcttttggagggcttcaacaactacaccttcctctccaatggctttgtgcccatcccagcagcccaggatgatgagatgttccaggaaaccgtggaggccatggcaatcatgggtttcagcgaggaggagcagctatccatattgaaggtggtatcatcggtcctgcagcttggaaatatcgtcttcaagaaggaaagaaacacagaccaggcgtccatgccagataacacagctgctcagaaagtttgccacctcatgggaattaatgtgacagatttcaccagatccatcctcactcctcgtatcaaggttgggcgagatgtggtacagaaagctcagacaaaagaacaggctgactttgctgtagaggctttggccaaggcaacatatgagcgccttttccgctggatactcacccgcgtgaacaaagccctggacaagacccatcggcaaggggcttccttcctggggatcctggatatagctggatttgagatctttgaggtgaactccttcgagcagctgtgcatcaactacaccaacgagaagctgcagcagctcttcaaccacaccatgttcatcctggagcaggaggagtaccagcgcgagggcatcgagtggaacttcatcgactttgggctggacctacagccctgcatcgagctcatcgagcgaccgaacaaccctccaggtgtgctggccctgctggacgaggaatgctggttccccaaagccacggacaagtctttcgtggagaagctgtgcacggagcagggcagccaccccaagttccagaagcccaagcagctcaaggacaagactgagttctccatcatccattatgctgggaaggtggactataatgcgagtgcctggctgaccaagaatatggacccgctgaatgacaacgtgacttccctgctcaatgcctcctccgacaagtttgtggccgacctgtggaaggacgtggaccgcatcgtgggcctggaccagatggccaagatgacggagagctcgctgcccagcgcctccaagaccaagaagggcatgttccgcacagtggggcagctgtacaaggagcagctgggcaagctgatgaccacgctacgcaacaccacgcccaacttcgtgcgctgcatcatccccaaccacgagaagaggtccggcaagctggatgcgttcctggtgctggagcagctgcggtgcaatggggtgctggaaggcattcgcatctgccggcagggcttccccaaccggatcgtcttccaggagttccgccaacgctacgagatcctggcggcgaatgccatccccaaaggcttcatggacgggaagcaggcctgcattctcatgatcaaagccctggaacttgaccccaacttatacaggatagggcagagcaaaatcttcttccgaactggcgtcctggcccacctagaggaggagcgagatttgaagatcaccgatgtcatcatggccttccaggcgatgtgtcgtggctacttggccagaaaggcttttgccaagaggcagcagcagctgaccgccatgaaggtgattcagaggaactgcgccgcctacctcaagctgcggaactggcagtggtggaggcttttcaccaaagtgaagccactgctgcaggtgacacggcaggaggaggagatgcaggccaaggaggatgaactgcagaagaccaaggagcggcagcagaaggcagagaatgagcttaaggagctggaacagaagcactcgcagctgaccgaggagaagaacctgctacaggaacagctgcaggcagagacagagctgtatgcagaggctgaggagatgcgggtgcggctggcggccaagaagcaggagctggaggagatactgcatgagatggaggcccgcctggaggaggaggaagacaggggccagcagctacaggctgaaaggaagaagatggcccagcagatgctggaccttgaagaacagctggaggaggaggaagctgccaggcagaagctgcaacttgagaaggtcacggctgaggccaagatcaagaaactggaggatgagatcctggtcatggatgatcagaacaataaactatcaaaagaacgaaaactccttgaggagaggattagtgacttaacgacaaatcttgcagaagaggaagaaaaggccaagaatcttaccaagctgaaaaacaagcatgaatctatgatttcagaactggaagtgcggctaaagaaggaagagaagagccgacaggagctggagaagctgaaacggaagctggagggtgatgccagcgacttccacgagcagatcgctgacctccaggcgcagatcgcagagctcaagatgcagctggccaagaaggaggaggagctgcaggcggccctggccaggcttgacgatgaaatcgctcagaagaacaatgccctgaagaagatccgggagctggagggccacatctcagacctccaggaggacctggactcagagcgggccgccaggaacaaggctgaaaagcagaagcgagacctcggcgaggagctggaggccctaaagacagagctggaagacacactggacagcacagccactcagcaggagctcagggccaagagggagcaggaggtgacggtgctgaagaaggccctggatgaagagacgcggtcccatgaggctcaggtccaggagatgaggcagaaacacgcacaggcggtggaggagctcacagagcagcttgagcagttcaagagggccaaggcgaacctagacaagaataagcagacgctggagaaagagaacgcagacctggccggggagctgcgggtcctgggccaggccaagcaggaggtggaacataagaagaagaagctggaggcgcaggtgcaggagctgcagtccaagtgcagcgatggggagcgggcccgggcggagctcaatgacaaagtccacaagctgcagaatgaagttgagagcgtcacagggatgcttaacgaggccgaggggaaggccattaagctggccaaggacgtggcgtccctcagttcccagctccaggacacccaggagctgcttcaagaagaaacccggcagaagctcaacgtgtctacgaagctgcgccagctggaggaggagcggaacagcctgcaagaccagctggacgaggagatggaggccaagcagaacctggagcgccacatctccactctcaacatccagctctccgactcgaagaagaagctgcaggactttgccagcaccgtggaagctctggaagaggggaagaagaggttccagaaggagatcgagaacctcacccagcagtacgaggagaaggcggccgcttatgataaactggaaaagaccaagaacaggcttcagcaggagctggacgacctggttgttgatttggacaaccagcggcaactcgtgtccaacctggaaaagaagcagaggaaatttgatcagttgttagccgaggagaaaaacatctcttccaaatacgcggatgagagggacagagctgaggcagaagccagggagaaggaaaccaaggccctgtccctggctcgggcccttgaagaggccttggaagccaaagaggaactcgagcggaccaacaaaatgctcaaagccgaaatggaagacctggtcagctccaaggatgacgtgggcaagaacgtccatgagctggagaagtccaagcgggccctggagacccagatggaggagatgaagacgcagctggaagagctggaggacgagctgcaagccacggaggacgccaaactgcggctggaagtcaacatgcaggcgctcaagggccagttcgaaagggatctccaagcccgggacgagcagaatgaggagaagaggaggcaactgcagagacagcttcacgagtatgagacggaactggaagacgagcgaaagcaacgtgccctggcagctgcagcaaagaagaagctggaaggggacctgaaagacctggagcttcaggccgactctgccatcaaggggagggaggaagccatcaagcagctacgcaaactgcaggctcagatgaaggactttcaaagagagctggaagatgcccgtgcctccagagatgagatctttgccacagccaaagagaatgagaagaaagccaagagcttggaagcagacctcatgcagctacaagaggacctcgccgccgctgagagggctcgcaaacaagcggacctcgagaaggaggaactggcagaggagctggccagtagcctgtcgggaaggaacgcactccaggacgagaagcgccgcctggaggcccggatcgcccagctggaggaggagctggaggaggagcagggcaacatggaggccatgagcgaccgggtccgcaaagccacacagcaggccgagcagctcagcaacgagctggccacagagcgcagcacggcccagaagaatgagagtgcccggcagcagctcgagcggcagaacaaggagctccggagcaagctccacgagatggagggggccgtcaagtccaagttcaagtccaccatcgcggcgctggaggccaagattgcacagctggaggagcaggtcgagcaggaggccagagagaaacaggcggccaccaagtcgctgaagcagaaagacaagaagctgaaggaaatcttgctgcaggtggaggacgagcgcaagatggccgagcagtacaaggagcaggcagagaaaggcaatgccagggtcaagcagctcaagaggcagctggaggaggcagaggaggagtcccagcgcatcaacgccaaccgcaggaagctgcagcgggagctggatgaggccacggagagcaacgaggccatgggccgcgaggtgaacgcactcaagagcaagctcaggcgaggaaacgagacctctttcgttccttctagaaggtctggaggacgtagagttattgaaaatgcagatggttctgaggaggaaacggacactcgagacgcagacttcaatggaaccaaggccagtgaataagcaactttctacagttttgcaccacggcaagaaaaccaaaaaccaaaacaaacaaacaaaaaaaacccaacaacaacccagaacaaagcaaaacccagcagactgtacttagcattgtctaaatccattctcaaattccaaatatcacagacacccctcacacaaggaatataaaaaccaccaccctccagcctgggcaacgtagtaaaacctcatctatacaagaatttaaaaataagctgggcgtggtggtacacacctgtggtcccagctactagggaggctgagccaggaagaacgctccagcccaggacttcgaggctgcaatgagctataattgcatcattgcactccagcctgggcaacagagaccctgtctcaaccaccaccaccaccaccacccctactacccctgtattcaaggtaaaaattgaagtttgtatgatgtaagagatgagaaaaacccaacaggaaacacagacacatcctccagttctatcaatggattgtgcagacactgagtttttagaaaaacatatccacggtaaccggtccctggcaattctgtttacatgaaatggggagaaagtcaccgaaatgggtgccgccggcccccactcccaattcattccctaacctgcaaacctttccaacttctcacgtcaggcctttgagaattctttccccctctcctggtttccacacctcagacacgcacagttcaccaagtgccttctgtagtcacatgaattgaaaaggagacgctgctcccacggaggggagcaggaatgctgcactgtttacaccctgactgtgcttaaaaacactttcactaataaatggttataaatcacaa

SEQ ID NO: 11939 - DNA, 6921 bp, Homo sapiens
gggagatttggacgctccggcctgggaggtgcgtcagatccgagctcgccatccagtttcctctccactagtccccccagttggagatctgggaccaacaaggcaccatggcgcagaagggccaactcagtgacgatgagaagttcctctttgtggacaaaaacttcatcaacagcccagtggcccaggctgactgggccgccaagagactcgtctgggtcccctcggagaagcagggcttcgaggcagccagcattaaggaggagaagggggatgaggtggttgtggagctggtggagaatggcaagaaggtcacggttgggaaagatgacatccagaagatgaacccacccaagttctccaaggtggaggacatggcggagctgacgtgcctcaacgaagcctccgtgctacacaacctgagggagcggtacttctcagggctaatatatacgtactctggcctcttctgcgtggtggtcaacccctataaacacctgcccatctactcggagaagatcgtcgacatgtacaagggcaagaagaggcacgagatgccgcctcacatctacgccatcgcagacacggcctaccggagcatgcttcaagatcgggaggaccagtccattctatgcacaggcgagtctggagccgggaaaaccgaaaacaccaagaaggtcattcagtacctggccgtggtggcctcctcccacaagggcaagaaagacacaagtatcacgggagagctggaaaagcagcttctacaagcaaacccgattctggaggctttcggcaacgccaaaacagtgaagaacgacaactcctcacgattcggcaaattcatccgcatcaacttcgacgtcacgggttacatcgtgggagccaacattgagacctatctgctagaaaaatcacgggcaattcgccaagccagagacgagaggacattccacatcttttactacatgattgctggagccaaggagaagatgagaagtgacttgcttttggagggcttcaacaactacaccttcctctccaatggctttgtgcccatcccagcagcccaggatgatgagatgttccaggaaaccgtggaggccatggcaatcatgggtttcagcgaggaggagcagctatccatattgaaggtggtatcatcggtcctgcagcttggaaatatcgtcttcaagaaggaaagaaacacagaccaggcgtccatgccagataacacagctgctcagaaagtttgccacctcatgggaattaatgtgacagatttcaccagatccatcctcactcctcgtatcaaggttgggcgagatgtggtacagaaagctcagacaaaagaacaggctgactttgctgtagaggctttggccaaggcaacatatgagcgccttttccgctggatactcacccgcgtgaacaaagccctggacaagacccatcggcaaggggcttccttcctggggatcctggatatagctggatttgagatctttgaggtgaactccttcgagcagctgtgcatcaactacaccaacgagaagctgcagcagctcttcaaccacaccatgttcatcctggagcaggaggagtaccagcgcgagggcatcgagtggaacttcatcgactttgggctggacctacagccctgcatcgagctcatcgagcgaccgaacaaccctccaggtgtgctggccctgctggacgaggaatgctggttccccaaagccacggacaagtctttcgtggagaagctgtgcacggagcagggcagccaccccaagttccagaagcccaagcagctcaaggacaagactgagttctccatcatccattatgctgggaaggtggactataatgcgagtgcctggctgaccaagaatatggacccgctgaatgacaacgtgacttccctgctcaatgcctcctccgacaagtttgtggccgacctgtggaaggacgtggaccgcatcgtgggcctggaccagatggccaagatgacggagagctcgctgcccagcgcctccaagaccaagaagggcatgttccgcacagtggggcagctgtacaaggagcagctgggcaagctgatgaccacgctacgcaacaccacgcccaacttcgtgcgctgcatcatccccaaccacgagaagaggtccggcaagctggatgcgttcctggtgctggagcagctgcggtgcaatggggtgctggaaggcattcgcatctgccggcagggcttccccaaccggatcgtcttccaggagttccgccaacgctacgagatcctggcggcgaatgccatccccaaaggcttcatggacgggaagcaggcctgcattctcatgatcaaagccctggaacttgaccccaacttatacaggatagggcagagcaaaatcttcttccgaactggcgtcctggcccacctagaggaggagcgagatttgaagatcaccgatgtcatcatggccttccaggcgatgtgtcgtggctacttggccagaaaggcttttgccaagaggcagcagcagctgaccgccatgaaggtgattcagaggaactgcgccgcctacctcaagctgcggaactggcagtggtggaggcttttcaccaaagtgaagccactgctgcaggtgacacggcaggaggaggagatgcaggccaaggaggatgaactgcagaagaccaaggagcggcagcagaaggcagagaatgagcttaaggagctggaacagaagcactcgcagctgaccgaggagaagaacctgctacaggaacagctgcaggcagagacagagctgtatgcagaggctgaggagatgcgggtgcggctggcggccaagaagcaggagctggaggagatactgcatgagatggaggcccgcctggaggaggaggaagacaggggccagcagctacaggctgaaaggaagaagatggcccagcagatgctggaccttgaagaacagctggaggaggaggaagctgccaggcagaagctgcaacttgagaaggtcacggctgaggccaagatcaagaaactggaggatgagatcctggtcatggatgatcagaacaataaactatcaaaagaacgaaaactccttgaggagaggattagtgacttaacgacaaatcttgcagaagaggaagaaaaggccaagaatcttaccaagctgaaaaacaagcatgaatctatgatttcagaactggaagtgcggctaaagaaggaagagaagagccgacaggagctggagaagctgaaacggaagctggagggtgatgccagcgacttccacgagcagatcgctgacctccaggcgcagatcgcagagctcaagatgcagctggccaagaaggaggaggagctgcaggcggccctggccaggcttgacgatgaaatcgctcagaagaacaatgccctgaagaagatccgggagctggagggccacatctcagacctccaggaggacctggactcagagcgggccgccaggaacaaggctgaaaagcagaagcgagacctcggcgaggagctggaggccctaaagacagagctggaagacacactggacagcacagccactcagcaggagctcagggccaagagggagcaggaggtgacggtgctgaagaaggccctggatgaagagacgcggtcccatgaggctcaggtccaggagatgaggcagaaacacgcacaggcggtggaggagctcacagagcagcttgagcagttcaagagggccaaggcgaacctagacaagaataagcagacgctggagaaagagaacgcagacctggccggggagctgcgggtcctgggccaggccaagcaggaggtggaacataagaagaagaagctggaggcgcaggtgcaggagctgcagtccaagtgcagcgatggggagcgggcccgggcggagctcaatgacaaagtccacaagctgcagaatgaagttgagagcgtcacagggatgcttaacgaggccgaggggaaggccattaagctggccaaggacgtggcgtccctcagttcccagctccaggacacccaggagctgcttcaagaagaaacccggcagaagctcaacgtgtctacgaagctgcgccagctggaggaggagcggaacagcctgcaagaccagctggacgaggagatggaggccaagcagaacctggagcgccacatctccactctcaacatccagctctccgactcgaagaagaagctgcaggactttgccagcaccgtggaagctctggaagaggggaagaagaggttccagaaggagatcgagaacctcacccagcagtacgaggagaaggcggccgcttatgataaactggaaaagaccaagaacaggcttcagcaggagctggacgacctggttgttgatttggacaaccagcggcaactcgtgtccaacctggaaaagaagcagaggaaatttgatcagttgttagccgaggagaaaaacatctcttccaaatacgcggatgagagggacagagctgaggcagaagccagggagaaggaaaccaaggccctgtccctggctcgggcccttgaagaggccttggaagccaaagaggaactcgagcggaccaacaaaatgctcaaagccgaaatggaagacctggtcagctccaaggatgacgtgggcaagaacgtccatgagctggagaagtccaagcgggccctggagacccagatggaggagatgaagacgcagctggaagagctggaggacgagctgcaagccacggaggacgccaaactgcggctggaagtcaacatgcaggcgctcaagggccagttcgaaagggatctccaagcccgggacgagcagaatgaggagaagaggaggcaactgcagagacagcttcacgagtatgagacggaactggaagacgagcgaaagcaacgtgccctggcagctgcagcaaagaagaagctggaaggggacctgaaagacctggagcttcaggccgactctgccatcaaggggagggaggaagccatcaagcagctacgcaaactgcaggctcagatgaaggactttcaaagagagctggaagatgcccgtgcctccagagatgagatctttgccacagccaaagagaatgagaagaaagccaagagcttggaagcagacctcatgcagctacaagaggacctcgccgccgctgagagggctcgcaaacaagcggacctcgagaaggaggaactggcagaggagctggccagtagcctgtcgggaaggaacgcactccaggacgagaagcgccgcctggaggcccggatcgcccagctggaggaggagctggaggaggagcagggcaacatggaggccatgagcgaccgggtccgcaaagccacacagcaggccgagcagctcagcaacgagctggccacagagcgcagcacggcccagaagaatgagagtgcccggcagcagctcgagcggcagaacaaggagctccggagcaagctccacgagatggagggggccgtcaagtccaagttcaagtccaccatcgcggcgctggaggccaagattgcacagctggaggagcaggtcgagcaggaggccagagagaaacaggcggccaccaagtcgctgaagcagaaagacaagaagctgaaggaaatcttgctgcaggtggaggacgagcgcaagatggccgagcagtacaaggagcaggcagagaaaggcaatgccagggtcaagcagctcaagaggcagctggaggaggcagaggaggagtcccagcgcatcaacgccaaccgcaggaagctgcagcgggagctggatgaggccacggagagcaacgaggccatgggccgcgaggtgaacgcactcaagagcaagctcagagggccccccccacaggaaacttcgcagtgatgcaccaggcgaggaaacgagacctctttcgttccttctagaaggtctggaggacgtagagttattgaaaatgcagatggttctgaggaggaaacggacactcgagacgcagacttcaatggaaccaaggccagtgaataagcaactttctacagttttgcaccacggcaagaaaaccaaaaaccaaaacaaacaaacaaaaaaaacccaacaacaacccagaacaaagcaaaacccagcagactgtacttagcattgtctaaatccattctcaaattccaaatatcacagacacccctcacacaaggaatataaaaaccaccaccctccagcctgggcaacgtagtaaaacctcatctatacaagaatttaaaaataagctgggcgtggtggtacacacctgtggtcccagctactagggaggctgagccaggaagaacgctccagcccaggacttcgaggctgcaatgagctataattgcatcattgcactccagcctgggcaacagagaccctgtctcaaccaccaccaccaccaccacccctactacccctgtattcaaggtaaaaattgaagtttgtatgatgtaagagatgagaaaaacccaacaggaaacacagacacatcctccagttctatcaatggattgtgcagacactgagtttttagaaaaacatatccacggtaaccggtccctggcaattctgtttacatgaaatggggagaaagtcaccgaaatgggtgccgccggcccccactcccaattcattccctaacctgcaaacctttccaacttctcacgtcaggcctttgagaattctttccccctctcctggtttccacacctcagacacgcacagttcaccaagtgccttctgtagtcacatgaattgaaaaggagacgctgctcccacggaggggagcaggaatgctgcactgtttacaccctgactgtgcttaaaaacactttcactaataaatggttataaatcacaa

SEQ ID NO: 11940 - DNA, 4675 bp, Homo sapiens
cagtagcatcgcccatttgccattcactgcagtagcaaaagtagtactctgtggtgggttaatcggtttgaggcagctccttaaatgaacatttgtgtttcatttttctgttattttcccgaacatgaaaagacgataaaactgaaatggaaaagatctattccagaggggagcttcaccacttcattgacggctttaatgaagagaaaagcaactggatgcgctatgtgaatccagcacactctccccgggagcaaaacctggctgcgtgtcagaacgggatgaacatctacttctacaccattaagcccatccctgccaaccaggaacttcttgtgtggtattgtcgggactttgcagaaaggcttcactacccttatcccggagagctgacaatgatgaatctcacacaaacacagagcagtctaaagcaaccgagcactgagaaaaatgaactctgcccaaagaatgtcccaaagagagagtacagcgtgaaagaaatcctaaaattggactccaacccctccaaaggaaaggacctctaccgttctaacatttcacccctcacatcagaaaaggacctcgatgactttagaagacgtgggagccccgaaatgcccttctaccctcgggtcgtttaccccatccgggcccctctgccagaagactttttgaaagcttccctggcctacgggatcgagagacccacgtacatcactcgctcccccattccatcctccaccactccaagcccctctgcaagaagcagccccgaccaaagcctcaagagctccagccctcacagcagccctgggaatacggtgtcccctgtgggccccggctctcaagagcaccgggactcctacgcttacttgaacgcgtcctacggcacggaaggtttgggctcctaccctggctacgcacccctgccccacctcccgccagctttcatcccctcgtacaacgctcactaccccaagttcctcttgcccccctacggcatgaattgtaatggcctgagcgctgtgagcagcatgaatggcatcaacaactttggcctcttcccgaggctgtgccctgtctacagcaatctcctcggtgggggcagcctgccccaccccatgctcaaccccacttctctcccgagctcgctgccctcagatggagcccggaggttgctccagccggagcatcccagggaggtgcttgtcccggcgccccacagtgccttctcctttaccggggccgccgccagcatgaaggacaaggcctgtagccccacaagcgggtctcccacggcgggaacagccgccacggcagaacatgtggtgcagcccaaagctacctcagcagcgatggcagcccccagcagcgacgaagccatgaatctcattaaaaacaaaagaaacatgaccggctacaagacccttccctacccgctgaagaagcagaacggcaagatcaagtacgaatgcaacgtttgcgccaagactttcggccagctctccaatctgaaggtccacctgagagtgcacagtggagaacggcctttcaaatgtcagacttgcaacaagggctttactcagctcgcccacctgcagaaacactacctggtacacacgggagaaaagccacatgaatgccaggtctgccacaagagatttagcagcaccagcaatctcaagacccacctgcgactccattctggagagaaaccataccaatgcaaggtgtgccctgccaagttcacccagtttgtgcacctgaaactgcacaagcgtctgcacacccgggagcggccccacaagtgctcccagtgccacaagaactacatccatctctgtagcctcaaggttcacctgaaagggaactgcgctgcggccccggcgcctgggctgcccttggaagatctgacccgaatcaatgaagaaatcgagaagtttgacatcagtgacaatgctgaccggctcgaggacgtggaggatgacatcagtgtgatctctgtagtggagaaggaaattctggccgtggtcagaaaagagaaagaagaaactggcctgaaagtgtctttgcaaagaaacatggggaatggactcctctcctcagggtgcagcctttatgagtcatcagatctacccctcatgaagttgcctcccagcaacccactacctctggtacctgtaaaggtcaaacaagaaacagttgaaccaatggatccttaagattttcagaaaacacttattttgtttcttaagttatgacttggtgagtcagggtgcctgtaggaagtggcttgtacataatcccagctctgcaaagctctctcgacagcaaatggtttcccctcacctctggaattaaagaaggaactccaaagttactgaaatctcagggcatgaacaaggcaaaggccatatatatatatatatatatatctgtatacatattatatatacttatttacacctgtgtctatatatttgcccctgtgtattttgaatatttgtgtggacatgtttgcatagccttcccattactaagactattacctagtcataattattttttcaatgataatccttcataatttattatacaatttatcattcagaaagcaataattaaaaaagtttacaatgactggaaagattccttgtaatttgagtataaatgtatttttgtcttgtggccattctttgtagataatttctgcacatctgtataagtacctaagatttagttaaacaaatatatgacttcagtcaacctctctctctaataatggtttgaaaatgaggtttgggtaattgccaatgttggacagttgatgtgttcattcctgggatcctatcatttgaacagcattgtacataacttgggggtatgtgtgcaggattacccaagaataacttaagtagaagaaacaagaaagggaatcttgtatatttttgttgatagttcatgtttttcccccagccacaattttaccggaagggtgacaggaaggctttaccaacctgtctctccctccaaaagagcagaatcctcccaccgccctgccctccccaccgagtcctgtggccattcagagcggccacatgacttttgcatccattgtattatcagaaaatgtgaagaagaaaaaaatgccatgttttaaaaccactgcgaaaatttccccaaagcataggtggctttgtgtgtgtgcgatttgggggcttgagtctgggtggtgttttgttgttggtttttgttgctttttttttttttttttttttaatgtcaaaattgcacaaacatggtgctctaccaggaaggattcgaggtagataggctcaggccacactttaaaaacaaacacacaaacaacaaaaaacgggtattctagtcatcttggggtaaaagcgggtaatgaacattcctatccccaacacatcaattgtattttttctgtaaaactcagattttcctcagtatttgtgtttttacattttatggttaatttaatggaagatgaaagggcattgcaaagttgttcaacaacagttacctcattgagtgtgtccagtagtgcaggaaatgatgtcttatctaatgatttgcttctctagaggagaaaccgagtaaatgtgctccagcaagatagactttgtgttattctatcttttattctgctaagcccaaagattacatgttggtgttcaaagtgtagcaaaaaatgatgtatatttataaatctatttataccactatatcatatgtatatatatttataaccacttaaattgtgagccaagccatgtaaaagatctactttttctaagggcaaaaaaaaaaaaaaaaaaaaaagaacactcctttctgagactttgcttaatacttggtgacctcacaatcacgtcggtatgattgggcacccttgcctactgtaagagaccctaaaaccttggtgcagtggtggggaccacaaaacaaccagggaggaagagatacatcattttttagtattaaggaccatctaagacagctctattttttttttgccactttatgattatgtggtcacacccaagtcacagaaataaaaaactgactttaccgctgcaatttttctgttttcctccttactaaatactgatacattactccaatctattttataattatatttgacattttgttcacatcaactaatgttcacctgtagaagagaacaaatttcgaataatccagggaaacccaagagccttactggtcttctgtaacttccaagactgacagctttttatgtatcagtgtttgataaacacagtccttaactgaaggtaaaccaaagcatcacgttgacattagaccaaatacttttgattcccaactactcgtttgttctttttctccttttgtgctttcccatagtgagaatttttataaagacttcttgcttctctcaccatccatccttctcttttctgcctcttacatgtgaatgttgagcccacaatcaacagtggttttattttttcctctactcaaagttaaaactgaccaaagttactggctttttactttgctagaacaacaaactatcttatgtttacatactggtttacaatgttatttatgtgcaaattgtcaaaatgtaaattaaatataaatgttcatgctttaccaaaaa

SEQ ID NO: 11941 - DNA, 5165 bp, Homo sapiens
gggaagccagacggttaacacagacaaagtgctgccgtgacactcggccctccagtgttgcggagaggcaagagcagcgaccgcggcacctgtccgcccggagctgggacgcgggcgcccgggcggccggacgaagcgaggagggaccgccgaggtgcgcgtctgtgcggctcagcctggcgggggacgcggggagaatgtggactgggtagagatgaacgagacttttctcagatgttggatatttgcttggaaaaacgtgtgggtacgaccttggctgcccccaagtgtaactccagcactgtgaggtttcagggattggcagaggggaccaaggggaccatgaaaatggacatggaggatgcggatatgactctgtggacagaggctgagtttgaagagaagtgtacatacattgtgaacgaccacccctgggattctggtgctgatggcggtacttcggttcaggcggaggcatccttaccaaggaatctgcttttcaagtatgccaccaacagtgaagaggttattggagtgatgagtaaagaatacataccaaagggcacacgttttggacccctaataggtgaaatctacaccaatgacacagttcctaagaacgccaacaggaaatatttttggaggatctattccagaggggagcttcaccacttcattgacggctttaatgaagagaaaagcaactggatgcgctatgtgaatccagcacactctccccgggagcaaaacctggctgcgtgtcagaacgggatgaacatctacttctacaccattaagcccatccctgccaaccaggaacttcttgtgtggtattgtcgggactttgcagaaaggcttcactacccttatcccggagagctgacaatgatgaatctcacacaaacacagagcagtctaaagcaaccgagcactgagaaaaatgaactctgcccaaagaatgtcccaaagagagagtacagcgtgaaagaaatcctaaaattggactccaacccctccaaaggaaaggacctctaccgttctaacatttcacccctcacatcagaaaaggacctcgatgactttagaagacgtgggagccccgaaatgcccttctaccctcgggtcgtttaccccatccgggcccctctgccagaagactttttgaaagcttccctggcctacgggatcgagagacccacgtacatcactcgctcccccattccatcctccaccactccaagcccctctgcaagaagcagccccgaccaaagcctcaagagctccagccctcacagcagccctgggaatacggtgtcccctgtgggccccggctctcaagagcaccgggactcctacgcttacttgaacgcgtcctacggcacggaaggtttgggctcctaccctggctacgcacccctgccccacctcccgccagctttcatcccctcgtacaacgctcactaccccaagttcctcttgcccccctacggcatgaattgtaatggcctgagcgctgtgagcagcatgaatggcatcaacaactttggcctcttcccgaggctgtgccctgtctacagcaatctcctcggtgggggcagcctgccccaccccatgctcaaccccacttctctcccgagctcgctgccctcagatggagcccggaggttgctccagccggagcatcccagggaggtgcttgtcccggcgccccacagtgccttctcctttaccggggccgccgccagcatgaaggacaaggcctgtagccccacaagcgggtctcccacggcgggaacagccgccacggcagaacatgtggtgcagcccaaagctacctcagcagcgatggcagcccccagcagcgacgaagccatgaatctcattaaaaacaaaagaaacatgaccggctacaagacccttccctacccgctgaagaagcagaacggcaagatcaagtacgaatgcaacgtttgcgccaagactttcggccagctctccaatctgaaggtccacctgagagtgcacagtggagaacggcctttcaaatgtcagacttgcaacaagggctttactcagctcgcccacctgcagaaacactacctggtacacacgggagaaaagccacatgaatgccaggtctgccacaagagatttagcagcaccagcaatctcaagacccacctgcgactccattctggagagaaaccataccaatgcaaggtgtgccctgccaagttcacccagtttgtgcacctgaaactgcacaagcgtctgcacacccgggagcggccccacaagtgctcccagtgccacaagaactacatccatctctgtagcctcaaggttcacctgaaagggaactgcgctgcggccccggcgcctgggctgcccttggaagatctgacccgaatcaatgaagaaatcgagaagtttgacatcagtgacaatgctgaccggctcgaggacgtggaggatgacatcagtgtgatctctgtagtggagaaggaaattctggccgtggtcagaaaagagaaagaagaaactggcctgaaagtgtctttgcaaagaaacatggggaatggactcctctcctcagggtgcagcctttatgagtcatcagatctacccctcatgaagttgcctcccagcaacccactacctctggtacctgtaaaggtcaaacaagaaacagttgaaccaatggatccttaagattttcagaaaacacttattttgtttcttaagttatgacttggtgagtcagggtgcctgtaggaagtggcttgtacataatcccagctctgcaaagctctctcgacagcaaatggtttcccctcacctctggaattaaagaaggaactccaaagttactgaaatctcagggcatgaacaaggcaaaggccatatatatatatatatatatatctgtatacatattatatatacttatttacacctgtgtctatatatttgcccctgtgtattttgaatatttgtgtggacatgtttgcatagccttcccattactaagactattacctagtcataattattttttcaatgataatccttcataatttattatacaatttatcattcagaaagcaataattaaaaaagtttacaatgactggaaagattccttgtaatttgagtataaatgtatttttgtcttgtggccattctttgtagataatttctgcacatctgtataagtacctaagatttagttaaacaaatatatgacttcagtcaacctctctctctaataatggtttgaaaatgaggtttgggtaattgccaatgttggacagttgatgtgttcattcctgggatcctatcatttgaacagcattgtacataacttgggggtatgtgtgcaggattacccaagaataacttaagtagaagaaacaagaaagggaatcttgtatatttttgttgatagttcatgtttttcccccagccacaattttaccggaagggtgacaggaaggctttaccaacctgtctctccctccaaaagagcagaatcctcccaccgccctgccctccccaccgagtcctgtggccattcagagcggccacatgacttttgcatccattgtattatcagaaaatgtgaagaagaaaaaaatgccatgttttaaaaccactgcgaaaatttccccaaagcataggtggctttgtgtgtgtgcgatttgggggcttgagtctgggtggtgttttgttgttggtttttgttgctttttttttttttttttttttaatgtcaaaattgcacaaacatggtgctctaccaggaaggattcgaggtagataggctcaggccacactttaaaaacaaacacacaaacaacaaaaaacgggtattctagtcatcttggggtaaaagcgggtaatgaacattcctatccccaacacatcaattgtattttttctgtaaaactcagattttcctcagtatttgtgtttttacattttatggttaatttaatggaagatgaaagggcattgcaaagttgttcaacaacagttacctcattgagtgtgtccagtagtgcaggaaatgatgtcttatctaatgatttgcttctctagaggagaaaccgagtaaatgtgctccagcaagatagactttgtgttattctatcttttattctgctaagcccaaagattacatgttggtgttcaaagtgtagcaaaaaatgatgtatatttataaatctatttataccactatatcatatgtatatatatttataaccacttaaattgtgagccaagccatgtaaaagatctactttttctaagggcaaaaaaaaaaaaaaaaaaaaaagaacactcctttctgagactttgcttaatacttggtgacctcacaatcacgtcggtatgattgggcacccttgcctactgtaagagaccctaaaaccttggtgcagtggtggggaccacaaaacaaccagggaggaagagatacatcattttttagtattaaggaccatctaagacagctctattttttttttgccactttatgattatgtggtcacacccaagtcacagaaataaaaaactgactttaccgctgcaatttttctgttttcctccttactaaatactgatacattactccaatctattttataattatatttgacattttgttcacatcaactaatgttcacctgtagaagagaacaaatttcgaataatccagggaaacccaagagccttactggtcttctgtaacttccaagactgacagctttttatgtatcagtgtttgataaacacagtccttaactgaaggtaaaccaaagcatcacgttgacattagaccaaatacttttgattcccaactactcgtttgttctttttctccttttgtgctttcccatagtgagaatttttataaagacttcttgcttctctcaccatccatccttctcttttctgcctcttacatgtgaatgttgagcccacaatcaacagtggttttattttttcctctactcaaagttaaaactgaccaaagttactggctttttactttgctagaacaacaaactatcttatgtttacatactggtttacaatgttatttatgtgcaaattgtcaaaatgtaaattaaatataaatgttcatgctttaccaaaaa

SEQ ID NO: 11942 - DNA, 4495 bp, Homo sapiens
gccggcgacgtcacgcggccgttacggcgctcaggcgtctcgacgcgcgcgatttaaaaccagctcaggagacgccaaggaaagatgggacctcccggcccagcactgccagccacaatgaataactcttcttcagagacgcgaggacacccccacagtgcctcctctccttcagagcgtgtgttcccgatgcccctgcccaggaaggcgcctctcaatattcctggcaccccagtcctcgaagactttcctcagaatgacgatgagaaggagcggctgcagcggaggcgctcgagggtctttgatctgcagttcagcactgactcacctcgcttattggcctccccctccagcaggagtattgacatttcagctactatccccaagtttacaaacacgcagattacggaacattactccacctgtatcaaactgtccactgaaaataaaatcactaccaagaatgcttttggtttgcacttgattgattttatgtcagagattcttaaacagaaagacaccgaaccaaccaactttaaagtggctgcgggtactctggatgccagcaccaagatctatgctgtgcgcgtggatgccgtccatgccgatgtatacagagtccttggggggctgggcaaagatgcaccgtctttggaagaagtagaaggccatgttgctgatggaagtgctactgaaatgggaacaaccaaaaaggctgtaaagccaaagaagaagcacttacacagaactattgagcagaacataaacaacctcaatgtctccgaagcagatcggaagtgtgagattgatcccatgtttcagaagacagcagcctcatttgatgagtgcagcacagcaggggtgtttctgtccactctccactgccaggactacagaagtgaactgctgtttccctctgatgtccagactctctccacgggagaacctctcgagttgccagagttaggttgtgtagaaatgacagatttaaaagcgcccttgcagcagtgtgcagaagatcgccagatctgcccttccctggccgggttccagtttacacagtgggacagtgaaacacataatgagtctgtgtcggccctggtagacaagtttaagaagaatgaccaggtatttgacatcaatgctgaagttgacgagagtgactgtggagacttccccgatgggtccctgggggatgactttgatgccaacgatgaacctgaccacaccgcagttggggatcatgaagagttcaggagctggaaggagccctgccaggttcagagctgccaggaagaaatgatttcccttggggatggagacatcaggaccatgtgcccccttctgtctatgaaacctggagaatattcttatttcagtcctcggaccatgtcgatgtgggctggcccggatcactggcgctttaggcctcgacgcaaacaagatgctccttcccaatcagaaaacaaaaagaagagtacaaaaaaagattttgaaattgactttgaagatgatattgactttgatgtatattttagaaaaacaaaggctgctactattctgaccaagtccactttggagaaccagaattggagagctaccacccttcctacagatttcaactacaatgttgacactctggtccagcttcacctcaaaccaggcaccaggttacttaagatggcccagggccatagggtagagactgagcattatgaagaaattgaagactatgattacaacaaccctaacgacacctccaacttttgccctggattacaggctgctgacagtgatgatgaagatttggatgacttatttgtgggacctgttgggaactctgacctctcaccttatccttgccatccacctaagacagcacaacagaatggtgacactccagaagcccaaggattagacatcacaacatatggggagtcaaacttggtagctgagcctcagaaggtaaataaaattgaaattcactatgccaagactgccaaaaagatggacatgaagaaactgaagcagagcatgtggagtctgctgacagcgctctccggaaaggaggcagatgcagaggcaaaccacagggaagctggaaaagaagcggccctggcagaagtggctgacgagaagatgcttagcgggctcacgaaggacctgcagaggagcctgccccctgtcatggctcagaacctctccatacctctggcttttgcctgtctcctacatttagccaatgaaaagaatctaaaactggaaggaacagaggacctctctgatgttcttgtgaggcaaggagattgagttcactatggagaagtcagcagcaggaggcccatcccttactcagttgccgggacatccccagtctcgggggaagaagatgccatgggcttatacccaggctgtagccaactaccaacgtgcctgtttgtttgttgctctttccttctctccatcatagtctgggtgccagcgccctgaagctccgtgctcaactgattaaactttactgccctatggtgaccatctaggagaggggagggcagagggggtgagggtactattctggattgagaaaacctatatccattctttatatcaatgtatagttttagtctcctaaattgatctgttattttccaaactattctcttgtagaaaattttccagtgggcacttaatggtgcccttgaagaacttcctaatccatgtacataaaatacatcatatgtacacttataaatgtatatagaatgctcaaaaataaaattcttaataatagaactggcaaaatatttgagtgtccactagatgagtatcagacctagtccttacccttagggggatgcagtcctggttgttatccaggatacacacctgtcagtataaggcagaagatgcctaagggccaagatggtttgcctcggaggagaatggaagagagagattgctgactggacattcagatgcaagactgggtcctgcttaaatcccaggattctgctggagggagctgatagtgatacttgtcccttctgtacattgcttcatgtagccttctcagcatccctaggagaaacttactattgtgactctcatgttggaggaggaaacggacacccaaggtagaggaacttgcaaaagggcagccggcaaactgtcaggggtggcctgagcctggcaatctgcctccagagtctgctctcggccattgtgctatgtgctacctggataggtcatacaggctcagcagtgggtggagagcagtgctcagatttgtccatctccacagaatgcagcacacacacaaatgtacaagttcttcccctaacctcagaggaataggggaattaactttgcttgcaatttggaacaatattatagatgttgatccaagtagttctgttactggctggtcctggatctctgccagaacacccgtcatcattgactggctaaatagagatcttggatataggccagaagcagtgaagtatataattggaaattgctcctgataataacttccttcttagccaaaaaccacacaaaacaaaaataatcccctccccacaggaatatgctttccaaattgtgtccaaaacattacctgctctgttatattgagaaggttagagacttcagagcatgcttagaaaaagcagtggtgccacaggtgagactccacactctgtcttgctggggctgaagcctccatcactttcccaggccaggttagtgctgggcttcttgctttccttctattcctgagagtagaactggctaagcccattccttccctcagtcagccccacttctctatagtgggttctgggggtggggggctgaattaccagtaaaactagaaagattgggaccaagtgcagtggcccacacctgtaaatcctagcgctttgaaaggaagaggcaggaggattgcttgaagtcaggagttcaagaccagcctgggcaaaatagaaccccatctttaaaaaaaaagtttaaaaattagccaggtacggaggtgtgtgcctgtaatcccagctactcagaaggctgaggtgggataatcacttgagcccaggagtttgaggctgcagtgagctgtgatcacactactgcattccagccaggacaacagagtgagatcctatctcttaaacaaaaaaaaaaactggcgagttcaataccaacttctacaatgaaatccccttccccccacaaccctgcttctcctaagtttccctcattacatggttgctgtgggctatgtgtgctgtggtctgaatgtttgtgtctaaaattcacatgttggtattaagagatagggcctttgggaggtgattaggttatgagggcagatccctcgtgaatgggattagtgctcttataaaagaggcctgaggaagcttgttcgttcctcttgcccttctgccatgtaaggatgcaatgagaaggcaccatctgtgagcaaggagcccctcac

SEQ ID NO: 11943 - DNA, 2355 bp, Homo sapiens
gtcgaccccgctgcacagtccggccggcgccatgaagctcaacgtggacgggctcctggtctacttcccgtacgactacatctaccccgagcagttctcctacatgcgggagctcaaacgcacgctggacgccaagggtcatggagtcctggagatgccctcaggcaccgggaagacagtatccctgttggccctgatcatggcataccagagagcatatccgctggaggtgaccaaactcatctactgctcaagaactgtgccagagattgagaaggtgattgaagagcttcgaaagttgctcaacttctatgagaagcaggagggcgagaagctgccgtttctgggactggctctgagctcccgcaaaaacttgtgtattcaccctgaggtgacacccctgcgctttgggaaggacgtcgatgggaaatgccacagcctcacagcctcctatgtgcgggcgcagtaccagcatgacaccagcctgccccactgccgattctatgaggaatttgatgcccatgggcgtgaggtgcccctccccgctggcatctacaacctggatgacctgaaggccctggggcggcgccagggctggtgcccatacttccttgctcgatactcaatcctgcatgccaatgtggtggtttatagctaccactacctcctggaccccaagattgcagacctggtgtccaaggaactggcccgcaaggccgtcgtggtcttcgacgaggcccacaacattgacaacgtctgcatcgactccatgagcgtcaacctcacccgccggacccttgaccggtgccagggcaacctggagaccctgcagaagacggtgctcaggatcaaagagacagacgagcagcgcctgcgggacgagtaccggcgtctggtggaggggctgcgggaggccagcgccgcccgggagacggacgcccacctggccaaccccgtgctgcccgacgaagtgctgcaggaggcagtgcctggctccatccgcacggccgagcatttcctgggcttcctgaggcggctgctggagtacgtgaagtggcggctgcgtgtgcagcatgtggtgcaggagagcccgcccgccttcctgagcggcctggcccagcgcgtgtgcatccagcgcaagcccctcagattctgtgctgaacgcctccggtccctgctgcatactctggagatcaccgaccttgctgacttctccccgctcaccctccttgctaactttgccacccttgtcagcacctacgccaaaggcttcaccatcatcatcgagccctttgacgacagaaccccgaccattgccaaccccatcctgcacttcagctgcatggacgcctcgctggccatcaaacccgtatttgagcgtttccagtctgtcatcatcacatctgggacactgtccccgctggacatctaccccaagatcctggacttccaccccgtcaccatggcaaccttcaccatgacgctggcacgggtctgcctctgccctatgatcatcggccgtggcaatgaccaggtggccatcagctccaaatttgagacccgggaggatattgctgtgatccggaactatgggaacctcctgctggagatgtccgctgtggtccctgatggcatcgtggccttcttcaccagctaccagtacatggagagcaccgtggcctcctggtatgagcaggggatccttgagaacatccagaggaacaagctgctctttattgagacccaggatggtgccgaaaccagtgtcgccctggagaagtaccaggaggcctgcgagaatggccgcggggccatcctgctgtcagtggcccggggcaaagtgtccgagggaatcgactttgtgcaccactacgggcgggccgtcatcatgtttggcgtcccctacgtctacacacagagccgcattctcaaggcgcggctggaatacctgcgggaccagttccagattcgtgagaatgactttcttaccttcgatgccatgcgccacgcggcccagtgtgtgggtcgggccatcaggggcaagacggactacggcctcatggtctttgccgacaagcggtttgcccgtggggacaagcgggggaagctgccccgctggatccaggagcacctcacagatgccaacctcaacctgaccgtggacgagggtgtccaggtggccaagtacttcctgcggcagatggcacagcccttccaccgggaggatcagctgggcctgtccctgctcagcctggagcagctagaatcagaggagacgctgaagaggatagagcagattgctcagcagctctgagtggggcgggtggggccataaacggttcctggtgactcctg

SEQ ID NO: 11944 - DNA, 5231 bp, Homo sapiens
agctgtcgtgcctcgtggtcccgggactgcagtggtgtgcgctctcggcgcgtggcgctaggcatggcgatggatcaagtaaacgcgctgtgcgagcagctggtgaaagcggtgacggtcatgatggaccccaactccacccagcgctaccggctggaagccctcaagttttgtgaggagtttaaagaaaagtgtcctatctgtgtcccctgtggcttgaggttggctgagaaaacacaagttgccatcgtcagacattttggccttcagatcctggaacacgttgtcaagtttcggtggaacggcatgtctcgattggagaaggtgtatctgaagaacagtgtcatggagctgattgcaaatggaacattgaacattttggaagaggagaaccatattaaagatgctctgtctcgaattgtagtggaaatgatcaagcgagagtggccacagcattggcctgacatgctaatagaattggacactctttccaaacaaggggaaacacagacagaattggtgatgtttatccttttgcgactggcagaggatgtagtgacttttcagacacttccccctcaaagaagaagggacatccagcaaacattaacccagaacatggaaaggatcttcagttttctgcttaacacacttcaagaaaatgtaaacaagtatcagcaagtgaagacagatacttctcaggagtcaaaggcgcaagcaaactgtcgagtaggagttgcagcactgaatactctagcaggctatattgactgggtgtctatgagtcacatcactgctgaaaactgtaaactcctggagatactgtgtttgctgttgaatgaacaggaacttcagttgggagccgctgagtgtcttctcattgcagtcagcagaaaaggcaagttggaagaccggaagcccttgatggtcttatttggagatgttgccatgcattatatactctccgccgcacagactgctgatggaggaggtttggtagaaaaacactacgtctttctgaagaggctctgtcaggtgttgtgtgcgctgggcaatcagctgtgtgcattgctgggtgcagattctgatgtagaaacaccatcaaactttggaaaatacctggaatcttttcttgctttcacaacccatccaagtcagtttctacgctcttcaactcagatgacttggggagccctcttcaggcatgaaatcctgtcccgtgatcctttgctattagcaataataccaaaatatcttcgtgcttccatgactaacttggtcaagatgggctttccttctaaaacagacagccctagctgtgaatattctcggtttgattttgatagcgatgaggacttcaatgctttcttcaactcctcccgagcacaacaaggagaggtgatgaggttggcatgtcgtttggatcccaaaactagcttccagatggctggggagtggctaaagtatcaactatcaacttttcttgatgctggttctgtgaattcttgttctgcagttggaactggagaaggaagcctctgttccgtcttctcaccttcattcgtgcagtgggaagccatgactctttttttggaaagtgttatcacccagatgtttcgaacactaaatagagaagaaattcctgttaatgatggaatagagctattgcagatggttctgaactttgataccaaggatcccctcatcctgtcctgcgtccttactaatgtctctgcactctttccatttgtcacctacagaccagagttcctgccccaggtcttctctaagctattttcatctgtcacttttgaaactgttgaagaaagtaaggcccccagaacccgggcagtgaggaatgtgaggaggcatgcttgttcctccatcatcaagatgtgtcgtgactacccccagcttgtgctgcccaattttgacatgctttataaccatgtgaagcaactcctctccaatgagctactcctgacacaaatggagaagtgtgccctcatggaagccctggttctcattagcaaccaatttaagaactacgagcgtcagaaggtgttcctagaggagctgatggcaccagtggccagcatctggctttctcaagacatgcacagagtgctgtcagatgttgatgctttcattgcgtatgtgggtacagatcagaagagctgtgacccaggcctggaggatccgtgtggcttaaaccgtgcacgaatgagcttttgtgtatacagcattctgggtgtggtgaaacgaacttgctggcccactgacctagaagaggccaaagctgggggatttgtggtgggttatacatccagtggaaatccaatcttccgtaacccctgcacagagcagattctgaaacttcttgacaatttgcttgcgcttataagaacccacaatacattatatgcaccagaaatgctagccaaaatggcagagcctttcaccaaggctctggatatgcttgacgcggaaaaatctgctatattaggattacctcaacctctcttggaactcaatgactctcctgtcttcaaaaccgtcttggaaagaatgcagcgtttcttctctaccctctatgaaaactgttttcatatcctagggaaggcaggcccttccatgcagcaagacttctatactgtggaggaccttgctacccagcttctcagctcagcctttgtcaacttgaacaatattcctgactaccgactcagacccatgcttcgtgtctttgtaaagcctctggtgctcttctgtcccccagagcactatgaagccctggtatcccccatcctcggacctcttttcacctacctccatatgaggctttctcagaaatggcaagttatcaaccaaaggagcctgctgtgtggagaagatgaggctgcagatgaaaacccagagtctcaagagatgctggaggagcaactggtgaggatgttaacccgagaagtcatggacctaatcacggtttgctgtgtttcaaagaagggtgctgaccacagtagtgctcccccagcagatggagacgatgaagaaatgatggccacagaggtcaccccctcagctatggcagagcttacagacctgggcaaatgtctgatgaagcatgaggatgtttgtacagcgctattaattacagccttcaattccctggcctggaaagatactctgtcctgccagaggacaacctcacagctctgctggcctctcctcaaacaagtgctgtcagggacactgctcgcagatgcagttacgtggcttttcaccagtgtgctgaaaggcttacagatgcacgggcagcacgacgggtgcatggcttccctggtccatctggccttccagatatatgaggcactgcgccccaggtacctggagataagagctgtaatggagcaaatccctgaaatacagaaggactcactggaccagtttgactgcaagcttttaaacccctccctgcagaaagtggctgacaagcgccgaaaggaccaattcaaacgcctcattgctggttgcattgggaaacccttgggagagcagttccgaaaagaagttcacattaagaatcttccctcacttttcaaaaaaacaaagccaatgctggagacggaggtgctggacaatgatgggggtggcctggccaccatctttgaaccctgaatcaagcttttgggcatccttcctcggcctttcttgtcatctcttctttccctttgtagccgatctctaggcccttcttgcactgccacctcactttccaccactgtcagcctggaaagagatccaggtctggagctggagagaacaggccctgtgcaggaccagaagtaattatactaaagtatcaagaaagggagttagggcttaaactattctgtctagatgtcccagatagttcccattctacttggagatttggcttttccaagaaaagctagagcagagcagcccttctcccacaagccctcccacccccgtgcagccacatacctgtacagaatggtaactaagggtgctgtgcccaaccctgcgactagcaaggctcgcagcaagagcacagccctcaactacttgtgccagagtttctcttggaccactccaactcccactgagcccttttgctgctgggctggcaggaaactttccccactccctaaggggcatgtctgggttaggtgctaagtgctgaagagaacttggtcagttctctcaactttgctttgggcaagaatctggtcacctgatgggatccatggtacaggctactgctaaacttggcacagtatcaagtatagtacctccaaggaccagggctgggaagtctttagtgctaacatcccctttagagttcacacatcttgcccttccatgaatgacccctcagtctggcctccccagcctcaaggtccactcaggcacaagagccacagtaccctagatagtgtcacatgacaccgttgtcatccaaggataatacagaccaactaggctacatctgtgatgagcagctagcaaagccgctggtcttctcctaggactaagtccaggtgccttccacaatctcatggtctttcaggtccctggttacttttctcaaaggccatttccaaaagaatacatgccttcacatcacaacctgtactgtgagtccattctagaggtcactgaaaggccctgtaaagagaggacatggatacgggacctggccctgaggttattactggccgtaaggcagagttaatccatacagaaaccagtgtgtccatgtgctctgcacaaaaacagacctgttgtccatccagtccactgacaagagggtttccccgagagccgaagtggactgaagctacagtttttagctggtgcgggccacaggcagggtcagattgagaagaagcaaagctggggaagcagaagttgggagtcttgtgttgctccctcttcctgtgtggtgctctgggtttctgtggatcgtgaaggcgatctcaagagtgtttccctccaaacctgatagctgcctattcctgtctggttggggctgtggaggatgtagttgtatttattgcattgtaatatttttaacatcctgtgacttcatgctagaaattttctattgtttatagaaactttttgtagaaacattaactctaaagcacatctgcatgtcagtaaaaatctcagtttcgtacagaaaaaaaaaaaaaaaaaaaaaa

SEQ ID NO: 11945 - DNA, 7495 bp, Homo sapiens
cgagggaagaggccggagggagatcgcggaggggagggggcgggaggggggtggggtatcctgagtcgtccgtggtccggagtctggaaggccctagagcggcgccagtcgacccgcctcgccacaacttgcccagaccagacacgtttcatcctgcgccctgcaagaaggagccggcctgcctctctccgctttgctgctcctcggcctccgcgggcccggcccgcgtcagcagcgaccctggggtctgggtcccctgtgtcgcccccgcccgcctgcagcgcccggcacccgcccaggagcgcgcagctggggttctagggacgtatacttgagcaagagagaccacagctcttgttcccgctgatcctgcagcccagtggatggagtccagaatctacagacctgccagaaaaaaaattcctgatgtctggtccaagcaggaattccccggtggattggggaatgtctggcttttcctcagcttattgatctctgtggtaaccactggaggcccccagaagacccatagaaatgagaggcctgaggtctacaagtcgctgctagaaatattttagcctctccaaagcccagaatgcagccccgacccaagtttgtaagggttctgggtgcacgctgaccctgcgcgggcagacgcgccctttgctccaggtccggacctgggcgctgctatagcaacgtcctggacgcccagaccttaggccgccgccgccgcggaagcgaggaacccggccttctcccgctcctgagggctgtggcggcggcggcccgggaggcggcccaggctgggtaaagaccgcccggctcctcctatgcaagctgaggcagcggattggttttcaagcatgcccttccagaagcatgtctactacccgctcgccagcggcccagaggggcccgacgtcgctgtggccgccgccgccgcgggtgcggcctccatggcctgtgcgccccccagcgcggcttcggggcccctgcccttcttccagttcaggccgcggctggagagtgtggactggcggcggctgagcgccatcgacgtggacaaggtggcgggggctgtggacgtgctgacgctgcaggagaacatcatgaacatcaccttctgcaagctggaagacgagaagtgcccacactgccagtcgggggtggacccggtgctgctgaagctcatccgtctggcgcagttcaccatcgagtacttgctgcactcacaagagttcctcacctcgcagctgcacaccctggaggagcggctgcgcctgagccactgcgacggcgagcagagcaagaagctgctcaccaagcaggcgggggagatcaagacgctcaaggaagagtgcaaacgccggaagaagatgatctccacccagcagctgatgatcgaggccaaagccaactattaccagtgccatttttgtgacaaggcctttatgaaccaagcttttctacaaagtcacattcaacgccgccacactgaagaaaattctcattttgagtatcagaaaaatgcacagattgagaagctccggagtgagatcgtcgtattgaaggaagagctgcagctcaccaggtctgagctagaggctgcacaccatgccagtgcagtcagattctccaaggaatatgaaatgcagaaaacaaaagaggaagactttttgaagttatttgacaggtggaaagaagaagaaaaggagaaactagttgatgaaatggaaaaagtcaaggagatgtttatgaaggaatttaaagaattaacttcgaagaattcagcattagaatatcaactgtcagaaatccagaagtccaatatgcagatcaagtccaacataggcacattaaaagatgcacacgagtttaaagaagaccgttctccatatccccaggatttccataatgtcatgcagcttcttgatagtcaggaaagcaaatggacagctcgagttcaagctattcatcaagaacacaagaaagagaagggtcggctcctgtcacatatagagaaacttcgaacctcaatgatagatgatctaaatgcaagcaatgttttctataagaaaaggatagaagagctagggcagagactccaggagcagaatgagctgattataactcagagacagcagattaaagactttacctgtaatccattaaacagtatcagtgaacccaaaggaaatcctttagcctggcaggcttttgaatctcagccagctgctccagctgtgcctatgaatgccccagccctgcacactttggaaactaaatcaagtctgccaatggtgcatgaacaggcattctcgtcgcacatactggaaccaatagaagaactttcagaggaagaaaaaggaagggaaaatgaacagaaattaaataacaacaaaatgcatttaaggaaagctttgaagagtaactcctccctcactaagggactaagaacaatggtggagcagaacttgatggagaaactggaaaccttggggattaatgcagatatacgtggcatttcaagtgatcagttgcatagagtactaaaaagtgtggaatcagaaagacataagcaagaaagagaaatacctaactttcatcaaattcgagaattccttgaacatcaagtcagctgtaaaattgaggagaaagcactactctcttcagatcagtgcagtgtttctcaaatggataccctttcaactggagaagtacccaaaatgatacaacttccttccaaaaacagacaactgattagacaaaaagctgtttctactgataggacatctgttccaaaaattaagaaaaatgtcatggaagatccttttcccagaaagtcttcaactattacgacccctccttttagttcagaggaggagcaggaggacgacgacctcatccgggcatacgcatccccaggcccacttcctgtgccgccaccacaaaacaagggcagcttcgggaagaacacagtgaaaagtgacgcggacgggaccgagggaagcgaaatcgaggacactgatgattctcccaagcccgcaggagtcgccgttaaaacacctactgaaaaagttgaaaagatgtttccacatcgcaaaaatgtgaacaaaccagtcggtggaactaatgtccctgagatgtttatcaaaaaagaagaattacaagaactaaagtgtgcggatgtggaggatgaagactgggacatatcatccctagaggaagagatatctttgggaaaaaaatctgggaaagaacagaaggaacctccacctgcgaaaaatgaaccacattttgctcatgtgctaaatgcctggggcgcatttaatcctaaggggccaaagggagaaggacttcaagaaaatgaatcaagcacattaaaaagcagcttagtaactgtgactgattggagcgacacttcagatgtctaattccacatgtcagaagattattccagaagccagcagtatttcagtatcacagtgtttcagtaatttgcctccatgattctagtgcttctgccttaccgtgtttcccacagcaacacagagactgattcaaagaacaatggtctctttaatggcacccaatacagtattgaaaatcagatcatcaacagtatttcgaagcatgtaaaggtgtttaagacttccgctgctgcttaaaaataacatgtcattgaagtcataaaaagttttttcttcagaaaggtactctagtgttaagtgtatttttttcaactaattttttagtgaattttttttaaacttacagcatgttttggtttgaattactaaaactttaaaaaatatttttcttatgtatgctgtcgtatcgtaggcgtttatattataaaattctgttagtagtcttaaaattgaattggtggaaccactaatccttaaaagttagtctggttatttttcatatagaagtaagtttaatccgagtgtggtggtgttcacctttaatcccagctacttgggaggctgaggtgggaggataacttgagcacaggagttcaagaccagcgtgggcaatatagcaagactccacccctccacaccccaaaaaagtaagtttaggattagaatatagctaggtccaatgttaaatacattttcctggagtacatttgtcacattcagctttgagccactgtaagcatgttactattaaatggttggttattttatatagcatattctttatcttggatattttatgaataaagtatagttattttaagtgccaattaatttatcagactaaatagaaaatatttgagccattactgaattcacatatgtatgtttttttttactatttaaaatacccaacatgtattatgaaatacctcaaaagtaatttagttacattcttaaacaatgacattgtcgaaagaaagttcttataagctgttttttgcatttttataacttggttatactatattctgtttccaagtaaccttttaactaaaagatttgttgggttttagatctcttttcatttgtcaaccttttcagtaaagccctctgttacatcactgtgactgtggctgtgttattagagatgaattctgagttaaatttgtacttattaggggtcttacagagggagaatctggccttgattgctatgccatatgacattctgtcctaatggttagaacaaatctttatctgtttccacccaccctgggatcctttttacttgtagcccattcctgccctctaaaagaatccttccaacttcctataggggccatttcatgcagatatactcactttatatgtatgtttctaaaagctttagtgaaggctgaatccaagtttcatgtagtaggacagagaacagaaggccgaatccaagtttcatgtggtaggacagagaacggcaatctacaaaactacaccaagcctaagatggcccatgtgccactttgttcattcatttatttattcagcagatatttattgaaccacttggtctggtttggttttgaacacgcactaattcatttaattacaacaactttgcgatgtagttattgttataatcctcatcctaaaggtgtgagaaacagagttattaagtaagttgccagaagccatacaagtacaaagtgtcaaggggagactttaagccaggtctctattccatgttttgtgtctgccatgttttcattcctgagcagaagagcttggggaaatgaacttttgctaagtaaacccagtatttaaattaagtcactatatctgtgtcttttaagagcccctcctttagcttacatggttagttgtatctttttttttttttttttttgagacagagtctcactatgttgcccaggcttgagcgcagtggcaccatctcggctcactacaacctccgcctcccagattcaagcgattttcctgcctcagcctcccaagtagctgggattacaggtgcccaccaccatgcctggcttaattttttgtatttttagtagagatgaggtttcaccatgttggccagactggtctcgaactcctgacctcaaatgatccgctgtcttgtcctcccaaagtgctgggattataggcgtgagccatcgcgccctgctgcatttcatttttttgtataaaatttggtttgttcgtttttgaggggaaccattcctttatgttgccccttactgatgcccaactaatgtgtttctggttactaacagaccttcatcccccaccctccctaaattcttcggtgtaatctaagcgttatctgcaccacttctgaataataaatgtgtttgaaatgcacacctacacaaccctgtcccacactggcctgtaggacctaatctaccttcatgtctttcagttgatttgtatttctgcaaaagatatttcaaggattatcaaggtatggaattttttttattttttatcttttaacaaacttgttcatttccttttctttccattgagcacctctgaacaatgtgattcttttttttaagtctttcacacttcaggaaaatactacattcacccacgttgtgattcatatcggacagtttcttactcaaagataacacaaataccaattcttattcatactttgaaactatattttaccctagactgccttggttcaaaggcctagtttcgacattactgtggcaaattatttaagctctctgttttcatttctttttctgtaaatgcaggatgaaaacaatatgtatctcctaggatggctgtgaggagtgagtgagacaggacatgaaaggtgtgtatgaactgtgataactgttgcccttgtgggcatgttatatagggctggctctaggaagaagcctgtgtcttttttcagaaatccctggagcaacttaaatgtctttagaaatgacaagtctctcagttatccagttagccgtaaacaggttctggaagacacacctagatagaactcggcccgtcagttctgagtgaggcacgtaccacttgggcttgggatgtccttaacccatttatgcctgaggttgcaattttttgaatttttccaatcacaccttggcgatgaccttgagcagtaggatataaataactcccacatgcttagtgttccaataatggaacactaggcataaacaggttttaattggctcctcagtcaaccatgaccaatatctctatctcagcttctgctgatgccctagctcagggctctgcattccgtgccagggacgcctcagccccttaacatggatgtgccacatgacaggcaataatatattggccccattagcccttcctggagcagtcataatgaattacagtcatgacaggcacatgtaagaaaccaaaatttgctaaatatgtacatgagtcttcatcacagcatcgtttatgaaaacaactaaatattcactaatggtgccagtggaataaatcagagaacatcccctgctacgtaactctctgcatacatcaaagagaatggtgtggctttgctttttcaacaatctactgagtggccatgggcatgtggatatggccatgaatgagcaagatcctctctgatcctgtagaagttaagttctaccagataacttgctgcttcaacaaaaagatttacctttttaaataaatgttgtagaatacttaaaaaaaacaaactagaatttgcctgtgtgcagccagtaacatgtctatttaacctggacaccttttgaggaatattctcagattgcccccatgctgtttataagacattgttccttatacacctgtttatgaatgaaaagaaacataaggagtgggtacaaagacttctatctatgaatgattaaaaaggctagagtacgaatacttcttgaacctttggtactaaatgcttttcatgttctatataaatgtagaaaacattttacaaatcctgtaaataaactgtttattttttatagaaagccaaaaaaaaaaaaaaaaaaaaaaaaaaa

SEQ ID NO: 11946 - DNA, 7438 bp, Homo sapiens
cgagggaagaggccggagggagatcgcggaggggagggggcgggaggggggtggggtatcctgagtcgtccgtggtccggagtctggaaggccctagagcggcgccagtcgacccgcctcgccacaacttgcccagaccagacacgtttcatcctgcgccctgcaagaaggagccggcctgcctctctccgctttgctgctcctcggcctccgcgggcccggcccgcgtcagcagcgaccctggggtctgggtcccctgtgtcgcccccgcccgcctgcagcgcccggcacccgcccaggagcgcgcagctggggttctagggacgtatacttgagcaagagagaccacagctcttgttcccgctgatcctgcagcccagtggatggagtccagaatctacagacctgccagaaaaaaaattcctgatgtctggtccaagcaggaattccccggtggattggggaatgtctggcttttcctcagcttattgatctctgtggtaaccactggaggcccccagaagacccatagaaatgagaggcctgaggtctacaagtcgctgctagaaatattttagcctctccaaagcccagaatgcagccccgacccaagtttgtaagggttctgggtgcacgctgaccctgcgcgggcagacgcgccctttgctccaggtccggacctgggcgctgctatagcaacgtcctggacgcccagaccttaggccgccgccgccgcggaagcgaggaacccggccttctcccgctcctgagggctgtggcggcggcggcccgggaggcggcccaggctgggtaaagaccgcccggctcctcctatgcaagctgaggcagcggattggttttcaagcatgcccttccagaagcatgtctactacccgctcgccagcggcccagaggggcccgacgtcgctgtggccgccgccgccgcgggtgcggcctccatggcctgtgcgccccccagcgcggcttcggggcccctgcccttcttccagttcaggccgcggctggagagtgtggactggcggcggctgagcgccatcgacgtggacaaggtggcgggggctgtggacgtgctgacgctgcaggagaacatcatgaacatcaccttctgcaagctggaagacgagaagtgcccacactgccagtcgggggtggacccggtgctgctgaagctcatccgtctggcgcagttcaccatcgagtacttgctgcactcacaagagttcctcacctcgcagctgcacaccctggaggagcggctgcgcctgagccactgcgacggcgagcagagcaagaagctgctcaccaagcaggcgggggagatcaagacgctcaaggaagagtgcaaacgccggaagaagatgatctccacccagcagctgatgatcgaggccaaagccaactattaccagtgccatttttgtgacaaggcctttatgaaccaagcttttctacaaagtcacattcaacgccgccacactgaagaaaattctcattttgagtatcagaaaaatgcacagattgagaagctccggagtgagatcgtcgtattgaaggaagagctgcagctcaccaggtctgagctagaggctgcacaccatgccagtgcagtcagattctccaaggaatatgaaatgcagaaaacaaaagaggaagactttttgaagttatttgacaggtggaaagaagaagaaaaggagaaactagttgatgaaatggaaaaagtcaaggagatgtttatgaaggaatttaaagaattaacttcgaagaattcagcattagaatatcaactgtcagaaatccagaagtccaatatgcagatcaagtccaacataggcacattaaaagatgcacacgagtttaaagaagaccgttctccatatccccaggatttccataatgtcatgcagcttcttgatagtcaggaaagcaaatggacagctcgagttcaagctattcatcaagaacacaagaaagagaagggtcggctcctgtcacatatagagaaacttcgaacctcaatgatagatgatctaaatgcaagcaatgttttctataagaaaaggatagaagagctagggcagagactccaggagcagaatgagctgattataactcagagacagcagattaaagactttacctgtaatccattaaacagtatcagtgaacccaaagtgaatgccccagccctgcacactttggaaactaaatcaagtctgccaatggtgcatgaacaggcattctcgtcgcacatactggaaccaatagaagaactttcagaggaagaaaaaggaagggaaaatgaacagaaattaaataacaacaaaatgcatttaaggaaagctttgaagagtaactcctccctcactaagggactaagaacaatggtggagcagaacttgatggagaaactggaaaccttggggattaatgcagatatacgtggcatttcaagtgatcagttgcatagagtactaaaaagtgtggaatcagaaagacataagcaagaaagagaaatacctaactttcatcaaattcgagaattccttgaacatcaagtcagctgtaaaattgaggagaaagcactactctcttcagatcagtgcagtgtttctcaaatggataccctttcaactggagaagtacccaaaatgatacaacttccttccaaaaacagacaactgattagacaaaaagctgtttctactgataggacatctgttccaaaaattaagaaaaatgtcatggaagatccttttcccagaaagtcttcaactattacgacccctccttttagttcagaggaggagcaggaggacgacgacctcatccgggcatacgcatccccaggcccacttcctgtgccgccaccacaaaacaagggcagcttcgggaagaacacagtgaaaagtgacgcggacgggaccgagggaagcgaaatcgaggacactgatgattctcccaagcccgcaggagtcgccgttaaaacacctactgaaaaagttgaaaagatgtttccacatcgcaaaaatgtgaacaaaccagtcggtggaactaatgtccctgagatgtttatcaaaaaagaagaattacaagaactaaagtgtgcggatgtggaggatgaagactgggacatatcatccctagaggaagagatatctttgggaaaaaaatctgggaaagaacagaaggaacctccacctgcgaaaaatgaaccacattttgctcatgtgctaaatgcctggggcgcatttaatcctaaggggccaaagggagaaggacttcaagaaaatgaatcaagcacattaaaaagcagcttagtaactgtgactgattggagcgacacttcagatgtctaattccacatgtcagaagattattccagaagccagcagtatttcagtatcacagtgtttcagtaatttgcctccatgattctagtgcttctgccttaccgtgtttcccacagcaacacagagactgattcaaagaacaatggtctctttaatggcacccaatacagtattgaaaatcagatcatcaacagtatttcgaagcatgtaaaggtgtttaagacttccgctgctgcttaaaaataacatgtcattgaagtcataaaaagttttttcttcagaaaggtactctagtgttaagtgtatttttttcaactaattttttagtgaattttttttaaacttacagcatgttttggtttgaattactaaaactttaaaaaatatttttcttatgtatgctgtcgtatcgtaggcgtttatattataaaattctgttagtagtcttaaaattgaattggtggaaccactaatccttaaaagttagtctggttatttttcatatagaagtaagtttaatccgagtgtggtggtgttcacctttaatcccagctacttgggaggctgaggtgggaggataacttgagcacaggagttcaagaccagcgtgggcaatatagcaagactccacccctccacaccccaaaaaagtaagtttaggattagaatatagctaggtccaatgttaaatacattttcctggagtacatttgtcacattcagctttgagccactgtaagcatgttactattaaatggttggttattttatatagcatattctttatcttggatattttatgaataaagtatagttattttaagtgccaattaatttatcagactaaatagaaaatatttgagccattactgaattcacatatgtatgtttttttttactatttaaaatacccaacatgtattatgaaatacctcaaaagtaatttagttacattcttaaacaatgacattgtcgaaagaaagttcttataagctgttttttgcatttttataacttggttatactatattctgtttccaagtaaccttttaactaaaagatttgttgggttttagatctcttttcatttgtcaaccttttcagtaaagccctctgttacatcactgtgactgtggctgtgttattagagatgaattctgagttaaatttgtacttattaggggtcttacagagggagaatctggccttgattgctatgccatatgacattctgtcctaatggttagaacaaatctttatctgtttccacccaccctgggatcctttttacttgtagcccattcctgccctctaaaagaatccttccaacttcctataggggccatttcatgcagatatactcactttatatgtatgtttctaaaagctttagtgaaggctgaatccaagtttcatgtagtaggacagagaacagaaggccgaatccaagtttcatgtggtaggacagagaacggcaatctacaaaactacaccaagcctaagatggcccatgtgccactttgttcattcatttatttattcagcagatatttattgaaccacttggtctggtttggttttgaacacgcactaattcatttaattacaacaactttgcgatgtagttattgttataatcctcatcctaaaggtgtgagaaacagagttattaagtaagttgccagaagccatacaagtacaaagtgtcaaggggagactttaagccaggtctctattccatgttttgtgtctgccatgttttcattcctgagcagaagagcttggggaaatgaacttttgctaagtaaacccagtatttaaattaagtcactatatctgtgtcttttaagagcccctcctttagcttacatggttagttgtatctttttttttttttttttttgagacagagtctcactatgttgcccaggcttgagcgcagtggcaccatctcggctcactacaacctccgcctcccagattcaagcgattttcctgcctcagcctcccaagtagctgggattacaggtgcccaccaccatgcctggcttaattttttgtatttttagtagagatgaggtttcaccatgttggccagactggtctcgaactcctgacctcaaatgatccgctgtcttgtcctcccaaagtgctgggattataggcgtgagccatcgcgccctgctgcatttcatttttttgtataaaatttggtttgttcgtttttgaggggaaccattcctttatgttgccccttactgatgcccaactaatgtgtttctggttactaacagaccttcatcccccaccctccctaaattcttcggtgtaatctaagcgttatctgcaccacttctgaataataaatgtgtttgaaatgcacacctacacaaccctgtcccacactggcctgtaggacctaatctaccttcatgtctttcagttgatttgtatttctgcaaaagatatttcaaggattatcaaggtatggaattttttttattttttatcttttaacaaacttgttcatttccttttctttccattgagcacctctgaacaatgtgattcttttttttaagtctttcacacttcaggaaaatactacattcacccacgttgtgattcatatcggacagtttcttactcaaagataacacaaataccaattcttattcatactttgaaactatattttaccctagactgccttggttcaaaggcctagtttcgacattactgtggcaaattatttaagctctctgttttcatttctttttctgtaaatgcaggatgaaaacaatatgtatctcctaggatggctgtgaggagtgagtgagacaggacatgaaaggtgtgtatgaactgtgataactgttgcccttgtgggcatgttatatagggctggctctaggaagaagcctgtgtcttttttcagaaatccctggagcaacttaaatgtctttagaaatgacaagtctctcagttatccagttagccgtaaacaggttctggaagacacacctagatagaactcggcccgtcagttctgagtgaggcacgtaccacttgggcttgggatgtccttaacccatttatgcctgaggttgcaattttttgaatttttccaatcacaccttggcgatgaccttgagcagtaggatataaataactcccacatgcttagtgttccaataatggaacactaggcataaacaggttttaattggctcctcagtcaaccatgaccaatatctctatctcagcttctgctgatgccctagctcagggctctgcattccgtgccagggacgcctcagccccttaacatggatgtgccacatgacaggcaataatatattggccccattagcccttcctggagcagtcataatgaattacagtcatgacaggcacatgtaagaaaccaaaatttgctaaatatgtacatgagtcttcatcacagcatcgtttatgaaaacaactaaatattcactaatggtgccagtggaataaatcagagaacatcccctgctacgtaactctctgcatacatcaaagagaatggtgtggctttgctttttcaacaatctactgagtggccatgggcatgtggatatggccatgaatgagcaagatcctctctgatcctgtagaagttaagttctaccagataacttgctgcttcaacaaaaagatttacctttttaaataaatgttgtagaatacttaaaaaaaacaaactagaatttgcctgtgtgcagccagtaacatgtctatttaacctggacaccttttgaggaatattctcagattgcccccatgctgtttataagacattgttccttatacacctgtttatgaatgaaaagaaacataaggagtgggtacaaagacttctatctatgaatgattaaaaaggctagagtacgaatacttcttgaacctttggtactaaatgcttttcatgttctatataaatgtagaaaacattttacaaatcctgtaaataaactgtttattttttatagaaagccaaaaaaaaaaaaaaaaaaaaaaaaaaa

SEQ ID NO: 11947 - DNA, 14315 bp, Homo sapiens
gcggccgcagaatcgagctcgggccccggcccccggcccgcggcgcggggctcccgggccccgccgcggacgtcgcgccggtcgccccttccccgtagcccgtgcgccctcggcgcggagccccggcccgccgcggtcccgtctcctgggcctgtcccgcccgcgccctccgccggccctcaggtataatacttctccacgtctgcttcaggaagaaagtgcctgccattcttatcatttctaagcaggttcatgccagcccagaacagagaatcagctggagcccagatttcaagttttgagtaaaataccttcaagcgaatgggccctattgtgctcacacattcagaacctgttacccaaggaattccctaaagaattagaagtgcgtctcaccaaccagccaagatgaacatggtgaagaggatcatggggcggccgaggcaggaggagtgcagcccacaagacaacgccttaggactgatgcacctccgccggctcttcacggagttgtgccatcctccccggcacatgactcagaaggaacaagaagagaaactgtatatgatgctgccagtgtttaacagggtttttggaaatgctccgccgaatacaatgacagaaaaattttctgatcttctgcagttcacaacacaagtctcacgactaatggtgacagaaattcgaaggagagcatcaaacaaatccacagaggctgcaagtcgggccatagttcagttcctagagattaatcagagtgaagaagccagtagaggctggatgcttctaacgacaattaatttgttagcttcctctggtcagaaaaccgtggactgcatgacaacaatgtcagtgccttccaccctggttaaatgtttatatctgttttttgaccttccacatgtgcctgaggcagttggaggtgcacagaatgagctacctctagcagaacgtcgaggactactccagaaagtttttgtacagatcttagtgaaactgtgcagttttgtttcccctgcggaggagctggctcagaaagatgatctccagcttctattcagtgcaataacctcttggtgccctccctataacctgccttggagaaagagtgctggagaagtcctcatgaccatatctcgtcatggtcttagtgtcaatgtagtgaagtatattcatgagaaagagtgtttatctacatgtgttcagaatatgcagcaatcagatgacctgtctcccctagaaattgtcgaaatgtttgctgggctttcttgtttcctcaaagattccagcgatgtttcccaaacacttctggatgattttcggatatggcaaggatataattttctttgtgatctcttgcttagattggaacaagcaaaagaggcagaatccaaagatgccttgaaagatctggttaatctgataacttccctaacaacatatggtgtcagtgaactaaaaccagctggtattaccacaggggcaccctttttattgcctggatttgcagtacctcagcctgcaggcaaaggtcacagtgtgagaaacgtccaggcctttgcagttcttcagaatgcatttttaaaagcaaaaaccagcttccttgcccaaatcatccttgatgctatcacaaatatttacatggctgacaatgccaattacttcatcctagagtcacagcacacattgtcacagtttgcagagaagatttctaaactcccagaagtacaaaacaaatactttgagatgctggagtttgttgtttttagcttaaattatataccttgtaaagaacttattagtgtcagtatcctcttaaaatctagctcttcttatcactgtagcattattgcaatgaaaacacttcttaagtttacaagacatgactacatatttaaagacgtgttcagggaggttggccttttggaggtcatggtaaaccttttgcataaatatgctgccctgttgaaggatccaactcaggcactaaatgaacaaggggactcaagaaataatagttcagttgaagaccaaaaacacctggctttattggttatggagaccttgacagtgcttcttcaaggatcaaacacaaatgcaggaatttttcgagaatttggaggtgcaagatgtgcacataatatagtaaagtaccctcaatgccggcagcatgccttgatgactatccaacagctggtgctctccccaaatggggacgatgacatgggcactctcctggggctaatgcattcagccccaccgacggaattgcagttgaagactgatattttaagggccctcctgtcggtccttcgagaaagccatcgttcaagaacagtttttaggaaagttggaggatttgtgtacattacatccttgctcgttgctatggaaagatctttgagctgtccacccaagaatggctgggagaaagtgaaccagaatcaagtgtttgaacttcttcacactgtgttctgcacgttgactgcagcaatgcgctatgagccagccaactctcatttcttcaaaacagagattcagtatgagaagttggcagatgctgttcgatttcttggctgcttctcagacctaagaaaaataagcgccatgaatgtcttcccctcaaatacacagccatttcaaagacttttagaggaagatgtaatctcaatagaatcagtgtcacccacgttacggcactgcagtaaactttttatttatctttacaaagtagccacagattcttttgacagtcgtgcagaacagatccctccttgcctgacaagtgagtcttctctcccctctccttggggtacaccagctttgtccaggaaaaggcatgcatatcattctgtttcaactccccctgtttaccctcctaaaaatgttgccgacctgaaactacatgtgacaacttcatctctgcagagttctgatgcagtcatcattcatcctggagccatgcttgccatgctggacctactggcctctgttgggtcagtgacacagccagaacatgctttggatcttcaacttgccgtggcaaatattttacaatccctggtgcacacagaaaggaaccagcaagtcatgtgtgaagctggtcttcatgcacgactgctgcagaggtgcagtgctgcattggctgatgaggaccactcactgcacccgcccctgcagcggatgtttgaacgattagcctctcaggctctggaacccatggtgttgagggagtttttacgtttggcaagtcctttaaattgtggtgcctgggacaaaaaactgctaaaacaatatagggtccacaaaccaagttcactgagttatgaaccagaaatgagaagtagtatgatcacatctctggaaggtctgggtactgataatgtttttagcttacatgaagataaccattaccggataagcaagagcctggtaaaatctgcggaaggaagtactgtacccctgaccagggtgaagtgtctggtctccatgacaaccccacatgacatcagacttcatgggtcatcagttactccagcttttgttgaatttgacacatcacttgaagggtttggatgtctttttttgcccagtttggcccctcataatgctcctacaaataataccgtcacaacaggtcttattgatggggctgtggtcagtggcattggttctggtgaaagattcttccctcctccctccggcttaagttactctagctggttttgtattgaacattttagttctcctccaaataaccaccctgtcagacttcttactgttgtgcgccgagcaaattcttctgagcaacattacgtgtgccttgcaatagttctatcagcaaaagaccgatctctgattgtttccaccaaagaggaactcctccaaaattatgttgatgattttagtgaagagtcctcattttatgaaattctcccatgctgtgctcgctttcgatgtggagagcttatcattgagggacagtggcatcatttggtcctggtaatgagcaaaggcatgttgaaaaacagtactgcagccctttatattgatggacagcttgttaacactgtaaagcttcattatgtccacagtactccagggggttcaggttcggcaaatccaccagtggtgagcacggtctatgcctacattggtactccacctgcccaacgccaaattgcctcattggtttggcgcctgggacccacacattttctagaagaagttttaccttcttcaaatgttactaccatttatgaacttggaccaaattatgttggaagctttcaggctgtatgtatgccatgtaaagatgcaaaatccgaaggggtggtgccatcccctgtgtcattagtaccagaggagaaagtgtcatttggcctctatgcactctctgtgtcgtctctaacagtggcaagaatccggaaagtgtataacaaattggatagcaaagccattgctaagcagttaggcatttcctcacatgagaatgccactcctgtgaagttgatacacaattcagcaggacatcttaatggatctgcacggacaattggggccgctctgattggatacttgggagtaagaacatttgtccctaagcctgttgccactactttgcagtacgttggtggagctgcagccatcctgggcctggtggccatggcctctgatgtggaagggttatatgcagcagtcaaggccctggtttgtgtggtcaagagtaacccactagccagcaaagaaatggaaagaatcaagggctaccagttgctggcaatgttgcttaagaagaaacgttcccttcttaacagccacatcctccatctaactttttctttggtgggaactgttgatagtggacatgagacctccattattccaaattcaactgctttccaggacctcctctgtgattttgaagtctggctccatgcaccatatgaacttcatctttccttatttgaacactttattgaactgctcacagagtccagtgaagcctcaaagaatgccaaattaatgagagaattccagttaatcccaaagctgctcctgactcttcgagatatgtctttatcccagcctactattgctgctattagtaatgtcctgagcttcttactgcaaggttttcctagcagcaatgatctgctcagatttgggcagtttatttcttctactttgccaacctttgcggtttgtgagaaatttgtagtaatggaaataaataatgaagagaagcttgacactggaactgaagaggagtttggaggtcttgtatcagctaatcttatacttttgaggaacagacttctggatatcttgctaaaactaatttatacatctaaagaaaagacaagcattaatttgcaagcttgtgaagaactggtgaagacactgggttttgactggatcatgatgtttatggaggaacacttacattccaccacagttacagcagccatgaggattcttgttgtcctactaagtaatcagtctattctcatcaagtttaaagaaggactcagtggtggaggatggcttgaacagacagattctgtcttaactaataagattggaactgtattaggattcaacgtgggcagaagtgctggtgggagatcgacggtcagggagattaaccgagatgcttgtcattttcctggttttccagtccttcagtcattccttcctaaacacactaatgtccctgccctctattttctcctcatggccttgtttctgcagcagccagttagtgagctgcctgagaacctgcaggtcagtgtgcctgtcatcagctgccggagtaagcagggttgccagtttgatttggattccatttggacattcatctttggagttcctgcctccagcggaactgtggtctcttctatccataacgtatgcacagaagctgtttttttattattgggaatgctccgcagcatgctgacttcaccttggcaatcagaagaagagggatcttggctccgagaatatcctgtgaccctgatgcagttcttcagatatttgtatcacaacgtgccagaccttgcctccatgtggatgagccctgacttcctgtgtgcattagcagccaccgtcttccccttcaatattcgcccttactcagagatggtgactgaccttgatgatgaagttggatctccagcagaagagtttaaagcgtttgcagcagacacagggatgaacaggagccaatcagagtactgcaatgtgggcaccaagacatatctgaccaatcacccggctaaaaagttcgtttttgacttcatgcgggtcttaatcatagacaacctctgtctcactcctgccagcaagcaaactccactaattgatcttttgttggaggcttcccctgaaaggtctacaagaactcagcaaaaagaatttcaaacttacattttggatagcgtgatggaccatttgcttgcagctgatgtgttattaggggaagatgcatctctgcctattaccagtggaggaagctaccaggtattggtgaacaatgtgttttatttcacacagcgtgtggtggacaagctttggcaaggcatgttcaacaaagaatctaaacttcttatagattttataattcaactaattgcacagtcaaagagaagatcacagggattgtcactggatgcagtgtatcattgcctcaataggaccatcttgtaccagttctcacgggcacacaaaaccgttcctcagcaagtagctctgcttgattcactcagggtcctcactgtaaacagaaacttgatcctgggacctgggaaccatgaccaagaattcattagctgtctggcccactgcttgataaatctacatgttggaagcaacgtggatggatttggactggaagcagaagcccgcatgaccacatggcacattatgatcccctcggacattgaaccagatggtagttacagccaagatattagtgaagggcgtcagcttctcataaaagctgtcaacagagtttggactgaactgatacatagtaagaaacaagtcttagaggaacttttcaaagtaactctacctgtgaatgaaaggggccacgtggacatagctacagcaaggccactcattgaagaagctgccctgaagtgctggcagaatcatttggcccatgaaaagaaatgcataagtcgaggagaagctttagcgcccaccacacagtccaaattatcccgtgtcagcagtggctttggtctttccaagttaacaggatcaagaaggaatcgaaaagaaagtggtcttaataaacacagtctttccacccaggagatttcgcagtggatgtttactcacattgctgttgttcgtgacttagtagatacacaatataaagaatatcaggagcgtcagcagaatgccctgaagtacgtgacagaagagtggtgtcagatcgagtgcgagctgttgagggagcgggggctgtggggccctcccatcggctcccacctcgacaagtggatgctggagatgacagaagggccctgcaggatgaggaaaaagatggtgcgaaatgatatgttttataaccattacccttacgtgccagaaactgagcaagagacaaatgtggcgtctgagatcccaagtaaacagcctgagacacccgatgatattcctcaaaagaaacctgctcgatatagaagagccgtaagttatgacagtaaagagtactacatgcgactggcctctggcaatcccgccattgtccaagacgccattgtggagagttcagaaggtgaagctgctcagcaagaaccagagcatggggaagacactattgctaaagtcaaaggtttggtcaagcctcctctaaaacgctcccgatctgcacctgatggaggagatgaggagaaccaggagcagctacaagaccagattgctgagggcagctccatagaagaggaggagaaaacagataatgctaccttactgcgcctgttagaggaaggagaaaagatccaacacatgtaccgctgtgctcgagtccagggcctagataccagtgaggggctccttctttttggtaaagagcatttttatgtgattgatggatttaccatgacagcaaccagggaaataagagatattgaaaccttacctccaaatatgcatgagcctattattcctagaggagccaggcaaggccctagtcaactcaagagaacatgcagcatttttgcatatgaagatatcaaggaagttcataaaaggagatatctcctgcagcctattgctgtggaagttttctctggagatggacggaattacctccttgcttttcagaaaggaatcagaaacaaagtctatcaaaggtttttggctgtagtgccatctctaacggacagttcagaatctgtatctgggcaacgaccaaacacgagtgtggagcagggatctgggttacttagcactttggttggagagaagtctgtgactcagagatgggagagaggtgaaatcagcaacttccaatatttgatgcatttgaacactttggctggcagatcatataatgatctcatgcagtatcctgtcttcccctggatccttgcagattatgactcagaggaggtggatcttactaatcccaagacgtttagaaacctggctaagccaatgggagcacaaacagatgaacgattagctcagtataagaagcggtataaagactgggaggatcctaatggagaaactcctgcataccactatgggacccactattcatctgcaatgattgtggcctcataccttgtaaggatggagcctttcacacagatattcttaaggctacagggtggccactttgacctggctgaccggatgtttcacagtgtgcgcgaggcctggtattcagcgtcaaagcacaatatggcagatgtaaaagaacttatcccagagttcttttatttaccagaattcctgttcaattccaacaactttgatctaggctgtaaacaaaatggcaccaagcttggagatgttatccttccaccctgggcaaaaggggacccacgagaattcatcagagtccatcgtgaggctttggagtgtgattacgtgagtgcccatctacatgagtggattgacttaatcttcggttataaacagcaaggccctgctgcagtagaagctgtaaatgtcttccatcatcttttttatgagggtcaagtggatatctacaacatcaatgacccactaaaggagacagccacaattgggttcattaataacttcggtcagatccctaaacagttatttaaaaaacctcatccaccaaagcgagtgagaagtcgactcaatggagacaatgcaggaatctctgtcctaccaggatctacaagtgacaagatcttttttcatcatctagacaacttgaggccttctctaacacctgtaaaagaactcaaagaacctgtaggacaaatcgtatgtacagataaaggtattcttgcggtggaacagaataaggttcttatcccaccaacctggaataaaacttttgcttggggctatgcagacctcagttgcagactgggaacctatgagtcagacaaggccatgactgtttatgaatgcttgtctgagtggggccagattctctgtgcaatctgccccaaccccaagctggtcatcacgggtggaacaagcacggttgtgtgtgtgtgggagatgggcacctccaaagaaaaggccaagaccgtcaccctcaaacaggccttactgggccacactgataccgtcacctgcgccacagcatcattagcctatcacataattgtcagtgggtcccgtgatcgaacctgtatcatttgggatttgaacaaactgtcatttctaacccagcttcgagggcatcgagctccagtttctgctctttgtatcaatgaattaacaggggacattgtgtcctgcgctggcacatatatccatgtgtggagcatcaatgggaaccctatcgtgagtgtcaacacgttcacaggtaggagccagcagatcatctgctgctgcatgtcggagatgaacgaatgggacacgcagaacgtcatagtgacaggacactcagatggagtggttcggttttggagaatggaatttttgcaagttcctgaaacaccagctcctgagcctgctgaagtcctagaaatgcaggaagactgtccagaagcacaaatagggcaggaagcccaagacgaggacagcagtgattcagaagcagatgagcagagcatcagccaggaccctaaggacactccaagccaacccagcagcaccagccacaggccccgggcagcctcctgccgcgcaacagccgcctggtgtactgacagtggctctgacgactccagacgctggtccgaccagctcagtctagatgagaaagacggcttcatatttgtgaactattcagagggccagaccagagcccatctgcagggcccccttagccacccccaccccaatcccattgaggtgcggaattacagcagattgaaacctgggtaccgatgggaacggcagctggtgttcaggagtaagctgactatgcacacagcctttgatcgaaaggacaatgcacacccagctgaggtcactgccttgggcatctccaaggatcacagtaggatcctcgttggtgacagtcgaggccgagttttcagctggtctgtgagtgaccagccaggccgttctgctgctgatcactgggtgaaggatgaaggtggtgacagctgctcaggctgctcggtgaggttttcactcacagaaagacgacaccattgcaggaactgtggtcagctcttctgccagaagtgcagtcgctttcaatctgaaatcaaacgcttgaaaatctcatccccggtgcgtgtttgtcagaactgttattataacttacagcatgagagaggttcagaagatgggcctcgaaattgttgaagattcaacaagctgagtggagaccatggtctgtagaccccttcccgattctcctgtcccagcttggaaggcattgaaaacagtctccgtttacacatctcttcataccacgtgtttgaagtgttaaaattcaaagggatcattgaataaaacgggtgtagagtacaggaatggggcagacgcgattcaggtgaacagcacaagaagaatatgaggtggttcctaggagcaacactttcgacctccagttctccctgatgacagtagctgtctccaagagaaaaatcctcacttattaactctcttttcttgcatctcatttttatagagctactcatccttatttggaaaaaccaacaacaaaaaaggcttttagaaaatggttgtaaatctgacttctttgcaagtaactatgtatattgtaaatagatataaaaggccttttttctaaataaggacttaactgcctgtaacatgaaacttcaaactaaaccactaactcaatgaactacttatggtttgtctgacatccctcacttaccaattaattataaatatgtttttttaaatccccaaagacattatctgtggtctttttttcctttcaagctcagcctgtgtgcctgatgtcatttctttcaagttgcccacagtatctccacttaaactaggctagtaaccaaaataatgtggaccttctttaggaaacagtgtgggagaataggagtccagccgtaagataaactggaaatatttgggcgtcttgtacctggctacgcaccacctcagtgttgttcctacataaacagggccccttttaaacttgtatgtggactgctgtttggtcaaagaataccttcttagcattgcagaaaggtggtcagatgaccagtgtagtgcaggaaacagccctgtctcaactaatggaaatatatttgcatgtaacccaaaattagcttatcttgcatagaacataataagtatgtgtctttggtgacactaatgttctactatagcttattttcaaacaaggggtaaaaaaaggaaagaaagaagtgtacagaattaacatataaactttgttgtaaaactgaatcatgtcagaactgcttaaaattaacctttaccatttaatgtcatctacctgaaaacagtgagatttatactgtatcaatgtctatttttttgtttttgctatgaatataattacagtattttaatatttagttatttaatttgttctactagttggatacagaacacacaaatccagggggattaaagctggaaggggctaagagattagtttacagagaaaaggcttggtggtgggatttttttaaatgtgtgttatgtacatatatatatatatataatatatattaaaaatgaaacaattaatctagattttaacattttcagaaacttagtgataacattatgaacaattctaaaagccctgtgatttgaaaaatatagaatcattaatggcccaagataggccttcacaccttcacaggtgcgaaaggaaaggccttcacaccctcacagaggcatcatgcaaaggacagcggctttggcttttccaattttccatctttaggccctggtgagaggcacacttatgcactaaaatgcacatatatgcacatgcattcaaaaataggcatttggtacaatggtgatcttgtacctgatgggctgaaaccagcttaagaacaaatttgttcttcctgatatgataactaggtctccaagagaaaatagaaaggctgctttagtgccttacgcttactaaatttaaatctttatttacctgggtttgagcctacagtctatttatgattacatatcaaaattgattaaaacacttccatttctaaaagttcaaatatacttgttaataaaaggattatcggcattaatactttaatttaaagaaaagttgtgttctgttttcctttctgtgtcttactccccccacactctccctcccccatcaccatcttcaattctaataaataatgctgatgttcaacagttgcagaaattgtgctattatgtaactgtgggccttgcccctgtctggccctctagatgatttgtagcagtgttattctacactttttaaaagaagcgtcctccttttgtccatgaatcatgtttaccccatacccagtggcagaggtgttctttaaagacttgaatatatgaatgtgtgtgtgtagttacttaaaggttattcctctttgtaataggaaactatatgggatgaacacttttaaactttccgacacaacttccattactaactttctaacagaacttccataactagaaggtggaaaccaaaaccctcatggtagtatttcctctggcagctggtgctgtgggcaactgttttgttcaatcgggtttcttttctttttgcctctaatgcagaaatcaacagaatcactcacacatacaagtacactcacatacataaactaattatttctctggatatctttctgtgttccatgtaaatttatttaccaacatctattgtcaacatgtacatctaccttagtatggtctgcattctttttctgagagtacctcatagggctcctgcctgatctttgtagtttgttcattcatccatccacctgttcatttgttcatccatgtattctaacatttctatgtagtgtgcaactctaatgtcatgcttttgaagaagagaatagctgcccatagcagccatccgtctggataatagcaaaacactctagataagttattttgcactttcttatgtataaagttggtagaaacttatttttgctttgtatcatttaaatacattttgttttggtaaatgaactgtgtataaaatatttatgccgttaaaactgtttttagaaagtatttttaatttcagcaagtttggttacttgttgcatgactcttaacacagctgactttttgtgtcagtgcaatgtatattttttgtcctgttattaacttgtaagccctagtaatggccaattatttgtacagcaacagaagtaaattgaagatactggctaagactggattgattgtggacttttatactatattgcagaaaccaatatctgtttcttggtggttatgtaaaagacctgaagaattactatctagtgtgcagtctgtgatatctgaatgttcattgtatatttgtctctgatgcaaaaaggtagagtaacacaattacaatacatgattaaatgcaatagtccaggtacttaagtaatttttttttcatttcaaataaatacctatttaccaccaaaagaaag

SEQ ID NO: 11948 - DNA, 3185 bp, Homo sapiens
agcgctgcgcgtcagtttccgtctacctggactaaacatttgcttcgccccgtctgcctgaatcgaacgtgcacttggcagtcttcccttgtccatacccgtttcctggggatcgctacggaccttaaaataccagcaacagccccttcgccccaagtaaggtcttgctctgtcagactagagtacagtgccatgatctccgctcactgcagcctcaacctcctgggctcaagcagtctttctgcctcagagtgctgggattacagacgggagccaccacgccaggcctacgagatttgacttgtaaagaattaattatattgactgagagagaagcccagaagaggaagaagaggaaagaaaaggagtcagggatggctcttacacagggacctttgacattcagggatgtagccatagaattctctcaggaggagtggaaatccctggaccctgtgcagaaagctttgtactgggatgtgatgttggagaactacaggaacctggtcttcctgggtatccttcctaaatgtatgaccaaggaattaccaccaatagggaacagtaatacaggagaaaaatgccaaacagtgacgctggaaagacatgaatgttatgatgttgaaaatttttacttaagggaaatccagaaaaatctacaggaccttgagtttcaatggaaagatggtgaaataaattataaagaagtgccaatgacctataaaaacaatcttaatggtaaaagaggtcaacatagtcaagaggatgtagaaaacaaatgtattgaaaatcagcttacattaagctttcagtcacgtctgactgaactgcagaaatttcaaactgaagggaaaatttatgagtgtaaccaatctgagaagacagttaataacagttccctagtttcaccacttcaaagaattcttcctagtgtccaaaccaacatttctaaaaaatatgagaatgagtttttgcagctgtcattacccacccaacttgagaaaacacacattagggaaaaaccttatatgtgtaaagggtgtggcaaagcctttagagtgtcttcaagtcttattaaccatcagatggtacatactacagagaaaccttacaaatgcaatgaatgtggcaaagcctttcatcggggctcactactaactatacatcagatagtccatacaagggggaagccatatcaatgtggtgtatgtggcaagatcttcagacaaaattcagatcttgtaaatcaccggagaagtcacactggagagaaaccgtacaaatgtaatgaatgtggcaagtcctttagtcaaagttataaccttgcaatacatcagagaattcacactggagagaaaccttacaaatgtaatgagtgtgggaaaaccttcaaacaaggctcatgcctcactacacatcagataatccatacaggagagaaaccatatcaatgtgatatatgtggcaaggtcttcaggcagaattctaatcttgtaaatcaccagagaatccacactggagagaaaccatacaaatgcaacatatgtggaaagtcctttagtcaaagttccaacctggcaactcatcagacagttcatagtggaaacaaaccttacaaatgtgatgagtgtggcaaaacctttaaacggagctccagcctcactacacatcagataatccatacaggagagaaaccatatacatgtgatgtatgcgacaaggtcttcagtcaacgttcacaacttgcaaggcaccagagaagtcatactggagagaaaccttacaaatgcaatgaatgtggcaaggtcttcagtcagacttcacatcttgtggggcatcggagaattcatactggagagaaaccttacaaatgtgataaatgtggtaaagcctttaaacagggctcattactcactcgacataagataattcataccagagagaaacgttaccaatgcggtgaatgtggaaaggtctttagtgaaaattcatgccttgtaagacatttaagaattcatactggggagcaaccttacaaatgtaatgtgtgtggcaaggtcttcaattacagtggaaacctttcaattcataagagaatacatacgggagagaaacctttccaatgtaatgaatgtggcacagtcttcaggaactactcatgcctagcacgtcatctaagaattcatactgggcagaaaccttacaaatgtaatgtgtgtggcaaggtcttcaatgacagtggaaacctttcaaatcataagagaattcatactggagagaagccgtttcaatgtaacgaatgcggcaaggttttcagttactactcatgcctagcacgtcatcggaaaattcataccggagagaaaccttacaaatgtaatgattgtggcaaagcctatactcagcgttcaagcctcactaaacatctgataattcatactggagagaaaccttacaattgtaatgagtttggaggggcatttatccaaagttcaaaacttgcaagatatcacagaaatcctactggggagaaaccacacaaatgtagccattgtggtagaacttttagtcatataacaggcctgacgtaccatcagagaaggcatactggagagatgccatacaaatgtattgaatgtggccaggtctttaattccacttcgaaccttgcaaggcatcggagaattcacactggagagaaaccttacaaatgtaatgaatgtggcaaggtctttcgtcatcaatcaacactagcacgtcatcggagtattcatactggagagaaaccttacgtgtgtaatgagtgtggcaaagcctttagagtgcgttcaattctggttaatcatcagaaaatgcatactggggacaaaccttacaaatgtaatgaatgtggtaaagcttttattgaaaggtcaaagctggtgtaccatcaaagaaatcacactggagagaagccatacaaatgtattgaatgtggcaaggcctttgggcggttttcttgcctcaacaaacaccaaatgattcattctggagaaaaaccttataaatgtaatgagtgtggcaaatctttcattagtcgctcaggcctcactaaacatcagacaaaacatactgcagagagtcttaaaacaaaattcaatgtggaaaagcctttagatgttctcctaacttctgggttcaaataa

SEQ ID NO: 11949 - DNA, 10919 bp, Homo sapiens
gcacgagactgcgctcgcctccctcctcacgcgggcgggattttcttgccttgtgaaaaaccgtctcggcggctgcccccgcctcctctgctggcatgtgaaatggcggtcggcgagtggtttgcgtccgtgacatcatcatcatggcaacaagagctgcagcctgggaccgaggagcccgtgtgattcccggcggtggcgcagtggcggcagcaccagcaccgacgaaagcttcgagggcttctctccttgcggccccttgccgggtgctcctgaggaggcggcggcagcagcgcctacaccgccccgcccgccgttcctcgaggtgcctctgtgtgaggggagggggccgtgccgagaaggggagggggcgccgccgccgctgcggagggagccgccgccgctgctgctgccgctgccgggtcgccagtgaagggaggcagtggcggcggcggcgaacatgttttcagtaaggatagtgactgcagactaatacatggccagcccgctgcaggggctggatacctgccaatcccccctcacccaggcccctgtcaagaaggtgccggtggtgcgagtcttcggagcgaccccggcagaataaaacccaagacaagccacataaaagcaacctaaaaattaaactgtcatcatattatttgttttaaaactatggaataatatatctgaggaagatttctctcaaaattgtttttctcaatttcaagtcagaagacatgtcttcatctacatggcatctttccttacctctatgtgccatacgatggttatggacagcagccagaaagctatctttctcagatggcattcagtatcgacagagcacttaatgtggctttaggcaatccatcttccactgctcagcatgtgttcaaagtgtcattagtatcaggaatgcctttttatggttatcatgagaaggaaagacactttatgaagatctatctttacaatcctacaatggtgaaaaggatatgtgaacttttgcaaagcggagccataatgaataaattttaccagcctcatgaagcgcatattccctacctcctacagctcttcattgactacaatctttatggcatgaatttaataaatctggctgctgtcaagttccgaaaagcaagaaggaaaagtaatacattgcatgcaactggatcctgcaagaatcatttatcaggaaattctcttgctgatactttatttcggtgggaacaagatgaaataccaagctctttaatattggaaggtgttgaaccacacagtacatgtgaattacaagtggatgctgtagctgctgatatcttaaatcgtctggacattgaagctcaaattggtggaaaccctggtctacaggccatatgggaagatgaaaagcaacggcgaagaaacagaaatgaaacttctcaaatgagccaacctgagtcacaagatcacaggtttgtgccagcaacagaaagtgaaaaaaaatttcagaagagacttcaggaaattctcaaacagaatgatttctctgtaacattatcaggatctgtggactacagcgatggatcccaggagttctctgctgagttaacattgcactctgaggttctgtctcctgaaatgcttcagtgtacaccagccaatatggtagaagttcacaaagacaaagagtcaagcaaaggtcacactagacacaaagtggaagaagctcttattaatgaagaagcaattttgaaccttatggaaaatagtcagacttttcagcctttgacccaaagactgagtgagtcacctgttttcatggacagtagtcctgatgaggctctggtacatcttcttgctggtttggaaagtgatggatatcggggggaaagaaataggatgccatcaccatgtcgctcctttggaaataataaatatccacaaaatagtgatgatgaagaaaatgaaccacagattgaaaaagaggaaatggagcttagtttggtgatgtcccagagatgggacagcaatattgaagaacattgtgccaaaaagagatcactgtgcagaaatacccacagaagttcaactgaagatgatgactcatcttcaggagaagaaatggaatggagtgataacagtttgcttctagccagtctttctatacctcagttagatggaactgcagatgaaaatagtgacaatccattgaacaatgaaaattctagaacccactcttctgtaattgcaacaagcaagctttcagttaaaccctccatctttcacaaagatgctgctacattagaaccctcatcttctgctaagattacctttcagtgtaaacacacaagtgccctttcttcccatgttttgaacaaggaagatttaattgaagacctttcacagacaaacaaaaatacagaaaaaggtctagataactcagtcacttcttttacaaacgaaagcacttattctatgaaataccctggatctttaagcagtactgttcattcagaaaattctcataaagagaatagtaagaaagagatcctcccagtatcttcctgtgaaagtagtatttttgattatgaagaagatattccatctgttacaagacaagtaccaagtagaaaatatacaaacattagaaaaatcgaaaaggattccccttttatacatatgcaccgtcaccctaacgagaatacattgggcaaaaattctttcaacttttctgacttaaatcattcaaaaaataaagtatcctctgaaggaaatgaaaaaggaaacagcacagctctgagtagtttattcccttcatcatttactgaaaattgtgaattactgtcatgctcaggggagaatagaactatggtgcattctcttaatagcactgctgatgaaagtggactaaataaacttaaaattaggtatgaagaatttcaagaacataaaacagaaaagccaagcctcagccagcaagcagcacactatatgttttttcccagtgttgttctttctaactgtcttactagaccacagaaactatctcctgtcacatataaattacaacctggcaataaaccatcccggttaaaattgaataaaaggaaacttgcaggtcatcaggagacttctaccaaaagtagtgagactggatccacaaaagataattttatacaaaataatccttgtaatagtaatcctgagaaggataatgcattggctagtgatttaactaaaaccactcgtggagcttttgaaaataaaacacccacagatggttttatagactgtcactttggagatggaacgttagaaactgagcagtcctttggactatatggaaataaatacacacttagagccaaacgcaaggtaaattatgagactgaagacagtgagtcaagttttgtaactcacaactcaaaaattagtctacctcatcccatggaaattggtgaaagtttagatggaactctcaaatcccgaaaacgaagaaaaatgtctaaaaagctgccccctgtcatcataaagtatattattattaatagatttagagggagaaaaaatatgcttgtgaagctaggaaaaatagactctaaagaaaaacaagtaatattaacagaagaaaaaatggaactatataaaaagcttgcacctttgaaggacttttggccaaaagttcccgactcccctgcaaccaaatatcccatttatccactaacaccaaagaaaagtcacagaagaaagtcaaaacataaatctgctaagaaaaaaactggtaaacaacaaaggacaaataatgaaaatattaaaagaactttgtctttcaggaaaaaacggtcacatgctattctttctcctccctcaccatcttacaatgctgaaaccgaagattgtgacttgaattatagtgatgttatgtctaaactaggttttctttctgagagaagcacaagtcccataaattcttctccacctcgctgctggtctcccacagatccaagagctgaagaaatcatggctgctgcagaaaaagaggcaatgctttttaagggtcctaatgtatgtaagaagactgttaattctcgtataggaaaaactagtcgcgcaagagcacagattaagaaatcaaaagcaaagcttgctaatccctctatagttactaagaaaaggaacaaacgaaatcagacaaataaactagtagatgatggaaaaaagaaaccaagagcaaaacaaaaaacaaatgagaaaggtacatcgagaaagcatataacacttaaggatgaaaaaataaaatctcagtctggtgctgaggttaagtttgtactgaaacaccagaatgtgtctgaatttgcaagtagttctggaggctctcaactactttttaaacagaaagatatgccactaatgggctctgctgtagatcatcccctttctgcttccctacccactggaattaatgcacaacagaagttatctggctgcttttcttctttcttagaaagcaagaagtctgtagatttgcagacattccccagttcacgagatgatttgcatccatcagttgtttgtaattctataggacctggagtctcaaaaattaatgttcaaaggcctcataatcaaagtgctatgtttactctaaaggaatcaacgttaattcaaaaaaatatatttgacctttccaatcatttatctcaggtagcacagaatacacagatatcttctggtatgtcctcaaagatagaagataatgcaaataatatacaaagaaactatttgtcatcaatcggaaagttaagtgaatatcgcaattccctagaatcaaagctggaccaagcatatacccctaattttttgcattgcaaagacagtcagcagcagattgtgtgcatagcggaacagtcaaagcacagtgaaacttgttctccgggaaatacagcttcagaggaaagccaaatgcctaataattgctttgtaacttccttgagaagtccaatcaaacaaatagcatgggagcaaaagcaaaggggctttattttagatatgtcaaattttaaacctgaaagagtaaaaccgaggtcattatcagaagcaatttcacaaaccaaagcactttctcagtgtaaaaatcgaaatgtgtcaacaccttcagcatttggtgaaggacagtctggactggcagttctaaaagaattgttacaaaaaagacagcaggaagcacaaaatgcaaatactacacaagacccattatccaataaacatcaaccaaataaaaatatttctggttcccttgagcataacaaagcaaataaacggacacgatcggtaacgtccccaagaaaacctcgaactcccagaagtacaaaacaaaaagaaaaaatccccaaacttctcaaagtagactctttaaatttacaaaactctagccagttggataactctgtatcagatgatagtcccatctttttttcagatccaggctttgaaagttgttactcacttgaagatagtttatctcctgaacataattataattttgatattaacacaataggtcagactggattttgtagcttttattctggaagtcagtttgtcccagctgatcagaatttgcctcagaagttcctaagtgatgctgttcaggatctttttccaggacaagctatagaaaaaaatgagtttttaagtcatgacaaccagaaatgtgatgaagacaagcatcataccacagactcagcctcatggattagatctggtactttaagtcctgaaatttttgagaagtcaaccatagatagcaatgagaatcgtcgccacaaccagtggaaaaatagctttcatcctctaacaactcggtctaactcaataatggattctttctgtgttcagcaggcagaagactgtctaagtgaaaaatctagattgaataggagttcagtaagcaaagaagtgtttcttagcctcccacagccaaacaattcagactggattcaaggtcacaccagaaaagaaatgggacagtctcttgactcagccaatacctcttttactgcaatactctcctcccctgatggtgaacttgtagacgtggcctgtgaagatttagaactgtatgtttcaagaaacaatgatatgttgacaccaactcctgatagttcaccaagatctactagctctccttcacaatctaaaaatggcagcttcacccctcgaactgctaacattctgaaaccacttatgtcccccccaagtagggaagaaattatggcaactttgttggatcatgacctgtctgagactatttaccaggaaccattttgcagtaatccttctgatgtaccagaaaagcccagggagattggtggacggctcctcatggtagaaactcgacttgcaaatgatctggctgagtttgagggagacttttccttggaaggacttcgtctttggaaaacagcattctcagcaatgactcagaatccaaggccagggtcaccccttcgcagtggccaaggagttgtcaataaagggtcaagtaatagccctaagatggttgaagataaaaaaattgtgattatgccttgcaaatgtgccccaagtcgacaactggttcaagtgtggcttcaagccaaagaagaatacgaacgttccaagaaactgcctaaaaccaagccaactggagttgtaaaatctgctgagaactttagctcttcagttaacccagatgacaaacctgtagtgcctccaaaaatggatgtaagtccatgtatactccccactacagcacataccaaggaggatgttgataattctcagattgctttacaagcaccaaccacgggatgtagtcaaactgcaagtgaaagtcagatgctgccaccagttgcctctgcaagtgatcccgaaaaagatgaagatgatgatgataactattacattagttatagctcccctgattctccagtaattcccccttggcaacaaccaatatccccagattccaaagcattaaatggagatgatagaccctcatcaccagtagaggagctgccttcattggcttttgagaacttcttaaagccaataaaagatggtatacaaaaaagcccctgcagtgagcctcaagagcctctagtgatatctccaattaatactagggcaagaactgggaaatgtgaatcactttgctttcatagtacaccaatcatacagagaaaacttctggaaaggcttcctgaagcacctggccttagcccattatcaacagaaccaaaaacacagaagttgagtaataagaaaggaagtaatactgacactcttagaagagtactgttaacacaagcaaagaatcaatttgcagcagtaaataccccacagaaagaaacttctcagattgatggaccatctttaaacaatacttacggtttcaaagtcagcatacaaaacttacaggaggcaaaagctttacatgagatacaaaatcttaccctaatcagtgtggagttgcatgctcgaactagacgagacttagaaccggatcctgaatttgacccaatctgtgctctgttctactgcatctcatctgacactccactgccagatacagaaaaaacagaactcacaggtgtaatagtgattgataaagacaagacagttttcagtcaagatatcagatatcagactccattacttattagatctggaattacaggactcgaagtcacctatgctgctgatgagaaggcactttttcatgaaattgcaaatataataaagaggtatgatcctgatattctgctaggatatgagattcagatgcattcctggggttacctcttacaaagggctgccgctttaagtattgacttatgtcggatgatctctcgggtgccagatgacaaaattgagaacagatttgcagctgaaagagatgagtatggatcatatacaatgagtgagataaatattgttggccgaattacactaaatctttggagaatcatgagaaatgaggtggctctaactaactacacctttgaaaatgtgagctttcatgttcttcatcagcgttttcccctctttacctttcgagtcttgtcagactggtttgataacaagacagatctatacagatggaaaatggttgatcattatgttagccgtgtccgtggaaatctccaaatgttagaacagctggacctgattgggaaaaccagtgagatggctagactttttggcattcagtttttacatgtactgacaaggggttcacagtaccgtgtggaatcaatgatgttgcgtattgctaaaccaatgaactatattcctgtgacacctagtgttcagcaaagatcccagatgagagccccacagtgtgttcctctaattatggagcctgaatcccgcttctatagcaactctgttctcgttttggatttccaatcactttatccttctattgtgattgcatataactactgcttttccacctgccttggccatgtggagaacttgggaaagtatgatgagttcaaatttggctgtacctctctgagagtacctccagatttactttaccaagttaggcatgatatcacagtgtcccccaatggagtagcttttgtcaagccttcagtaagaaaaggtgtactaccaagaatgcttgaagaaattttgaagactagatttatggtgaagcagtcaatgaaggcttacaagcaagacagagccctgtcacgaatgcttgatgcgcgtcagttgggacttaagctgatagcaaatgtcacatttggctatacatctgctaatttttctgggagaatgccatgcattgaggttggcgatagtattgttcacaaagccagagagaccttggaacgagctattaaactggtgaatgataccaagaaatggggggctagggttgtatatggcgatactgacagtatgtttgtgctactgaaaggagccactaaggagcagtcttttaagattggtcaggaaattgccgaagctgtaactgctaccaatcctaaaccagtgaaattgaagtttgaaaaggtatatttgccctgtgttttacaaacaaaaaagaggtatgtgggttacatgtatgaaacactggatcagaaggacccagtatttgatgcaaaaggaatagaaacagtcagaagagattcctgccctgctgtttctaagatacttgagcgttctctaaagctgctatttgaaacgagagatataagtctaattaaacagtatgttcagcgacaatgtatgaagcttctggaaggaaaggccagcatacaagactttatctttgccaaggaatacagaggaagtttttcttataaaccaggagcttgtgtgccagcccttgaacttacaaggaaaatgctgacttatgaccggcgctctgagcctcaggttggggagcgagtgccatacgtcatcatttatgggacccccggagtaccacttatccagcttgtaaggcgcccagtggaagtcctgcaggacccaactctgagactgaatgctacttactatattaccaagcaaatccttccacccttggcaagaatcttctcacttattggtattgatgtcttcagctggtatcatgaattaccaaggatccataaagctaccagctcctcgcgaagtgaacctgaagggcggaaaggcactatttcacaatattttactaccttacactgtcctgtgtgtgatgacctaactcagcatggcatctgtagtaaatgtcggagccaacctcagcatgttgcagtcatcctcaaccaagaaatccgggagttggaacgtcaacaggagcaacttgtaaagatatgcaagaactgtacaggttgctttgatcgacacatcccatgtgtttctctgaactgcccagtacttttcaaactctcccgagtaaatagagaattgtccaaggcaccatatctccggcagttattagaccagttttaaattgtcaatatcacagtattacaggtgctatttttttcagtgcttaccactaaactgttgtgcatggtgctttttaactttcatcgagtcaaggatgttcactgtctgttatctgaagactatgaagacttctatgctaaccgaattaaaatgtacttgttgatctctgaatagctcacttcttacaatgtacaaattcctcattctgtcaccttttaaacattgttttataatgcaggtgttggatttgctccagtatgtgtaccatcttgtaaattcatttgagtagatcatgtttacttcccagtggaaggagcactgaaaacctcttaaagaaaaagcatttgtgtgttttccttgaactgtctgtatcaagacgtgttacttcgagatatccattcactttataattttgactgcaaaatattttgtaaatacacttttttacttttcaaacgagtaaaataatgtgcaatgatttttatacaaatgattttcaagttgtttggtatatttcctctaggttttgcttgactcaaagtagatcgttattttgatcaaactgtgcaaacagtagtaccacgtgtagcattttgaaacattattttttaaaaaatgctgtcttgctttagctattaatggggcattgtgaggaactgtgcaaagacatttttgttacaaacctgtgggcctgttgcaatactttaaaaataaaaaattttattccatttgcttgttttgtatagacatttctattgcttctaaatatacttaaaatattttctttccttatgtactgtacagttaatcttatttgccatcatcttgaacacaaaatgtgtatttagaatatttgtataactgtgtaaaataaaaaaggaattatgtggtcagtgcattgttttttaaactggaaatcattttgttttaaaagttaa

SEQ ID NO: 11950 - DNA, 3024 bp, Homo sapiens
gcgccgcgctgcgcaccgccgccgaccatgagcgaggacagccgcggagacagccgcgccgagagcgccaaggacctggagaagcagcttcgcctgcgcgtgtgcgtgctcagcgagctccagaagaccgagcgggactatgtgggcacgctggagttcctggtgtcggcattcttacacagaatgaaccagtgtgcagcatcaaaagttgacaaaaatgtgacagaagaaacagtgaagatgttgttctcaaacattgaagacatccttgcagtacataaagaattcttaaaagtcgtggaagaatgcttacaccccgaacctaatgctcaacaagaagtgggaacctgctttcttcactttaaagacaagtttcgtatctatgatgaatattgtagtaaccatgagaaggcacaaaaattacttcttgaactcaacaaaataagaacaatccggacatttcttttgaactgcatgctgcttggaggacggaagaacacagatgttcccttggaaggatatttagtaacaccaatacaaagaatatgcaagtaccctcttattttgaaggagttgctgaagcggactccacggaaacacagtgactatgcagcagtgatggaagccctccaagccatgaaagctgtctgttccaacataaacgaggccaagagacagatggagaagttagaagttttagaggaatggcagtctcacattgaaggctgggaggggtccaacatcactgacacctgcactgaaatgctaatgtgtggagtcttactgaaaatttcttctggaaatattcaagaacgggtgttttttcttttcgataatcttttggtgtactgcaaaagaaaacacagacggttgaagaacagcaaggcatctacagatggacatcggtacctttttcgtggccggatcaacacggaggtgatggaagtggagaatgtggatgatggcaccgctgatttccatagcagtggacacattgttgttaatggatggaagatacataacacagcaaaaaataaatggtttgtttgtatggcaaaaacacctgaagagaagcatgaatggtttgaagctattttgaaagaaagagaacggcggaaaggtttaaaattaggaatggagcaagatacctgggtcatgatctctgaacagggtgagaaactttataaaatgatgtgcagacaaggaaatctgatcaaagaccgaaagagaaaactgactacgttccctaaatgctttcttggaagcgaatttgtgtcatggctgttggaaattggagagattcacaggcctgaggaaggcgtgcacttgggacaagcattattagaaaatggaatcattcaccatgttactgataaacatcaattcaaaccagaacagatgttatatagatttcgctatgatgatggaacattttatccaagaaatgagatgcaggacgtgatttcaaagggtgtaagattatattgtcgtcttcatagcctttttactccagtgataagagataaagattaccatttaaggacctacaaatctgtggtcatggccaacaaactgatagactggttaattgcacagggagattgccgcaccagagaagaggcaatgatatttggcgttggactctgtgacaatggatttatgcaccatgtccttgaaaaaagcgaattcaaagatgaacccctacttttccgttttttttcggatgaggaaatggagggatcaaatatgaaacatcgacttatgaaacatgacttaaaagttgtggaaaatgttatagctaagtcattattgattaaatccaatgaaggcagctatggctttggattagaagacaaaaataaagttccaataataaagttggtagaaaagggatctaatgctgagatggctggcatggaagtcgggaaaaagatttttgctattaatggtgacctagtttttatgagacctttcaatgaagtggattgcttcctgaaatcgtgtttaaacagcagaaaacctctaagagttcttgtgagcacaaagccaagagagacagtgaaaattccagattcagctgatggacttggcttccagatccggggatttggcccttctgttgtgcatgctgtaggaagaggaactgtggctgcagcagctggtcttcaccctggacagtgcattatcaaggtgaatggaatcaatgtcagcaaagagacacatgccagtgtcattgcacacgttacagcctgcaggaagtacaggcggccaacgaagcaagattccatacaatgggtttataatagcattgagagtgctcaagaagaccttcaaaaatctcactccaagccccctggagatgaagcaggggatgcttttgactgtaaagtagaagaggttattgacaaattcaacactatggccatcattgatgggaagaaggagcatgtgagtctgacagtggacaatgtccacctggaatatggtgtcgtgtatgagtacgacagcacagctggcatcaagtgcaatgtggtggaaaagatgattgagcccaaaggtttcttcagcttaactgccaagattcttgaagccctggctaaaagtgatgagcattttgtacaaaactgtaccagcctaaattctctaaatgaagtgattcctactgaccttcagagtaaattcagtgccctttgcagtgaaagaattgaacacctatgtcagagaatatccagttataaaaaggttcaagcttcagaaaggttttacaatttcacagcacggcatgctgtctgggagcacagttttgatcttcacagtgtaagcagcacatttccagtacctgtgactatggagttcctcctgctgcctcctcctctcttaggaatatcccaggatggaagacagcactgcattcctgaggaccttccttctcaagaaatgctcttagcagagagggcccctgtctgattcttaccctttggaacagttcaggcacccttagacacagtacacagcccttcctag

SEQ ID NO: 11951 - DNA, 2414 bp, Homo sapiens
actctctttacagtcagccttctgcttgccacagtcatagtgggcagtcagtgaatcttccccaagtgctgacaattaatacctggtttagcggcaaagattcagagaggcgtgagcagcccctctggccttcagacaaaaatctacgtaccatcagaaactatgtctctgcagatggtaacagtcagtaataacatagccttaattcagccaggcttctcactgatgaattttgatggacaagttttcttctttggacaaaaaggctggcccaaaagatcctgccccactggagttttccatctggatgtaaagcataaccatgtcaaactgaagcctacaattttctctaaggattcctgctacctccctcctcttcgctacccagccacttgcacattcaaaggcagcttggagtctgaaaagcatcaatacatcatccatggagggaaaacaccaaacaatgaggtttcagataagatttatgtcatgtctattgtttgcaagaacaacaaaaaggttacttttcgctgcacagagaaagacttggtaggagatgttcctgaagccagatatggtcattccattaatgtggtgtacagccgagggaaaagtatgggtgctctctttggaggacgctcatacatgccttctacccacagaaccacagaaaaatggaatagtgtagctgactgcctgccctgtgttttcctggtggattttgaatttgggtgtgctacatcatacattcttccagaacttcaggatgggctatcttttcatgtctctattgccaaaaatgacaccatctatattttaggaggacattcacttgccaataatatccggcctgccaacctgtacagaataagggttgatcttcccctgggtagcccagctgtgaattgcacagtcttgccaggaggaatctctgtctccagtgcaatcctgactcaaactaacaatgatgaatttgttattgttggtggctatcagcttgaaaatcaaaaaagaatgatctgcaacatcatctctttagaggacaacaagatagaaattcgtgagatggagaccccagattggaccccagacattaagcacagcaagatatggtttggaagcaacacgggaaatggaactgtttttcttggcataccaggagacaataaacaagttgtttcagaaggattctatttctatatgttgaaatgtgctgaagatgatactaatgaagagcagacaacattcacaaacagtcaaacatcaacagaagatccaggggattccactccctttgaagactctgaagaattttgtttcagtgcagaagcaaatagttttgatggtgatgatgaatttgacacctataatgaagatgatgaagaagatgagtctgagacaggctactggattacatgctgccctacttgtgatgtggatatcaacacttgggtaccattctattcaactgagctcaacaaacccgccatgatctactgctctcatggggatgggcactgggtccatgctcagtgcatggatctggcagaacgcacactcatccatctgtcagcaggaagcaacaagtattactgcaatgagcatgtggagatagcaagagctctacacactccccaaagagtcctacccttaaaaaagcctccaatgaaatccctccgtaaaaaaggttctggaaaaatcttgactcctgccaagaaatcctttcttagaaggttgtttgattagttttgcaaaagcctttcagattcaggtgtatggaatttttgaatctatttttaaaatcataacattgattttaaaaatacatttttgtttatttaaaatgcctatgttttcttttagttacatgaattaagggccagaaaaaagtgtttataatgcaatgataaataaagtcattctagaccctatacattttgaaaatattttacccaaatactcaatttactaatttattcttcactgaggatttctgatctgattttttattcaacaaaccttaaacacccagaagcagtaataatcatcgaggtatgtttatatttattatatgagtcttggtaacaaataacctataaagtgtttatgacaaatttagccaataaagaaattaacacccaaaagaattaaattgattattttgtgcaacataacaattcggcagttggccaaaacttaaaagcaagatctactacatcccacattagtgttctttatataccttcaagcaaccctttggattatgcccatgaacaagttagtttctcatagctttacagatgtagatataaatataaatatatgtatacatatagatagataatgttctccactgacacaaaagaagaaataaataatctacatcaaaaaaaaaaaaaaaaaaaaaaaaaaaa

SEQ ID NO: 11952 - DNA, 2004 bp, Homo sapiens
aggcgatggccctgctgctggtgctcctcgcctcttggggcctggggcagtgagggggccggcgggcgtgggccgagtggccgcgggcgccatggagggggtgctgtacaagtggaccaactatctgagcggttggcagcctcgatggttccttctctgtgggggaatattgtcctattatgattctcctgaagatgcctggaaaggttgcaaagggagcatacaaatggcagtctgtgaaattcaagttcattctgtagataatacacgcatggacctgataatccctggggaacagtatttctacctgaaggccagaagtgtggctgaaagacagcggtggctggtggccctgggatcagccaaggcttgcctgactgacagtaggacccagaaggagaaagagtttgctgaaaacactgaaaacttgaaaaccaaaatgtcagaactaagactctactgtgacctccttgttcagcaagtagataaaacaaaagaagtgaccacaactggtgtgtccaattctgaggagggaattgatgtgggaactttgctgaaatcaacctgtaatacttttctgaagaccttggaagaatgcatgcagatcgcaaatgcagccttcacctctgagctgctctaccgcactccaccaggatcacctcagctggccatgctcaagtccagcaagatgaaacatcctattataccaattcataattcattggaaaggcaaatggagttgagcacttgtgaaaatggatctttaaatatggaaataaatggtgaggaagaaatcctaatgaaaaataagaattccttatatttgaaatctgcagagatagactgcagcatatcaagtgaggaaaatacagatgataatataacagtccaaggtgaaataaggaaggaagatggaatggaaaacctgaaaaatcatgacaataacttgactcagtctggatcagactcaagttgctctccggaatgcctctgggaggaaggcaaagaagttatcccaactttctttagtaccatgaacacaagctttagtgacattgaacttctggaagacagtggcattcccacagaagcattcttggcatcatgttatgctgtggttccagtattagacaaacttggccctacagtgtttgctcctgttaagatggatcttgttggaaatattaagaaagtaaatcagaagtatataaccaacaaagaagagtttaccactctccagaagatagtgctgcacgaagtggaggcggatgtagcccaggttaggaactcagcgactgaagccctcttgtggctgaagagaggtctcaaatttttgaagggatttttgacagaagtgaaaaatggggagaaggatatccagacagccctaagaaatccaacagaaaacacttgacaccaaaacataccctgatgaagatcctgaacttcaagaatgaagaaagaattcctcaccattcaggcagaaaaagcaagtcaccaagggacctcaaacttcctttccacaagattctgtgacgggaaacaatgggggagtatttccgaagttctgagtaggaaaaaagaatgactcaaatgtattattgccaaccaagtcgtcaaatctaatgtcaagttctcttaagcaggtaagaactcagaacataatacctgagtgccttcttaaggaaaccatttgataggaaagatgaaccaaataactcaatgatggatgagctggtagaaaaaaagctggtggtgaaccaaggtcaaactggaaattatagtcacagtatagatatagattataaatattacaaaccctaagatagctaataaattgggaatgggagaagggaggatataagagcactaatgccctcttattttcatagcagagacttgatactgtctcaacttttttcaaaaacacaatttcttaaattttttggtaatcttttaaataaacagatttctaaaaagaaaaaaaaaaaaaaaaaaaaaaaa

SEQ ID NO: 11953 - DNA, 3163 bp, Homo sapiens
ctcttccgccgtcgtcgccgccatcctcggcgcgactcgcttctttcggttctacctgggagaatccaccgccatccgccaccatggtgaacttcacggtagaccagatccgcgccatcatggacaagaaggccaacatccgcaacatgtctgtcatcgcccacgtggaccatggcaagtccacgctgacagactccctggtgtgcaaggcgggcatcatcgcctcggcccgggccggggagacacgcttcactgatacccggaaggacgagcaggagcgttgcatcaccatcaagtcaactgccatctccctcttctacgagctctcggagaatgacttgaacttcatcaagcagagcaaggacggtgccggcttcctcatcaacctcattgactcccccgggcatgtcgacttctcctcggaggtgactgctgccctccgagtcaccgatggcgcattggtggtggtggactgcgtgtcaggcgtgtgcgtgcagacggagacagtgctgcggcaggccattgccgagcgcatcaagcctgtgctgatgatgaacaagatggaccgcgccctgctggagctgcagctggagcccgaggagctctaccagactttccagcgcatcgtggagaacgtgaacgtcatcatctccacctacggcgagggcgagagcggccccatgggcaacatcatgatcgatcctgtcctcggtaccgtgggctttgggtctggcctccacgggtgggccttcaccctgaagcagtttgccgagatgtatgtggccaagttcgccgccaagggggagggccagttggggcctgccgagcgggccaagaaagtagaggacatgatgaagaagctgtggggtgacaggtactttgacccagccaacggcaagttcagcaagtcagccaccagccccgaagggaagaagctgccacgcaccttctgccagctgatcctggaccccatcttcaaggtgtttgatgcgatcatgaatttcaagaaagaggagacagcaaaactgatagagaaactggacatcaaactggacagcgaggacaaggacaaagaaggcaaacccctgctgaaggctgtgatgcgccgctggctgcctgccggagacgccttgttgcagatgatcaccatccacctgccctcccctgtgacggcccagaagtaccgctgcgagctcctgtacgaggggcccccggacgacgaggctgccatgggcattaaaagctgtgaccccaaaggccctcttatgatgtatatttccaaaatggtgccaacctccgacaaaggtcggttctacgcctttggacgagtcttctcggggctggtctccactggcctgaaggtcaggatcatggggcccaactatacccctgggaagaaggaggacctctacctgaagccaatccagagaacaatcttgatgatgggccgctacgtggagcccatcgaggatgtgccttgtgggaacattgtgggcctcgtgggcgtggaccagttcctggtgaagacgggcaccatcaccaccttcgagcacgcgcacaacatgcgggtgatgaagttcagcgtcagccctgttgtcagagtggccgtggaggccaagaacccggctgacctgcccaagctggtggaggggctgaagcggctggccaagtccgaccccatggtgcagtgcatcatcgaggagtcgggagagcatatcatcgcgggcgccggcgagctgcacctggagatctgcctgaaggacctggaggaggaccacgcctgcatccccatcaagaaatctgacccggtcgtctcgtaccgcgagacggtcagtgaagagtcgaacgtgctctgcctctccaagtcccccaacaagcacaaccggctgtacatgaaggcgcggcccttccccgacggcctggccgaggacatcgataaaggcgaggtgtccgcccgtcaggagctcaagcagcgggcgcgctacctggccgagaagtacgagtgggacgtggctgaggcccgcaagatctggtgctttgggcccgacggcaccggccccaacatcctcaccgacatcaccaagggtgtgcagtacctcaacgagatcaaggacagtgtggtggccggcttccagtgggccaccaaggagggcgcactgtgtgaggagaacatgcggggtgtgcgcttcgacgtccacgacgtcaccctgcacgccgacgccatccaccgcggagggggccagatcatccccacagcacggcgctgcctctatgccagtgtgctgaccgcccagccacgcctcatggagcccatctaccttgtggagatccagtgtccagagcaggtggtcggtggcatctacggggttttgaacaggaagcggggccacgtgttcgaggagtcccaggtggccggcacccccatgtttgtggtcaaggcctatctgcccgtcaacgagtcctttggcttcaccgctgacctgaggtccaacacgggcggccaggcgttcccccagtgtgtgtttgaccactggcagatcctgcccggagaccccttcgacaacagcagccgccccagccaggtggtggcggagacccgcaagcgcaagggcctgaaagaaggcatccctgccctggacaacttcctggacaaattgtaggcggcccttcctgcagcgcctgccgccccggggactcgcagcacccacagcaccacgtcctcgaattctcagacgacacctggagactgtcccgacacagcgacgctcccctgagaggtttctggggcccgctgcgtgccatcactcaaccataacacttgatgccgtttctttcaatatttatttccagagtccggaggcagcagacacgccctcttagtagggacttaatgggccggtcggggagggggaggcgggatgggacacccaacactttttccatttcttcagagggaaactcagatgtccaaactaattttaacaaacgcattaagaggtttatttgggtacatggcccgcagtggcttttgccccagaaaggggaaaggaacacgcgggtagatgatttctagcaggcaggaagtcctgtgcggtgtcaccatgagcacctccagctgtactagtgccattggaataataaatttgataaggtggtgaaaaaa

SEQ ID NO: 11954 - DNA, 4527 bp, Homo sapiens
ccgcttctgtggccacggcagatgaaacagaaaggctaaagagggctggagtcaggggacttctcttccaccagcttcacggtgatgatatggcatctgccagctctagccgggcaggagtggccctgccttttgagaagtctcagctcactttgaaagtggtgtccgcaaagcccaaggtgcataatcgtcaacctcgaattaactcctacgtggaggtggcggtggatggactccccagtgagaccaagaagactgggaagcgcattgggagctctgagcttctctggaatgagatcatcattttgaatgtcacggcacagagtcatttagatttaaaggtctggagctgccataccttgagaaatgaactgctaggcaccgcatctgtcaacctctccaacgtcttgaagaacaatgggggcaaaatggagaacatgcagctgaccctgaacctgcagacggagaacaaaggcagcgttgtctcaggcggagagctgacaattttcctggacgggccaactgttgatctgggaaatgtgcctaatggcagtgccctgacagatggatcacagctgccttcgagagactccagtggaacagcagtagctccagagaaccggcaccagccccccagcacaaactgctttggtggaagatcccggacgcacagacattcgggtgcttcagccagaacaaccccagcaaccggcgagcaaagccccggtgctcggagccggcaccgccagcccgtcaagaactcaggccacagtggcttggccaatggcacagtgaatgatgaacccacaacagccactgatcccgaagaaccttccgttgttggtgtgacgtccccacctgctgcacccttgagtgtgaccccgaatcccaacacgacttctctccctgccccagccacaccggctgaaggagaggaacccagcacttcgggtacacagcagctcccagcggctgcccaggcccccgacgctctgcctgctggatgggaacagcgagagctgcccaacggacgtgtctattatgttgaccacaataccaagaccaccacctgggagcggccccttcctccaggctgggaaaaacgcacagatccccgaggcaggttttactatgtggatcacaatactcggaccaccacctggcagcgtccgaccgcggagtacgtgcgcaactatgagcagtggcagtcgcagcggaatcagctccagggggccatgcagcacttcagccaaagattcctctaccagtcttcgagtgcttcgactgaccatgatcccctgggccccctccctcctggctgggagaagagacaggacaatggacgggtgtattacgtgaaccataacactcgcacgacccagtgggaggatccccggacccaggggatgatccaggaaccagctctgcccccaggatgggagatgaaatacaccagcgagggggtgcgatactttgtggaccacaatacccgcaccaccacctttaaggatcctcgcccggggtttgagtcggggacgaagcaaggttcccctggtgcttatgaccgcagttttcggtggaagtatcaccagttccgtttcctctgccattcaaatgccctacctagccacgtgaagatcagcgtttccaggcagacgcttttcgaagattccttccaacagatcatgaacatgaaaccctatgacctgcgccgccggctctacatcatcatgcgtggcgaggagggcctggactatgggggcatcgccagagagtggtttttcctcctgtctcatgaggtgctcaaccctatgtattgtttatttgaatatgccggaaagaacaattactgcctgcagatcaaccccgcctcctccatcaacccggaccacctcacctactttcgctttataggcagattcatcgccatggcgctgtaccatggaaagttcatcgacacgggcttcaccctccctttctacaagcggatgctcaataagagaccaaccctgaaagacctggagtccattgaccctgagttctacaactccattgtctggatcaaagagaacaacctggaagaatgtggcctggagctgtacttcatccaggacatggagatactgggcaaggtgacgacccacgagctgaaggagggcggcgagagcatccgggtcacagaggagaacaaggaagagtacatcatgctgctgactgactggcgtttcacccgaggcgtggaagagcagaccaaagccttcctggatggcttcaacgaggtggccccgctggagtggctgcgctactttgacgagaaagagctggagctgatgctgtgcggcatgcaggagatagacatgagcgactggcagaagagcaccatctaccggcactacaccaagaacagcaagcagatccagtggttctggcaggtggtgaaggagatggacaacgagaagaggatccggctgctgcagtttgtcaccggtacctgccgcctgcccgtcgggggatttgccgaactcatcggtagcaacggaccacagaagttttgcattgacaaagttggcaaggaaacctggctgcccagaagccacacctgcttcaaccgtctggatcttccaccctacaagagctacgaacagctgagagagaagctgctgtatgccattgaggagaccgagggctttggacaggagtaaccgaggccgcccctcccacgccccccagcgcacatgtagtcctgagtcctccctgcctgagaggccactggccccgcagcccttgggaggcccccgtggatgtggccctgtgtgggaccacactgtcatctcgctgctggcagaaaagcctgatcccaggaggccctgcagttcccccgacccgcggatggcagtctggaataaagccccctagttgcctttggccccacctttgcaaagttccagagggctgaccctctctgcaaaactctcccctgtcctctagaccccaccctgggtgtatgtgagtgtgcaagggaaggtgttgcatccccaggggctgccgcagaggccggagacctcctggactagttcggcgaggagactggccactgggggtggctgttcgggactgagagcgccaagggtctttgccagcaaaggaggttctgcctgtaattgagcctctctgatgatggagatgaagtgaaggtctgagggagcgggccctggggcgaggccatctctgcctgcctccctagcaggcgccagcggtggaggctgagtcgcaggacacatgccggccagttaattcattctcagccaatgaaggtttgtctaagctgcctgggtatccacgggacaaaaacagcaaactccctcagactttgtccatgtataaacttgaagtggttgtgttgtagggttgcaggttttttgttacgctgctgtcactttctgtccaggagctggcaccccaggtgttctgagaccttgagggacccagacctttgggtccaagagtttcccaaacagccacgcctctcaggaacccacctggcggttccgtgagctcaggcaggcctgacccggcggcacagcctggcagggacctcgtccccaagcctggcagaatgagaggggttgaggtcccgagcgccactcctagccttgccgccttcaatagagaagaaatccctttgctagatagggtcccccaggcagtccccagtggcgggacacaggggtccggctgtggagctcccctgccagcccctggagctccaggagggcctgttggtcccctgttcagaatggagtgcagcccgccagcggaaagtgttcattctgcataggtgtgaggctttatctgcacacaggacatgaaaaccagcagaaaggccctgagctgctgcatagccccatctgatttctgcagttcccgccagcctccaacacggggactctgccgtaactggaatcttcataggtcatattgaaatcttcaaggtgaccatgccccaccggggtgctggggcagtagtcatggcagactcccggcctgggcccccaggattctaggacccccaggcagccccttggactggtcccgggtgccttccaagcacagtctccatgctcccagattctcgaccttcccccggcccgggaggtgcagcctgcgtctgcctctgtcgtgtgtgctgatttgagtggcttagcttgccacagcgcagcctcttctgtccctttcagtcatttgctgtacttccctgtggcacgttaccatggaagccgctccagggtgggtcagggtgcaagctgctggtgaggtttggaagcatcaggctcacgggtgttcatgtgtgttcgtgcgtgtgtgtgcgtacgtgtatataactgaagtgtctgtacggaatgccctttgctagccatgggctggtcaccagattgttttgtaatgcccgccccttgcctcgatattgccagtttcttgtgcaataaacaatcagcagctgtaaaaaaaaaaaaaaaaaaaaaaaaa

SEQ ID NO: 11955 - DNA, 2508 bp, Homo sapiens
aaagtaggttgggagtggaaggtggtggctcctgctccgcatgtggggaagatggcgccgccggtggcagagagggggctaaagagcgtcgtgtggcagaagataaaagcaacagtgtttgatgactgcaagaaagaaggcgaatggaagataatgcttttagatgaatttaccactaagcttttggcatcgtgttgcaaaatgacagatcttctagaagaaggtattactgttgtagagaatatttataagaaccgtgaacctgtcagacaaatgaaagctctttatttcatcactccgacatcaaagtctgtagattgtttcttacatgattttgcaagtaaatcggagaacaagtataaagcagcatatatttacttcactgacttttgccctgataatctctttaacaaaattaaggcttcttgctccaagtcaataagaagatgtaaagaaataaatatttccttcattccacatgaatctcaggtgtatactcttgatgtaccagatgcattctattactgttatagtccagaccctggtaatgcaaagggaaaagatgccattatggaaacaatggctgaccagatagttacagtgtgtgccaccttggatgaaaatcccggagtaagatataaaagtaaacctctagataatgccagtaagcttgcacagcttgttgaaaaaaagcttgaagactactacaagattgatgaaaagagcctaataaagggtaaaactcattcacagctcttaataattgatcgtggctttgatcctgtgtccactgtcctgcatgaactgacctttcaggcaatggcatatgatctactaccaattgagaatgatacatacaaatataaaacagatgggaaaggaaaggaggccatccttgaagaagaagatgacctctgggttagaattcgacatcgacatattgcggttgtgttagaggaaattcccaagcttatgaaagaaatttcatcaacaaagaaagcaacagaaggaaagacatcacttagtgctcttacccagctgatgaaaaagatgccccatttccgaaaacagattactaagcaagttgtccatcttaacttagcagaagattgcatgaataagttcaagcttaatatagaaaagctctgcaaaactgaacaggacctggcacttggaactgatgcagaaggacagaaggtgaaagattccatgcgagtactccttccagttctactcaacaaaaatcatgataattgtgataaaataagagcaattctactttatatcttcagtattaatggaactacggaagaaaatttggacaggttgatccagaatgtaaagataggaaatgagagtgacatgattcgtaactggagttaccttggtgttcccattgttccccaatctcaacaaggcaaaccgttaagaaaggatcggtctgcagaagaaacttttcagctctctcggtggacaccttttatcaaagatattatggaggatgctattgataatagattagattcaaaagaatggccatattgttcccagtgtccagcagtatggaatggttcaggagctgtaagtgctcgccagaaacccagagctaattatttagaagaccgaaaaaatgggtcaaagctgattgtttttgtaattggagggatcacatactctgaagtgcgtggtgcttatgaagtttctcaggcacataaatcctgtgaagttattattggttctacacatgttttaacacccaaaaagctgttggatgatataaagatgctgaataaacccaaggataaagtctccttaattaaagatgaatagcatttctttttggagggtttagagattcttactaatatgttgaactaaaatagaaagaaaatgttgctgtcatgtaatttaaacaatgtaaatattttatggaataatggcttttcaaatacatttcttaaggaactgtttatgattattactggatttgtcatttttgataatttaaatattgctgctgctttgtagatgatgagaagaaatgttaaagtgctttctaaaaggaaattttttcacctttggaggagaatatattagagttgtgggtaatttttcacagccacctatgtacatactaattacccattggatacttatatctaaaagtctcatgctgaagtatagtttttgggaaagaatgattttaaataaagagattgtaaaagtaaaaaactgtaaatgtatatgtatgatagaattgtttcctctaagtgtagtttttctttcaactaaaattcagtttatgtgtaaaataattcagtcattaatagaaatggagtgatttcacagtgtgtactgttttgccacatacttctaaagaacacaattttatataattttgaaatcatgtatgtttaaattagaaaaccaaaaatcatgaacattctaagaggaaataaatatagaatttaaaaaattaaaaaaaaaaaaaaaaaaaaaaaaggaatt

SEQ ID NO: 11956 - DNA, 6230 bp, Homo sapiens
aggaagaagcgccgggaaagatggcggcgtctgtggtttgaattccagcggcgccgccagagtctgaacaagagctggggtggagggggcggggacctggggagcccggcgggtcgctatcgcggggggtactagtggcgccgccgccacagacaccaacgctgtcgccacctctgtagccatgatggacttggtgttggaagaggacgtcaccgtccctgggacgctcagcggctgcagtggccttgttcccagtgtaccagatgacctggatggcatcaaccccaatgctgggttgggaaatggtctgctcccaaatgtgtcagaagaaacagtgtctcccaccagagcacggaacatgaaggactttgaaaatcaaatcactgaattgaagaaagaaaactttaacctaaagctccgcatctatttccttgaggaaagaatgcaacaggaatttcatggccccactgaacatatctacaaaactaacattgagctcaaggtggaagtagaaagtctgaagcgggaactccaggagagagagcagctgctcatcaaagcctccaaagcagttgagagcttagctgaagcaggtggctctgaaatccagcgggtgaaagaagatgctcgaaagaaggtgcagcaggtggaagatctcctaactaaaagaatactccttttggaaaaggatgtgacagccgcccaggcagaactggaaaaggcctttgcagggacagagacggagaaggctcttcggttgcgtttggaaagcaagctttcagagatgaagaagatgcacgagggggacttggcgatggctctggtcctggatgagaaagacagactgattgaggagttgaagctgtctttgaagagcaaagaagctttaattcagtgccttaaagaggagaaatctcagatggcatgtcctgatgagaatgtgtcatctggagagctccgaggactttgtgctgctccaagggaagaaaaggagagagaaactgaggctgcacaaatggagcatcagaaggagagaaacagctttgaagagaggatccaggcacttgaagaggacctgagagagaaggaaagagaaattgctacagagaagaaaaatagtctaaagagggataaagccattcagggtttaaccatggcattaaaatcaaaggaaaaaaaggttgaagaacttaactctgaaattgaaaagctcagtgctgcctttgctaaagccagagaggccctacagaaagcacagacccaggaatttcaggggtctgaagactatgagactgctctatcaggaaaggaagccctttcggctgcgctgcgctcacaaaacctcaccaagagtacagagaaccacagactgcgtagaagcattaagaagatcacccaggagctgagtgacttgcagcaggagagggagagactggagaaggacctggaggaagcccatcgagagaagagcaaaggagactgcaccatccgtgatcttagaaatgaagttgaaaaattacgcaatgaagtgaatgaaagagagaaagcaatggaaaatcgttacaagagtcttctgagtgaaagcaataaaaaattgcacaatcaagagcaagtgatcaaacatctaacagaaagtaccaatcagaaggacgtgttgcttcagaaattcaatgaaaaagatttggaagtaatacagcagaactgctatttaatggctgcagaggatcttgagctcaggagtgaaggcttaataacagaaaagtgctcttctcaacagccaccaggcagcaaaaccatcttctctaaggaaaagaaacaatcatcagactatgaagagctgattcaggtcttaaagaaagagcaggacatctatacccatctggtcaaatctctgcaggaatcagacagtatcaacaacctgcaggctgagttaaacaagatttttgccctgcggaagcaactggagcaggatgtgctttcatatcagaatttgcggaagaccttggaggagcagatcagcgaaattcggaggcgggaagaagaatcattttcactttatagtgatcaaacatcttatctaagtatttgccttgaagaaaacaatcggtttcaagtggaacatttttctcaagaagaacttaagaaaaaggtcagtgaccttatacagctagtgaaggagctgtatacagacaaccagcacctgaagaaaaccatttttgatctctcctgcatgggtttccagggaaatgggtttccagatagacttgcgtctacagaacaaacagagcttctggctagcaaggaggacgaggacacgatcaaaattggggaggatgacgagattaatttcctgagtgaccagcatttgcagcagagtaatgagattatgaaagacctttccaaaggaggctgcaaaaatggatacttaaggcacacggagtctaagatttcagattgtgatggggcccacgcacctggctgcctagaagaaggtgcattcataaacctgcttgcccctttgttcaatgagaaggccacattattactggaatccaggccagaccttctgaaagtggtacgggaactgcttctgggacaactattcttgacagagcaggaagtttctggagaacaccttgatggtaaaactgagaagacacctaagcaaaaaggtgaacttgtacattttgtccaaaccaactcattttccaagccacatgatgaactgaagttgtcttgtgaggcccagctagtaaaggcaggcgaagtgcccaaggtaggactgaaagatgcctcagtgcagactgtggccacggagggcgacctgctgagattcaagcatgaagcaacaagagaggcttgggaagagaaaccgatcaacactgcactcagcgcagagcatcggccagagaacctgcacggggtgcctgggtggcaggctgccctcctttccctccctggtattaccaacagagaggctaagaagtcccgcttgccaatcctaataaaaccatcccggtcattaggaaatatgtatcgtctccctgccacccaggaggtggtgacgcagctgcagagccagatcttggagctgcagggggagctgaaggagtttaaaacttgtaataagcaacttcaccaaaagttaattctggctgaagcagtgatggaggggaggccaacgcccgacaaaacgttgctgaatgctcagccccctgtgggagcagcctaccaggacagcccaggagagcagaaaggaattaaaaccacatcttctgtctggagagacaaggaaatggacagtgatcagcaaagaagctacgagattgactctgagatttgcccacctgatgaccttgccagcttgccatcatgcaaagaaaatcctgaagatgttctgagcccaacttcagtagctacttacctgagttccaagagtcagccttctgctaaagtcagtgtgatggggactgatcagtcagagagcattaatacctcaaatgagacagaatacttaaaacagaaaatccatgacttggaaactgagctggaaggctaccagaatttcatatttcagcttcaaaagcactcccagtgcagtgaggccataattacagttttgtgtgggacagaaggggcccaggatggcttgagcaagcccaagaatggttctgatggggaagaaatgaccttttcaagtttgcaccaagtgcgatacgtgaaacacgtgaaaatcctcggtccgctggccccagagatgattgacagcagggtgctggagaacctcaaacagcagctggaggaacaggaatacaagctgcagaaggagcagaatttgaacatgcaacttttcagtgagatccataatctgcagaataagttcagagatctctcacctcccagatacgattcattagttcagtcccaagccagggagctctcccttcaacggcagcagattaaggatggccatggcatctgtgtcatctcccgtcaacacatgaacaccatgattaaggcatttgaggagttgctgcaggccagtgatgtggattactgtgtggccgagggtttccaggaacagctgaatcaatgtgctgagctgctggagaaattggaaaagctatttctcaacggaaaatcagttggagtggaaatgaacacccagaatgaactgatggagaggattgaggaagacaacttaacctaccaacatcttctgcctgaatctcctgagccttcagcctctcatgcgctctctgattatgaaacatctgaaaagtccttcttctcacgagaccagaagcaagataatgagacagagaagacttcagttatggtgaacagtttttctcaagacttactaatggaacacatacaggaaattcgaactttgagaaagcgtttagaagaatctattaaaacaaatgagaagctacggaaacagttggaacggcaaggatctgaatttgttcaaggttctacaagcatttttgcttctggttcagagcttcatagttctctaacatcagaaattcatttcttgaggaagcagaaccaggccctcaatgcaatgctcattaaaggatccagagataaacagaaggagaatgacaaattacgagagtccctctccaggaagaccgtgagcctggagcaccttcagcgggagtatgccagcgtgaaggaagaaaatgaaaggctgcagaaagaaggcagcgagaaggagagacacaaccagcagctgatccaggaggtccgctgcagcggccaggagctgagcagggtgcaggaggaggtgaagttgaggcagcagctgctctcacagaatgacaagctattgcagtctctccgagtggagctgaaggcgtatgagaagctggatgaagagcacaggagactgagagaggcgtcgggagaaggctggaaggggcaggatcctttcagggacctgcacagcctcctgatggagatccaggctctgcgcttgcaactagaaaggagcatcgaaaccagcagcactctgcagagcaggctcaaggaacagctggcaaggggggcagagaaggcacaggaaggagccctcactctggctgtccaagccgtgtccatccctgaggtgccccttcagcctgacaaacacgatggtgacaaatatcccatggaaagtgataattcatttgatctgtttgattcctcccaggcagtgacaccaaaatcagtttcagagactcctccactctctgggaatgacacggactccctctcctgcgacagtggcagttcggcaactagcactccgtgtgtgtcccgcctggtcactggccaccacctgtgggccagcaagaatggccgccatgtcctgggcctgattgaggactatgaggccctgctcaaacagatcagccagggacagaggctccttgctgaaatggacattcaaacccaagaggctcccagctccacaagtcaagagctgggaacaaagggtccacacccagcaccactgagcaagtttgtgagcagtgtgagcacggccaagctgaccctggaagaggcctacaggcggctgaagcttctctggagagtctcactccccgaggatggccagtgcccccttcactgtgagcagattggagaaatgaaggcagaggtcaccaaactacataaaaaattgtttgaacaagaaaagaagttgcaaaacaccatgaagcttttgcagctgagcaagcgccaggaaaaagtcatctttgatcaattggtcgtaacccacaaaatccttcggaaggccagaggaaacctggagcttaggcctgggggagcccatccaggaacatgcagtcccagcagaccaggctcctgagaagaactttcagccaataaagcttgtgcttcccccaccgagctcacgctgtctctttgttccaagtgtggttcctatttattgaggaagaaagagctgtctggccaaaggaaatctattttttcccttcatgttttctctctgaaagttggcttgagagttgttgtcagaaaggtgcaggtgctccacaaacgggtggtaaaaaggcctcgagctcttggatgttgtatttcagatcaggggcaggcaccggagttgaggctgtgcgccttggtgggcttcacgtcttcccctggatttgcttagtactcagccagtgccacagtttgaagattctcattaaatgattcatttcatttcaccttga

SEQ ID NO: 11957 - DNA, 1165 bp, Homo sapiens
cgcaccatctgcacccccacattctcctcgcgggaagcgcagcagtgcctccaagggttcttaaagcagagatgaataatacggcagctagtccaatgtctactgcaacttcaagtagtggaaggagtacagggaagtctataagctttgcaacagaattacagagtatgatgtattctttaggtgatgctagaaggcctcttcatgaaacagcagttttggtagaagatgtggtacacactcagttaattaatctgttacagcaagctgctgaagtttctcagctgcggggagcaagggtaatcactcctgaagatcttctgtttttgatgcgcaaagataagaaaaaacttagaagactgctaaaatacatgtttatccgagactacaaatcaaagattgtcaaaggcatcgatgaggatgatcttctcgaagacaaattgagtggcagcaataatgcgaacaaaagacaaaagattgctcaggacttcctcaactctattgaccagacaggagaacttttagcaatgtttgaagatgacgaaattgatgaagttaaacaagaaagaatggagagagcagaaagacaaactcgaattatggattcagctcaatatgcagaattctgtgaaagtcgacaattaagtttctccaaaaaagcttccaaatttcgagactggttggactgcagcagtatggagataaaacccaatgttgtcgcaatggaaatcttagcatatttagcgtatgaaactgtggcacagttagtggatctggctcttcttgtgaggcaagacatggtaaccaaggcaggggaccccttcagccatgccatttctgcaaccttcattcagtatcacaactctgctgagagcactgcagcctgtggtgttgaggctcacagcgatgccatccagccctgccacatcagagaggccattcgacgctacagccacaggattggcccactttccccattcacaaatgcctaccgcaggaatgggatggcttttctagcctgctgatgtgacaactgtgatgtgcctgcaacaacaggaaaggcaatgttatattaaggtgatttcttgtgaacaaaataaaatacaaatttacctttcttttatctgacaaaaaaaaaaaaaaaaaaaaaaaaaaaaaaaaaaaa

SEQ ID NO: 11958 - DNA, 1466 bp, Homo sapiens
atactcaccaggatacccctcgttaagggcaaggcggcttctggctcttccgcaggctcagttgtgggttcctgtgtgcttagtcatcgggtccgacacaggctggactgatctggagagccgcgaagggcctgccttcacaaagggacgtaacgcaagtactgcgggcagtgtttgaatatggccctgaacaatgtgtccctgtcctccggtgatcagaggagcagggtggcctaccgctcttcccatggcgacctcagaccgcgggcgtcagcgttggcgatggtctccggagacggcttcctcgtttccaggcctgaagcgattcatctaggacctcggcaggcggtgcgaccaagcgttcgggccgagagccgtcgagtggatggtggcggccggagcccaagggaaccagatggccggggccggagccgccaagccagattctcaccttacccaatccctgccgttgaacccgatctcctaagaagtgtgctgcaacagcgtttgattgcattaggaggtgttatcgcagctcgaatttcagtttaaacgaacacctttcctctggccctcacttagcttgtgaacaggcctttttaaaatcctttcttggtgtagcagcaatcgtgttgttttatttttagatggatgtattttcatttaatacgtgggagttatatgaatatgtcctagcactaagggaagtgtaacagttgattgatttaggtggttttatgcagccagaacgattggaacaggaaaggtgtggaagggatattcttaggtcgtcacaaagctgagctgatgggagcaccctccccagaggtcaacaatccattcgttaactcagacacttaacctttacctttacttctgttggcgaaaaagaagtgctcctttttattacactgatttatccttccatcttttccttggcatttaccatcttccatctcccccttcacttttttcagatatgtctacaaacagactccaatctcagtcgcactaaaaataagaacaaaacctaaaccttacagttctttcaaattattaaatcaatttattattcctttctttggcaaaggttccaaatttttactttatatttgtaattttactatttgcattcagtcccagcgcattaatctgaatctgctgtcctaaaatacactggtgaaaacattacttgtacaatctcctatcagaaaactgttcatctactcactgtagtgccctccttgaaatgtgtgtttgttcattcaactaacaatatttggggatccctgtagtaaacactgtatgaattttacacagtctggccatcaagaaagatcacggagtatattctagatggggaggctactaagtgaataggaatcaccacgctgggctgtttattaggtacagtaataaacataagtactggttgcagtgaaaaaaaaaaaaaaaaaaaaaaaaaa

SEQ ID NO: 11959 - DNA, 1620 bp, Homo sapiens
cggcgagccggaagtggggttagccaggttatccccaggggtggagaagcggaggcccaggaggagggggaataaagaaggtggaggatcctggctaccactctgaatccgataccgcttctcttagacctcagcgacagaaaaagggaagggtgtctcatcccccttcctcctctcctccctgtcctgagccttagccatggccgaggcaggggctgggctgagcgagaccgtcactgagacaacggttaccgtgacaaccgagcccgagaaccggagccttaccatcaaacttcggaaacggaagccagagaaaaaggtagaatggacaagtgacactgtggacaatgaacacatgggccgccgctcatccaaatgctgctgtatttatgagaaacctcgggcctttggcgagagctccacggaaagtgatgaggaggaagaagagggctgtggtcatacacactgtgtacgtggccaccgcaaaggacggcgtcgtgcaaccctaggaccgacccccaccacccctccccagcctcctgacccttcccagccccctccagggccaatgcagcactaaatccctctctcctccagcattcctgtgtctgtctggccctaaatgtatccatgtggctacttctccagccccctccttccctctcttctgcctgatagagggaagaggaagaggaggacgaacagagatcctgaaattctgacttgctgctattccagaacccagcctcctgggtttccccagtcctcatttttcctcccaatacccacccttctctctcgagggatctaggcaccttggtcccagtgtcttccttttgttctcactgccaaactgcctgtcctgggatctagttatcttggccctgcactctcaacatgagtagcgaacacttaaattgggttttcaacagtcccagctttcactgccagggtcccagtcagattccaggaatttgcgccctaactttgcttgctaatcctggtttagagctatcccactaaaatatttaatcctaattcttagtccttgcctgtgagatatgaggtcttacaggagacctcagagctcccagcccttctcctcctgctaacccttctcacaccctcaagaggagttagaaaagaggtccttgtcattctcacctcttatggaaaatggaataagaaataatcatatcctttcttcccacccttctcctgttatttaggatttctgacaaagctggcttgagattggtcacttagagccgactgtctcctctgccttttgtttttcagcttcagagacagatccaatatagtcccagggacctgggtctctgggagaggaaggaagagggagggagcaaagagattggggtatgtcccctgtagtacactcttacctcttacttcctagactttgatttctccggcagcccagatgttcagttctcttggcccctctctaccccttactgggatctggttttcattttccggtccttttgccatacacagttacagagatcagtcaaatccataccaccactgagatctcatttattgccacagatgcacaaaataaataacccaaaatcacaaaaaaaaaaaaaaaaa

SEQ ID NO: 11960 - DNA, 3063 bp, Homo sapiens
cgccggcggggaagatgaccgcgggcgccggcgtgctccttctgctgctctcgctctccggcgcgctccgggcccataatgaggatcttacaactagagagacctgcaaggctgggttctctgaagatgattacacggcattaatctcccaaaatattctagaaggggaaaagctacttcaagtcaagttcagcagctgtgtggggaccaaggggacacaatatgagaccaacagcatggacttcaaagttggggcagatgggacagtcttcgccacccgggagctgcaggtcccctccgagcaggtggcgttcacggtgactgcatgggacagccagacagcagagaaatgggacgccgtggtgcggttgctggtggcccagacctcgtccccgcactctggacacaagccgcagaaaggaaagaaggtcgtggctctggacccctctccgcctccgaaggacaccctgctgccgtggccccagcaccagaacgccaacgggctgaggcggcgcaaacgggactgggtcatcccgcccatcaacgtgcccgagaactcgcgcgggcccttcccgcagcagctcgtgaggatccggtccgacaaagacaatgacatccccatccggtacagcatcacgggagtgggcgccgaccagccccccatggaggtcttcagcattgactccatgtccggccggatgtacgtcacaaggcccatggaccgggaggagcacgcctcttaccacctccgagcccacgctgtggacatgaatggcaacaaggtggagaaccccatcgacctgtacatctacgtcatcgacatgaatgacaaccgccctgagttcatcaaccaggtctacaacggctccgtggacgagggctccaagccaggcacctacgtgatgaccgtcacggccaacgatgctgacgacagcaccacggccaacgggatggtgcggtaccggatcgtgacccagaccccacagagcccgtcccagaatatgttcaccatcaacagcgagactggagatatcgtcacagtggcggctggcctggaccgagagaaagttcagcagtacacagtcatcgttcaggccacagatatggaaggaaatctcaactatggcctctcaaacacagccacagccatcatcacggtgacagatgtgaatgacaacccgccagaatttaccgccagcacgtttgcaggggaggtccccgaaaaccgcgtggagaccgtggtcgcaaacctcacggtgatggaccgagatcagccccactctccaaactggaatgccgtttaccgcatcatcagtggggatccatccgggcacttcagcgtccgcacagaccccgtaaccaacgagggcatggtcaccgtggtgaaggcagtcgactacgagctcaacagagctttcatgctgacagtgatggtgtccaaccaggcgcccctggccagcggaatccagatgtccttccagtccacggcaggggtgaccatctccatcatggacatcaacgaggctccctacttcccctcaaaccacaagctgatccgcctggaggagggcgtgccccccggcaccgtgctgaccacgttttcagctgtggaccctgaccggttcatgcagcaggctgtgagatactcaaagctgtcagacccagcgagctggctgcacatcaatgccaccaacggccagatcaccacggcggcagtgctggaccgtgagtccctctacaccaaaaacaacgtctacgaggccaccttcctggcagctgacaatgggatacccccggccagcggcaccgggaccctccagatctatctcattgacatcaacgacaacgcccctgagctgctgcccaaggaggcgcagatctgcgagaagcccaacctgaacgccatcaacatcacggcggccgacgctgacgtcgaccccaacatcggcccctacgtcttcgagctgccctttgtcccggcggccgtgcggaagaactggaccatcacccgcctgaacggtgactatgcccaactcagcttgcgcatcctgtacctggaggccgggatgtatgacgtccccatcatcgtcacagactctggaaaccctcccctgtccaacacgtccatcatcaaagtcaaggtgtgcccatgtgatgacaacggggactgcaccaccattggcgcagtggcagcggctggtctgggcaccggtgccatcgtggccatcctcatctgcatcctcatcctgctgaccatggtcctgctgtttgtcatgtggatgaagcggcgagagaaggagcgccacacgaagcagctgctcattgaccccgaggacgacgtccgcgacaacatcctcaagtatgacgaggaaggcggtggcgaggaggaccaggactacgacctcagccagctgcagcagccggaagccatggggcacgtgccaagcaaagcccctggcgtgcgtcgcgtggatgagcggccggtgggcgctgagccccagtacccgatcaggcccatggtgccgcacccaggcgacatcggtgacttcatcaatgagggactccgcgctgctgacaacgaccccacggcacccccctatgactccctgctggtcttcgactacgaggggagcggctccaccgcaggctccgtcagctccctgaactcatccagttccggggaccaagactacgattacctcaacgactgggggcccagattcaagaagctggcggacatgtatggaggtggtgaagaggattgactgacctcgcatcttcggaccgaagtgagagccgtgctcggacgccggaggagcaggactgagcagaggcggccggtcttcccgactccctgcggctgtgtccttagtgctgttaggaggccccccaatccccacgttgagctgtctagcatgagcacccacccccacagcgccctgcacccggccgctgcccagcaccgcgctggctggcactgaaggacagcaagaggcactctgtcttcacttgaatttcctagaacagaagcactgtttttaaaaaaaaaaaaaaaaaaagaag

SEQ ID NO: 11961 - DNA, 1201 bp, Homo sapiens
agtcgccgctgggcaccccgagaccatggggaagctcgtggcgctggtcctgctgggggtcggcctgtccttagtcggggagatgttcctggcgtttagagaaagggtgaatgcctctcgagaagtggagccagtagaacctgaaaactgccaccttattgaggaacttgaaagtggctctgaagatattgatatacttcctagtgggctggcttttatctccagtggattaaaatatccaggcatgccaaactttgcgccagatgaaccaggaaaaatcttcttgatggatctgaatgaacaaaacccaagggcacaagcgctagaaatcagtggtggatttgacaaagaattatttaatccacatgggatcagtattttcatcgacaaagacaatactgtgtatctttatgttgtgaatcatccccacatgaagtccactgtggagatatttaaatttgaggaacaacaacgttctctggtatacctgaaaactataaaacatgaacttctcaaaagtgtgaatgacattgtggttcttggaccagaacagttctatgccaccagagaccactattttaccaactccctcctgtcattttttgagatgatcttggatcttcgctggacttatgttcttttctacagcccaagggaggttaaagtggtggccaaaggattttgtagtgccaatgggatcacagtctcagcagaccagaagtatgtctatgtagctgatgtagcagctaagaacattcacataatggaaaaacatgataactgggatttaactcaactgaaggtgatacagttgggcaccttagtggataacctgactgtcgatcctgccacaggagacattttggcaggatgccatcctaatcctatgaagctactgaactataaccctgaggaccctccaggatcagaagtacttcgcatccagaatgttttgtctgagaagcccagggtgagcaccgtgtatgccaacaatggctctgtgcttcagggcacctctgtggcttctgtgtaccatgggaaaattctcataggcaccgtatttcacaaaactctgtactgtgagctctagactctagatagtaaaaaaaaaaaaaaaaagtctacatattttgtaaaagtaaactgataattgtatgataagtggcactgtaagtaaatagcaaacaccaaaaaaaaaaaa

SEQ ID NO: 11962 - DNA, 4176 bp, Homo sapiens
ggcggtcccctgttctccccgctcaggtgcggcgctgtggcaggaagccaccccctcggtcggccggtgcgcggggctgttgcgccatccgctccggctttcgtaaccgcaccctgggacggcccagagacgctccagcgcgagttcctcaaatgttttcctgcgttgccaggaccgtccgccgctctgagtcatgtgcgagtgggaagtcgcactgacactgagccgggccagagggagaggagccgagcgcggcgcggggccgagggactcgcagtgtgtgtagagagccgggctcctgcggatgggggctgcccccggggcctgagcccgcctgcccgcccaccgccccgccccgcccctgccacccctgccgcccggttcccattagcctgtccgcctctgcgggaccatggagtggtagccgaggaggaagcatgctggccgtcggctgcgcgctgctggctgccctgctggccgcgccgggagcggcgctggccccaaggcgctgccctgcgcaggaggtggcgagaggcgtgctgaccagtctgccaggagacagcgtgactctgacctgcccgggggtagagccggaagacaatgccactgttcactgggtgctcaggaagccggctgcaggctcccaccccagcagatgggctggcatgggaaggaggctgctgctgaggtcggtgcagctccacgactctggaaactattcatgctaccgggccggccgcccagctgggactgtgcacttgctggtggatgttccccccgaggagccccagctctcctgcttccggaagagccccctcagcaatgttgtttgtgagtggggtcctcggagcaccccatccctgacgacaaaggctgtgctcttggtgaggaagtttcagaacagtccggccgaagacttccaggagccgtgccagtattcccaggagtcccagaagttctcctgccagttagcagtcccggagggagacagctctttctacatagtgtccatgtgcgtcgccagtagtgtcgggagcaagttcagcaaaactcaaacctttcagggttgtggaatcttgcagcctgatccgcctgccaacatcacagtcactgccgtggccagaaacccccgctggctcagtgtcacctggcaagacccccactcctggaactcatctttctacagactacggtttgagctcagatatcgggctgaacggtcaaagacattcacaacatggatggtcaaggacctccagcatcactgtgtcatccacgacgcctggagcggcctgaggcacgtggtgcagcttcgtgcccaggaggagttcgggcaaggcgagtggagcgagtggagcccggaggccatgggcacgccttggacagaatccaggagtcctccagctgagaacgaggtgtccacccccatgcaggcacttactactaataaagacgatgataatattctcttcagagattctgcaaatgcgacaagcctcccagtgcaagattcttcttcagtaccactgcccacattcctggttgctggagggagcctggccttcggaacgctcctctgcattgccattgttctgaggttcaagaagacgtggaagctgcgggctctgaaggaaggcaagacaagcatgcatccgccgtactctttggggcagctggtcccggagaggcctcgacccaccccagtgcttgttcctctcatctccccaccggtgtcccccagcagcctggggtctgacaatacctcgagccacaaccgaccagatgccagggacccacggagcccttatgacatcagcaatacagactacttcttccccagatagctggctgggtggcaccagcagcctggaccctgtggatgataaaacacaaacgggctcagcaaaagatgcttctcactgccatgccagcttatctcaggggtgtgcggcctttggcttcacggaagagccttgcggaaggttctacgccaggggaaaatcagcctgctccagctgttcagctggttgaggtttcaaacctccctttccaaatgcccagcttaaaggggctagagtgaacttgggccactgtgaagagaaccatatcaagactctttggacactcacacggacactcaaaagctgggcaggttggtgggggcctcggtgtggagaagcggctggcagcccacccctcaacacctctgcacaagctgcaccctcaggcaggtgggatggatttccagccaaagcctcctccagccgccatgctcctggcccactgcatcgtttcatcttccaactcaaactcttaaaacccaagtgccttagcaaattctgtttttctaggcctggggacggcttttacttaaaccgccaaggctgggggaagaagctctctcctccctttcttccctacagttgaaaaacagctgagggtgagtgggtgaataatacagtatctcagggcctggtcgttttcaacagaattataattagttcctcattagcattttgctaaatgtgaatgatgatcctaggcatttgctgaatacagaggcaactgcattggctttgggttgcaggacctcaggtgagaagcagaggaaggagaggagaggggcacagggtctctaccatcccctgtagagtgggagctgagtgggggatcacagcctctgaaaaccaatgttctctcttctccacctcccacaaaggagagctagcagcagggagggcttctgccatttctgagatcaaaacggttttactgcagctttgtttgttgtcagctgaacctgggtaactagggaagataatattaaggaagacaatgtgaaaagaaaaatgagcctggcaagaatgtgtttaaacttggtttttaaaaaactgctgactgttttctcttgagagggtggaatatccaatattcgctgtgtcagcatagaagtaacttacttaggtgtgggggaagcaccataactttgtttagcccaaaaccaagtcaagtgaaaaaggaggaagagaaaaaatattttcctgccaggcatggtggcccacgcacttcgggaggtcgaggcaggaggatcacttgagtccagaagtttgagatcagcctgggcaatgtgataaaaccccatctctacaaaaagcataaaaattagccaagtgtggtagagtgtgcctgaagtcccagatacttggggggctgaggtgggaggatctcttgagcctgggaggtcaaggctgcagtgagccgagattgcaccactgcactccagcctgggtgacagagcaagtgagaccctgtctcaaaaaaagaaaaagaaaaagaaaaaatattttccctattagagaagagattgtggtttcattctgtattttgtttttgtcttaaaaagtggaaaaatagcctgcctcttctctactctagggaaaaaccagcgtgtgactactcccccaggtggttatggagagggtgtccggtccctgtcccagtgccgagaaggaagcctcccacgactgcccggcagggtcctagaaattccccaccctgaaagccctgagctttctgctatcaaagaggttttaaaaaaatcccatttaaaaaaaatcccttacctcggtgccttcctctttttatttagttccttgagttgattcagctctgcaagaattgaagcaggactaaatgtctagttgtaacaccatgattaaccacttcagctgacttttctgtccgagctttgaaaattcagtggtgttagtggttacccagttagctctcaagttatcagggtattccagagtggggatatgatttaaatcagccgtgtaaccatggacccaatatttaccagaccacaaaacttttctaatactctaccctcttagaaaaaccaccaccatcaccagacaggtgcgaaaggatgaaagtgaccatgttttgtttacggttttccaggtttaagctgttactgtcttcagtaagccgtgattttcattgctgggcttgtctgtagattttagaccctattgctgcttgaggcaactcatcttaggttggcaaaaaggcaggatggccgggcgcggtggctcacgcctgtaatcctagcactttgggaggccaaggtgggaggattgcttgagctcaggagtttgagaccaacctggg

SEQ ID NO: 11963 - DNA, 4082 bp, Homo sapiens
ggcggtcccctgttctccccgctcaggtgcggcgctgtggcaggaagccaccccctcggtcggccggtgcgcggggctgttgcgccatccgctccggctttcgtaaccgcaccctgggacggcccagagacgctccagcgcgagttcctcaaatgttttcctgcgttgccaggaccgtccgccgctctgagtcatgtgcgagtgggaagtcgcactgacactgagccgggccagagggagaggagccgagcgcggcgcggggccgagggactcgcagtgtgtgtagagagccgggctcctgcggatgggggctgcccccggggcctgagcccgcctgcccgcccaccgccccgccccgcccctgccacccctgccgcccggttcccattagcctgtccgcctctgcgggaccatggagtggtagccgaggaggaagcatgctggccgtcggctgcgcgctgctggctgccctgctggccgcgccgggagcggcgctggccccaaggcgctgccctgcgcaggaggtggcgagaggcgtgctgaccagtctgccaggagacagcgtgactctgacctgcccgggggtagagccggaagacaatgccactgttcactgggtgctcaggaagccggctgcaggctcccaccccagcagatgggctggcatgggaaggaggctgctgctgaggtcggtgcagctccacgactctggaaactattcatgctaccgggccggccgcccagctgggactgtgcacttgctggtggatgttccccccgaggagccccagctctcctgcttccggaagagccccctcagcaatgttgtttgtgagtggggtcctcggagcaccccatccctgacgacaaaggctgtgctcttggtgaggaagtttcagaacagtccggccgaagacttccaggagccgtgccagtattcccaggagtcccagaagttctcctgccagttagcagtcccggagggagacagctctttctacatagtgtccatgtgcgtcgccagtagtgtcgggagcaagttcagcaaaactcaaacctttcagggttgtggaatcttgcagcctgatccgcctgccaacatcacagtcactgccgtggccagaaacccccgctggctcagtgtcacctggcaagacccccactcctggaactcatctttctacagactacggtttgagctcagatatcgggctgaacggtcaaagacattcacaacatggatggtcaaggacctccagcatcactgtgtcatccacgacgcctggagcggcctgaggcacgtggtgcagcttcgtgcccaggaggagttcgggcaaggcgagtggagcgagtggagcccggaggccatgggcacgccttggacagaatccaggagtcctccagctgagaacgaggtgtccacccccatgcaggcacttactactaataaagacgatgataatattctcttcagagattctgcaaatgcgacaagcctcccaggttcaagaagacgtggaagctgcgggctctgaaggaaggcaagacaagcatgcatccgccgtactctttggggcagctggtcccggagaggcctcgacccaccccagtgcttgttcctctcatctccccaccggtgtcccccagcagcctggggtctgacaatacctcgagccacaaccgaccagatgccagggacccacggagcccttatgacatcagcaatacagactacttcttccccagatagctggctgggtggcaccagcagcctggaccctgtggatgataaaacacaaacgggctcagcaaaagatgcttctcactgccatgccagcttatctcaggggtgtgcggcctttggcttcacggaagagccttgcggaaggttctacgccaggggaaaatcagcctgctccagctgttcagctggttgaggtttcaaacctccctttccaaatgcccagcttaaaggggctagagtgaacttgggccactgtgaagagaaccatatcaagactctttggacactcacacggacactcaaaagctgggcaggttggtgggggcctcggtgtggagaagcggctggcagcccacccctcaacacctctgcacaagctgcaccctcaggcaggtgggatggatttccagccaaagcctcctccagccgccatgctcctggcccactgcatcgtttcatcttccaactcaaactcttaaaacccaagtgccttagcaaattctgtttttctaggcctggggacggcttttacttaaaccgccaaggctgggggaagaagctctctcctccctttcttccctacagttgaaaaacagctgagggtgagtgggtgaataatacagtatctcagggcctggtcgttttcaacagaattataattagttcctcattagcattttgctaaatgtgaatgatgatcctaggcatttgctgaatacagaggcaactgcattggctttgggttgcaggacctcaggtgagaagcagaggaaggagaggagaggggcacagggtctctaccatcccctgtagagtgggagctgagtgggggatcacagcctctgaaaaccaatgttctctcttctccacctcccacaaaggagagctagcagcagggagggcttctgccatttctgagatcaaaacggttttactgcagctttgtttgttgtcagctgaacctgggtaactagggaagataatattaaggaagacaatgtgaaaagaaaaatgagcctggcaagaatgtgtttaaacttggtttttaaaaaactgctgactgttttctcttgagagggtggaatatccaatattcgctgtgtcagcatagaagtaacttacttaggtgtgggggaagcaccataactttgtttagcccaaaaccaagtcaagtgaaaaaggaggaagagaaaaaatattttcctgccaggcatggtggcccacgcacttcgggaggtcgaggcaggaggatcacttgagtccagaagtttgagatcagcctgggcaatgtgataaaaccccatctctacaaaaagcataaaaattagccaagtgtggtagagtgtgcctgaagtcccagatacttggggggctgaggtgggaggatctcttgagcctgggaggtcaaggctgcagtgagccgagattgcaccactgcactccagcctgggtgacagagcaagtgagaccctgtctcaaaaaaagaaaaagaaaaagaaaaaatattttccctattagagaagagattgtggtttcattctgtattttgtttttgtcttaaaaagtggaaaaatagcctgcctcttctctactctagggaaaaaccagcgtgtgactactcccccaggtggttatggagagggtgtccggtccctgtcccagtgccgagaaggaagcctcccacgactgcccggcagggtcctagaaattccccaccctgaaagccctgagctttctgctatcaaagaggttttaaaaaaatcccatttaaaaaaaatcccttacctcggtgccttcctctttttatttagttccttgagttgattcagctctgcaagaattgaagcaggactaaatgtctagttgtaacaccatgattaaccacttcagctgacttttctgtccgagctttgaaaattcagtggtgttagtggttacccagttagctctcaagttatcagggtattccagagtggggatatgatttaaatcagccgtgtaaccatggacccaatatttaccagaccacaaaacttttctaatactctaccctcttagaaaaaccaccaccatcaccagacaggtgcgaaaggatgaaagtgaccatgttttgtttacggttttccaggtttaagctgttactgtcttcagtaagccgtgattttcattgctgggcttgtctgtagattttagaccctattgctgcttgaggcaactcatcttaggttggcaaaaaggcaggatggccgggcgcggtggctcacgcctgtaatcctagcactttgggaggccaaggtgggaggattgcttgagctcaggagtttgagaccaacctggg

SEQ ID NO: 11964 - DNA, 2722 bp, Homo sapiens
aagccgaacaccatggccgtctggcttgcccagtggctgggccctctgctcttggtttccctctggggactcttggctccagcctcccttcttaggcgcctgggtgagcacattcagcagtttcaggagagctctgcccagggcctgggcctgagcctggggccaggtgctgcagccctcccaaaagtggggtggctggagcaactgctggaccccttcaacgtgtccgacagacgatccttcctacagcgttactgggtgaatgaccaacattgggttggccaggatggacccatattcctgcatctagggggtgagggcagccttgggcctggctcagtgatgagaggccatcccgcagccttggccccagcctggggcgccctggtgataagcctggaacacagattttatggcctgagtatacctgctggaggcctggaaatggcccagctccgcttcttgtccagccgccttgcgctggctgatgtggtctctgcccgcctggcactttcccgcctctttaacatctcctcctccagcccctggatctgcttcggaggctcctatgccggctccttggccgcctgggcccggctgaagttcccccatctcattttcgcgtcggtcgcctcctccgccccggtgcgggccgtgctggatttctccgagtataatgacgtggtatcccgaagcctaatgagcaccgcgatcggcgggtccctggagtgccgggcggcggtgtccgtcgccttcgctgaagtggagcggcggctgcgctcgggtggggcggctcaagcagcattgcggacggagctgagcgcttgcgggcccctgggccgcgctgaaaaccaggcggagctgttgggggcgctgcaggcactggtgggaggtgtagtgcagtatgatgggcagacgggagcgccgctaagcgtgcgacagctctgcggacttctcctcgggggcgggggcaaccgcagccactccacgccctactgcgggcttcgtcgggcggtgcagattgtcttgcacagcctgggccagaagtgtttaagcttttcccgagcagagacagtggcacagctgaggagcacagaacctcaactgtctggtgtgggtgaccggcagtggttgtatcagacatgtaccgagttcggcttctatgtcacctgtgagaatcccagatgtcctttctcccagctcccagcactgccctcccagctagacctatgtgagcaggtgtttgggctctcagccttgtcagtagcccaggctgtggctcagacgaactcctactacggtggccagacccctggggctaacaaagtgctgtttgttaatggggacacagacccctggcatgtgctaagtgtaacacaggctttaggatcctcagaatcaactcttcttatccgcactggctcccactgcttggacatggcacctgagaggccctcagactcccccagcctccgcctagggcgccagaacatcttccagcagctacagacctggctcaagctggcaaaggagagccagattaagggtgaagtctgaatctcataccctttccactccctgcatggtcacctcagtcctggacatacttgttcactgaacaaaagaaagcagcttgttttgaaagaagaaactcccaggaattggaattcagcacctgttccgcacgtaattggcatgtgtctgcaaacatccttattcccaacttaaagtgctttattgcagagagttatggaaatataagtggatgattattctcattgtaaatattggtattttgaatgttaaatgtcaaacaaatgtgacttatgctggtgccctcgccctgctgatcagattctggttcaaattctgccactccagctcctgggttaggggctttgctgtaagtttctttttctggactttagatcctgaacctgtccttgcttctcagtttctctcactgtacccctttccctcagtctcttcctctctctttcccctgtcactatttgtctttctaatctccttctgtttctctgaatatcttcatttctatctctgtgtttctgtctatttctctgtttatctttctgtccttcaatctgtgtttttgtttctggctctccgtcagtgtctttttctctcctctctctcttgctctgccatggctatttccactgctctatttctgactctcatttttggtctctgtgtgtctcctagtcactttctttctcactctgtctctgtctctatttctgtctctcctctgctgtgtcctcaatctctctgtctccctgaggctctatttctgtctctcctctgctgtgtcctcaatctctctgtctccctgaggctctatttctgtctctgatgctcttcttctgtgtctctatttctcttcctgtcacttaatcttttccttctctatctctcttatttagtcttccttccacacccttcactcaccatcttttcccacaatcaaatatcactccctggtacttccagcttccaactctagggattcatgattctggtggagattccttcttccagggcctgggaggatagggctaatcccaagggtgcctgcttaggctatgttagctgtgacaggaacctgccatagatttgcactgttctttcctaaagatcaattattttcagcaataaatacttctcagctttttgtatgtctttgtatgcaaaaaaaaaa

SEQ ID NO: 11965 - DNA, 1245 bp, Homo sapiens
ccttcccctggcccggggagctgctccttgtgctgccgggaaggtcaaagtcccgcgcccaccaggagagctcggcaagtatataaggacagaggagcgcgggaccaagcggcggcgaaggaggggaagaagagccgcgaccgagagaggccgccgagcgtccccgccctcagagagcagcctcccgagacagagcctcagcctgcctggaagatgccgagatcgtgctgcagccgctcgggggccctgttgctggccttgctgcttcaggcctccatggaagtgcgtggctggtgcctggagagcagccagtgtcaggacctcaccacggaaagcaacctgctggagtgcatccgggcctgcaagcccgacctctcggccgagactcccatgttcccgggaaatggcgacgagcagcctctgaccgagaacccccggaagtacgtcatgggccacttccgctgggaccgattcggccgccgcaacagcagcagcagcggcagcagcggcgcagggcagaagcgcgaggacgtctcagcgggcgaagactgcggcccgctgcctgagggcggccccgagccccgcagcgatggtgccaagccgggcccgcgcgagggcaagcgctcctactccatggagcacttccgctggggcaagccggtgggcaagaagcggcgcccagtgaaggtgtaccctaacggcgccgaggacgagtcggccgaggccttccccctggagttcaagagggagctgactggccagcgactccgggagggagatggccccgacggccctgccgatgacggcgcaggggcccaggccgacctggagcacagcctgctggtggcggccgagaagaaggacgagggcccctacaggatggagcacttccgctggggcagcccgcccaaggacaagcgctacggcggtttcatgacctccgagaagagccagacgcccctggtgacgctgttcaaaaacgccatcatcaagaacgcctacaagaagggcgagtgagggcacagcggggccccagggctaccctcccccaggaggtcgaccccaaagccccttgctctcccctgccctgctgccgcctcccagcctggggggtcgtggcagataatcagcctcttaaagctgcctgtagttaggaaataaaacctttcaaatttcacatccacctctgactttgaatgtaaactgtgtgaataaagtaaaaatacgtagccgtcaaataacagc

SEQ ID NO: 11966 - DNA, 1322 bp, Homo sapiens
tcctcaaaggaggggcagagcctgcgcagggcaggagcagctggcccactggcggcccgcaacactccgtctcaccctctgggcccactgcatctagaggagggccgtctgtgaggccactacccctccagcaactgggaggtgggactgtcagaagctggcccagggtggtggtcagctgggtcagggacctacggcacctgctggaccacctcgccttctccatcgaagcagggaagtgggagcctcgagccctcgggtggaagctgaccccaagccacccttcacctggacaggatgagagtgtcaggtgtgcttcgcctcctggccctcatctttgccatagtcacgacatggatgtttattcgaagctacatgagcttcagcatgaaaaccatccgtctgccacgctggctggcagcctcgcccaccaaggagatccaggttaaaaagtacaagtgtggcctcatcaagccctgcccagccaactactttgcgtttaaaatctgcagtggggccgccaacgtcgtgggccctactatgtgctttgaagaccgcatgatcatgagtcctgtgaaaaacaatgtgggcagaggcctaaacatcgccctggtgaatggaaccacgggagctgtgctgggacagaaggcatttgacatgtactctggagatgttatgcacctagtgaaattccttaaagaaattccggggggtgcactggtgctggtggcctcctacgacgatccagggaccaaaatgaacgatgaaagcaggaaactcttctctgacttggggagttcctacgcaaaacaactgggcttccgggacagctgggtcttcataggagccaaagacctcaggggtaaaagcccctttgagcagttcttaaagaacagcccagacacaaacaaatacgagggatggccagagctgctggagatggagggctgcatgcccccgaagccattttagggtggctgtggctcttcctcagccaggggcctgaagaagctcctgcctgacttaggagtcagagcccggcaggggctgaggaggaggagcagggggtgctgcgtggaaggtgctgcaggtccttgcacgctgtgtcgcgcctctcctcctcggaaacagaaccctcccacagcacatcctacccggaagaccagcctcagagggtccttctggaaccagctgtctgtggagagaatggggtgctttcgtcagggactgctgacggctggtcctgaggaaggacaaactgcccagacttgagcccaattaaattttatttttgctggttttgaatgaaaaaaaaaaaaaaa

SEQ ID NO: 11967 - DNA, 5005 bp, Homo sapiens
gcaggcgccgcgccgaggaggctgccgctctggcttgccgccccccgccgccgctgcacaccggacccagccgccgtgccgcgggccatggacctgcccaggggcctggtggtggcctgggcgctcagcctgtggccagggttcacggacaccttcaacatggacaccaggaagccccgggtcatccctggctccaggaccgccttctttggctacacagtgcagcagcacgacatcagtggcaataagtggctggtcgtgggcgccccactggaaaccaatggctaccagaagacgggagacgtgtacaagtgtccagtgatccacgggaactgcaccaaactcaacctgggaagggtcaccctgtccaacgtgtccgagcggaaagacaacatgcgcctcggccttagtctcgccaccaaccccaaggacaacagcttcctggcctgcagccccctctggtctcatgagtgtgggagctcctactacaccacagggatgtgttcaagagtcaactccaacttcaggttctccaagaccgtggccccagctctccaaaggtgccagacctacatggacatcgtcattgtcctggatggctccaacagcatctacccctgggtggaggttcagcacttcctcatcaacatcctgaaaaagttttacattggcccagggcagatccaggttggagttgtgcagtatggcgaagatgtggtgcatgagtttcacctcaacgactacaggtctgtaaaagatgtggtggaagctgccagccacattgagcagagaggaggaacagagacccggacggcatttggcattgaatttgcacgctcagaggctttccagaagggtggaaggaaaggagccaagaaggtgatgattgtcatcacagatggggagtcccacgacagcccagacctggagaaggtgatccagcaaagcgaaagagacaacgtaacaagatatgcggtggccgtcctgggctactacaaccgcagggggatcaatccagaaacttttctaaatgaaatcaaatacatcgccagtgaccctgatgacaagcacttcttcaatgtcactgatgaggctgccttgaaggacattgtcgatgccctgggggacagaatcttcagcctggaaggcaccaacaagaacgagacctcctttgggctggagatgtcacagacgggcttttcctcgcacgtggtggaggatggggttctgctgggagccgtcggtgcctatgactggaatggagctgtgctaaaggagacgagtgccgggaaggtcattcctctccgcgagtcctacctgaaagagttccccgaggagctcaagaaccatggtgcatacctggggtacacagtcacatcggtcgtgtcctccaggcaggggcgggtgtacgtggccggagccccccggttcaaccacacgggcaaggtcatcctgttcaccatgcacaacaaccggagcctcaccatccaccaggctatgcggggccagcagataggctcttactttgggagtgaaatcacctcggtggacatcgacggcgacggcgtgactgatgtcctgctggtgggcgcacccatgtacttcaacgagggccgtgagcgaggcaaggtgtacgtctatgagctgagacagaacctgtttgtttataacggaacgctaaaggattcacacagttaccagaatgcccgatttgggtcctccattgcctcagttcgagacctcaaccaggattcctacaatgacgtggtggtgggagcccccctggaggacaaccacgcaggagccatctacatcttccacggcttccgaggcagcatcctgaagacacctaagcagagaatcacagcctcagagctggctaccggcctccagtattttggctgcagcatccacgggcaattggacctcaatgaggatgggctcatcgacctggcagtgggagcccttggcaacgctgtgattctgtggtcccgcccagtggttcagatcaatgccagcctccactttgagccatccaagatcaacatcttccacagagactgcaagcgcagtggcagggatgccacctgcctggccgccttcctctgcttcacgcccatcttcctggcaccccatttccaaacaacaactgttggcatcagatacaacgccaccatggatgagaggcggtatacaccgagggcccacctggacgagggcggggaccgattcaccaacagagccgtactgctctcctccggccaggagctctgtgagcggatcaacttccatgtcctggacactgctgactacgtgaagccagtgaccttctcagtcgagtattccctggaggaccctgaccatggccccatgctggacgacggctggcccaccactctcagagtctcggtgcccttctggaacggctgcaatgaggatgagcactgtgtccctgaccttgtgttggatgcccggagtgacctgcccacggccatggagtactgccagagggtgctgaggaagcctgcgcaggactgctccgcatacacgctgtccttcgacaccacagtcttcatcatagagagcacacgccagcgagtggcggtggaggccacactggagaacaggggcgagaacgcctacagcacggtcctaaatatctcgcagtcagcaaacctgcagtttgccagcttgatccagaaggaggactcagacggtagcattgagtgtgtgaacgaggagaggaggctccagaagcaagtctgcaacgtcagctatcccttcttccgggccaaggccaaggtggctttccgtcttgattttgagttcagcaaatccatcttcctacaccacctggagatcgagctcgctgcaggcagtgacagtaatgagcgggacagcaccaaggaagacaacgtggcccccttacgcttccacctcaaatacgaggctgacgtcctcttcaccaggagcagcagcctgagccactacgaggtcaagcccaacagctcgctggagagatacgatggtatcgggcctcccttcagctgcatcttcaggatccagaacttgggcttgttccccatccacgggatgatgatgaagatcaccattcccatcgccaccaggagcggcaaccgcctactgaagctgagggacttcctcacggacgaggcgaacacgtcctgtaacatctggggcaatagcactgagtaccggcccaccccagtggaggaagacttgcgtcgtgctccacagctgaatcacagcaactctgatgtcgtctccatcaactgcaatatacggctggtccccaaccaggaaatcaatttccatctactggggaacctgtggttgaggtccctaaaagcactcaagtacaaatccatgaaaatcatggtcaacgcagccttgcagaggcagttccacagccccttcatcttccgtgaggaggatcccagccgccagatcgtgtttgagatctccaagcaagaggactggcaggtccccatctggatcattgtaggcagcaccctggggggcctcctactgctggccctgctggtcctggcactgtggaagctcggcttctttagaagtgccaggcgcaggagggagcctggtctggaccccacccccaaagtgctggagtgaggctccagaggagactttgagttgatgggggccaggacaccagtccaggtagtgttgagacccaggcctgtggccccaccgagctggagcggagaggaagccagctggctttgcacttgacctcatctcccgagcaatggcgcctgctccctccagaatggaactcaagctggttttaagtggaactgccctactgggagactgggacacctttaacacagacccctagggatttaaagggacacccctacacacacccaggcccatgccaaggcctccctcaggctctgtggagggcatttgctgccccagctactaaggtgctaggaattcgtaatcatccccatcctccagagaaacccagggaggaagactgtaaatacgaacccaatctgcacactccaggcctctagttccagaaggatccaagacaaaacagatctgaattctgcccttttctctcacccatcccacccctccattggctcccaagtcacacccactcccttccccatagataggcccctggggctcccgaagaatgaacccaagagcaagggcttgatggtgacagctgcaagccagggatgaagaaagactctgagatgtggagactgatggccaggcaagtgggaccaggatactggacgctgtcctgagatgagaggtagccgggctctgcacccacgtgcattcacattgaccgcaactcacacattcccccaccagctgcagccccttgctctcagctgccaaccctcccgggtcacttttgttcccaggtacctcatgggaagcatgtggatgacacaatccctggggctgtgcattcccacgtcttcttgctgcagcctgcccctagacatggacgcaccggcctggctgcagctgggcagcaggggtaggggtagggagcctcccctccctgtatcaccccctccctacacacacacacacacacacacacacacactgcctcccatccttccctcatgcccgccagtgcacagggaagggcttggccagcgctgttgaggggtcccctctggaatgcactgaataaagcacgtgcaaggactcccggagcctgtgcagccttggtggcaaatatctcatctgccggcccccaggacaagtggtatgaccagtgataatgccccaaggacaaggggcgtgcctggcgcccagtggagtaatttatgccttagtcttgttttgaggtagaaatgcaagggggacacatgaaaggcatcagtccccctgtgcatagtacgacctttactgtcgtatttttgaaaaattaaaaatacagtgtttaaaaacaaaaaaaaaaaaaaaaaaaaaaaaaaaa

SEQ ID NO: 11968 - DNA, 3927 bp, Homo sapiens
gaattccggcccccgtgtctgggcgtccgcctcctggcctcctggctgaggggaagctgagtgggccacggcccatgtgtcgcactcgcctcggctcccacacagccgcctctgctccagcaaggatgtggctcttccacactctgctctgcatagccagcctggccctgctggccgctttcaatgtggatgtggcccggccctggctcacgcccaagggaggtgcccctttcgtgctcagctcccttctgcaccaagaccccagcaccaaccagacctggctcctggtcaccagccccagaaccaagaggacaccagggcccctccatcgatgttcccttgtccaggatgaaatcctttgccatcctgtagagcatgtccccatccccaaggggaggcaccggggagtgaccgttgtccggagccaccacggtgttttgatatgcattcaagtgctggtccggcggcctcacagcctcagctcagaactcacaggcacctgtagcctcctgggccctgacctccgtccccaggctcaggccaacttcttcgaccttgaaaatctcctggatccagatgcacgtgtggacactggagactgctacagcaacaaagaaggcggtggagaagacgatgtgaacacagccaggcagcgccgggctctggagaaggaggaggaggaagacaaggaggaggaggaagacgaggaggaggaggaagctggcaccgagattgccatcatcctggatggctcaggaagcattgatcccccagactttcagagagccaaagacttcatctccaacatgatgaggaacttctatgaaaagtgttttgagtgcaactttgccttggtgcagtatggaggagtgatccagactgagtttgaccttcgggacagccaggatgtgatggcctccctcgccagagtccagaacatcactcaagtggggagtgtcaccaagactgcctcagccatgcaacacgtcttagacagcatcttcacctcaagccacggctccaggagaaaggcatccaaggtcatggtggtgctcaccgatggtggcatattcgaggaccccctcaaccttacgacagtcatcaactcccccaaaatgcagggtgttgagcgctttgccattggggtgggagaagaatttaagagtgctaggactgcgagggaactgaacctgatcgcctcagacccggatgagacccatgctttcaaggtgaccaactacatggcgctggatgggctgctgagcaaactgcggtacaacatcatcagcatggaaggcacggttggagacgcccttcactaccagctggcacagattggcttcagtgctcagatcctggatgagcggcaggtgctgctcggcgccgtcggggcctttgactggtccggaggggcgttgctctacgacacacgcagccgccggggccgcttcctgaaccagacagcggcggcggcggcagacgcggaggctgcgcagtacagctacctgggttacgctgtggccgtgctgcacaagacctgcagcctctcctacgtcgcgggggctccacagtacaaacatcatggggccgtgtttgagctccagaaggagggcagagaggccagcttcctgccagtgctggagggagagcagatggggtcctattttggctctgagctgtgccctgtggacattgacatggatggaagcacggacttcttgctggtggctgctccattttaccacgttcatggagaagaaggcagagtctacgtgtaccgtctcagcgagcaggatggttctttctccttggcacgcatactgagtgggcaccccgggttcaccaatgcccgctttggctttgccatggcggctatgggggatctcagtcaggataagctcacagatgtggccatcggggcccccctggaaggttttggggcagatgatggtgccagcttcggcagtgtgtatatctacaatggacactgggacggcctctccgccagcccctcgcagcggatcagagcctccacggtggccccaggactccagtacttcggcatgtccatggctggtggctttgatattagtggcgacggccttgccgacatcaccgtgggcactctgggccaggcggttgtgttccgctcccggcctgtggttcgcctgaaggtctccatggccttcacccccagcgcactgcccatcggcttcaacggcgtcgtgaatgtccgtttatgttttgaaatcagctctgtaaccacagcctctgagtcaggcctccgtgaggcacttctcaacttcacgctggatgtggatgtggggaagcagaggagacggctgcagtgttcagacgtaagaagctgtctgggctgcctgagggagtggagcagcggatcccagctttgtgaggacctcctgctcatgcccacagagggagagctctgtgaggaggactgcttctccaatgccagtgtcaaagtcagctaccagctccagacccctgagggacagacggaccatccccagcccatcctggaccgctacactgagccctttgccatcttccagctgccctatgagaaggcctgcaagaataagctgttttgtgtcgcagaattacagttggccaccaccgtctctcagcaggagttggtggtgggtctcacaaaggagctgaccctgaacattaacctaactaactccggggaagattcctacatgacaagcatggccttgaattaccccagaaacctgcagttgaagaggatgcaaaagcctccctctccaaacattcagtgtgatgaccctcagccggttgcttctgtcctgatcatgaactgcaggattggtcaccccgtcctcaagaggtcatctgctcatgtttcagtcgtttggcagctagaggagaatgcctttccaaacaggacagcagacatcactgtgactgtcaccaattccaatgaaagacggtctttggccaacgagacccacacccttcaattcaggcatggcttcgttgcagttctgtccaaaccatccataatgtacgtgaacacaggccaggggctttctcaccacaaagaattcctcttccatgtacatggggagaacctctttggagcagaataccagttgcaaatttgcgtcccaaccaaattacgaggtctccaggttgcagcagtgaagaagctgacgaggactcaggcctccacggtgtgcacctggagtcaggagcgcgcttgtgcgtacagttcggttcagcatgtggaagaatggcattcagtgagctgtgtcatcgcttcagataaagaaaatgtcaccgtggctgcagagatctcctgggatcactctgaggagttactaaaagatgtaactgaactgcagatccttggtgaaatatctttcaacaaatctctatatgagggactgaatgcagagaaccacagaactaagatcactgtcgtcttcctgaaagatgagaagtaccattctttgcctatcatcattaaaggcagcgttggtggacttctggtgttgatcgtgattctggtcatcctgttcaagtgtggcttttttaaaagaaaatatcaacaactgaacttggagagcatcaggaaggcccagctgaaatcagagaatctgctcgaagaagagaattaggacctgctatccactgggagaggctatcagccagtcctgggacttggagacccagcatcctttgcattactttttccttcaggatgatctagagcagcatggagctgttggtagaatattagtttttaaccatacattgtcccaaaagtgtctgtgcattgtgcaaaaagtaaacttaggaaacatttggtattaaataaatttacacttttctttgcaaaaaaaaaaaaaaaaaaaaaaaaaaaaaaaaaaaaaaaaaaaa

SEQ ID NO: 11969 - DNA, 5896 bp, Homo sapiens
ctgcggccggcccgcgagctaggctgggtttttttttttctcccctccctcccccctttttccatgcagctgatctaaaagggaataaaaggctgcgcataatcataataataaaagaaggggagcgcgagagaaggaaagaaagccgggaggtggaagaggagggggagcgtctcaaagaagcgatcagaataataaaaggaggccgggctctttgccttctggaacgggccgctcttgaaagggcttttgaaaagtggtgttgttttccagtcgtgcatgctccaatcggcggagtatattagagccgggacgcggcggccgcaggggcagcggcgacggcagcaccggcggcagcaccagcgcgaacagcagcggcggcgtcccgagtgcccgcggcgcgcggcgcagcgatgcgttccccacggacgcgcggccggtccgggcgccccctaagcctcctgctcgccctgctctgtgccctgcgagccaaggtgtgtggggcctcgggtcagttcgagttggagatcctgtccatgcagaacgtgaacggggagctgcagaacgggaactgctgcggcggcgcccggaacccgggagaccgcaagtgcacccgcgacgagtgtgacacatacttcaaagtgtgcctcaaggagtatcagtcccgcgtcacggccggggggccctgcagcttcggctcagggtccacgcctgtcatcgggggcaacaccttcaacctcaaggccagccgcggcaacgaccgcaaccgcatcgtgctgcctttcagtttcgcctggccgaggtcctatacgttgcttgtggaggcgtgggattccagtaatgacaccgttcaacctgacagtattattgaaaaggcttctcactcgggcatgatcaaccccagccggcagtggcagacgctgaagcagaacacgggcgttgcccactttgagtatcagatccgcgtgacctgtgatgactactactatggctttggctgcaataagttctgccgccccagagatgacttctttggacactatgcctgtgaccagaatggcaacaaaacttgcatggaaggctggatgggccccgaatgtaacagagctatttgccgacaaggctgcagtcctaagcatgggtcttgcaaactcccaggtgactgcaggtgccagtatggctggcaaggcctgtactgtgataagtgcatcccacacccgggatgcgtccacggcatctgtaatgagccctggcagtgcctctgtgagaccaactggggcggccagctctgtgacaaagatctcaattactgtgggactcatcagccgtgtctcaacgggggaacttgtagcaacacaggccctgacaaatatcagtgttcctgccctgaggggtattcaggacccaactgtgaaattgctgagcacgcctgcctctctgatccctgtcacaacagaggcagctgtaaggagacctccctgggctttgagtgtgagtgttccccaggctggaccggccccacatgctctacaaacattgatgactgttctcctaataactgttcccacgggggcacctgccaggacctggttaacggatttaagtgtgtgtgccccccacagtggactgggaaaacgtgccagttagatgcaaatgaatgtgaggccaaaccttgtgtaaacgccaaatcctgtaagaatctcattgccagctactactgcgactgtcttcccggctggatgggtcagaattgtgacataaatattaatgactgccttggccagtgtcagaatgacgcctcctgtcgggatttggttaatggttatcgctgtatctgtccacctggctatgcaggcgatcactgtgagagagacatcgatgaatgtgccagcaacccctgtttgaatgggggtcactgtcagaatgaaatcaacagattccagtgtctgtgtcccactggtttctctggaaacctctgtcagctggacatcgattattgtgagcctaatccctgccagaacggtgcccagtgctacaaccgtgccagtgactatttctgcaagtgccccgaggactatgagggcaagaactgctcacacctgaaagaccactgccgcacgaccccctgtgaagtgattgacagctgcacagtggccatggcttccaacgacacacctgaaggggtgcggtatatttcctccaacgtctgtggtcctcacgggaagtgcaagagtcagtcgggaggcaaattcacctgtgactgtaacaaaggcttcacgggaacatactgccatgaaaatattaatgactgtgagagcaacccttgtagaaacggtggcacttgcatcgatggtgtcaactcctacaagtgcatctgtagtgacggctgggagggggcctactgtgaaaccaatattaatgactgcagccagaacccctgccacaatgggggcacgtgtcgcgacctggtcaatgacttctactgtgactgtaaaaatgggtggaaaggaaagacctgccactcacgtgacagtcagtgtgatgaggccacgtgcaacaacggtggcacctgctatgatgagggggatgcttttaagtgcatgtgtcctggcggctgggaaggaacaacctgtaacatagcccgaaacagtagctgcctgcccaacccctgccataatgggggcacatgtgtggtcaacggcgagtcctttacgtgcgtctgcaaggaaggctgggaggggcccatctgtgctcagaataccaatgactgcagccctcatccctgttacaacagcggcacctgtgtggatggagacaactggtaccggtgcgaatgtgccccgggttttgctgggcccgactgcagaataaacatcaatgaatgccagtcttcaccttgtgcctttggagcgacctgtgtggatgagatcaatggctaccggtgtgtctgccctccagggcacagtggtgccaagtgccaggaagtttcagggagaccttgcatcaccatggggagtgtgataccagatggggccaaatgggatgatgactgtaatacctgccagtgcctgaatggacggatcgcctgctcaaaggtctggtgtggccctcgaccttgcctgctccacaaagggcacagcgagtgccccagcgggcagagctgcatccccatcctggacgaccagtgcttcgtccacccctgcactggtgtgggcgagtgtcggtcttccagtctccagccggtgaagacaaagtgcacctctgactcctattaccaggataactgtgcgaacatcacatttacctttaacaaggagatgatgtcaccaggtcttactacggagcacatttgcagtgaattgaggaatttgaatattttgaagaatgtttccgctgaatattcaatctacatcgcttgcgagccttccccttcagcgaacaatgaaatacatgtggccatttctgctgaagatatacgggatgatgggaacccgatcaaggaaatcactgacaaaataatcgatcttgttagtaaacgtgatggaaacagctcgctgattgctgccgttgcagaagtaagagttcagaggcggcctctgaagaacagaacagatttccttgttcccttgctgagctctgtcttaactgtggcttggatctgttgcttggtgacggccttctactggtgcctgcggaagcggcggaagccgggcagccacacacactcagcctctgaggacaacaccaccaacaacgtgcgggagcagctgaaccagatcaaaaaccccattgagaaacatggggccaacacggtccccatcaaggattacgagaacaagaactccaaaatgtctaaaataaggacacacaattctgaagtagaagaggacgacatggacaaacaccagcagaaagcccggtttgccaagcagccggcgtatacgctggtagacagagaagagaagccccccaacggcacgccgacaaaacacccaaactggacaaacaaacaggacaacagagacttggaaagtgcccagagcttaaaccgaatggagtacatcgtatagcagaccgcgggcactgccgccgctaggtagagtctgagggcttgtagttctttaaactgtcgtgtcatactcgagtctgaggccgttgctgacttagaatccctgtgttaatttaagttttgacaagctggcttacactggcaatggtagtttctgtggttggctgggaaatcgagtgccgcatctcacagctatgcaaaaagctagtcaacagtaccctggttgtgtgtccccttgcagccgacacggtctcggatcaggctcccaggagcctgcccagccccctggtctttgagctcccacttctgccagatgtcctaatggtgatgcagtcttagatcatagttttatttatatttattgactcttgagttgtttttgtatattggttttatgatgacgtacaagtagttctgtatttgaaagtgcctttgcagctcagaaccacagcaacgatcacaaatgactttattatttatttttttaattgtatttttgttgttgggggaggggagactttgatgtcagcagttgctggtaaaatgaagaatttaaagaaaaaaatgtcaaaagtagaactttgtatagttatgtaaataattcttttttattaatcactgtgtatatttgatttattaacttaataatcaagagccttaaaacatcattcctttttatttatatgtatgtgtttagaattgaaggtttttgatagcattgtaagcgtatggctttatttttttgaactcttctcattacttgttgcctataagccaaaattaaggtgtttgaaaatagtttattttaaaacaataggatgggcttctgtgcccagaatactgatggaattttttttgtacgacgtcagatgtttaaaacaccttctatagcatcacttaaaacacgttttaaggactgactgaggcagtttgaggattagtttagaacaggtttttttgtttgtttgttttttgtttttctgctttagacttgaaaagagacaggcaggtgatctgctgcagagcagtaagggaacaagttgagctatgacttaacatagccaaaatgtgagtggttgaatatgattaaaaatatcaaattaattgtgtgaacttggaagcacaccaatctgactttgtaaattctgatttcttttcaccattcgtacataatactgaaccacttgtagatttgattttttttttaatctactgcatttagggagtattctaataagctagttgaatacttgaaccataaaatgtccagtaagatcactgtttagatttgccatagagtacactgcctgccttaagtgaggaaatcaaagtgctattacgaagttcaagatcaaaaaggcttataaaacagagtaatcttgttggttcaccattgagaccgtgaagatactttgtattgtcctattagtgttatatgaacatacaaatgcatctttgatgtgttgttcttggcaataaattttgaaaagtaatatttattaaatttttttgtatgaaaacatggaacagtgtggctcttctgagcttacgtagttctaccggctttgccgtgtgcttctgccaccctgctgagtctgttctggtaatcggggtataataggctctgcctgacagagggatggaggaagaactgaaaggcttttcaaccacaaaactcatctggagttctcaaagacctggggctgctgtgaagctggaactgcgggagccccatctaggggagccttgattcccttgttattcaacagcaagtgtgaatactgcttgaataaacaccactggattaatggaaaaaaaaaaaaaaaa

SEQ ID NO: 11970 - DNA, 9312 bp, Homo sapiens
atgccgccgctcctggcgcccctgctctgcctggcgctgctgcccgcgctcgccgcacgaggcccgcgatgctcccagcccggtgagacctgcctgaatggcgggaagtgtgaagcggccaatggcacggaggcctgcgtctgtggcggggccttcgtgggcccgcgatgccaggaccccaacccgtgcctcagcaccccctgcaagaacgccgggacatgccacgtggtggaccgcagaggcgtggcagactatgcctgcagctgtgccctgggcttctctgggcccctctgcctgacacccctggacaatgcctgcctcaccaacccctgccgcaacgggggcacctgcgacctgctcacgctgacggagtacaagtgccgctgcccgcccggctggtcagggaaatcgtgccagcaggctgacccgtgcgcctccaacccctgcgccaacggtggccagtgcctgcccttcgaggcctcctacatctgccactgcccacccagcttccatggccccacctgccggcaggatgtcaacgagtgtggccagaagcccgggctttgccgccacggaggcacctgccacaacgaggtcggctcctaccgctgcgtctgccgcgccacccacactggccccaactgcgagcggccctacgtgccctgcagcccctcgccctgccagaacgggggcacctgccgccccacgggcgacgtcacccacgagtgtgcctgcctgccaggcttcaccggccagaactgtgaggaaaatatcgacgattgtccaggaaacaactgcaagaacgggggtgcctgtgtggacggcgtgaacacctacaactgccgctgcccgccagagtggacaggtcagtactgtaccgaggatgtggacgagtgccagctgatgccaaatgcctgccagaacggcgggacctgccacaacacccacggtggctacaactgcgtgtgtgtcaacggctggactggtgaggactgcagcgagaacattgatgactgtgccagcgccgcctgcttccacggcgccacctgccatgaccgtgtggcctccttctactgcgagtgtccccatggccgcacaggtctgctgtgccacctcaacgacgcatgcatcagcaacccctgtaacgagggctccaactgcgacaccaaccctgtcaatggcaaggccatctgcacctgcccctcggggtacacgggcccggcctgcagccaggacgtggatgagtgctcgctgggtgccaacccctgcgagcatgcgggcaagtgcatcaacacgctgggctccttcgagtgccagtgtctgcagggctacacgggcccccgatgcgagatcgacgtcaacgagtgcgtctcgaacccgtgccagaacgacgccacctgcctggaccagattggggagttccagtgcatctgcatgcccggctacgagggtgtgcactgcgaggtcaacacagacgagtgtgccagcagcccctgcctgcacaatggccgctgcctggacaagatcaatgagttccagtgcgagtgccccacgggcttcactgggcatctgtgccagtacgatgtggacgagtgtgccagcaccccctgcaagaatggtgccaagtgcctggacggacccaacacttacacctgtgtgtgcacggaagggtacacggggacgcactgcgaggtggacatcgatgagtgcgaccccgacccctgccactacggctcctgcaaggacggcgtcgccaccttcacctgcctctgccgcccaggctacacgggccaccactgcgagaccaacatcaacgagtgctccagccagccctgccgccacgggggcacctgccaggaccgcgacaacgcctacctctgcttctgcctgaaggggaccacaggacccaactgcgagatcaacctggatgactgtgccagcagcccctgcgactcgggcacctgtctggacaagatcgatggctacgagtgtgcctgtgagccgggctacacagggagcatgtgtaacatcaacatcgatgagtgtgcgggcaacccctgccacaacgggggcacctgcgaggacggcatcaatggcttcacctgccgctgccccgagggctaccacgaccccacctgcctgtctgaggtcaatgagtgcaacagcaacccctgcgtccacggggcctgccgggacagcctcaacgggtacaagtgcgactgtgaccctgggtggagtgggaccaactgtgacatcaacaacaatgagtgtgaatccaacccttgtgtcaacggcggcacctgcaaagacatgaccagtggctacgtgtgcacctgccgggagggcttcagcggtcccaactgccagaccaacatcaacgagtgtgcgtccaacccatgtctgaaccagggcacgtgtattgacgacgttgccgggtacaagtgcaactgcctgctgccctacacaggtgccacgtgtgaggtggtgctggccccgtgtgcccccagcccctgcagaaacggcggggagtgcaggcaatccgaggactatgagagcttctcctgtgtctgccccacgggctggcaagcagggcagacctgtgaggtcgacatcaacgagtgcgttctgagcccgtgccggcacggcgcatcctgccagaacacccacggcggctaccgctgccactgccaggccggctacagtgggcgcaactgcgagaccgacatcgacgactgccggcccaacccgtgtcacaacgggggctcctgcacagacggcatcaacacggccttctgcgactgcctgcccggcttccggggcactttctgtgaggaggacatcaacgagtgtgccagtgacccctgccgcaacggggccaactgcacggactgcgtggacagctacacgtgcacctgccccgcaggcttcagcgggatccactgtgagaacaacacgcctgactgcacagagagctcctgcttcaacggtggcacctgcgtggacggcatcaactcgttcacctgcctgtgtccacccggcttcacgggcagctactgccagcacgatgtcaatgagtgcgactcacagccctgcctgcatggcggcacctgtcaggacggctgcggctcctacaggtgcacctgcccccagggctacactggccccaactgccagaaccttgtgcactggtgtgactcctcgccctgcaagaacggcggcaaatgctggcagacccacacccagtaccgctgcgagtgccccagcggctggaccggcctttactgcgacgtgcccagcgtgtcctgtgaggtggctgcgcagcgacaaggtgttgacgttgcccgcctgtgccagcatggagggctctgtgtggacgcgggcaacacgcaccactgccgctgccaggcgggctacacaggcagctactgtgaggacctggtggacgagtgctcacccagcccctgccagaacggggccacctgcacggactacctgggcggctactcctgcaagtgcgtggccggctaccacggggtgaactgctctgaggagatcgacgagtgcctctcccacccctgccagaacgggggcacctgcctcgacctccccaacacctacaagtgctcctgcccacggggcactcagggtgtgcactgtgagatcaacgtggacgactgcaatccccccgttgaccccgtgtcccggagccccaagtgctttaacaacggcacctgcgtggaccaggtgggcggctacagctgcacctgcccgccgggcttcgtgggtgagcgctgtgagggggatgtcaacgagtgcctgtccaatccctgcgacgcccgtggcacccagaactgcgtgcagcgcgtcaatgacttccactgcgagtgccgtgctggtcacaccgggcgccgctgcgagtccgtcatcaatggctgcaaaggcaagccctgcaagaatgggggcacctgcgccgtggcctccaacaccgcccgcgggttcatctgcaagtgccctgcgggcttcgagggcgccacgtgtgagaatgacgctcgtacctgcggcagcctgcgctgcctcaacggcggcacatgcatctccggcccgcgcagccccacctgcctgtgcctgggccccttcacgggccccgaatgccagttcccggccagcagcccctgcctgggcggcaacccctgctacaaccaggggacctgtgagcccacatccgagagccccttctaccgttgcctgtgccccgccaaattcaacgggctcttgtgccacatcctggactacagcttcgggggtggggccgggcgcgacatccccccgccgctgatcgaggaggcgtgcgagctgcccgagtgccaggaggacgcgggcaacaaggtctgcagcctgcagtgcaacaaccacgcgtgcggctgggacggcggtgactgctccctcaacttcaatgacccctggaagaactgcacgcagtctctgcagtgctggaagtacttcagtgacggccactgtgacagccagtgcaactcagccggctgcctcttcgacggctttgactgccagcgtgcggaaggccagtgcaaccccctgtacgaccagtactgcaaggaccacttcagcgacgggcactgcgaccagggctgcaacagcgcggagtgcgagtgggacgggctggactgtgcggagcatgtacccgagaggctggcggccggcacgctggtggtggtggtgctgatgccgccggagcagctgcgcaacagctccttccacttcctgcgggagctcagccgcgtgctgcacaccaacgtggtcttcaagcgtgacgcacacggccagcagatgatcttcccctactacggccgcgaggaggagctgcgcaagcaccccatcaagcgtgccgccgagggctgggccgcacctgacgccctgctgggccaggtgaaggcctcgctgctccctggtggcagcgagggtgggcggcggcggagggagctggaccccatggacgtccgcggctccatcgtctacctggagattgacaaccggcagtgtgtgcaggcctcctcgcagtgcttccagagtgccaccgacgtggccgcattcctgggagcgctcgcctcgctgggcagcctcaacatcccctacaagatcgaggccgtgcagagtgagaccgtggagccgcccccgccggcgcagctgcacttcatgtacgtggcggcggccgcctttgtgcttctgttcttcgtgggctgcggggtgctgctgtcccgcaagcgccggcggcagcatggccagctctggttccctgagggcttcaaagtgtctgaggccagcaagaagaagcggcgggagcccctcggcgaggactccgtgggcctcaagcccctgaagaacgcttcagacggtgccctcatggacgacaaccagaatgagtggggggacgaggacctggagaccaagaagttccggttcgaggagcccgtggttctgcctgacctggacgaccagacagaccaccggcagtggactcagcagcacctggatgccgctgacctgcgcatgtctgccatggcccccacaccgccccagggtgaggttgacgccgactgcatggacgtcaatgtccgcgggcctgatggcttcaccccgctcatgatcgcctcctgcagcgggggcggcctggagacgggcaacagcgaggaagaggaggacgcgccggccgtcatctccgacttcatctaccagggcgccagcctgcacaaccagacagaccgcacgggcgagaccgccttgcacctggccgcccgctactcacgctctgatgccgccaagcgcctgctggaggccagcgcagatgccaacatccaggacaacatgggccgcaccccgctgcatgcggctgtgtctgccgacgcacaaggtgtcttccagatcctgatccggaaccgagccacagacctggatgcccgcatgcatgatggcacgacgccactgatcctggctgcccgcctggccgtggagggcatgctggaggacctcatcaactcacacgccgacgtcaacgccgtagatgacctgggcaagtccgccctgcactgggccgccgccgtgaacaatgtggatgccgcagttgtgctcctgaagaacggggctaacaaagatatgcagaacaacagggaggagacacccctgtttctggccgcccgggagggcagctacgagaccgccaaggtgctgctggaccactttgccaaccgggacatcacggatcatatggaccgcctgccgcgcgacatcgcacaggagcgcatgcatcacgacatcgtgaggctgctggacgagtacaacctggtgcgcagcccgcagctgcacggagccccgctggggggcacgcccaccctgtcgcccccgctctgctcgcccaacggctacctgggcagcctcaagcccggcgtgcagggcaagaaggtccgcaagcccagcagcaaaggcctggcctgtggaagcaaggaggccaaggacctcaaggcacggaggaagaagtcccaggacggcaagggctgcctgctggacagctccggcatgctctcgcccgtggactccctggagtcaccccatggctacctgtcagacgtggcctcgccgccactgctgccctccccgttccagcagtctccgtccgtgcccctcaaccacctgcctgggatgcccgacacccacctgggcatcgggcacctgaacgtggcggccaagcccgagatggcggcgctgggtgggggcggccggctggcctttgagactggcccacctcgtctctcccacctgcctgtggcctctggcaccagcaccgtcctgggctccagcagcggaggggccctgaatttcactgtgggcgggtccaccagtttgaatggtcaatgcgagtggctgtcccggctgcagagcggcatggtgccgaaccaatacaaccctctgcgggggagtgtggcaccaggccccctgagcacacaggccccctccctgcagcatggcatggtaggcccgctgcacagtagccttgctgccagcgccctgtcccagatgatgagctaccagggcctgcccagcacccggctggccacccagcctcacctggtgcagacccagcaggtgcagccacaaaacttacagatgcagcagcagaacctgcagccagcaaacatccagcagcagcaaagcctgcagccgccaccaccaccaccacagccgcaccttggcgtgagctcagcagccagcggccacctgggccggagcttcctgagtggagagccgagccaggcagacgtgcagccactgggccccagcagcctggcggtgcacactattctgccccaggagagccccgccctgcccacgtcgctgccatcctcgctggtcccacccgtgaccgcagcccagttcctgacgcccccctcgcagcacagctactcctcgcctgtggacaacacccccagccaccagctacaggtgcctgagcaccccttcctcaccccgtcccctgagtcccctgaccagtggtccagctcgtccccgcattccaacgtctccgactggtccgagggcgtctccagccctcccaccagcatgcagtcccagatcgcccgcattccggaggccttcaagtaaacggcgcgccccacgagaccccggcttcctttcccaagccttcgggcgtctgtgtgcgctctgtggatgccagggccgaccagaggagcctttttaaaacacatgtttttatacaaaataagaacgaggattttaattttttttagtatttatttatgtacttttattttacacagaaacactgcctttttatttatatgtactgttttatctggccccaggtagaaacttttatctattctgagaaaacaagcaagttctgagagccagggttttcctacgtaggatgaaaagattcttctgtgtttataaaatataaacaaagattcatgatttataaatgccatttatttattgattccttttttcaaaatccaaaaagaaatgatgttggagaagggaagttgaacgagcatagtccaaaaagctcctggggcgtccaggccgcgccctttccccgacgcccacccaaccccaagccagcccggccgctccaccagcatcacctgcctgttaggagaagctgcatccagaggcaaacggaggcaaagctggctcaccttccgcacgcggattaatttgcatctgaaataggaaacaagtgaaagcatatgggttagatgttgccatgtgttttagatggtttcttgcaagcatgcttgtgaaaatgtgttctcggagtgtgtatgccaagagtgcacccatggtaccaatcatgaatctttgtttcaggttcagtattatgtagttgttcgttggttatacaagttcttggtccctccagaaccaccccggccccctgcccgttcttgaaatgtaggcatcatgcatgtcaaacatgagatgtgtggactgtggcacttgcctgggtcacacacggaggcatcctacccttttctggggaaagacactgcctgggctgaccccggtggcggccccagcacctcagcctgcacagtgtcccccaggttccgaagaagatgctccagcaacacagcctgggccccagctcgcgggacccgaccccccgtgggctcccgtgttttgtaggagacttgccagagccgggcacattgagctgtgcaacgccgtgggctgcgtcctttggtcctgtccccgcagccctggcagggggcatgcggtcgggcaggggctggagggaggcgggggctgcccttgggccacccctcctagtttgggaggagcagatttttgcaataccaagtatagcctatggcagaaaaaatgtctgtaaatatgtttttaaaggtggattttgtttaaaaaatcttaatgaatgagtctgttgtgtgtcatgccagtgagggacgtcagacttggctcagctcggggagccttagccgcccatgcactggggacgctccgctgccgtgccgcctgcactcctcagggcagcctcccccggctctacgggggccgcgtggtgccatccccagggggcatgaccagatgcgtcccaagatgttgatttttactgtgttttataaaatagagtgtagtttacagaaaaagactttaaaagtgatctacatgaggaactgtagatgatgtatttttttcatcttttttgttaactgatttgcaataaaaatgatactgatggtgaaaaaaaaaaaaaaa

SEQ ID NO: 11971 - DNA, 2496 bp, Homo sapiens
gggactcgtcccagagtttgctgccgccgccgccgctgccattagagcggttttaattagctgcaggatttttaatgagctgaaatcaagaagagccccatctcagaagtaagcgagagccgcgcgcagggaagaactagtctgacaaaacagaaggaggtggtgctctcgggggactgggctgtaggctcccaccgatcgatcggcgacgagcagatgagttcccgaggccaggaggctgaggagggaagccagggctcagagaccagcgcccggtgcagagtccccgctgctgccaccgcggcagaaggcacggtgccggattcaaggtgacggcagtgcctggctccattctcctcaagttgccatagcagcctctctcccaacaagcagcttctccgggagccctcagccgggagggacgtcattgttctctcctgcccgtgtggtgcaaggagacccaccggacagagaactttcccgagcccggggtccgctgaccacgtgggtgcacccatgctgcctggagccaggcacagggacaggtccccacggccacagggaatcctctgggcagctgaggggagcgtccaggcccagaagcagctgcagccaagcgtgtccttggagccgtccatgcgtctgtccgcctgctgccggtcgccactggagatctcggcctgatggacgcctggtgtggacgatgagggaagaacgtgccccccacacccaagaggtgacccctgagccagccccggatgaccctgcgacctggaacaatgcggctggcctgcatgttctcttccatcctgctgttcggagctgcaggcctcctcctcttcatcagcctgcaggaccctacggagctcgccccccagcaggtgccaggaataaagttcaacatcaggccaaggcagccccaccacgacctcccaccaggcggctcccaggatggtgacttgaaggaacccacagagagggtcactcgggacttatccagtggggccccgaggggccgcaacctgccagcgcctgaccagcctcaacccccgctgcagaggggaacccgtctgcggctccgccagcgccgtcgccgtctgctcatcaagaaaatgccagctgcggcgaccatcccggccaacagctcggacgcgcccttcatccggccgggacccgggacgctggatggccgctgggtcagcctgcaccggagccagcaggagcgcaagcgggtgatgcaggaggcctgcgccaagtaccgggcgagcagcagccgccgggccgtcacgccccgccacgtgtcccgtatcttcgtggaggaccgccaccgcgtgctctactgcgaggtgcccaaggccggctgctccaattggaagcgggtgctcatggtgctggccggcctggcctcgtccactgccgacatccagcacaacaccgtccactatggcagcgctctcaagcgcctggacaccttcgaccgccagggtatcttgcaccgtctcagcacctacaccaagatgctctttgtccgcgagcccttcgagaggctggtgtccgccttccgcgacaagtttgagcaccccaacagctactatcacccggtcttcggcaaggccatcctggcccggtaccgcgccaatgcctctcgggaggccctgcggaccggctctggggtgcgttttcccgagttcgtccagtacctgctggacgtgcaccggcccgtggggatggacattcactgggaccatgtcagccggctctgcagcccctgcctcatcgactacgatttcgtaggcaagttcgagagcatggaggacgatgccaacttcttcctgagcctcatccgcgcgccgcggaacctgaccttcccccggttcaaggaccggcactcgcaggaggcgcggaccacagcgaggatcgcccaccagtacttcgcccaactctcggccctgcaaaggcagcgcacctacgacttctactacatggattacctgatgttcaactattccaagccctttgcagatctgtactgaggggcgccgcagctggccggggccgccctgccccggtcactcacctgtgctcccgggcatcctcctgtccctggctcctcatcctgggagcaacagggctctgaggacgtgaggagccatcgctgtgggaggcagcaggccccgggtggggggcagaggcgcccagccttggatggggaccccagcccctggcctgtacctgtttcctcattccttggctgagggagaggctgagaactgggcagacacccctggagctcagccgacagttttgatgagcagggaagtctgaggcccagaggacggggggcccagcggtaagggatgtcccgcactcccttagccattgccttggaccaaaccacgtggtttgcagcttttctacgagccaggggggaggttcccttggattaaggttccaaataaagcacatggtttccagagcaaaaaaaaaaaaaaaaaa

SEQ ID NO: 11972 - DNA, 2936 bp, Homo sapiens
cgcttgacttgcttccagacaaaggttgtctcaagtttgttgctcaaaccgagttctggagaacgccatcagctcgctgcttaaaattaaaccacaggttccattatgggtcgacttgatgggaaagtcatcatcctgacggccgctgctcaggggattggccaagcagctgccttagcttttgcaagagaaggtgccaaagtcatagccacagacattaatgagtccaaacttcaggaactggaaaagtacccgggtattcaaactcgtgtccttgatgtcacaaagaagaaacaaattgatcagtttgccaatgaagttgagagacttgatgttctctttaatgttgctggttttgtccatcatggaactgtcctggattgtgaggagaaagactgggacttctcgatgaatctcaatgtgcgcagcatgtacctgatgatcaaggcattccttcctaaaatgcttgctcagaaatctggcaatattatcaacatgtcttctgtggcttccagcgtcaaaggagttgtgaacagatgtgtgtacagcacaaccaaggcagccgtgattggcctcacaaaatctgtggctgcagatttcatccagcagggcatcaggtgcaactgtgtgtgcccaggaacagttgatacgccatctctacaagaaagaatacaagccagaggaaatcctgaagaggcacggaatgatttcctgaagagacaaaagacgggaagattcgcaactgcagaagaaatagccatgctctgcgtgtatttggcttctgatgaatctgcttatgtaactggtaaccctgtcatcattgatggaggctggagcttgtgattttaggatctccatggtgggaaggaaggcaggcccttcctatccacagtgaacctggttacgaagaaaactcaccaatcatctccttcctgttaatcacatgttaatgaaaataagctctttttaatgatgtcactgtttgcaagagtctgattctttaagtatattaatctctttgtaatctcttctgaaatcattgtaaagaaataaaaatattgaactcatagcaggagaatagtttttaaaataaatctcgatttgttagcatctgtcttagtcactttgggctgctataacaaattaccatagatggagtgtcatagacaacaaacatttatttttcagtctggaggctaggaagtgcaagataaaggtgccagcagatatagtttctggttagggcccacttcctggtttgcagatggtcctcttcttgctgtatcctcacatagcaagagcagagaaaaaaagcgagcgctcatgtgtctttttataaggacactaatcctgttcatgagggcactacccttatgacctgattacctcccaaaggccccacctcctaatgtatcatattgcaggttaggatgtcaacacatgactctggggtgatacaaataggccattgcagcatatacaattaaaatgtaaatatgaagaaaaaaggaagtttttgtttttttgtgggggagatgggggttaaggaagaagatagtaatttcaggactaggcatggtagctcatgcctataattcctgcactttgggaggccaaggcaggaggatcacttgcggccaggagttcaggaccagcatggttaacagaggctaaggcaggaggattacttgagcccaagagtttgaggctgcagtgagctgtaatcatgccactgcactccagggtgacagagcaagaccctgtacctaaataataataataatttccacttcatttttcaatattcaaatatttttatataattctgcattgttctgtatgtagatcctaattttaaaattttacaccatcataaatgaacaaaggtaggaaggagtttggcttcaatagcttacagtaaaaggagtaaaggagttcagcctcaaaacgatattgttgacctgttatgttatgaaaaataatccagtgtttatacttaacggatgccatcccttattatttactattttcttagtctaactaaacaatctttattaaaataagcaatgatatttgacatgggcctaagaaatatatagttagctaacaatattgtcagttagagggatttcttttctaaattaagtacagatttcttcaccaaactccaggataacagaaaagaggacataaaatttggacatagtttctggataaataaatgtaaatttaaatataaattatgtaacaggaaacaaacgaaattaaagaaaataaatttttcaagaaaagtaaatttatggatgttaattctgtaacattgtcagggcaaagttttttgtttttattttaatttaagggttttatgtttgttttttacttgttgcaacctcaaatgaccaaatggtatgatgcacactgagatactcaataaatgtgcagtgattcttagccttttttcctagaactttaatattaacatggaaaattctgaaatggacaacaaaaagataacactttgtgtatggggaagaatatcatgcagttgatgacggtacattaaaattcacacaaaaggacattttgactagcattcagaaagagtccattgattataagattatctatgaggttttggaccgggcactacactaccgaattatggctaactttggtttgtgatctagaccaagtcacccaatctatcttggattttagttttctggtttatgaaattaaggagttaagctaaatgacttgggtttcttttcgtgtatcataatcaaaatgctgtaacttctctagtgaattcatagaacactgactcttacaagtatgtcatgaaatactttatgctgtgagcaggtatacatgtataatatatgtatagctatgaacaaataaattttaaataaatgcaaaaaaaaaaaaaaaaa

SEQ ID NO: 11973 - DNA, 5229 bp, Homo sapiens
gcagtcggagacttgcaggcagcaaacacggtgcgagcgaacaggagtgggggggaaattaaaaaaagctaaacgtggagcagccgatcggggaccgagaaggggaatcgatgcaaggagcacaataaaacaaaagctacttcggaacaaacagcatttaaaaatccacgactcaagataactgaaacctaaaataaaacctgctcatgcaccatggtttttcaaactcggtacccttcatggattattttatgctacatctggctgctccgctttgcacacacaggggaggcgcaggctgcgaaggaagtactactgctggattctaaagcacaacaaacagagttggagtggatttcctctccacccaatgggtgggaagaaattagtggtttggatgagaactataccccgatacgaacataccaggtgtgccaagtcatggagcccaaccaaaacaactggctgcggactaactggatttccaaaggcaatgcacaaaggatttttgtagaattgaaattcaccctgagggattgtaacagtcttcctggagtactgggaacttgcaaggaaacatttaatttgtactattatgaaacagactatgacactggcaggaatataagagaaaacctctatgtaaaaatagacaccattgctgcagatgaaagttttacccaaggtgaccttggtgaaagaaagatgaagcttaacactgaggtgagagagattggacctttgtccaaaaagggattctatcttgcctttcaggatgtaggggcttgcatagctttggtttctgtcaaagtgtactacaagaagtgctggtccattattgagaacttagctatctttccagatacagtgactggttcagaattttcctctttagtcgaggttcgagggacatgtgtcagcagtgcagaggaagaagcggaaaacgcccccaggatgcactgcagtgcagaaggagaatggttagtgcccattggaaaatgtatctgcaaagcaggctaccagcaaaaaggagacacttgtgaaccctgtggccgtgggttctacaagtcttcctctcaagatcttcagtgctctcgttgtccaactcacagtttttctgataaagaaggctcctccagatgtgaatgtgaagatgggtattacagggctccatctgacccaccatacgttgcatgcacaaggcctccatctgcaccacagaacctcattttcaacatcaaccaaaccacagtaagtttggaatggagtcctcctgcagacaatgggggaagaaacgatgtgacctacagaatattgtgtaagcggtgcagttgggagcagggcgaatgtgttccctgtgggagtaacattggatacatgccccagcagactggattagaggataactatgtcactgtcatggacctgctagcccacgctaattatacttttgaagttgaagctgtaaatggagtttctgacttaagccgatcccagaggctctttgctgctgtcagtatcaccactggtcaagcagctccctcgcaagtgagcggagtaatgaaggagagagtactgcagcggagtgtcgagctttcctggcaggaaccagagcatcccaatggagtcatcacagaatatgaaatcaagtattacgagaaagatcaaagggaacggacctactcaacagtaaaaaccaagtctacttcagcctccattaataatctgaaaccaggaacagtgtatgttttccagattcgggcttttactgctgctggttatggaaattacagtcccagacttgatgttgctacactagaggaagctacaggtaaaatgtttgaagctacagctgtctccagtgaacagaatcctgttattatcattgctgtggttgctgtagctgggaccatcattttggtgttcatggtctttggcttcatcattgggagaaggcactgtggttatagcaaagctgaccaagaaggcgatgaagagctttactttcattttaaatttccaggcaccaaaacctacattgaccctgaaacctatgaggacccaaatagagctgtccatcaattcgccaaggagctagatgcctcctgtattaaaattgagcgtgtgattggtgcaggagaattcggtgaagtctgcagtggccgtttgaaacttccagggaaaagagatgttgcagtagccataaaaaccctgaaagttggttacacagaaaaacaaaggagagactttttgtgtgaagcaagcatcatggggcagtttgaccacccaaatgttgtccatttggaaggggttgttacaagagggaaaccagtcatgatagtaatagagttcatggaaaatggagccctagatgcatttctcaggaaacatgatgggcaatttacagtcattcagttagtaggaatgctgagaggaattgctgctggaatgagatatttggctgatatgggatatgttcacagggaccttgcagctcgcaatattcttgtcaacagcaatctcgtttgtaaagtgtcagattttggcctgtcccgagttatagaggatgatccagaagctgtctatacaactactggtggaaaaattccagtaaggtggacagcacccgaagccatccagtaccggaaattcacatcagccagtgatgtatggagctatggaatagtcatgtgggaagttatgtcttatggagaaagaccttattgggacatgtcaaatcaagatgttataaaagcaatagaagaaggttatcgtttaccagcacccatggactgcccagctggccttcaccagctaatgttggattgttggcaaaaggagcgtgctgaaaggccaaaatttgaacagatagttggaattctagacaaaatgattcgaaacccaaatagtctgaaaactcccctgggaacttgtagtaggccaataagccctcttctggatcaaaacactcctgatttcactaccttttgttcagttggagaatggctacaagctattaagatggaaagatataaagataatttcacggcagctggctacaattcccttgaatcagtagccaggatgactattgaggatgtgatgagtttagggatcacactggttggtcatcaaaagaaaatcatgagcagcattcagactatgagagcacaaatgctacatttacatggaactggcattcaagtgtgatatgcatttctcccttttaagggagattacagactgcaagagaacagtactggccttcagtatatgcatagaatgctgctagaagacaagtgatgtcctgggtccttccaacagtgaagagaagatttaagaagcacctatagacttgaactcctaagtgccaccagaatatataaaaagggaatttaggatccaccatcggtggccaggaaaatagcagtgacaataaacaaagtactacctgaaaaacatccaaacaccttgagctctctaacctcctttttgtcttatagactttttaaaatgtacataaagaatttaagaaagaatatatttgtcaaataaaatcatgatcttattgttaaaattaatgaaatattttccttaaatatgtgatttcagactattcctttttaaaatcatttgtgtttattcttcataaggactttgttttagaaagctgtttatagctttggacctttttagtgttaaatctgtaacattactacactgggtacctttgaaagaatctcaaatttcaaaagaaatagcatgattgaagatacatctctgttagaacattggtatcctttttgtgccattttattctgtttaatcagtgctgttttgatattgtttgctaattggcaggtagtcaagaaaatgcaagttgccaagagctctgatattttttaaaaagaatttttttgtaaagatcagacaacacactatcttttcaatgaaaaaagcaataatgatccatacatactataaggcacttttaacagattgtttatagagtgattttactagaaagaatttaataaactcgaagtttaggtttatgagtatataaacaaatgaggcacttcatctgaagaatgttggtgaaggcaagtctctgaaagcagaactatccagtgttatctaaaaattaatctgagcacatcaagattttttcattctcgtgacattaggaaatttaggataaatagttgacatatattttatatcctcttctgttgaatgcagtccaaacatgaaaggaaataattgttttatattataactctgaagcatgataaaggggcagttcacaattttcaccatttaaacacaaatttgctgcacagaatatcaccattgcagttcaaaacaaaacaaaacaaaaagtcttttgtttgtgaacactgatgcaagaaacttgttaaatgaaaggactctttaccctagaaggaagaggtgaaggatctggcttgtttttaaagctttatttattaaaccatattatttgattactgtgttagaatttcataagcaataattaaatgtgtctttatagatattgcaggaatgtatacatattgtgattaatgctttcaaaacttatgaaaatcatgaactaccccagaattgaactgttgtacttccaaagagaattgggctgtttataatgattttaatagagaaagatcccagggatcggtcataattggtcttgtttgataatgtgggcatccacaaacaaacaaacaaataacagaaacaaaatctgtaaatgttcctttgtaaaacttgtaaattttatttatactgtcttgttttgtacacacatttctctgtagtgggctctgaatacattgaaaatgcactatatttttctattttacttgcagagcatcacaaaagaacaggtattttcagtgctacataatgtgttttcccacatttaggaccaaagacggctatagaaaaactcaaatggattgcttcccaaacccctccccaccctttttttttggttttaaatcactgtacagtgttatttgatattttaatttattttttgattgactagaaaaatcattttaatttcactaaaatgttttttgtccctaaggaaaagtaatctgtaaaaataattttaattagcataatacagtcacctagacacttccatttgtaatctttgtaatagactgtaaatatatttttggaactataaaaaaaaaaaaaaaa

SEQ ID NO: 11974 - DNA, 2475 bp, Homo sapiens
atgttgttctcctggcgagaagatcctggagcccagtgcctgctgctttctcttctgctcctcgcagcctcggaggtggggagcggccagctccactactccgtctctgaggaggccaagcatggcaccttcgtgggccgcatcgcgcaggacctggggctggagctggcggagctggtgccgcgcctgttccgggtggcgtccaaaagacacggggaccttctggaggtaaatctgcagaatggcattttgtttgtgaattctcggatagaccgcgaggaactgtgcgggcggagcgcggagtgcagcatccacctggaggtgatcgtggacaggccgctgcaggttttccatgtggaggtggaagtgaaggacattaatgacaacgcgccagtttttccaatggctgtaaagaatctgtttatttccgaatcccgacagcctggctctcggttttcgctagagggcgcatcagatgcagatatcggaacaaattcgttgttgacttacagtcttgattccactgaatattttaccttggacgttaaaagaaatgatgaggaaattaaatcccttggactcgtgttgaaaaaaaatttaaatcgagaggacactcctaagcattatttactaataacagcaattgatggtgggaaaccagagctcactggcacgactcaactaaagatcactgttttagatgtaaacgacaacgccccagcgtttgagaggacgatctataaagtcagattactcgaaaatgcaccaaatggtaccctagtggtgaccgttaacgccaccgatttggatgaaggagtaaataaggatatcgcgtattctttcaatacggacatgtcagcagatattctgtcaaaattccatttagatccagtcaatggacaaatcagtgtaaagggtaacatagatttcgaggaaagtaagtcatatgaaatccaggtagaagccacggataaaggaaatcccccaatgtcagatcactgcacagttctactcgaaattgtggacatcaatgataatgtacctgagttagttattcaatcactatctttacctgtattagaagactctccacttagcacagtcatcgctctgatcagcgtgtccgaccgcgactcaggagtcaatggacaggtcacctgctcgctgacgccccacgtccccttcaagctggtgtccaccttcaagaattactactcattggtgctggacagccctctggaccgcgagagcgtgtcggcctatgagctggtggtgactgctcgggacgggggctcgccttcactgtgggccacggccagcgtgtccgtggaggtggccgacgtgaacgacaatgcgccggcattctcgcagtccgagtacacggtgttcgtgaaggagaacaacccgccgggctgccacatcttcacggtgtctgcgcgggacgcggacgcgcaggagaacgccctggtgtcctactcgctggtggaacggcgggtgggggagcgcgcgctgtcgagctacgtgtcggtacacgcggagagcggcaaggtgtacgcgctgcagccgctggaccacgaggagctagagctgctgcagttccaggtgagtgcgcgcgatgcgggcgtgccgcctctgggcagcaacgtgacgctgcaggtgttcgtgctggacgagaacgacaacgcgccggcactgctgatgcctcgggtgggtggcatcggtggcgcagtgagcgagctggtgccgcggtcagtgggtgcgggccacgtggtagcgaaggtgcgcgcagtggatgcagactcaggctacaacgcgtggctttcgtatgagctgcagcctgggaccggcggtgcgcgcatcccgtttcgcgtggggctgtacacgggagagatcagcacgacccgtgccctggacgaggtggacgccccgcgccatcgcctactggtgctggtgaaggaccacggtgaaccctcattgaccgccacggccactgtgctggtgtcgctggtggagagtggccaggcacccaaggcctcgtcccaggcgtccgctggcgccacgggcccggaagctgcactggtggatgtcaacgtgtacttgatcgtcgccatctgcgcggtgtccagtctgttggtgctcacactgctgctatatactgctctgcggtgctccgcgccgccaaccgaaggcgactgtgggccgggcaagcccacgctggtgtgctccagcgcggtggggagctggtcatactcgcagcagaggcagcagagggtgtgctctggagaggggttgcccaagaccgacctcatggcttttagccctagccttcctccttgtccaattagccgggatagagaggagaaacaggatgtggacgttgatctctcagccaaagtgagtaatttttatttattctttccaaaatgtctttgtttttcattcctcaatgtttccactcctctggaaatacattaa

SEQ ID NO: 11975 - DNA, 5260 bp, Homo sapiens
atgttgttctcctggcgagaagatcctggagcccagtgcctgctgctttctcttctgctcctcgcagcctcggaggtggggagcggccagctccactactccgtctctgaggaggccaagcatggcaccttcgtgggccgcatcgcgcaggacctggggctggagctggcggagctggtgccgcgcctgttccgggtggcgtccaaaagacacggggaccttctggaggtaaatctgcagaatggcattttgtttgtgaattctcggatagaccgcgaggaactgtgcgggcggagcgcggagtgcagcatccacctggaggtgatcgtggacaggccgctgcaggttttccatgtggaggtggaagtgaaggacattaatgacaacgcgccagtttttccaatggctgtaaagaatctgtttatttccgaatcccgacagcctggctctcggttttcgctagagggcgcatcagatgcagatatcggaacaaattcgttgttgacttacagtcttgattccactgaatattttaccttggacgttaaaagaaatgatgaggaaattaaatcccttggactcgtgttgaaaaaaaatttaaatcgagaggacactcctaagcattatttactaataacagcaattgatggtgggaaaccagagctcactggcacgactcaactaaagatcactgttttagatgtaaacgacaacgccccagcgtttgagaggacgatctataaagtcagattactcgaaaatgcaccaaatggtaccctagtggtgaccgttaacgccaccgatttggatgaaggagtaaataaggatatcgcgtattctttcaatacggacatgtcagcagatattctgtcaaaattccatttagatccagtcaatggacaaatcagtgtaaagggtaacatagatttcgaggaaagtaagtcatatgaaatccaggtagaagccacggataaaggaaatcccccaatgtcagatcactgcacagttctactcgaaattgtggacatcaatgataatgtacctgagttagttattcaatcactatctttacctgtattagaagactctccacttagcacagtcatcgctctgatcagcgtgtccgaccgcgactcaggagtcaatggacaggtcacctgctcgctgacgccccacgtccccttcaagctggtgtccaccttcaagaattactactcattggtgctggacagccctctggaccgcgagagcgtgtcggcctatgagctggtggtgactgctcgggacgggggctcgccttcactgtgggccacggccagcgtgtccgtggaggtggccgacgtgaacgacaatgcgccggcattctcgcagtccgagtacacggtgttcgtgaaggagaacaacccgccgggctgccacatcttcacggtgtctgcgcgggacgcggacgcgcaggagaacgccctggtgtcctactcgctggtggaacggcgggtgggggagcgcgcgctgtcgagctacgtgtcggtacacgcggagagcggcaaggtgtacgcgctgcagccgctggaccacgaggagctagagctgctgcagttccaggtgagtgcgcgcgatgcgggcgtgccgcctctgggcagcaacgtgacgctgcaggtgttcgtgctggacgagaacgacaacgcgccggcactgctgatgcctcgggtgggtggcatcggtggcgcagtgagcgagctggtgccgcggtcagtgggtgcgggccacgtggtagcgaaggtgcgcgcagtggatgcagactcaggctacaacgcgtggctttcgtatgagctgcagcctgggaccggcggtgcgcgcatcccgtttcgcgtggggctgtacacgggagagatcagcacgacccgtgccctggacgaggtggacgccccgcgccatcgcctactggtgctggtgaaggaccacggtgaaccctcattgaccgccacggccactgtgctggtgtcgctggtggagagtggccaggcacccaaggcctcgtcccaggcgtccgctggcgccacgggcccggaagctgcactggtggatgtcaacgtgtacttgatcgtcgccatctgcgcggtgtccagtctgttggtgctcacactgctgctatatactgctctgcggtgctccgcgccgccaaccgaaggcgactgtgggccgggcaagcccacgctggtgtgctccagcgcggtggggagctggtcatactcgcagcagaggcagcagagggtgtgctctggagaggggttgcccaagaccgacctcatggcttttagccctagccttcctccttgtccaattagccgggatagagaggagaaacaggatgtggacgttgatctctcagccaaaccacgacagcccaaccctgactggcgttactctgcctccctgagagcaggcatgcacagctctgtgcacctagaggaggctggcattctacgggctggtccaggagggcctgatcagcagtggccaacagtatccagtgcaacaccagaaccagaggcaggagaagtgtcccctccagtcggtgcgggtgtcaacagcaacagctggacctttaaatacggaccaggcaaccccaaacaatccggtcccggtgagttgcccgacaaattcattatcccaggatctcctgcaatcatctccatccggcaggagcctactaacagccaaattgacaaaagtgacttcataaccttcggcaaaaaggaggagaccaagaaaaagaagaaaaagaagaagggtaacaagacccaggagaaaaaagagaaagggaacagcacgactgacaacagtgaccagtgaggtcctcaaatggaaacaagccacttagccagtttttgtaataatggcaaatctctcccatgtagcaattccctgctcctttttcctatctacatgagccctcttagagacctcagaaatctgcagaaagttccctgtgtctgtctagaacgcatttaacaggttttgtcgtaaaagctttactaagtctggtgttaactctttctctccactctggcttgttttcagaacctaaaaagcagacccaagtttcctttctcctccgccgcaaaggagaggcttcccagccccgccagtgagaggttggactctctgccctgtgctccggggatcctgtcttgatgacacttgcagggcaggctgaaaagttttgagattgagcagcttgggagtttgtggccactgggtatgtgtggctaccgcgggtatgcgagtgccagatattggctgagacgagccagcttagactaattggtacaaggaaggcaagaaaacaaagacaaataaacagcggaagttatcagtatggaggggaagtgtaaacttaaagggaccagactttctaaatcttacaactcaagaggtggcagccaccctctaggagacaaaactacccccactgacaaggctttaggagaccctaaagtctgttggctgtgacgtcattatacctaaaatctgcatcatacctgcaagccaacagttcagtgttttaacagagaaccaccctgggaaacagaagcagatctgatgtgtttcctatacatgtcctgtgctcactttattaaaaattcttttgcacacaatgtttatgaaaaggccagatccttttccaatacttatgcaaaagcaaaagaaaaccccgacacctcacctttcgctgtttgttgtttcatagatttatttaaaaaaagagaaagtctatagctataaatctttaaagagaaatatgaatacaattcccctaaactctcctcaaaagagaattcagtctacagccatttaaatgatcattgctgctacagaagtgctttaagagaattgcctgaaacatctgtattatatcggccacctgccaatcacagctttactctttcaggtcactctggggctgcctcttgcatgtattactaaataaaatgatctctctttctctctctctctctcttttctaagaaacaattatgtgcactttgatacacaaccttctctaaccaactatatatcaagacccaaaaattgaagaaaaatattgttttctcatacagtgagcagatttttcaatctactaattctgtgacttgtcttggtgtgctagcctacaccttctctttggtttagttttccttttctataacactctgaattgctaatcttactaacacctatgatgttacctgaaatcaatctcccatatgtatgctgtatgctatgctaagactcctgaaatatacttactctgtgcttgtgtatgtgaatgttaatgcaactattacctagagtgaactttaagctttattgttgaatgtaattccattatatttccttttgtacacctgtgaaaaagtggagtagtgtttttttaaccattgttaatcagcttttgtgtatgaaagacacagtaaaatttctttcttaaatcaagatactggtgattcaaggaattttatttatggtccagccaagagccatctcgtgccaagacttctgctggcaagggaatggataaagctgttttgttctagtaacaattttggaatgaatactgacaatattccatgagggtgtgcaagcacaaattttaccaatctgacctctttgaagttgcagaatgctttgaaattctaatggtatctgaaatatcagctcatagaaagtaacaaaatttgctgtcaccttaaataagacattttaattttgttataatgtacaatttagaagtttgattaattatattatctatttaggcattaatataaaagaggtaggagtctgttatttaaaaaaagcattaaatttaaaaaaaaactgtcttgtctacttttagcttcattctcccatattttgaagggtgtgtaacttcagctctgcaggattgcatggggtaaaacttgttaccaacacatgtgaaccattgctacattgtaggttgtgatcattttgccccactgaagcccatgtatctgaccttacgtgccttttgaactaggagaatcgggctaatttattaatgatgataattataatgtatctgtacagcactttttacatttgcgaagtgctttccaatccatgttagttactagttattacagctgtaaggataaaacacgtcatgtggattcattttgaattggtgctattggtatttcctctgttattgctaataaatgaaaatggtggtatg

SEQ ID NO: 11976 - DNA, 5108 bp, Homo sapiens
gggaaggtgagcggctgcgggacccagcccctcgccgggagcgggcaccatggtgctgtcggtgcctgtgatcgcgctgggcgccacgctgggcacagccaccagcatcctcgcgttgtgcggggtcacctgcctgtgtcggcacatgcaccccaagaaggggctgctgccgcgggaccaggaccccgacctggagaaggcgaagcccagcttgctcgggtctgcacaacagttcaatgttaaaaagtccacggaacctgttcagccccgtgccctcctcaagttcccagacatctatggacccaggccagctgtgacggctccagaggtcatcaactatgcagactattcactgaggtctacggaggagcccactgcacctgccagcccccaacccccgaatgacagtcgcctcaagaggcaggtcacagaggagctgttcatcctccctcagaatggtgtggtggaggatgtctgtgtcatggagacctggaacccagagaaggctgccagttggaaccaggcccccaaactccactactgcctggactatgactgtcagaaggcagaattgtttgtgactcgcctggaagctgtgaccagcaaccacgacggaggctgtgactgctacgtccaagggagtgtggccaataggaccggctctgtggaggctcagacagccctaaagaagcggcagctgcacaccacctgggaggagggcctggtgctccccctggcggaggaggagctccccacagccaccctgacgctgaccttgaggacctgcgaccgcttctcccgtcacagcgtggccggggagctccgcctgggcctggacgggacatctgtgcctctaggggctgcccagtggggcgagctgaagacttcagcgaaggagccatctgcaggagctggagaggtcctactatccatcagctacctcccggctgccaaccgcctcctggtggtgctgattaaagccaagaacctccactctaaccagtccaaggagctcctggggaaggatgtctctgtcaaggtgaccttgaagcaccaggctcggaagctgaagaagaagcagactaaacgagctaagcacaagatcaaccccgtgtggaacgagatgatcatgtttgagctgcctgacgacctgctgcaggcctccagtgtggagctggaagtgctgggccaggacgattcagggcagagctgtgcgcttggccactgcagcctgggcctgcacacctcgggctctgagcgcagccactgggaggagatgctcaaaaaccctcgccggcagattgccatgtggcaccagctgcacctgtaaccagctgcccagctgcctcccttcttggacagccctgacccgtcctctgcaacctcctttctgtgcccctttcctcattctgacacccagaagacagtgacagatgtgtttgcaaggctgggatggctctctcatcatactcttgtttcttagaaataagcaagacagagcaggaaatggaatatgcgggtcacactgaggaatgcattttgctcatctgtgttattgaaggaggtgcttattaaatacagttcctatgcctgttttataggtggggttaggccagatgcagagaaagctaaatgtgggaatcatggatgcaaagaagaatttggctttttgaaaaacaagcatttcaaaaatgatgaaggaagtgaaagtatcctggatcaactcctagagttagagattgcccaggtggaaagaaaccttagccagcgttcaatcaagctcaccatgcagggcagtcacccggcagttctcaaactttagcatgtgaagagtcaccagcagattcctgggctcgcctggagacattcctagtcggtattcctggtcgaagcccaggagccttcctttttaacaagctgatgtagagggtggagcactgtatgtggagaaattccttctacaatattccacacaggtttttggccacagtccttgatggagtcccaaaaccatggtgcagccagttccaatgctggacacctcaaccatcagggtgaaatctggggcctcagctttttaatttaattattttaattcttaatactttaatttgtgcatttcataagccccctgctcttggactgaattttgtgctttttattgaagaattttattgtttttatcttaaaatcagtttctattatccttggggagaccatccctaacaaagtacaggtgggatctcctgtgagtcattggctgggttctgattgctagatgtcacacccaccagcatcaccaaagtgactctgagatagaccggtcccttctcagcgttccagtcacttcaggaggaatttagttattgacttagtctatgacatctggctacatgtaggtagagaagaaagacaattttaaaaaggaaatcaggtcttttgcaactgtgcctccctctgtctgttttcacttgaatgggtaaataaccagcagctaggttttgaattcctaccttgttattctaaacagatgtccacattgttaattaaatctaaattatgagccttgctgagtggatacggtacttacacctgaaccaggattcctgggttctgttgttgacattgcccttcagcacctgtttggccagctgtataagataggactaatgactaggaagcctaccccaatgaatgatatactagatgaaatagtgttcaaaacctgtaggcactctctggctaaaaacaaactctgaggccaccagcagatcatctttaagctaagttactatttttcacctttttttttagacggagttttgctctttgttgcccaggctggagtgcagtggcacgatctcggctcactgcaacctccgcctcccaagttcaagcgattctcctgtctcagcctcctgggtagctgggattacaggtgcccaccaacatgcctggctaatttttgtacttttagtagagatggggtttcaccatgttggccaggctggtcttcaactccagatctcaggtgatctaccctcctcggcctcccaaagtactgggattacaggcctgagccaccgcgcccggcctatttttcactttaatttggcagctgagaatgcccaaaaagtgccagaagcatcgtggcatttccagaaccatggattctgcctttggacccctctctattaatattaaaactctgggccttcagatgtcaccctaatccactgccctaagacagaatttctggacaagatgggtaagggcttcattccttcaacaagtcaagtcatacttggcctctccctgagaatctgagcaggagccttataacctgtggtcattattttttctttctgtacagaaatagaaaagcattagaaataacttctaaccatcctctgaaaaaacagaaaaaatatcgaatccctctttcatgagaagtcttttggataattggaaaccttcatcactgaggttggccagcccctgccaagtgttgtgtaggcaaagcacttgttagtggcttcctatgaaatgttttagagatctcttcaccatactggtttcttctctttggttggtgtgggtaaaagaaaacaaaacatttcctataagctgaaagctgaccagcattctcttcttggtaacatctactactccaacctagaaaatttggattctagaccaaaaatcaggaaacatggctccttataaatctgtgcagctgccttatagtaccatcaaaggaatttcaggtgggctgggcggggccccgatcccagaattatcaactccacccatcatcatttggtcatgaagcatcctttcattcttcttcttcttttttttggggggggcggggcgggggagggatctcaaagttttagtcttccagaatccaaattaaaggttgcccctgatgggggccaggttccgccacagaacatcttagatgtcagccttgacctcacttagcagggattacagaaatgagatacattttgaaggagagttgtctgttatgttcactgtattctaagtgcctgggataaagctgtctcatgggtgctccatatatattcatatatatttgttgagtgaattaatgaattaagagtggctggcagagtaggcagaaaaagacactgcaaatggcataaaaattaaagtcctagctgagttctcaatggtaaaggcatcagatgtcttagcagtcaagctagaaattcatgacaatgagtattactatttgcctaatgacaactcattgctctccatgtaaatgtaatcaacagatgaagagaatataattgctctgcttttccactaaaactccatcttagtgaattttaaattatccagagatgtcaaactgccaaataaaaatatttcagtagtctttgcatcagcttaccttgtaccagaaacatttccaatttactatcaaattatagtaactgagcctgtgtgaagtatctcatcattttcgaaaggaacaccttgtgtgatgccagtgagcatttctaaaaagggtgtgaggtagaggtaaaaataaggtgagagaccatttcagaatgcactgttgctcaaaaaggtgatctggttctttcttcagagatttctacggggatagaaaatcgggagtctgccctcattaatctgtgactccacctcttgcatcaaatcaatatctatttgttgagcacttattgattaagaccttgcatatgtctgtccattttgatttgagatacaactttttgtgtgggttgaatgacaaatcactccaaacaaaactgggcacagagaatcagctaggagaccagttattcagggtccatttctcttggatgtaaaggagtcctgggtaaaatgtggctgtaacctaaaccaactagtccttgtgatttgtttctgccctctgtgtttcctgttgtcaaatgctaagtgtgtgttttgcagtcatgaactaaagcacaaaaagatgcatgagacattgtagtcatatgtctggtgtgacactttggagcaaaaaccttgcagtggtaaataaaaaatttccaacagggaaaaaaaaaaaaaaaaaaaaaaaaaaa

SEQ ID NO: 11977 - DNA, 2210 bp, Homo sapiens
acatgcttccattgcttgattcctcgaaaagggcggggactctgggcagcggttgtggagtgccgcgggtccacagtgctgcactgagcagagaggaaggggcgtcccgggatatttggaggataaaggtgtgggcaagggtgatgaccacacctgccggctccggcagcggcttcggctccgtgtcctggtggggcctgtccccggcgctggacctgcaggctgaaagtcctcctgtggacccagactcccaggccgatacagtgcacagcaaccccgagctagatgtgctgcttctgggctctgtggatggacggcacctgctgcggaccctgtcccgagcgaagttctggcctcgcaggaggttcaacttctttgtgctggagaataatctggaagctgtggcccgacacatgctgatcttcagcctagccctggaggaaccggagaagatggggctgcaagagcgaagcgagaccttcctggaagtgtgggggaacgcgctgctgcgcccgccagtggccgccttcgtgcgtgcccaggccgacctgctggcgcacctggtccccgagcccgaccgcctggaggaacagctgccctggctcagcctccgcgccctcaagttccgcgagcgggatgccctggaggccgtattccgcttctgggctggcggcgagaaagggccccaggcgttccccatgagccgcctctgggactcgcgcctgcgccactacctgggctcccgctacgacgcccggcgcggtgtcagcgactgggacctgcgcatgaagctgcatgaccgcggggctcaagtcattcacccccaggagttccgacgctggcgggacacaggcgtcgcctttgaactcagggactccagcgcctatcatgtgcccaaccggaccctggcgtccggtcgcctcctgagctaccgtggggagcgcgtggcagcgcgcgggtactggggggacatcgccacggggcccttcgtggccttcggcatcgaagcggacgacgagagcctcctgcggacgagcaacggccagccagtcaagacggccggggagatcactcaacacaacgtgacggagctgctccgcgacgtggccgcctgggggcgcgcgagagccaccgggggggacctggaggagcagcagcacgcggagggaagcccggagccagggactccagcagccccgaccccggaatctttcaccgtccacttcctgccgctcaattctgctcagactctccaccacaagagctgctacaacggccgattccagctcctctatgtggcctgtggtatggtccatcttctcatccctgagcttggggcctgtgtggcacccggagggaacttgattgtggaattagcccggtacctggtggacgtgcggcaggagcagctgcagggattcaacacccgggtcagggagctagctcaggcagctggatttgctccacagaccggggccaggccttcagagaccttcgcacgtttctgcaagtcccaggaatcagctctgggcaacactgtcccagctgtggaacccggaactccgccccttgacatcctggcccagcctcttgaagccagcaacccagcccttgagggcctgacccagcctctgcagggtgggaccccacactgtgagccctgccagctgccctctgagtctccaggttcactctcagaggttctggctcagcctcagggggccttggctccgcccaactgtgagtcagactccaaaactggagtctgacccaacccctagacaccccttatctccaacttccaaagtcaggttgtaggatgagaacccgctgataccattctaagtccgctgctagagtcctcaattttattctaatcattcccactcagtacccgccacccccaccccgggagtgttggtagactttcaaattccatttctgagattctatggtctattcctagaattctagattgttctctcagaattccaaattccacttctgaggctctaagcccagcctaggatctgacactgagtctcaggcccttgactttggcccccttgttcccaggcaccctgtggctgactaggggctggggtgtctcctcaccagggcctggtcagcacccagatggttcaagtaaagcaagttgtgtccaccctaaaaaaaaaaaaaaaaaaaaaaaaaaaaaaaaaaaaaaaaaa

SEQ ID NO: 11978 - DNA, 6704 bp, Homo sapiens
ggcaacatgccagccccgtagcactgcccaccccacccactgtggtctgttgtaccccactgctggggtggtggttccaatgagacagggcacaccaaactccatctggctgttactgaggcggagacacgggtgatgattggctttctggggagagaggaagtcctgtgattggccagatctctggagcttgccgacgcggtgtgaggacgctcccacggaggccggaattggctgtgaaaggactgaggcagccatctgggggtagcgggcactcttatcagagcggctggagccggaccatcgtcccagagagctggggcagggggccgtgcccaatctccagggctcctggggccactgctgacctggctggatgcatcgggcagtggaccctccaggggcccgcgctgcacgggaagcctttgcccttgggggcctgagctgtgctggggcctggagctcctgcccgcctcatccccctcctcgtagcgcatggctgcctggaggcagatgctcagccagcattgggcagcccccgcttcctgctcccctacccccttcacatggcagtagttctgggcaccccagcaaaccatattatgctccaggggcgcccactccaagacccctccatgggaagctggaatccctgcatggctgtgtgcaggcattgctccgggagccagcccagccagggctttgggaacagcttgggcaactgtacgagtcagagcacgatagtgaggaggccacacgctgctaccacagcgcccttcgatacggaggaagcttcgctgagctggggccccgcattggccgactgcagcaggcccagctctggaactttcatactggctcctgccagcaccgagccaaggtcctgcccccactggagcaagtgtggaacttgctacaccttgagcacaaacggaactatggagccaagcggggaggtcccccggtgaagcgagctgctgaacccccagtggtgcagcctgtgcctcctgcagcactctcaggcccctcaggggaggagggcctcagccctggaggcaagcgaaggagaggctgcaactctgaacagactggccttcccccagggctgccactgcctccaccaccattaccaccaccaccaccaccaccaccaccaccaccaccacccctgcctggcctggctaccagccccccatttcagctaaccaagccagggctgtggagtaccctgcatggagatgcctggggcccagagcgcaagggttcagcacccccagagcgccaggagcagcggcactcgctgcctcacccatatccatacccagctccagcgtacaccgcgcacccccctggccaccggctggtcccggctgctcccccaggcccaggcccccgccccccaggagcagagagccatggctgcctgcctgccacccgtccccccggaagtgaccttagagagagcagagttcagaggtcgcggatggactccagcgtttcaccagcagcaaccaccgcctgcgtgccttacgccccttcccggccccctggcctccccggcaccaccaccagcagcagcagtagcagcagcagcaacactggtctccggggcgtggagccgaacccaggcattcccggcgctgaccattaccaaactcccgcgctggaggtctctcaccatggccgcctggggccctcggcacacagcagtcggaaaccgttcttgggggctcccgctgccactccccacctatccctgccacctggaccttcctcaccccctccacccccctgtccccgcctcttacgccccccaccaccccctgcctggttgaagggtccggcctgccgggcagcccgagaggatggagagatcttagaagagctcttctttgggactgagggacccccccgccctgccccaccacccctcccccatcgcgagggcttcttggggcctccggcctcccgcttttctgtgggcactcaggattctcacacccctcccactcccccaaccccaaccaccagcagtagcaacagcaacagtggcagccacagcagcagccctgctgggcctgtgtcctttcccccaccaccctatctggccagaagtatagacccccttccccggcctcccagcccagcacagaacccccaggacccacctcttgtacccctgactcttgccctgcctccagcccctccttcctcctgccaccaaaatacctcaggaagcttcaggcgcccggagagcccccggcccagggtctccttcccaaagacccccgaggtggggccggggccacccccaggccccctgagtaaagccccccagcctgtgccgcccggggttggggagctgcctgcccgaggccctcgactctttgattttccccccactccgctggaggaccagtttgaggagccagccgaattcaagatcctacctgatgggctggccaacatcatgaagatgctggacgaatccattcgcaaggaagaggaacagcaacaacacgaagcaggcgtggccccccaacccccgctgaaggagccctttgcatctctgcagtctcctttccccaccgacacagcccccaccactactgctcctgctgtcgccgtcaccaccaccaccaccaccaccaccaccaccacggccacccaggaagaggagaagaagccaccaccagccctaccaccaccaccgcctctagccaagttccctccaccctctcagccacagccaccaccacccccaccccccagcccggccagcctgctcaaatccttggcctccgtgctggagggacaaaagtactgttatcgggggactggagcagctgtttccacccggcctgggcccttgcccaccactcagtattcccctggccccccatcaggtgctaccgccctgccgcccacctcagcggcccctagcgcccagggctccccacagccctctgcttcctcgtcatctcagttctctacctcaggcgggccctgggcccgggagcgcagggcgggcgaagagccagtcccgggccccatgacccccacccaaccgcccccacccctatctctgccccctgctcgctctgagtctgaggtgctagaagagatcagccgggcttgcgagacccttgtggagcgggtgggccggagtgccactgacccagccgacccagtggacacagcagagccagcggacagtgggactgagcgactgctgccccccgcacaggccaaggaggaggctggcggggtggcggcagtgtcaggcagctgtaagcggcgacagaaggagcatcagaaggagcatcggcggcacaggcgggcctgtaaggacagtgtgggtcgtcggccccgtgagggcagggcaaaggccaaggccaaggtccccaaagaaaagagccgccgggtgctggggaacctggacctgcagagcgaggagatccagggtcgtgagaagtcccggcccgatcttggcggggcctccaaggccaagccacccacagctccagcccctccatcagctcctgcaccttctgcccagcccacacccccgtcagcctctgtccctggaaagaaggctcgggaggaagccccagggccaccgggtgtcagccgggccgacatgctgaagctgcgctcacttagtgaggggccccccaaggagctgaagatccggctcatcaaggtagagagtggtgacaaggagacctttatcgcctctgaggtggaagagcggcggctgcgcatggcagacctcaccatcagccactgtgctgctgacgtcgtgcgcgccagcaggaatgccaaggtgaaagggaagtttcgagagtcctacctttcccctgcccagtctgtgaaaccgaagatcaacactgaggagaagctgccccgggaaaaactcaacccccctacacccagcatctatctggagagcaaacgggatgccttctcacctgtcctgctgcagttctgtacagaccctcgaaatcccatcacagtgatccggggcctggcgggctccctgcggctcaacttgggcctcttctccaccaagaccctggtggaagcgagtggcgaacacaccgtggaagttcgcacccaggtgcagcagccctcagatgagaactgggatctgacaggcactcggcagatctggccttgtgagagctcccgttcccacaccaccattgccaagtacgcacagtaccaggcctcatccttccaggagtctctgcaggaggagaaggagagtgaggatgaggagtcagaggagccagacagcaccactggaacccctcctagcagcgcaccagacccgaagaaccatcacatcatcaagtttggcaccaacatcgacttgtctgatgctaagcggtggaagccccagctgcaggagctgctgaagctgcccgccttcatgcgggtaacatccacgggcaacatgctgagccacgtgggccacaccatcctgggcatgaacacggtgcagctgtacatgaaggtgcccggcagccgaacgccaggccaccaggagaataacaacttctgctccgtcaacatcaacattggcccaggcgactgcgagtggttcgcggtgcacgagcactactgggagaccatcagcgctttctgtgatcggcacggcgtggactacttgacgggttcctggtggccaatcctggatgatctctatgcatccaatattcctgtgtaccgcttcgtgcagcgacccggagacctcgtgtggattaatgcggggactgtgcactgggtgcaggccaccggctggtgcaacaacattgcctggaacgtggggcccctcaccgcctatcagtaccagctggccctggaacgatacgagtggaatgaggtgaagaacgtcaaatccatcgtgcccatgattcacgtgtcatggaacgtggctcgcacggtcaaaatcagcgaccccgacttgttcaagatgatcaagttctgcctgctgcagtccatgaagcactgccaggtgcaacgcgagagcctggtgcgggcagggaagaaaatcgcttaccagggccgtgtcaaggacgagccagcctactactgcaacgagtgcgatgtggaggtgtttaacatcctgttcgtgacaagtgagaatggcagccgcaacacgtacctggtacactgcgagggctgtgcccggcgccgcagcgcaggcctgcagggcgtggtggtgctggagcagtaccgcactgaggagctggctcaggcctacgacgccttcacgctggtgagggcccggcgggcgcgcgggcagcggaggagggcactggggcaggctgcagggacgggcttcgggagcccggccgcgcctttccctgagcccccgccggctttctccccccaggccccagccagcacgtcgcgatgaggccggacgccccgcccgcctgcctgcccgcgcaaggcgccgcggggccaccagcacatgcctgggctggacctaggtcccgcctgtggccgagaagggggtcgggcccagcccttccaccccattggcagctcccctcacttaatttattaagaaaaactttttttttttttttagcaaatatgaggaaaaaaggaaaaaaaatgggagacgggggagggggctggcagcccctcgcccaccagcgcctcccctcaccgactttggcctttttagcaacagacacaaggaccaggctccggcggcggcgggggtcacatacgggttccctcaccctgccagccgcccgcccgcccggcgcagatgcacgcggctcgtgtatgtacatagacgttacggcagccgaggtttttaatgagattctttctatgggctttacccctcccccggaacctccttttttacttccaatgctagctgtgacccctgtacatgtctctttattcacttggttatgatttgtattttttgttcttttcttgtttttttgtttttaatttataacagtcccactcacctctatttattcatttttgggaaaacccgacctcccacacccccaagccatcctgcccgcccctccagggaccgcccgtcgccgggctctccccgcgccccagtgtgtgtccgggcccggcccgaccgtctccacccgtccgcccgcggctccagccgggttctcatggtgctcaaacccgctcccctcccctacgtcctgcactttctcggaccagtccccccactcccgacccgaccccagccccacctgagggtgagcaactcctgtactgtaggggaagaagtgggaactgaaatggtattttgtaaaaaaaataaataaaataaaaaaattaaaggttttaaagaaagaactatgaggaaaaggaaccccgtccttcccagccccggccaactttaaaaaacacagaccttcacccccacccccttttctttttaagtgtgaaacaacccagggccagggcctcactggggcagggacaccccggggtgagtttctctggggctttattttcgttttgttggttgttttttctccacgctggggctgcggaggggtggggggtttacagtcccgcaccctcgcactgcactgtctctctgccccaggggcagaggggtcttcccaaccctacccctattttcggtgatttttgtgtgagaatattaatattaaaaataaacggagaaaaaaaatcct

SEQ ID NO: 11979 - DNA, 4513 bp, Homo sapiens
gcgcggtgccgccgggaaagatggtcgtggcgctgcggtacgtgtggcctctcctcctctgcagcccctgcctgcttatccagatccccgaggaatatgaaggacaccatgtgatggagccacctgtcatcacggaacagtctccacggcgcctggttgtcttccccacagatgacatcagcctcaagtgtgaggccagtggcaagcccgaagtgcagttccgctggacgagggatggtgtccacttcaaacccaaggaagagctgggtgtgaccgtgtaccagtcgccccactctggctccttcaccatcacgggcaacaacagcaactttgctcagaggttccagggcatctaccgctgctttgccagcaataagctgggcaccgccatgtcccatgagatccggctcatggccgagggtgcccccaagtggccaaaggagacagtgaagcccgtggaggtggaggaaggggagtcagtggttctgccttgcaaccctcccccaagtgcagagcctctccggatctactggatgaacagcaagatcttgcacatcaagcaggacgagcgggtgacgatgggccagaacggcaacctctactttgccaatgtgctcacctccgacaaccactcagactacatctgccacgcccacttcccaggcaccaggaccatcattcagaaggaacccattgacctccgggtcaaggccaccaacagcatgattgacaggaagccgcgcctgctcttccccaccaactccagcagccacctggtggccttgcaggggcagccattggtcctggagtgcatcgccgagggctttcccacgcccaccatcaaatggctgcgccccagtggccccatgccagccgaccgtgtcacctaccagaaccacaacaagaccctgcagctgctgaaagtgggcgaggaggatgatggcgagtaccgctgcctggccgagaactcactgggcagtgcccggcatgcgtactatgtcaccgtggaggctgccccgtactggctgcacaagccccagagccatctatatgggccaggagagactgcccgcctggactgccaagtccagggcaggccccaaccagaggtcacctggagaatcaacgggatccctgtggaggagctggccaaagaccagaagtaccggattcagcgtggcgccctgatcctgagcaacgtgcagcccagtgacacaatggtgacccaatgtgaggcccgcaaccggcacgggctcttgctggccaatgcctacatctacgttgtccagctgccagccaagatcctgactgcggacaatcagacgtacatggctgtccagggcagcactgcctaccttctgtgcaaggccttcggagcgcctgtgcccagtgttcagtggctggacgaggatgggacaacagtgcttcaggacgaacgcttcttcccctatgccaatgggaccctgggcattcgagacctccaggccaatgacaccggacgctacttctgcctggctgccaatgaccaaaacaatgttaccatcatggctaacctgaaggttaaagatgcaactcagatcactcaggggccccgcagcacaatcgagaagaaaggttccagggtgaccttcacgtgccaggcctcctttgacccctccttgcagcccagcatcacctggcgtggggacggtcgagacctccaggagcttggggacagtgacaagtacttcatagaggatgggcgcctggtcatccacagcctggactacagcgaccagggcaactacagctgcgtggccagtaccgaactggatgtggtggagagtagggcacagctcttggtggtggggagccctgggccggtgccacggctggtgctgtccgacctgcacctgctgacgcagagccaggtgcgcgtgtcctggagtcctgcagaagaccacaatgcccccattgagaaatatgacattgaatttgaggacaaggaaatggcgcctgaaaaatggtacagtctgggcaaggttccagggaaccagacctctaccaccctcaagctgtcgccctatgtccactacacctttagggttactgccataaacaaatatggccccggggagcccagcccggtctctgagactgtggtcacacctgaggcagccccagagaagaaccctgtggatgtgaagggggaaggaaatgagaccaccaatatggtcatcacgtggaagccgctccggtggatggactggaacgccccccaggttcagtaccgcgtgcagtggcgccctcaggggacacgagggccctggcaggagcagattgtcagcgaccccttcctggtggtgtccaacacgtccaccttcgtgccctatgagatcaaagtccaggccgtcaacagccagggcaagggaccagagccccaggtcactatcggctactctggagaggactacccccaggcaatccctgagctggaaggcattgaaatcctcaactcaagtgccgtgctggtcaagtggcggccggtggacctggcccaggtcaagggccacctccgcggatacaatgtgacgtactggagggagggcagtcagaggaagcacagcaagagacatatccacaaagaccatgtggtggtgcccgccaacaccaccagtgtcatcctcagtggcttgcggccctatagctcctaccacctggaggtgcaggcctttaacgggcgaggatcggggcccgccagcgagttcaccttcagcaccccagagggagtgcctggccaccccgaggcgttgcacctggagtgccagtcgaacaccagcctgctgctgcgctggcagcccccactcagccacaacggcgtgctcaccggctacgtgctctcctaccaccccctggatgaggggggcaaggggcaactgtccttcaaccttcgggaccccgaacttcggacacacaacctgaccgatctcagcccccacctgcggtaccgcttccagcttcaggccaccaccaaagagggccctggtgaagccatcgtacgggaaggaggcactatggccttgtctgggatctcagattttggcaacatctcagccacagcgggtgaaaactacagtgtcgtctcctgggtccccaaggagggccagtgcaacttcaggttccatatcttgttcaaagccttgggagaagagaagggtggggcttccctttcgccacagtatgtcagctacaaccagagctcctacacgcagtgggacctgcagcctgacactgactacgagatccacttgtttaaggagaggatgttccggcaccaaatggctgtgaagaccaatggcacaggccgcgtgaggctccctcctgctggcttcgccactgagggctggttcatcggctttgtgagtgccatcatcctcctgctcctcgtcctgctcatcctctgcttcatcaagcgcagcaagggcggcaaatactcagtgaaggataaggaggacacccaggtggactctgaggcccgaccgatgaaagatgagaccttcggcgagtacagtgacaacgaggagaaggcctttggcagcagccagccatcgctcaacggggacatcaagcccctgggcagtgacgacagcctggccgattatgggggcagcgtggatgttcagttcaacgaggatggttcgttcattggccagtacagtggcaagaaggagaaggaggcggcagggggcaatgacagctcaggggccacttcccccatcaaccctgccgtggccctagaatagtggagtccaggacaggagatgctgtgcccctggccttgggatccaggcccctccctctccagcaggcccatgggaggctggagttggggcagaggagaacttgctgcctcggatccccttcctaccacccggtccccactttattgccaaaacccagctgcaccccttcctgggcacacgctgctctgccccagcttgggcagatctcccacatgccaggggcctttgggtgctgttttgccagcccatttgggcagagaggctgtggtttgggggagaagaagtaggggtggcccgaaagggtctccgaaatgctgtctttcttgctccctgactgggggcagacatggtggggtctcctcaggaccagggttggcaccttccccctcccccagccactccccagccagcctggctgggactgggaacagaactcggtgtccccaccatctgctgtcttttctttgccatctctgctccaaccgggatgggagccgggcaaactggccgcgggggcaggggaggccatctggagagcccagagtccccccactcccagcatcgcactctggcagcaccgcctcttcccgccgcccagcccaccccatggccggctttcaggagctccatacacacgctgccttcggtacccaccacacaacatccaagtggcctccgtcactacctggctgcggggcgggcacacctcctcccactgcccactggccggc

SEQ ID NO: 11980 - DNA, 4525 bp, Homo sapiens
gcgcggtgccgccgggaaagatggtcgtggcgctgcggtacgtgtggcctctcctcctctgcagcccctgcctgcttatccagatccccgaggaatatgaaggacaccatgtgatggagccacctgtcatcacggaacagtctccacggcgcctggttgtcttccccacagatgacatcagcctcaagtgtgaggccagtggcaagcccgaagtgcagttccgctggacgagggatggtgtccacttcaaacccaaggaagagctgggtgtgaccgtgtaccagtcgccccactctggctccttcaccatcacgggcaacaacagcaactttgctcagaggttccagggcatctaccgctgctttgccagcaataagctgggcaccgccatgtcccatgagatccggctcatggccgagggtgcccccaagtggccaaaggagacagtgaagcccgtggaggtggaggaaggggagtcagtggttctgccttgcaaccctcccccaagtgcagagcctctccggatctactggatgaacagcaagatcttgcacatcaagcaggacgagcgggtgacgatgggccagaacggcaacctctactttgccaatgtgctcacctccgacaaccactcagactacatctgccacgcccacttcccaggcaccaggaccatcattcagaaggaacccattgacctccgggtcaaggccaccaacagcatgattgacaggaagccgcgcctgctcttccccaccaactccagcagccacctggtggccttgcaggggcagccattggtcctggagtgcatcgccgagggctttcccacgcccaccatcaaatggctgcgccccagtggccccatgccagccgaccgtgtcacctaccagaaccacaacaagaccctgcagctgctgaaagtgggcgaggaggatgatggcgagtaccgctgcctggccgagaactcactgggcagtgcccggcatgcgtactatgtcaccgtggaggctgccccgtactggctgcacaagccccagagccatctatatgggccaggagagactgcccgcctggactgccaagtccagggcaggccccaaccagaggtcacctggagaatcaacgggatccctgtggaggagctggccaaagaccagaagtaccggattcagcgtggcgccctgatcctgagcaacgtgcagcccagtgacacaatggtgacccaatgtgaggcccgcaaccggcacgggctcttgctggccaatgcctacatctacgttgtccagctgccagccaagatcctgactgcggacaatcagacgtacatggctgtccagggcagcactgcctaccttctgtgcaaggccttcggagcgcctgtgcccagtgttcagtggctggacgaggatgggacaacagtgcttcaggacgaacgcttcttcccctatgccaatgggaccctgggcattcgagacctccaggccaatgacaccggacgctacttctgcctggctgccaatgaccaaaacaatgttaccatcatggctaacctgaaggttaaagatgcaactcagatcactcaggggccccgcagcacaatcgagaagaaaggttccagggtgaccttcacgtgccaggcctcctttgacccctccttgcagcccagcatcacctggcgtggggacggtcgagacctccaggagcttggggacagtgacaagtacttcatagaggatgggcgcctggtcatccacagcctggactacagcgaccagggcaactacagctgcgtggccagtaccgaactggatgtggtggagagtagggcacagctcttggtggtggggagccctgggccggtgccacggctggtgctgtccgacctgcacctgctgacgcagagccaggtgcgcgtgtcctggagtcctgcagaagaccacaatgcccccattgagaaatatgacattgaatttgaggacaaggaaatggcgcctgaaaaatggtacagtctgggcaaggttccagggaaccagacctctaccaccctcaagctgtcgccctatgtccactacacctttagggttactgccataaacaaatatggccccggggagcccagcccggtctctgagactgtggtcacacctgaggcagccccagagaagaaccctgtggatgtgaagggggaaggaaatgagaccaccaatatggtcatcacgtggaagccgctccggtggatggactggaacgccccccaggttcagtaccgcgtgcagtggcgccctcaggggacacgagggccctggcaggagcagattgtcagcgaccccttcctggtggtgtccaacacgtccaccttcgtgccctatgagatcaaagtccaggccgtcaacagccagggcaagggaccagagccccaggtcactatcggctactctggagaggactacccccaggcaatccctgagctggaaggcattgaaatcctcaactcaagtgccgtgctggtcaagtggcggccggtggacctggcccaggtcaagggccacctccgcggatacaatgtgacgtactggagggagggcagtcagaggaagcacagcaagagacatatccacaaagaccatgtggtggtgcccgccaacaccaccagtgtcatcctcagtggcttgcggccctatagctcctaccacctggaggtgcaggcctttaacgggcgaggatcggggcccgccagcgagttcaccttcagcaccccagagggagtgcctggccaccccgaggcgttgcacctggagtgccagtcgaacaccagcctgctgctgcgctggcagcccccactcagccacaacggcgtgctcaccggctacgtgctctcctaccaccccctggatgaggggggcaaggggcaactgtccttcaaccttcgggaccccgaacttcggacacacaacctgaccgatctcagcccccacctgcggtaccgcttccagcttcaggccaccaccaaagagggccctggtgaagccatcgtacgggaaggaggcactatggccttgtctgggatctcagattttggcaacatctcagccacagcgggtgaaaactacagtgtcgtctcctgggtccccaaggagggccagtgcaacttcaggttccatatcttgttcaaagccttgggagaagagaagggtggggcttccctttcgccacagtatgtcagctacaaccagagctcctacacgcagtgggacctgcagcctgacactgactacgagatccacttgtttaaggagaggatgttccggcaccaaatggctgtgaagaccaatggcacaggccgcgtgaggctccctcctgctggcttcgccactgagggctggttcatcggctttgtgagtgccatcatcctcctgctcctcgtcctgctcatcctctgcttcatcaagcgcagcaagggcggcaaatactcagtgaaggataaggaggacacccaggtggactctgaggcccgaccgatgaaagatgagaccttcggcgagtacaggtccctggagagtgacaacgaggagaaggcctttggcagcagccagccatcgctcaacggggacatcaagcccctgggcagtgacgacagcctggccgattatgggggcagcgtggatgttcagttcaacgaggatggttcgttcattggccagtacagtggcaagaaggagaaggaggcggcagggggcaatgacagctcaggggccacttcccccatcaaccctgccgtggccctagaatagtggagtccaggacaggagatgctgtgcccctggccttgggatccaggcccctccctctccagcaggcccatgggaggctggagttggggcagaggagaacttgctgcctcggatccccttcctaccacccggtccccactttattgccaaaacccagctgcaccccttcctgggcacacgctgctctgccccagcttgggcagatctcccacatgccaggggcctttgggtgctgttttgccagcccatttgggcagagaggctgtggtttgggggagaagaagtaggggtggcccgaaagggtctccgaaatgctgtctttcttgctccctgactgggggcagacatggtggggtctcctcaggaccagggttggcaccttccccctcccccagccactccccagccagcctggctgggactgggaacagaactcggtgtccccaccatctgctgtcttttctttgccatctctgctccaaccgggatgggagccgggcaaactggccgcgggggcaggggaggccatctggagagcccagagtccccccactcccagcatcgcactctggcagcaccgcctcttcccgccgcccagcccaccccatggccggctttcaggagctccatacacacgctgccttcggtacccaccacacaacatccaagtggcctccgtcactacctggctgcggggcgggcacacctcctcccactgcccactggccggc

SEQ ID NO: 11981 - DNA, 1970 bp, Homo sapiens
cgggagtcttcggggagctatgctgagaccgggtggtgcggaggaagctgcgcagctcccgcttcggcgcgccagcgccccggtccctgtgccgtcgcccgcggcccccgacggctcccgggcttcggcccgcctaggtcttgcctgccttctgctcctgctgctgctgacgctgccggcccgcgtagacacgtcctggtggtacattggggcactgggggcacgagtgatctgtgacaatatccctggtttggtgagccggcagcggcagctgtgccagcgttacccagacatcatgcgttcagtgggcgagggtgcccgagaatggatccgagagtgtcagcaccaattccgccaccaccgctggaactgtaccaccctggaccgggaccacaccgtctttggccgtgtcatgctcagaagtagccgagaggcagcttttgtatatgccatctcatcagcaggggtagtccacgctattactcgcgcctgtagccagggtgaactgagtgtgtgcagctgtgacccctacacccgtggccgacaccatgaccagcgtggggactttgactggggtggctgcagtgacaacatccactacggtgtccgttttgccaaggccttcgtggatgccaaggagaagaggcttaaggatgcccgggccctcatgaacttacataataaccgctgtggtcgcacggctgtgcggcggtttctgaagctggagtgtaagtgccatggcgtgagtggttcctgtactctgcgcacctgctggcgtgcactctcagatttccgccgcacaggtgattacctgcggcgacgctatgatggggctgtgcaggtgatggccacccaagatggtgccaacttcaccgcagcccgccaaggctatcgccgtgccacccggactgatcttgtctactttgacaactctccagattactgtgtcttggacaaggctgcaggttccctaggcactgcaggccgtgtctgcagcaagacatcaaaaggaacagacggttgtgaaatcatgtgctgtggccgagggtacgacacaactcgagtcacccgtgttacccagtgtgagtgcaaattccactggtgctgtgctgtacggtgcaaggaatgcagaaatactgtggacgtccatacttgcaaagcccccaagaaggcagagtggctggaccagacctgaacacacagatacctcactcatccctccaattcaagcctctcaactcaaaagcacaagatccttgcatgcacaccttcctccaccctccaccctgggctgctaccgcttctatttaaggatgtagagagtaatccatagggaccatggtgtcctggctggttccttagccctgggaaggagttgtcaggggatataagaaactgtgcaagctccctgatttcccgctctggagatttgaagggagagtagaagagatagggggtctttagagtgaaatgagttgcactaaagtacgtagttgaggctccttttttctttcctttgcaccagcttcccgacacttcttggtgtgcaagaggaagggtacctgtagagagcttctttttgtttctacctggccaaagttagatgggacaaagatgaatggcatgtcccttctctgaagtccgtttgagcagaactacctggtaccccgaaagaaaaatcttaggctaccacattctattattgagagcctgagatgttagccatagtggacaaggttccattcacatgctcatatgtttataaactgtgttttgtagaagaaaaagaatcataacaatacaaacacacattcattctctctttttctctctaccattctcaacctgtattggacagcactgcctcttttgcttacttgctgcctgttcaaactgaggtggaatgcagtggttcccatgcttaacagatcattaaaacaccctagaacactcctaggatagattaatgt

SEQ ID NO: 11982 - DNA, 2014 bp, Homo sapiens
aaaccctgaagagcccaagcaatgtggttgtaaaatttgcaaaataagattaaatcttaactgcaatctgttaacactgctgtctcctttcactctttctcctatatcacactttcccacatgttggatggccttggagtggtagccataagcatttttggaattcaactaaaaactgaaggatccttgaggacggcagtacctggcatacctacacagtcagcgttcaacaagtgtttgcaaaggtacattggggcactgggggcacgagtgatctgtgacaatatccctggtttggtgagccggcagcggcagctgtgccagcgttacccagacatcatgcgttcagtgggcgagggtgcccgagaatggatccgagagtgtcagcaccaattccgccaccaccgctggaactgtaccaccctggaccgggaccacaccgtctttggccgtgtcatgctcagaagtagccgagaggcagcttttgtatatgccatctcatcagcaggggtagtccacgctattactcgcgcctgtagccagggtgaactgagtgtgtgcagctgtgacccctacacccgtggccgacaccatgaccagcgtggggactttgactggggtggctgcagtgacaacatccactacggtgtccgttttgccaaggccttcgtggatgccaaggagaagaggcttaaggatgcccgggccctcatgaacttacataataaccgctgtggtcgcacggctgtgcggcggtttctgaagctggagtgtaagtgccatggcgtgagtggttcctgtactctgcgcacctgctggcgtgcactctcagatttccgccgcacaggtgattacctgcggcgacgctatgatggggctgtgcaggtgatggccacccaagatggtgccaacttcaccgcagcccgccaaggctatcgccgtgccacccggactgatcttgtctactttgacaactctccagattactgtgtcttggacaaggctgcaggttccctaggcactgcaggccgtgtctgcagcaagacatcaaaaggaacagacggttgtgaaatcatgtgctgtggccgagggtacgacacaactcgagtcacccgtgttacccagtgtgagtgcaaattccactggtgctgtgctgtacggtgcaaggaatgcagaaatactgtggacgtccatacttgcaaagcccccaagaaggcagagtggctggaccagacctgaacacacagatacctcactcatccctccaattcaagcctctcaactcaaaagcacaagatccttgcatgcacaccttcctccaccctccaccctgggctgctaccgcttctatttaaggatgtagagagtaatccatagggaccatggtgtcctggctggttccttagccctgggaaggagttgtcaggggatataagaaactgtgcaagctccctgatttcccgctctggagatttgaagggagagtagaagagatagggggtctttagagtgaaatgagttgcactaaagtacgtagttgaggctccttttttctttcctttgcaccagcttcccgacacttcttggtgtgcaagaggaagggtacctgtagagagcttctttttgtttctacctggccaaagttagatgggacaaagatgaatggcatgtcccttctctgaagtccgtttgagcagaactacctggtaccccgaaagaaaaatcttaggctaccacattctattattgagagcctgagatgttagccatagtggacaaggttccattcacatgctcatatgtttataaactgtgttttgtagaagaaaaagaatcataacaatacaaacacacattcattctctctttttctctctaccattctcaacctgtattggacagcactgcctcttttgcttacttgctgcctgttcaaactgaggtggaatgcagtggttcccatgcttaacagatcattaaaacaccctagaacactcctaggatagattaatgt

SEQ ID NO: 11983 - DNA, 18209 bp, Homo sapiens
gaagccgcatccagacaaaagctgccgcatccctgccctgcccaacccctggagggattcgagtttggtgcttgtccccgtctgattctcagcgccaaactttttgctagttcagagattccaagagtctgatgagttactctgagaggaaaccctctgcctgttgttgaggaggactgagcacagtgcttaggcgctgagggggaaaaagagggggaaaaaaaagaaaatgatttcctgggaagttgtccatacagtattcctgtttgctcttctttattcttccctagctcaagatgcgagcccccagtcagagatcagagctgaggaaattcccgagggggcctccacgttggcttttgtgtttgatgtgactggttctatgtatgatgatttagttcaggtgattgaaggggcttccaaaattttggagacgtctttgaaaagacctaaaagacctcttttcaactttgcgttggtgcctttccatgatccagaaattggcccagtgacaattaccacagatcccaagaaatttcaatatgaactcagagaactgtatgttcagggtggtggtgattgcccagaaatgagtattggagctataaaaattgccttggaaatttctcttcctggttctttcatctatgttttcactgatgctcggtccaaagattaccggctcacccatgaggtgctgcaacttatccaacagaaacagtcacaagtcgtatttgttctgactggagattgtgatgacaggacccatattggatataaagtctatgaagaaattgcctctacaagttctggtcaagtgttccatctggacaaaaaacaagttaatgaggtattaaaatgggtagaagaagcagtacaggcctccaaagttcaccttttatccacagatcatttggaacaggctgtaaatacttggagaattccttttgatcccagcctgaaagaggtcactgtgtctttgagtgggccttctccaatgattgaaattcgcaatcctttagggaagctgataaaaaagggatttggcctgcatgagctattaaatatccataactctgccaaagtagtgaatgtgaaagagccagaggctggaatgtggacagtgaagacctcaagcagtggaaggcactctgttcgcattactggcctcagtactattgatttccgagctggcttttctcgaaagcccaccctggacttcaaaaaaacagtcagcagaccagtgcaaggaatacctacctatgtactgctcaatacttctggaatttccactccagctagaatagatcttcttgaacttttgagtatctcaggaagttctcttaagactattcctgttaaatattacccacatcgaaaaccttatggcatatggaatatttctgactttgtaccaccaaatgaagctttctttctcaaagtaacaggctatgataaagatgattacctcttccagagagtatcaagtgtttccttttctagtattgtcccagatgctcccaaagttacgatgcctgagaaaaccccaggatactatctgcagccgggccaaattccctgctctgttgacagtcttttgccctttaccttgagctttgtcagaaatggagttacacttggagtagaccagtatttgaaagaatctgccagtgtgaacttagatattgcaaaggtcactttgtctgacgaaggtttctatgaatgcattgctgtcagcagtgcaggtactggacgggcacagacattttttgacgtatcagagccccctccggtcatccaagtgcctaacaatgttacagtcactcctggagagagagcagttttaacatgtctcatcatcagtgcggtggattacaatctaacctggcagaggaatgacagagatgtcagactggcagagccagcgagaattaggaccttggctaatctgtcattggagctaaagagtgtgaaattcaacgatgctggagagtatcattgtatggtttctagtgaaggtggatcatcagccgcttcagttttcctcacagtgcaagaaccacccaaagtcactgtgatgcccaagaatcagtctttcacaggagggtctgaggtctccatcatgtgttctgcaacaggttatcccaaaccaaagattgcctggaccgttaacgatatgtttatcgtgggttcacacaggtataggatgacctcagatggtaccttatttatcaaaaatgcagctcccaaagatgcagggatctatggttgcctagcaagtaattcagctggaacagataaacagaattctactctcagatacattgaagcccctaagttgatggtagttcagagtgagctcttggttgcccttggggatataaccgttatggaatgcaaaacctctggtattcctccacctcaagttaaatggttcaaaggagatcttgagttgaggccctcaacattcctcattattgaccctctcttgggacttttgaagattcaagaaacacaagatctggatgctggcgattatacctgtgtagccatcaatgaggctggaagagcaactggcaagataactctggatgttggctcacctccagttttcatacaagaacctgctgatgtgtctatggaaattggctcaaatgtgacattaccttgttatgttcagggttatccagaaccaacaatcaaatggcgaagattagacaacatgccaattttctcaagacctttttcagttagttccatcagccaactaagaacaggagctctctttattttaaacttatgggcaagtgataaaggaacctatatttgtgaagctgaaaaccagtttggaaagatccagtcagagacaacagtaacagtgaccggacttgttgctccacttattggaatcagcccttcagtggccaatgttattgaaggacagcagcttactttgccctgtactctgttagctggaaatcccattccagaacgtcggtggattaagaattcagctatgttgctccaaaatccttacatcactgtgcgcagtgatgggagcctccatattgaaagagttcagcttcaggatggtggtgaatatacttgtgtggccagtaacgttgctgggaccaataacaaaactacctctgtggttgtgcatgttctgccaaccattcagcatgggcagcagatactcagtacaattgaaggcattccagtaactttaccatgcaaagcaagtggaaatcccaaaccgtctgtcatctggtccaagaaaggagagctgatttcaaccagcagtgctaagttttcagcaggagctgatggtagtctgtatgtggtatcacctggaggagaggagagtggggagtatgtctgcactgccaccaatacagccggctacgccaaaaggaaagtgcagctaacagtctatgtaaggcccagagtgtttggagatcaacgaggactgtcccaggataagcctgttgagatctccgtccttgcaggggaagaggtaacacttccatgtgaagtgaagagcttacctccacccataattacttgggccaaagaaacccagctcatctcaccgttctctccaagacacacattcctcccttctggttcaatgaagatcactgaaacccgcacttcagatagtgggatgtatctttgtgttgccacaaatattgctgggaatgtgactcaggctgtcaaattaaatgtccatgttcctccaaagatacagcgtggacctaaacatctcaaagtccaagttggtcaaagagtggatattccatgtaatgctcaagggactcctcttcctgtaatcacctggtccaaaggtggaagcactatgctggttgatggagagcaccatgttagcaatccagacggaactttaagcatcgaccaagccacgccctcagatgctggcatatatacatgtgttgctactaacatagcaggcactgatgaaacagagataacgctacatgtccaagaaccacccacagtggaagatctagaacctccatataacactactttccaagaaagagtggccaatcaacgcattgaatttccatgtcctgcaaaaggtacccctaaaccaaccatcaaatggttacacaatggtagagagttgacaggcagagagcctggcatttctatcttggaagatggcacattgctggttattgcttctgttacaccctatgacaatggggagtacatctgtgtggcagtcaatgaagctggaaccacagaaagaaaatataacctcaaagtccatgttcctccagtaattaaagataaagaacaagttacaaatgtgtcggtgttgttaaatcagctgaccaatctcttctgtgaagtggaaggcactccatctcccatcattatgtggtataaagataatgtccaggtgactgaaagcagcactattcagactgtgaacaatgggaagatactgaagctcttcagagccactccagaggatgcaggaagatattcctgcaaagcaattaatattgcaggcacttctcagaagtactttaacattgatgtgctagttccacccaccataataggtaccaacttcccaaatgaagtctcagttgtcctcaaccgtgacgtcgcccttgaatgccaggtcaaaggcactccctttcctgatattcattggttcaaagatggcaagcctttatttttgggcgatcctaatgttgaacttctagacagaggacaagtcttacatttaaagaatgcacggagaaatgacaaggggcgctaccaatgtactgtgtctaatgcagctggcaaacaagccaaggatataaaactgactatctatattccacctagtattaaaggaggaaatgtcaccacagacatatcagtattgatcaacagccttattaaactggaatgtgaaacacggggacttccaatgcctgccattacttggtataaggacgggcagccaatcatgtccagctcacaagcactttatattgataaaggacaatatcttcatattcctcgagcacaggtctctgattcagcaacatatacgtgtcacgtagccaatgttgctggaactgctgaaaaatcattccatgtggatgtctatgttcctccaatgattgaaggcaacttggccacgcctttgaataagcaagtagttattgctcattctctgacactggagtgcaaagctgctggaaacccttctcccattctcacctggttgaaagatggtgtacctgtgaaagctaatgacaatatccgcatagaagctggtgggaagaaactcgaaatcatgagtgcccaagaaattgatcgaggacagtacatatgcgtggctaccagtgtggcaggagaaaaggaaatcaaatatgaagttgatgtcttggtgccaccagctatagaaggaggagatgaaacatcttacttcattgtgatggttaataacttactggagctagattgtcatgtgacaggctctcccccaccaactatcatgtggctgaaggatggccagttaattgatgaaagggatggattcaagattttattaaatggacgcaaactggttattgctcaggctcaagtgtcaaacacaggcctttatcggtgcatggcagcaaatactgctggagaccacaagaaggaatttgaagtgactgttcatgttcctccaacaatcaagtcctcaggcctttctgagagagttgtggtaaaatacaagcctgtcgccttgcagtgcatagccaatgggattccaaatccttccattacatggttaaaagatgaccagcctgtgaacactgcccaaggaaaccttaaaatacagtcttctggtcgagttctacaaattgccaaaaccctgttggaagatgctggcagatacacatgtgtggctaccaacgcagctggagaaacacaacagcacattcaactgcatgttcatgaaccacctagtctggaagatgctggaaaaatgctgaatgagactgtgttggtgagcaaccctgtacagctggagtgtaaggcagctggaaatcctgtgcctgttattacatggtacaaagataatcgtctactctcaggttccaccagcatgactttcttgaacagaggacagatcattgatattgaaagtgcccagatctcagatgctggcatatataaatgcgtggccatcaactcagctggagctacagagttattttacagtctgcaagttcatgtggccccatcaatttctggcagcaataacatggtggcagtggtggttaataacccggtgaggttagaatgtgaagccagaggtattcctgccccaagtctgacctggttgaaagatgggagtcctgtttctagtttttctaatggattacaggttctctctggtggtcgaatcctagcattgaccagtgcacaaatcagcgacacaggaaggtacacctgcgtggcagtgaatgctgctggagaaaagcaaagggacattgacctccgagtatatgttccgccaaatattatgggagaagaacagaatgtctctgtcctcattagccaagctgtggaattactatgtcaaagtgatgctattcccccacctactcttacttggttaaaagacggccaccccttgctgaagaaaccaggcctcagtatatctgaaaatagaagtgtgttaaagattgaagatgctcaggttcaagacactggtcgttacacttgtgaagcaacaaatgttgctggaaaaactgaaaaaaaaaactacaatgtcaacatttgggtccccccaaatattggtggttctgatgaacttactcaacttacagtcattgaagggaatctcattagtctgttgtgtgaatcaagtggtattccacccccaaatctcatctggaagaagaaaggctctccagtgctgactgattccatggggcgagttagaattttatctgggggcaggcaattacaaatttcaattgctgaaaagtctgatgcagcactctattcatgtgtggcgtcgaatgttgctgggactgcaaagaaagaatacaatctgcaagtttacattagaccaaccataaccaacagtggcagccaccctactgaaattattgtgacccgagggaagagtatctccttggagtgtgaggtgcagggtattccaccaccaacagtgacctggatgaaagatggccaccccttgatcaaggcaaagggagtagaaatactggatgaaggtcacatccttcagctgaagaacattcatgtatctgacacaggccgttatgtgtgtgttgctgtgaatgtagcaggaatgactgacaaaaaatatgacttaagtgtccatgctcctccaagcatcataggaaaccacaggtcacctgaaaatattagtgtggtagaaaagaactcagtatctttgacttgtgaagcttctggaattcccctgccttccataacctggttcaaagatgggtggcctgtcagccttagcaattctgtgaggattctttcaggaggcaggatgctacggctgatgcagaccacaatggaagatgctggccaatatacttgcgttgtaaggaatgcagctggtgaagaaagaaaaatctttgggctttcagtattagtaccacctcatattgtgggtgaaaatacattggaagatgtgaaggtaaaagagaaacagagtgttacgctgacttgtgaagtgacagggaatccagtgccagaaattacatggcacaaagatgggcagcccctccaagaagatgaagcccatcacattatatctggtggccgttttcttcaaattaccaatgtccaggtgccacacactggaagatatacatgtttggcttccagtccagctggccacaagagcaggagcttcagtcttaatgtatttgtatctcctacaattgctggtgtaggtagtgatggcaaccctgaagatgtcactgtcatccttaacagccctacatctttggtctgtgaagcttattcatatcctccagctaccatcacctggtttaaggatggcactcctttagaatctaaccgaaatattcgtattcttccaggaggcagaactctgcagatcctcaatgcacaggaggacaatgctggaagatactcttgtgtagccacgaatgaggctggagaaatgataaagcactatgaagtgaaggtgtacattccacccataatcaataaaggggacctttgggggccaggtctttcccctaaagaagtgaagatcaaagtaaacaacactctgaccttggaatgtgaagcgtatgcaattccttctgcctccctcagctggtacaaggatggacagccccttaaatccgatgatcatgttaatattgctgcgaatggacacacacttcaaataaaggaggctcaaatatcagacaccggacgatatacttgtgtagcatctaacattgcaggtgaagatgagttggattttgatgtgaatattcaagttcctccaagttttcagaaactctgggaaataggaaacatgctagatactggcaggaatggtgaagccaaagatgtgatcatcaacaatcccatttctctttactgtgagacaaatgctgctccccctcctacactgacatggtacaaagatggccaccctctgacctcaagtgataaagtattgattttgccaggagggcgagtgttgcagattcctcgggctaaagtagaagatgctgggagatacacatgtgtggctgtgaatgaggctggagaagattcccttcaatatgatgtccgtgtactcgtgccgccaattatcaagggagcaaatagtgatctccctgaagaggtcaccgtgctggtgaacaagagtgcactgatagagtgtttatccagtggcagcccagcaccaaggaattcctggcagaaagatggacagcccttgctagaagatgaccatcataaatttctatctaatggacgaattctgcagattctgaatactcaaataacagatatcggcaggtatgtgtgtgttgctgagaacacagctgggagtgccaaaaaatattttaacctcaatgttcatgttcctccaagtgtcattggtcctaaatctgaaaatcttaccgtcgtggtgaacaatttcatctctttgacctgtgaggtctctggttttccacctcctgacctcagctggctcaagaatgaacagcccatcaaactgaacacaaatactctcattgtgcctggtggtcgaactctacagattattcgggccaaggtatcagatggtggtgaatacacttgtatagctatcaatcaagctggcgaaagcaagaaaaagttttccctgactgtttatgtgcccccaagcattaaagaccatgacagtgaatctctttctgtagttaatgtaagagagggaacttctgtgtctttggagtgtgagtcgaacgctgtgccacctccagtcatcacttggtataagaatgggcggatgataacagagtctactcatgtggagattttagctgatggacaaatgctacacattaagaaagctgaggtatctgacacaggccagtatgtatgtagagctataaatgtagcaggacgggatgataaaaatttccacctcaatgtatatgtgccacccagtattgaaggacctgaaagagaagtgattgtggagacgatcagcaatcctgtgacattaacatgtgatgccactgggatcccacctcccacgatagcatggttaaagaaccacaagcgcatagaaaattctgactcactggaagttcgtattttgtctggaggtagcaaactccagattgcccggtctcagcattcagatagtggaaactatacatgtattgcttcaaatatggagggaaaagcccagaaatattactttctttcaattcaagttcctccaagtgttgctggtgctgaaattccaagtgatgtcagtgtccttctaggagaaaatgttgagctggtctgcaatgcaaatggcattcctactccacttattcaatggcttaaagatggaaagcccatagctagtggtgaaacagaaagaatccgagtgagtgcaaatggcagcacattaaacatttatggagctcttacatctgacacggggaaatacacatgtgttgctactaatcccgctggagaagaagaccgaatttttaacttgaatgtctatgttacacctacaattaggggtaataaagatgaagcagagaaactaatgactttagtggatacttcaataaatattgaatgcagagccacagggacgcctccaccacagataaactggctgaagaatggacttcctctgcctctctcctcccatatccggttactggcagcaggacaagttatcaggattgtgagagctcaggtgtctgatgtcgctgtgtatacttgtgtggcctccaacagagctggggtggataataagcattacaatcttcaagtgtttgcaccaccaaatatggacaattcaatggggacagaggaaatcacagttctcaaaggtagttccacctctatggcatgcattactgatggaaccccagctcccagtatggcctggcttagagatggccagcctctggggcttgatgcccatctgacagtcagcacccatggaatggtcctgcagctcctcaaagcagagactgaagattcgggaaagtacacctgcattgcctcaaatgaagctggagaagtcagcaagcactttatcctcaaggtcctagaaccacctcacattaatggatctgaagaacatgaagagatatcagtaattgttaataacccacttgaacttacctgcattgcttctggaatcccagcccctaaaatgacctggatgaaagatggccggccccttccacagacggatcaagtgcaaactctaggaggaggagaggttcttcgaatttctactgctcaggtggaggatacaggaagatatacatgtctggcatccagtcctgcaggagatgatgataaggaatatctagtgagagtgcatgtacctcctaatattgctggaactgatgagccccgggatatcactgtgttacggaacagacaagtgacattggaatgcaagtcagatgcagtgcccccacctgtaattacttggctcagaaatggagaacggttacaggcaacacctcgagtgcgaatcctatctggagggagatacttgcaaatcaacaatgctgacctaggtgatacagccaattatacctgtgttgccagcaacattgcaggaaagactacaagagaatttattctcactgtaaatgttcctccaaacataaaggggggcccccagagccttgtaattcttttaaataagtcaactgtattggaatgcatcgctgaaggtgtgccaactccaaggataacatggagaaaggatggagctgttctagctgggaatcatgcaagatattccatcttggaaaatggattccttcatattcaatcagcacatgtcactgacactggacggtatttgtgtatggccaccaatgctgctggaacagatcgcaggcgaatagatttacaggtccatgttcctccatctattgctccgggtcctaccaacatgactgtaatagtaaatgttcaaactactctggcttgtgaggctactgggataccaaaaccatcaatcaattggagaaaaaatgggcatcttcttaatgtggatcaaaatcagaactcatacaggctcctttcttcaggttcactagtaattatttccccttctgtggatgacactgcaacctatgaatgtactgtgacaaacggtgctggagatgataaaagaactgtggatctcactgtccaagttccaccttccatagctgatgagcctacagatttcctagtaaccaaacatgccccagcagtaattacctgcactgcttcgggagttccatttccctcaattcactggaccaaaaatggtataagactgcttcccaggggagatggctatagaattctgtcctcaggagcaattgaaatacttgccacccaattaaaccatgctggaagatacacttgtgtcgctaggaatgcggctggctctgcacatcgacacgtgacccttcatgttcatgagcctccagtcattcagccccaaccaagtgaactacacgtcattctgaacaatcctattttattaccatgtgaagcaacagggacacccagtcctttcattacttggcaaaaagaaggcatcaatgttaacacttcaggcagaaaccatgcagttcttcctagtggcggcttacagatctccagagctgtccgagaggatgctggcacttacatgtgtgtggcccagaacccggctggtacagccttgggcaaaatcaagttaaatgtccaagttcctccagtcattagccctcatctaaaggaatatgttattgctgtggacaagcccatcacgttatcctgtgaagcagatggcctccctccgcctgacattacatggcataaagatgggcgtgcaattgtggaatctatccgccagcgcgtcctcagctctggctctctgcaaatagcatttgtccagcctggtgatgctggccattacacgtgcatggcagccaatgtagcaggatcaagcagcacaagcaccaagctcaccgtccatgtaccacccaggatcagaagtacagaaggacactacacggtcaatgagaattcacaagccattcttccatgcgtagctgatggaatccccacaccagcaattaactggaaaaaagacaatgttcttttagctaacttgttaggaaaatacactgctgaaccatatggagaactcattttagaaaatgttgtgctggaggattctggcttctatacctgtgttgctaacaatgctgcaggtgaagatacacacactgtcagcctgactgtgcatgttctccccacttttactgaacttcctggagacgtgtcattaaataaaggagaacagctacgattaagctgtaaagctactggtattccattgcccaaattaacatggaccttcaataacaatattattccagcccactttgacagtgtgaatggacacagtgaacttgttattgaaagagtgtcaaaagaggattcaggtacttatgtgtgcaccgcagagaacagcgttggctttgtgaaggcaattggatttgtttatgtgaaagaacctccagtcttcaaaggtgattatccttctaactggattgaaccacttggtgggaatgcaatcctgaattgtgaggtgaaaggagaccccaccccaaccatccagtggaacagaaagggagtggatattgaaattagccacagaatccggcaactgggcaatggctccctggccatctatggcactgttaatgaagatgccggtgactatacatgtgtagctaccaatgaagctggggtggtggagcgcagcatgagtctgactctgcaaagtcctcctattatcactcttgagccagtggaaactgttattaatgctggtggcaaaatcatattgaattgtcaggcaactggagagcctcaaccaaccattacatggtcccgtcaagggcactctatttcctgggatgaccgggttaacgtgttgtccaacaactcattatatattgctgatgctcagaaagaagatacctctgaatttgaatgtgttgctcgaaacttaatgggttctgtccttgtcagagtgccagtcatagtccaggttcatggtggattttcccagtggtctgcatggagagcctgcagtgtcacctgtggaaaaggcatccaaaagaggagtcgtctgtgcaaccagccccttccagccaatggtgggaagccctgccaaggttcagatttggaaatgcgaaactgtcaaaataagccttgtccagtggatggtagctggtcggaatggagtctttgggaagaatgcacaaggagctgtggacgcggcaaccaaaccaggaccaggacttgcaataatccatcagttcagcatggtgggcggccatgtgaagggaatgctgtggaaataattatgtgcaacattaggccttgcccagttcatggagcatggagcgcttggcagccttggggaacatgcagcgaaagttgtgggaaaggtactcagacaagagcaagactttgtaataacccaccaccagcgtttggtgggtcctactgtgatggagcagaaacacagatgcaagtttgcaatgaaagaaattgtccaattcatggcaagtgggcgacttgggccagttggagtgcctgttctgtgtcatgtggaggaggtgccagacagagaacaaggggctgctccgaccctgtgccccagtatggaggaaggaaatgcgaagggagtgatgtccagagtgatttttgcaacagtgacccttgcccaacccatggtaactggagtccttggagtggctggggaacatgcagccggacgtgtaacggagggcagatgcggcggtaccgcacatgtgataaccctcctccctccaatgggggaagagcttgtgggggaccagactcccagatccagaggtgcaacactgacatgtgtcctgtggatggaagttggggaagctggcatagttggagccagtgctctgcctcctgtggaggaggtgaaaagactcggaagcggctgtgcgaccatcctgtgccagttaaaggtggccgtccctgtcccggagacactactcaggtgaccaggtgcaatgtacaagcatgtccaggtgggccccagcgagccagaggaagtgttattggaaatattaatgatgttgaatttggaattgctttccttaatgccacaataactgatagccctaactctgatactagaataatacgtgccaaaattaccaatgtacctcgtagtcttggttcagcaatgagaaagatagtttctattctaaatcccatttattggacaacagcaaaggaaataggagaagcagtcaatggctttaccctcaccaatgcagtcttcaaaagagaaactcaagtggaatttgcaactggagaaatcttgcagatgagtcatattgcccggggcttggattccgatggttctttgctgctagatatcgttgtgagtggctatgtcctacagcttcagtcacctgctgaagtcactgtaaaggattacacagaggactacattcaaacaggtcctgggcagctgtacgcctactcaacccggctgttcaccattgatggcatcagcatcccatacacatggaaccacaccgttttctatgatcaggcacagggaagaatgcctttcttggttgaaacacttcatgcatcctctgtggaatctgactataaccagatagaagagacactgggttttaaaattcatgcttcaatatccaaaggagatcgcagtaatcagtgcccctccgggtttaccttagactcagttggacctttttgtgctgatgaggatgaatgtgcagcagggaatccctgctcccatagctgccacaatgccatggggacttactactgctcctgccctaaaggcctcaccatagctgcagatggaagaacttgtcaagatattgatgagtgtgctttgggtaggcatacctgccacgctggtcaggactgtgacaatacgattggatcttatcgctgtgtggtccgttgtggaagtggctttcgaagaacctctgatgggctgagttgtcaagatattaatgaatgtcaagaatccagcccctgtcaccagcgctgtttcaatgccataggaagtttccattgtggatgtgaacctgggtatcagctcaaaggcagaaaatgcatggatgtgaacgagtgtagacaaaatgtatgcagaccagatcagcactgtaagaacacccgtggtggctataagtgcattgatctttgtccaaatggaatgaccaaggcagaaaatggaacctgtattgatattgatgaatgtaaagatgggacccatcagtgcagatataaccagatatgtgagaatacaagaggcagctatcgttgtgtatgcccaagaggttatcggtctcaaggagttggaagaccctgcatggacattaatgaatgtgaacaagtgcctaaaccttgtgcacatcagtgctccaacacccccggcagcttcaagtgtatctgtccaccaggacaacatttattaggggacgggaaatcttgcgctggattggagaggctgccaaattatggcactcaatacagtagctataaccttgcacggttctcccctgtgagaaacaactatcaacctcaacagcattacagacagtactcacatctctacagctcctactcagagtatagaaacagcagaacatctctctccaggactagaaggactattaggaaaacttgccctgaaggctctgaggcaagccatgacacatgtgtagatattgatgaatgtgaaaatacagatgcctgccagcatgagtgtaagaatacctttggaagttatcagtgcatctgcccacctggctatcaactcacacacaatggaaagacatgccaagatatcgatgaatgtctggagcagaatgtgcactgtggacccaatcgcatgtgcttcaacatgagaggaagctaccagtgcatcgatacaccctgtccacccaactaccaacgggatcctgtttcagggttctgcctcaagaactgtccacccaatgatttggaatgtgccttgagcccatatgccttggaatacaaactcgtctccctcccatttggaatagccaccaatcaagatttaatccggctggttgcatacacacaggatggagtgatgcatcccaggacaactttcctcatggtagatgaggaacagactgttccttttgccttgagggatgaaaacctgaaaggagtggtgtatacaacacgaccactacgagaagcagagacctaccgcatgagggtccgagcctcatcctacagtgccaatgggaccattgaatatcagaccacattcatagtttatatagctgtgtccgcctatccatactaaggaactctccaaagcctattccacatatttaaaccgcattaatcatggcaatcaagcccccttccagattactgtctcttgaacagttgcaatcttggcagcttgaaaatggtgctacactctgttttgtgtgccttccttggtacttctgaggtattttcatgatcccaccatggtcatatcttgaagtatggtctagaaaagtcccttattattttatttattacactggagcagttacttcccaaagattattctgaacatctaacaggacatatcagtgatggtttacagtagtgtagtacctaagatcattttcctgaaagccaaaccaaacaacgaaaaacaagaacaactaattcagaatcaaatagagtttttgagcatttgactatttttagaatcataaaattagttactaagtattttgatcaaagcttataaaataacttacggagatttttgtaagtattgatacattataataggacttgcctattttcatttttaagaagaaaaacaccactcattttataaaatatagtacagctactataaggcttgtttgatcccaaatggtgcttatcttgattgaacattcagaacaaggatattattttcagtgattttgtgagatcagctgaaccacttatgataataataataaaaaagactgctttgccctcacgtcagttgtacatggcatggaactttaaaaattttaatataaactttcatccagttagcttcataacttttacgttccagaattttgtttattttcctgtcaatgaaagcaatttttaaagataccagtgggacaggtttggttttttaaaaatctcatgtgttcaaattaacataaatattacacgtcaatacactgtacatggtggtaatagactctaagcaattgccaagatgtattctatttttatgaagtgtatatatattaccttagtgtgcattttctatataatatcttgatggactcttttataaaattattttataaaaaacaatgttacactaaaatcagcctaaataaattttcacaactttttttcat

SEQ ID NO: 11984 - DNA, 1848 bp, Homo sapiens
ggctcaccccaggtaaggagggaggccaccgacctactgggccgacggactcccacacagttcctgagctggtgccaggcaggtgacacctcctgcagcccccagcatgcgggcaggcccaggccccaccgttacattggccctggtgctggcggtgtcatgggccatggagctcaagcccacagcaccacccatcttcactggccggccctttgtggtagcgtgggacgtgcccacacaggactgtggcccacgcctcaaggtgccactggacctgaatgcctttgatgtgcaggcctcacctaatgagggttttgtgaaccagaatattaccatcttctaccgcgaccgtctaggcctgtatccacgcttcgattctgccggaaggtctgtgcatggtggtgtgccacagaatgtcagcctttgggcacaccggaagatgctgcagaaacgtgtggagcactacattcggacacaggagtctgcggggctggcggtcatcgactgggaggactggcgacctgtgtgggtgcgcaactggcaggacaaagatgtgtatcgccggttatcacgccagctagtggccagtcgtcaccctgactggcctccagaccgcatagtcaaacaggcacaatatgagtttgagttcgcagcacagcagttcatgctggagacactgcgttatgtcaaggcagtgcggccccggcacctctggggcttctacctctttcctgactgctacaatcatgattatgtgcagaactgggagagctacacaggccgctgccctgatgttgaggtggcccgcaatgaccagctggcctggctgtgggctgagagcacggccctcttcccgtctgtctacctggacgagacacttgcttcctcccgccatggccgcaactttgtgagcttccgtgttcaggaggcccttcgtgtggctcgcacccaccatgccaaccatgcactcccagtctacgtcttcacacgacccacctacagccgcaggctcacggggcttagtgagatggacctcatctctaccattggcgagagtgcggccctgggcgcagctggtgtcatcctctggggtgacgcggggtacaccacaagcacggagacctgccagtacctcaaagattacctgacacggctgctggtcccctacgtggtcaatgtgtcctgggccacccaatattgcagccgggcccagtgccatggccatgggcgctgtgtgcgccgcaaccccagtgccagtaccttcctgcatctcagcaccaacagtttccgcctagtgcctggccatgcacctggtgaaccccagctgcgacctgtgggggagctcagttgggccgacattgaccacctgcagacacacttccgctgccagtgctacttgggctggagtggtgagcaatgccagtgggaccataggcaggcagctggaggtgccagcgaggcctgggctgggtcccacctcaccagtctgctggctctggcagccctggcctttacctggaccttgtaggggtctcctgcctagctgcctagcaagctggcctctaccacaagggctctcttaggcatgtaggaccctgcagggggtggacaaactggagtctggagtgggcagagcccccaggaagcccaggagggcatccataccagctcgcacccccctgttctaagggggaggggaagtccctgggaggccccttctctccctgccagaggggaaggagggtacagctgggctggggaggacctgaccctactcccttgccctagatagtttattattattattattttggggtctcttttgtaaattaaacataaaacaattgc

SEQ ID NO: 11985 - DNA, 1909 bp, Homo sapiens
aggcgctgagccgggccgcgcctgggcgaacggccggagcgggctgggctgggcccgggatggcggtggccctggcgccggtcccggtggcgccccgcgcgagttcctgagctggtgccaggcaggtgacacctcctgcagcccccagcatgcgggcaggcccaggccccaccgttacattggccctggtgctggcggtgtcatgggccatggagctcaagcccacagcaccacccatcttcactggccggccctttgtggtagcgtgggacgtgcccacacaggactgtggcccacgcctcaaggtgccactggacctgaatgcctttgatgtgcaggcctcacctaatgagggttttgtgaaccagaatattaccatcttctaccgcgaccgtctaggcctgtatccacgcttcgattctgccggaaggtctgtgcatggtggtgtgccacagaatgtcagcctttgggcacaccggaagatgctgcagaaacgtgtggagcactacattcggacacaggagtctgcggggctggcggtcatcgactgggaggactggcgacctgtgtgggtgcgcaactggcaggacaaagatgtgtatcgccggttatcacgccagctagtggccagtcgtcaccctgactggcctccagaccgcatagtcaaacaggcacaatatgagtttgagttcgcagcacagcagttcatgctggagacactgcgttatgtcaaggcagtgcggccccggcacctctggggcttctacctctttcctgactgctacaatcatgattatgtgcagaactgggagagctacacaggccgctgccctgatgttgaggtggcccgcaatgaccagctggcctggctgtgggctgagagcacggccctcttcccgtctgtctacctggacgagacacttgcttcctcccgccatggccgcaactttgtgagcttccgtgttcaggaggcccttcgtgtggctcgcacccaccatgccaaccatgcactcccagtctacgtcttcacacgacccacctacagccgcaggctcacggggcttagtgagatggacctcatctctaccattggcgagagtgcggccctgggcgcagctggtgtcatcctctggggtgacgcggggtacaccacaagcacggagacctgccagtacctcaaagattacctgacacggctgctggtcccctacgtggtcaatgtgtcctgggccacccaatattgcagccgggcccagtgccatggccatgggcgctgtgtgcgccgcaaccccagtgccagtaccttcctgcatctcagcaccaacagtttccgcctagtgcctggccatgcacctggtgaaccccagctgcgacctgtgggggagctcagttgggccgacattgaccacctgcagacacacttccgctgccagtgctacttgggctggagtggtgagcaatgccagtgggaccataggcaggcagctggaggtgccagcgaggcctgggctgggtcccacctcaccagtctgctggctctggcagccctggcctttacctggaccttgtaggggtctcctgcctagctgcctagcaagctggcctctaccacaagggctctcttaggcatgtaggaccctgcagggggtggacaaactggagtctggagtgggcagagcccccaggaagcccaggagggcatccataccagctcgcacccccctgttctaagggggaggggaagtccctgggaggccccttctctccctgccagaggggaaggagggtacagctgggctggggaggacctgaccctactcccttgccctagatagtttattattattattattttggggtctcttttgtaaattaaacataaaacaattgcaaaaaaaaaaaaaaaaaa

SEQ ID NO: 11986 - DNA, 3655 bp, Homo sapiens
agcaatcctttctttcagctggagtgctcctcaggagccagccccacccttagaaaagatgttttccatgaggatcgtctgcctggtcctaagtgtggtgggcacagcatggactgcagatagtggtgaaggtgactttctagctgaaggaggaggcgtgcgtggcccaagggttgtggaaagacatcaatctgcctgcaaagattcagactggcccttctgctctgatgaagactggaactacaaatgcccttctggctgcaggatgaaagggttgattgatgaagtcaatcaagattttacaaacagaataaataagctcaaaaattcactatttgaatatcagaagaacaataaggattctcattcgttgaccactaatataatggaaattttgagaggcgatttttcctcagccaataaccgtgataatacctacaaccgagtgtcagaggatctgagaagcagaattgaagtcctgaagcgcaaagtcatagaaaaagtacagcatatccagcttctgcagaaaaatgttagagctcagttggttgatatgaaacgactggaggtggacattgatattaagatccgatcttgtcgagggtcatgcagtagggctttagctcgtgaagtagatctgaaggactatgaagatcagcagaagcaacttgaacaggtcattgccaaagacttacttccctctagagataggcaacacttaccactgataaaaatgaaaccagttccagacttggttcccggaaattttaagagccagcttcagaaggtacccccagagtggaaggcattaacagacatgccgcagatgagaatggagttagagagacctggtggaaatgagattactcgaggaggctccacctcttatggaaccggatcagagacggaaagccccaggaaccctagcagtgctggaagctggaactctgggagctctggacctggaagtactggaaaccgaaaccctgggagctctgggactggagggactgcaacctggaaacctgggagctctggacctggaagtactggaagctggaactctgggagctctggaactggaagtactggaaaccaaaaccctgggagccctagacctggtagtaccggaacctggaatcctggcagctctgaacgcggaagtgctgggcactggacctctgagagctctgtatctggtagtactggacaatggcactctgaatctggaagttttaggccagatagcccaggctctgggaacgcgaggcctaacaacccagactggggcacatttgaagaggtgtcaggaaatgtaagtccagggacaaggagagagtaccacacagaaaaactggtcacttctaaaggagataaagagctcaggactggtaaagagaaggtcacctctggtagcacaaccaccacgcgtcgttcatgctctaaaaccgttactaagactgttattggtcctgatggtcacaaagaagttaccaaagaagtggtgacctccgaagatggttctgactgtcccgaggcaatggatttaggcacattgtctggcataggtactctggatgggttccgccataggcaccctgatgaagctgccttcttcgacactgcctcaactggaaaaacattcccaggtttcttctcacctatgttaggagagtttgtcagtgagactgagtctaggggctcagaatctggcatcttcacaaatacaaaggaatccagttctcatcaccctgggatagctgaattcccttcccgtggtaaatcttcaagttacagcaaacaatttactagtagcacgagttacaacagaggagactccacatttgaaagcaagagctataaaatggcagatgaggccggaagtgaagccgatcatgaaggaacacatagcaccaagagaggccatgctaaatctcgccctgtcagagactgtgatgatgtcctccaaacacatccttcaggtacccaaagtggcattttcaatatcaagctaccgggatccagtaagattttttctgtttattgcgatcaagagaccagtttgggaggatggcttttgatccagcaaagaatggatggatcactgaattttaaccggacctggcaagactacaagagaggtttcggcagcctgaatgacgagggggaaggagaattctggctaggcaatgactacctccacttactaacccaaaggggctctgttcttagggttgaattagaggactgggctgggaatgaagcttatgcagaatatcacttccgggtaggctctgaggctgaaggctatgccctccaagtctcctcctatgaaggcactgcgggtgatgctctgattgagggttccgtagaggaaggggcagagtacacctctcacaacaacatgcagttcagcacctttgacagggatgcagaccagtgggaagagaactgtgcagaagtctatgggggaggctggtggtataataactgccaagcagccaatctcaatggaatctactaccctgggggctcctatgacccaaggaataacagtccttatgagattgagaatggagtggtctgggtttcctttagaggggcagattattccctcagggctgttcgcatgaaaattaggccccttgtgacccaataggctgaagaagtgggaatgggagcactctgtcttctttgctagagaagtggagagaaaatacaaaaggtaaagcagttgagattctctacaacctaaaaaattcctaggtgctattttcttatcctttgtactgtagctaaatgtacctgagacatattagtctttgaaaaataaagttatgtaaggttttttttatctttaaatagctctgtgggttttaacatttttataaagatataccaagggccattcagtacatcaggaaagtggcagacagaagcttctctctgcaaccttgaagactattggtttgagaacttctcttcccataccacccaaaatcataatgccattggaaagcaaaaagttgttttatccatttgatttgaattgttttaagccaatattttaaggtaaaactcactgaatctaaccatagctgacctttgtagtagaatttacaacttataattacaatgcacaatttataattacaatatgtatttatgtcttttgctatggagcaaatccaggaaggcaagagaaacattctttcctaaatataaatgaaaatctatcctttaaactcttccactagacgttgtaatgcacacttatttttttcccaaggagtaaccaatttctttctaaaacacatttaaaattttaaaactatttatgaatattaaaaaaagacataattcacacattaataaacaatctcccaagtattgatttaacttcatttttctaataatcataaactatattctgtgacatgctaattattattaaatgtaagtcgttagttcgaaagcctctcactaagtatgatctatgctatattcaaaattcaacccatttactttggtcaatatttgatctaagttgcatctttaatcctggtggtcttgccttctgatttttaatttgtatccttttctattaagatatatttgtcattttctcttgaatatgtattaaaatatcccaagc

SEQ ID NO: 11987 - DNA, 2255 bp, Homo sapiens
cttgtggagcattcgggcttggaaggaaagctataggctacccattcagctcccctgtcagagactcaagctttgagaaaggctagcaaagagcaaggaaagagagaaaacaacaaagtggcgaggccctcagagtgaaagcgtaaggttcagtcagcctgctgcagctttgcagacctcagctgggcatctccagactcccctgaaggaagagccttcctcacccaaacccacaaaagatgctgaaaaagcctctctcagctgtgacctggctctgcattttcatcgtggcctttgtcagccacccagcgtggctgcagaagctctctaagcacaagacaccagcacagccacagctcaaagcggccaactgctgtgaggaggtgaaggagctcaaggcccaagttgccaaccttagcagcctgctgagtgaactgaacaagaagcaggagagggactgggtcagcgtggtcatgcaggtgatggagctggagagcaacagcaagcgcatggagtcgcggctcacagatgctgagagcaagtactccgagatgaacaaccaaattgacatcatgcagctgcaggcagcacagacggtcactcagacctccgcagatgccatctacgactgctcttccctctaccagaagaactaccgcatctctggagtgtataagcttcctcctgatgacttcctgggcagccctgaactggaggtgttctgtgacatggagacttcaggcggaggctggaccatcatccagagacgaaaaagtggccttgtctccttctaccgggactggaagcagtacaagcagggctttggcagcatccgtggggacttctggctggggaacgaacacatccaccggctctccagacagccaacccggctgcgtgtagagatggaggactgggagggcaacctgcgctacgctgagtatagccactttgttttgggcaatgaactcaacagctatcgcctcttcctggggaactacactggcaatgtggggaacgacgccctccagtatcataacaacacagccttcagcaccaaggacaaggacaatgacaactgcttggacaagtgtgcacagctccgcaaaggtggctactggtacaactgctgcacagactccaacctcaatggagtgtactaccgcctgggtgagcacaataagcacctggatggcatcacctggtatggctggcatggatctacctactccctcaaacgggtggagatgaaaatccgcccagaagacttcaagccttaaaaggaggctgccgtggagcacggatacagaaactgagacacgtggagactggatgagggcagatgaggacaggaagagagtgttagaaagggtaggactgagaaacagcctataatctccaaagaaagaataagtctccaaggagcacaaaaaaatcatatgtaccaaggatgttacagtaaacaggatgaactatttaaacccactgggtcctgccacatccttctcaaggtggtagactgagtggggtctctctgcccaagatccctgacatagcagtagcttgtcttttccacatgatttgtctgtgaaagaaaataattttgagatcgttttatctattttctctacggcttaggctatgtgagggcaaaacacaaatccctttgctaaaaagaaccatattattttgattctcaaaggataggcctttgagtgttagagaaaggagtgaaggaggcaggtgggaaatggtatttctatttttaaatccagtgaaattatcttgagtctacacattatttttaaaacacaaaaattgttcggctggaactgacccaggctggacttgcggggaggaaactccagggcactgcatctggcgatcagactctgagcactgcccctgctcgccttggtcatgtacagcactgaaaggaatgaagcaccagcaggaggtggacagagtctctcatggatgccggcacaaaactgccttaaaatattcatagttaatacaggtatatctatttttatttactttgtaagaaacaagctcaaggagcttccttttaaattttgtctgtaggaaatggttgaaaactgaaggtagatggtgttatagttaataataaatgctgtaaataagcatctcactttgtaaaaataaaatattgtggttttgttttaaacattcaacgtttcttttccttctacaataaacactttcaaaatgtgaaaaaaaaaaaaaaaaaa

SEQ ID NO: 11988 - DNA, 6641 bp, Homo sapiens
gccctcgccgcccgcggcgccccgagcgctttgtgagcagatgcggagccgagtggagggcgcgagccagatgcggggcgacagctgacttgctgagaggaggcggggaggcgcggagcgcgcgtgtggtccttgcgccgctgacttctccactggttcctgggcaccgaaagataaacctctcataatgaaggcccccgctgtgcttgcacctggcatcctcgtgctcctgtttaccttggtgcagaggagcaatggggagtgtaaagaggcactagcaaagtccgagatgaatgtgaatatgaagtatcagcttcccaacttcaccgcggaaacacccatccagaatgtcattctacatgagcatcacattttccttggtgccactaactacatttatgttttaaatgaggaagaccttcagaaggttgctgagtacaagactgggcctgtgctggaacacccagattgtttcccatgtcaggactgcagcagcaaagccaatttatcaggaggtgtttggaaagataacatcaacatggctctagttgtcgacacctactatgatgatcaactcattagctgtggcagcgtcaacagagggacctgccagcgacatgtctttccccacaatcatactgctgacatacagtcggaggttcactgcatattctccccacagatagaagagcccagccagtgtcctgactgtgtggtgagcgccctgggagccaaagtcctttcatctgtaaaggaccggttcatcaacttctttgtaggcaataccataaattcttcttatttcccagatcatccattgcattcgatatcagtgagaaggctaaaggaaacgaaagatggttttatgtttttgacggaccagtcctacattgatgttttacctgagttcagagattcttaccccattaagtatgtccatgcctttgaaagcaacaattttatttacttcttgacggtccaaagggaaactctagatgctcagacttttcacacaagaataatcaggttctgttccataaactctggattgcattcctacatggaaatgcctctggagtgtattctcacagaaaagagaaaaaagagatccacaaagaaggaagtgtttaatatacttcaggctgcgtatgtcagcaagcctggggcccagcttgctagacaaataggagccagcctgaatgatgacattcttttcggggtgttcgcacaaagcaagccagattctgccgaaccaatggatcgatctgccatgtgtgcattccctatcaaatatgtcaacgacttcttcaacaagatcgtcaacaaaaacaatgtgagatgtctccagcatttttacggacccaatcatgagcactgctttaataggacacttctgagaaattcatcaggctgtgaagcgcgccgtgatgaatatcgaacagagtttaccacagctttgcagcgcgttgacttattcatgggtcaattcagcgaagtcctcttaacatctatatccaccttcattaaaggagacctcaccatagctaatcttgggacatcagagggtcgcttcatgcaggttgtggtttctcgatcaggaccatcaacccctcatgtgaattttctcctggactcccatccagtgtctccagaagtgattgtggagcatacattaaaccaaaatggctacacactggttatcactgggaagaagatcacgaagatcccattgaatggcttgggctgcagacatttccagtcctgcagtcaatgcctctctgccccaccctttgttcagtgtggctggtgccacgacaaatgtgtgcgatcggaggaatgcctgagcgggacatggactcaacagatctgtctgcctgcaatctacaaggttttcccaaatagtgcaccccttgaaggagggacaaggctgaccatatgtggctgggactttggatttcggaggaataataaatttgatttaaagaaaactagagttctccttggaaatgagagctgcaccttgactttaagtgagagcacgatgaatacattgaaatgcacagttggtcctgccatgaataagcatttcaatatgtccataattatttcaaatggccacgggacaacacaatacagtacattctcctatgtggatcctgtaataacaagtatttcgccgaaatacggtcctatggctggtggcactttacttactttaactggaaattacctaaacagtgggaattctagacacatttcaattggtggaaaaacatgtactttaaaaagtgtgtcaaacagtattcttgaatgttataccccagcccaaaccatttcaactgagtttgctgttaaattgaaaattgacttagccaaccgagagacaagcatcttcagttaccgtgaagatcccattgtctatgaaattcatccaaccaaatcttttattagtggtgggagcacaataacaggtgttgggaaaaacctgaattcagttagtgtcccgagaatggtcataaatgtgcatgaagcaggaaggaactttacagtggcatgtcaacatcgctctaattcagagataatctgttgtaccactccttccctgcaacagctgaatctgcaactccccctgaaaaccaaagcctttttcatgttagatgggatcctttccaaatactttgatctcatttatgtacataatcctgtgtttaagccttttgaaaagccagtgatgatctcaatgggcaatgaaaatgtactggaaattaagggaaatgatattgaccctgaagcagttaaaggtgaagtgttaaaagttggaaataagagctgtgagaatatacacttacattctgaagccgttttatgcacggtccccaatgacctgctgaaattgaacagcgagctaaatatagagtggaagcaagcaatttcttcaaccgtccttggaaaagtaatagttcaaccagatcagaatttcacaggattgattgctggtgttgtctcaatatcaacagcactgttattactacttgggtttttcctgtggctgaaaaagagaaagcaaattaaagatctgggcagtgaattagttcgctacgatgcaagagtacacactcctcatttggataggcttgtaagtgcccgaagtgtaagcccaactacagaaatggtttcaaatgaatctgtagactaccgagctacttttccagaagatcagtttcctaattcatctcagaacggttcatgccgacaagtgcagtatcctctgacagacatgtcccccatcctaactagtggggactctgatatatccagtccattactgcaaaatactgtccacattgacctcagtgctctaaatccagagctggtccaggcagtgcagcatgtagtgattgggcccagtagcctgattgtgcatttcaatgaagtcataggaagagggcattttggttgtgtatatcatgggactttgttggacaatgatggcaagaaaattcactgtgctgtgaaatccttgaacagaatcactgacataggagaagtttcccaatttctgaccgagggaatcatcatgaaagattttagtcatcccaatgtcctctcgctcctgggaatctgcctgcgaagtgaagggtctccgctggtggtcctaccatacatgaaacatggagatcttcgaaatttcattcgaaatgagactcataatccaactgtaaaagatcttattggctttggtcttcaagtagccaaaggcatgaaatatcttgcaagcaaaaagtttgtccacagagacttggctgcaagaaactgtatgctggatgaaaaattcacagtcaaggttgctgattttggtcttgccagagacatgtatgataaagaatactatagtgtacacaacaaaacaggtgcaaagctgccagtgaagtggatggctttggaaagtctgcaaactcaaaagtttaccaccaagtcagatgtgtggtcctttggcgtgctcctctgggagctgatgacaagaggagccccaccttatcctgacgtaaacacctttgatataactgtttacttgttgcaagggagaagactcctacaacccgaatactgcccagaccccttatatgaagtaatgctaaaatgctggcaccctaaagccgaaatgcgcccatccttttctgaactggtgtcccggatatcagcgatcttctctactttcattggggagcactatgtccatgtgaacgctacttatgtgaacgtaaaatgtgtcgctccgtatccttctctgttgtcatcagaagataacgctgatgatgaggtggacacacgaccagcctccttctgggagacatcatagtgctagtactatgtcaaagcaacagtccacactttgtccaatggttttttcactgcctgacctttaaaaggccatcgatattctttgctcttgccaaaattgcactattataggacttgtattgttatttaaattactggattctaaggaatttcttatctgacagagcatcagaaccagaggcttggtcccacaggccacggaccaatggcctgcagccgtgacaacactcctgtcatattggagtccaaaacttgaattctgggttgaattttttaaaaatcaggtaccacttgatttcatatgggaaattgaagcaggaaatattgagggcttcttgatcacagaaaactcagaagagatagtaatgctcaggacaggagcggcagccccagaacaggccactcatttagaattctagtgtttcaaaacacttttgtgtgttgtatggtcaataacatttttcattactgatggtgtcattcacccattaggtaaacattcccttttaaatgtttgtttgttttttgagacaggatctcactctgttgccagggctgtagtgcagtggtgtgatcatagctcactgcaacctccacctcccaggctcaagcctcccgaatagctgggactacaggcgcacaccaccatccccggctaatttttgtattttttgtagagacggggttttgccatgttgccaaggctggtttcaaactcctggactcaagaaatccacccacctcagcctcccaaagtgctaggattacaggcatgagccactgcgcccagcccttataaatttttgtatagacattcctttggttggaagaatatttataggcaatacagtcaaagtttcaaaatagcatcacacaaaacatgtttataaatgaacaggatgtaatgtacatagatgacattaagaaaatttgtatgaaataatttagtcatcatgaaatatttagttgtcatataaaaacccactgtttgagaatgatgctactctgatctaatgaatgtgaacatgtagatgttttgtgtgtatttttttaaatgaaaactcaaaataagacaagtaatttgttgataaatatttttaaagataactcagcatgtttgtaaagcaggatacattttactaaaaggttcattggttccaatcacagctcataggtagagcaaagaaagggtggatggattgaaaagattagcctctgtctcggtggcaggttcccacctcgcaagcaattggaaacaaaacttttggggagttttattttgcattagggtgtgttttatgttaagcaaaacatactttagaaacaaatgaaaaaggcaattgaaaatcccagctatttcacctagatggaatagccaccctgagcagaactttgtgatgcttcattctgtggaattttgtgcttgctactgtatagtgcatgtggtgtaggttactctaactggttttgtcgacgtaaacatttaaagtgttatattttttataaaaatgtttatttttaatgatatgagaaaaattttgttaggccacaaaaacactgcactgtgaacattttagaaaaggtatgtcagactgggattaatgacagcatgattttcaatgactgtaaattgcgataaggaaatgtactgattgccaatacaccccaccctcattacatcatcaggacttgaagccaagggttaacccagcaagctacaaagagggtgtgtcacactgaaactcaatagttgagtttggctgttgttgcaggaaaatgattataactaaaagctctctgatagtgcagagacttaccagaagacacaaggaattgtactgaagagctattacaatccaaatattgccgtttcataaatgtaataagtaatactaattcacagagtattgtaaatggtggatgacaaaagaaaatctgctctgtggaaagaaagaactgtctctaccagggtcaagagcatgaacgcatcaatagaaagaactcggggaaacatcccatcaacaggactacacacttgtatatacattcttgagaacactgcaatgtgaaaatcacgtttgctatttataaacttgtccttagattaatgtgtctggacagattgtgggagtaagtgattcttctaagaattagatacttgtcactgcctatacctgcagctgaactgaatggtacttcgtatgttaatagttgttctgataaatcatgcaattaaagtaaagtgatgcaacatcttgtaaaaaaaaaaaaaaaaaaaa

SEQ ID NO: 11989 - DNA, 5015 bp, Homo sapiens
gcgctccgcacctgggcactcccagcgatgcgcagcggggcagcgccggccccgccgatggagctgctgttgctgccgccgccgccgcccggagcgccccgctccgcccgcgccccgtgcgcctgagcaccgagctcgcccctcctccgcgctaactccgccgcccgctccccaggccgcccgcgctccccgcgcgcctcctcgggctccacgcgtcttgccccgcagaggcagcctcctccaggagcggggccctgcacaccatggcccccgggtgggcaggggtcggcgccgccgtgcgcgcccgcctggcgctggccttggcgctggcgagcgtcctgagtgggcctccagccgtcgcctgccccaccaagtgtacctgctccgctgccagcgtggactgccacgggctgggcctccgcgcggttcctcggggcatcccccgcaacgctgagcgccttgacctggacagaaataatatcaccaggatcaccaagatggacttcgctgggctcaagaacctccgagtcttgcatctggaagacaaccaggtcagcgtcatcgagagaggcgccttccaggacctgaagcagctagagcgactgcgcctgaacaagaataagctgcaagtccttccagaattgcttttccagagcacgccgaagctcaccagactagatttgagtgaaaaccagatccaggggatcccgaggaaggcgttccgcggcatcaccgatgtgaagaacctgcaactggacaacaaccacatcagctgcattgaagatggagccttccgagcgctgcgcgatttggagatccttaccctcaacaacaacaacatcagtcgcatcctggtcaccagcttcaaccacatgccgaagatccgaactctgcgcctccactccaaccacctgtactgcgactgccacctggcctggctctcggattggctgcgacagcgacggacagttggccagttcacactctgcatggctcctgtgcatttgaggggcttcaacgtggcggatgtgcagaagaaggagtacgtgtgcccagccccccactcggagcccccatcctgcaatgccaactccatctcctgcccttcgccctgcacgtgcagcaataacatcgtggactgtcgaggaaagggcttgatggagattcctgccaacttgccggagggcatcgtcgaaatacgcctagaacagaactccatcaaagccatccctgcaggagccttcacccagtacaagaaactgaagcgaatagacatcagcaagaatcagatatcggatattgctccagatgccttccagggcctgaaatcactcacatcgctggtcctgtatgggaacaagatcaccgagattgccaagggactgtttgatgggctggtgtccctacagctgctcctcctcaatgccaacaagatcaactgcctgcgggtgaacacgtttcaggacctgcagaacctcaacttgctctccctgtatgacaacaagctgcagaccatcagcaaggggctcttcgcccctctgcagtccatccagacactccacttagcccaaaacccatttgtgtgcgactgccacttgaagtggctggccgactacctccaggacaaccccatcgagacaagcggggcccgctgcagcagcccgcgccgactcgccaacaagcgcatcagccagatcaagagcaagaagttccgctgctcaggctccgaggattaccgcagcaggttcagcagcgagtgcttcatggacctcgtgtgccccgagaagtgtcgctgtgagggcacgattgtggactgctccaaccagaagctggtccgcatcccaagccacctccctgaatatgtcaccgacctgcgactgaatgacaatgaggtatctgttctggaggccactggcatcttcaagaagttgcccaacctgcggaaaataaatctgagtaacaataagatcaaggaggtgcgagagggagctttcgatggagcagccagcgtgcaggagctgatgctgacagggaaccagctggagaccgtgcacgggcgcgtgttccgtggcctcagtggcctcaaaaccttgatgctgaggagtaacttgatcggctgtgtgagtaatgacacctttgccggcctgagttcggtgagactgctgtccctctatgacaatcggatcaccaccatcacccctggggccttcaccacgcttgtctccctgtccaccataaacctcctgtccaaccccttcaactgcaactgccacctggcctggctcggcaagtggttgaggaagaggcggatcgtcagtgggaaccctaggtgccagaagccatttttcctcaaggagattcccatccaggatgtggccatccaggacttcacctgtgatggcaacgaggagagtagctgccagctgagcccgcgctgcccggagcagtgcacctgtatggagacagtggtgcgatgcagcaacaaggggctccgcgccctccccagaggcatgcccaaggatgtgaccgagctgtacctggaaggaaaccacctaacagccgtgcccagagagctgtccgccctccgacacctgacgcttattgacctgagcaacaacagcatcagcatgctgaccaattacaccttcagtaacatgtctcacctctccactctgatcctgagctacaaccggctgaggtgcatccccgtccacgccttcaacgggctgcggtccctgcgagtgctaaccctccatggcaatgacatttccagcgttcctgaaggctccttcaacgacctcacatctctttcccatctggcgctgggaaccaacccactccactgtgactgcagtcttcggtggctgtcggagtgggtgaaggcggggtacaaggagcctggcatcgcccgctgcagtagccctgagcccatggctgacaggctcctgctcaccaccccaacccaccgcttccagtgcaaagggccagtggacatcaacattgtggccaaatgcaatgcctgcctctccagcccgtgcaagaataacgggacatgcacccaggaccctgtggagctgtaccgctgtgcctgcccctacagctacaagggcaaggactgcactgtgcccatcaacacctgcatccagaacccctgtcagcatggaggcacctgccacctgagtgacagccacaaggatgggttcagctgctcctgccctctgggctttgaggggcagcggtgtgagatcaacccagatgactgtgaggacaacgactgcgaaaacaatgccacctgcgtggacgggatcaacaactacgtgtgtatctgtccgcctaactacacaggtgagctatgcgacgaggtgattgaccactgtgtgcctgagctgaacctctgtcagcatgaggccaagtgcatccccctggacaaaggattcagctgcgagtgtgtccctggctacagcgggaagctctgtgagacagacaatgatgactgtgtggcccacaagtgccgccacggggcccagtgcgtggacacaatcaatggctacacatgcacctgcccccagggcttcagtggacccttctgtgaacaccccccacccatggtcctactgcagaccagcccatgcgaccagtacgagtgccagaacggggcccagtgcatcgtggtgcagcaggagcccacctgccgctgcccaccaggtttcgccggccccagatgcgagaagctcatcactgtcaacttcgtgggcaaagactcctacgtggaactggcctccgccaaggtccgaccccaggccaacatctccctgcaggtggccactgacaaggacaacggcatccttctctacaaaggagacaatgaccccctggcactggagctgtaccagggccacgtgcggctggtctatgacagcctgagttcccctccaaccacagtgtacagtgtggagacagtgaatgatgggcagtttcacagtgtggagctggtgacgctaaaccagaccctgaacctagtagtggacaaaggaactccaaagagcctggggaagctccagaagcagccagcagtgggcatcaacagccccctctaccttggaggcatccccacctccaccggcctctccgccttgcgccagggcacggaccggcctctaggcggcttccacggatgcatccatgaggtgcgcatcaacaacgagctgcaggacttcaaggccctcccaccacagtccctgggggtgtcaccaggctgcaagtcctgcaccgtgtgcaagcacggcctgtgccgctccgtggagaaggacagcgtggtgtgcgagtgccgcccaggctggaccggcccactctgcgatcaggaggcccgggacccctgcctcggccacagatgccaccatggaaaatgtgtggcaactgggacctcatacatgtgcaagtgtgccgagggctatggaggggacttgtgtgacaacaagaatgactctgccaatgcctgctcagccttcaagtgtcaccatgggcagtgccacatctcagaccaaggggagccctactgcctgtgccagcccggctttagcggcgagcactgccaacaagagaatccgtgcctgggacaagtagtccgagaggtgatccgccgccagaaaggttatgcatcatgtgccacagcctccaaggtgcccatcatggaatgtcgtgggggctgtgggccccagtgctgccagcccacccgcagcaagcggcggaaatacgtcttccagtgcacggacggctcctcgtttgtagaagaggtggagagacacttagagtgcggctgcctcgcgtgttcctaagcccctgcccgcctgcctgccacctctcggactccagcttgatggagttgggacagccatgtgggaccccctggtgattcagcatgaaggaaatgaagctggagaggaaggtaaagaagaagagaatattaagtatattgtaaaataaacaaaaaatagaacttatttttattatggaaa

SEQ ID NO: 11990 - DNA, 2732 bp, Homo sapiens
aacaacatcctgggattgggacccactttctgggcactgctggccagtcccaaaatggaacataaggaagtggttcttctacttcttttatttctgaaatcaggtcaaggagagcctctggatgactatgtgaatacccagggggcttcactgttcagtgtcactaagaagcagctgggagcaggaagtatagaagaatgtgcagcaaaatgtgaggaggacgaagaattcacctgcagggcattccaatatcacagtaaagagcaacaatgtgtgataatggctgaaaacaggaagtcctccataatcattaggatgagagatgtagttttatttgaaaagaaagtgtatctctcagagtgcaagactgggaatggaaagaactacagagggacgatgtccaaaacaaaaaatggcatcacctgtcaaaaatggagttccacttctccccacagacctagattctcacctgctacacacccctcagagggactggaggagaactactgcaggaatccagacaacgatccgcaggggccctggtgctatactactgatccagaaaagagatatgactactgcgacattcttgagtgtgaagaggaatgtatgcattgcagtggagaaaactatgacggcaaaatttccaagaccatgtctggactggaatgccaggcctgggactctcagagcccacacgctcatggatacattccttccaaatttccaaacaagaacctgaagaagaattactgtcgtaaccccgatagggagctgcggccttggtgtttcaccaccgaccccaacaagcgctgggaactttgcgacatcccccgctgcacaacacctccaccatcttctggtcccacctaccagtgtctgaagggaacaggtgaaaactatcgcgggaatgtggctgttaccgtttccgggcacacctgtcagcactggagtgcacagacccctcacacacataacaggacaccagaaaacttcccctgcaaaaatttggatgaaaactactgccgcaatcctgacggaaaaagggccccatggtgccatacaaccaacagccaagtgcggtgggagtactgtaagataccgtcctgtgactcctccccagtatccacggaacaattggctcccacagcaccacctgagctaacccctgtggtccaggactgctaccatggtgatggacagagctaccgaggcacatcctccaccaccaccacaggaaagaagtgtcagtcttggtcatctatgacaccacaccggcaccagaagaccccagaaaactacccaaatgctggcctgacaatgaactactgcaggaatccagatgccgataaaggcccctggtgttttaccacagaccccagcgtcaggtgggagtactgcaacctgaaaaaatgctcaggaacagaagcgagtgttgtagcacctccgcctgttgtcctgcttccagatgtagagactccttccgaagaagactgtatgtttgggaatgggaaaggataccgaggcaagagggcgaccactgttactgggacgccatgccaggactgggctgcccaggagccccatagacacagcattttcactccagagacaaatccacgggcgggtctggaaaaaaattactgccgtaaccctgatggtgatgtaggtggtccctggtgctacacgacaaatccaagaaaactttacgactactgtgatgtccctcagtgtgcggccccttcatttgattgtgggaagcctcaagtggagccgaagaaatgtcctggaagggttgtgggggggtgtgtggcccacccacattcctggccctggcaagtcagtcttagaacaaggtttggaatgcacttctgtggaggcaccttgatatccccagagtgggtgttgactgctgcccactgcttggagaagtccccaaggccttcatcctacaaggtcatcctgggtgcacaccaagaagtgaatctcgaaccgcatgttcaggaaatagaagtgtctaggctgttcttggagcccacacgaaaagatattgccttgctaaagctaagcagtcctgccgtcatcactgacaaagtaatcccagcttgtctgccatccccaaattatgtggtcgctgaccggaccgaatgtttcatcactggctggggagaaacccaaggtacttttggagctggccttctcaaggaagcccagctccctgtgattgagaataaagtgtgcaatcgctatgagtttctgaatggaagagtccaatccaccgaactctgtgctgggcatttggccggaggcactgacagttgccagggtgacagtggaggtcctctggtttgcttcgagaaggacaaatacattttacaaggagtcacttcttggggtcttggctgtgcacgccccaataagcctggtgtctatgttcgtgtttcaaggtttgttacttggattgagggagtgatgagaaataattaattggacgggagacagagtgacgcactgactcacctagaggctgggacgtgggtagggatttagcatgctggaaataactggcagtaatcaaacgaagacactgtccccagctaccagctacgccaaacctcggcattttttgtgttattttctgactgctggattctgtagtaaggtgacatagctatgacatttgttaaaaataaactctgtacttaactttgatttgagtaaattttggtttt

SEQ ID NO: 11991 - DNA, 2315 bp, Homo sapiens
tgtgctgtgggaggtggagttgcctttgatgcaaatcctttgagccagcagaacatctgtggaacatcccctgatacatgaagctctctccccagccttcatgtgttaacctggggatgatgtggacctgggcactgtggatgctcccttcactctgcaaattcagcctggcagctctgccagctaagcctgagaacatttcctgtgtctactactataggaaaaatttaacctgcacttggagtccaggaaaggaaaccagttatacccagtacacagttaagagaacttacgcttttggagaaaaacatgataattgtacaaccaatagttctacaagtgaaaatcgtgcttcgtgctcttttttccttccaagaataacgatcccagataattataccattgaggtggaagctgaaaatggagatggtgtaattaaatctcatatgacatactggagattagagaacatagcgaaaactgaaccacctaagattttccgtgtgaaaccagttttgggcatcaaacgaatgattcaaattgaatggataaagcctgagttggcgcctgtttcatctgatttaaaatacacacttcgattcaggacagtcaacagtaccagctggatggaagtcaacttcgctaagaaccgtaaggataaaaaccaaacgtacaacctcacggggctgcagccttttacagaatatgtcatagctctgcgatgtgcggtcaaggagtcaaagttctggagtgactggagccaagaaaaaatgggaatgactgaggaagaagctccatgtggcctggaactgtggagagtcctgaaaccagctgaggcggatggaagaaggccagtgcggttgttatggaagaaggcaagaggagccccagtcctagagaaaacacttggctacaacatatggtactatccagaaagcaacactaacctcacagaaacaatgaacactactaaccagcagcttgaactgcatctgggaggcgagagcttttgggtgtctatgatttcttataattctcttgggaagtctccagtggccaccctgaggattccagctattcaagaaaaatcatttcagtgcattgaggtcatgcaggcctgcgttgctgaggaccagctagtggtgaagtggcaaagctctgctctagacgtgaacacttggatgattgaatggtttccggatgtggactcagagcccaccaccctttcctgggaatctgtgtctcaggccacgaactggacgatccagcaagataaattaaaacctttctggtgctataacatctctgtgtatccaatgttgcatgacaaagttggcgagccatattccatccaggcttatgccaaagaaggcgttccatcagaaggtcctgagaccaaggtggagaacattggcgtgaagacggtcacgatcacatggaaagagattcccaagagtgagagaaaggggatcatctgcaactacaccatcttttaccaagctgaaggtggaaaaggattctccaagacagtcaattccagcatcttgcagtacggcctggagtccctgaaacgaaagacctcttacattgttcaggtcatggccagcaccagtgctgggggaaccaacgggaccagcataaatttcaagacattgtcattcagtgtctttgagattatcctcataacttctctgattggtggaggccttcttattctcattatcctgacagtggcatatggtctcaaaaaacccaacaaattgactcatctgtgttggcccaccgttcccaaccctgctgaaagtagtatagccacatggcatggagatgatttcaaggataagctaaacctgaaggagtctgatgactctgtgaacacagaagacaggatcttaaaaccatgttccacccccagtgacaagttggtgattgacaagttggtggtgaactttgggaatgttctgcaagaaattttcacagatgaagccagaacgggtcaggaaaacaatttaggaggggaaaagaatgggtatgtgacctgccccttcaggcctgattgtcccctggggaaaagttttgaggagctcccagtttcacctgagattccgcccagaaaatcccaatacctacgttcgaggatgccagaggggacccgcccagaagccaaagagcagcttctcttttctggtcaaagtttagtaccagatcatctgtgtgaggaaggagccccaaatccatatttgaaaaattcagtgacagccagggaatttcttgtgtctgaaaaacttccagagcacaccaagggagaagtctaa

SEQ ID NO: 11992 - DNA, 3621 bp, Homo sapiens
cccacagggggaccggccctgtgacccctcaccggggccgtgggcccgagccccggacttccctaagccggcaatgaccgcctgcgcccgccgagcgggtgggcttccggaccccgggctctgcggtcccgcgtggtgggctccgtccctgccccgcctcccccgggccctgccccggctcccgctcctgctgctcctgcttctgctgcagccccccgccctctccgccgtgttcacggtgggggtcctgggcccctgggcttgcgaccccatcttctctcgggctcgcccggacctggccgcccgcctggccgccgcccgcctgaaccgcgaccccggcctggcaggcggtccccgcttcgaggtagcgctgctgcccgagccttgccggacgccgggctcgctgggggccgtgtcctccgcgctggcccgcgtgtcgggcctcgtgggtccggtgaaccctgcggcctgccggccagccgagctgctcgccgaagaagccgggatcgcgctggtgccctggggctgcccctggacgcaggcggagggcaccacggcccctgccgtgacccccgccgcggatgccctctacgccctgcttcgcgcattcggctgggcgcgcgtggccctggtcaccgccccccaggacctgtgggtggaggcgggacgctcactgtccacggcactcagggcccgggggctgcctgtcgcctccgtgacttccatggagcccttggacctgtctggagcccgggaggccctgaggaaggttcgggacgggcccagggtcacagcagtgatcatggtgatgcactcggtgctgctgggtggcgaggagcagcgctacctcctggaggccgcagaggagctgggcctgaccgatggctccctggtcttcctgcccttcgacacgatccactacgccttgtccccaggcccggaggccttggccgcactcgccaacagctcccagcttcgcagggcccacgatgccgtgctcaccctcacgcgccactgtccctctgaaggcagcgtgctggacagcctgcgcagggctcaagagcgccgcgagctgccctctgacctcaatctgcagcaggtctccccactctttggcaccatctatgacgcggtcttcttgctggcaaggggcgtggcagaagcgcgggctgccgcaggtggcagatgggtgtccggagcagctgtggcccgccacatccgggatgcgcaggtccctggcttctgcggggacctaggaggagacgaggagcccccattcgtgctgctagacacggacgcggcgggagaccggctttttgccacatacatgctggatcctgcccggggctccttcctctccgccggtacccggatgcacttcccgcgtgggggatcagcacccggacctgacccctcgtgctggttcgatccaaacaacatctgcggtggaggactggagccgggcctcgtctttcttggcttcctcctggtggttgggatggggctggctggggccttcctggcccattatgtgaggcaccggctacttcacatgcaaatggtctccggccccaacaagatcatcctgaccgtggacgacatcacctttctccacccacatgggggcacctctcgaaaggtggcccaggggagtcgatcaagtctgggtgcccgcagcatgtcagacattcgcagcggccccagccaacacttggacagccccaacattggtgtctatgagggagacagggtttggctgaagaaattcccaggggatcagcacatagctatccgcccagcaaccaagacggccttctccaagctccaggagctccggcatgagaacgtggccctctacctggggcttttcctggctcggggagcagaaggccctgcggccctctgggagggcaacctggctgtggtctcagagcactgcacgcggggctctcttcaggacctcctcgctcagagagaaataaagctggactggatgttcaagtcctccctcctgctggaccttatcaagggaataaggtatctgcaccatcgaggcgtggctcatgggcggctgaagtcacggaactgcatagtggatggcagattcgtactcaagatcactgaccacggccacgggagactgctggaagcacagaaggtgctaccggagcctcccagagcggaggaccagctgtggacagccccggagctgcttagggacccagccctggagcgccggggaacgctggccggcgacgtctttagcttggccatcatcatgcaagaagtagtgtgccgcagtgccccttatgccatgctggagctcactcccgaggaagtggtgcagagggtgcggagcccccctccactgtgtcggcccttggtgtccatggaccaggcacctgtcgagtgtatcctcctgatgaagcagtgctgggcagagcagccggaacttcggccctccatggaccacaccttcgacctgttcaagaacatcaacaagggccggaagacgaacatcattgactcgatgcttcggatgctggagcagtactctagtaacctggaggatctgatccgggagcgcacggaggagctggagctggaaaagcagaagacagaccggctgcttacacagatgctgcctccgtctgtggctgaggccttgaagacggggacaccagtggagcccgagtactttgagcaagtgacactgtactttagtgacattgtgggcttcaccaccatctctgccatgagtgagcccattgaggttgtggacctgctcaacgatctctacacactctttgatgccatcattggttcccacgatgtctacaaggtggagacaataggggacgcctatatggtggcctcggggctgccccagcggaatgggcagcgacacgcggcagagatcgccaacatgtcactggacatcctcagtgccgtgggcactttccgcatgcgccatatgcctgaggttcccgtgcgcatccgcataggcctgcactcgggtccatgcgtggcaggcgtggtgggcctcaccatgccgcggtactgcctgtttggggacacggtcaacaccgcctcgcgcatggagtccaccgggctgccttaccgcatccacgtgaacttgagcactgtggggattctccgtgctctggactcgggctaccaggtggagctgcgaggccgcacggagctgaagggcaagggcgccgaggacactttctggctagtgggcagacgcggcttcaacaagcccatccccaaaccgcctgacctgcaaccggggtccagcaaccacggcatcagcctgcaggagatcccacccgagcggcgacggaagctggagaaggcgcggccgggccagttctcttgagaagtgaggcccggccccggacagggtctgggccctgctccctgtcccatctgcagtggaccccaggcacccccctttgaggaggtggggtgaactgctccttggcagggatttgtgacactgcattgctgggctgtgttcctcgggctcttctggaccttgcaccgtggataccaggccatgtgccatggtatttgggtcctgggagggtgggtgaaataaaggcatactgtctt

SEQ ID NO: 11993 - DNA, 6873 bp, Homo sapiens
ggtacagcccgcgccgcctctgctgcagccgctgccgtctactccttgcgcgctggcactccgcagcctttaaggttcgcgcgggggccaggcaagagttagccatgaagagcctcaagtcccgcctgaggaggcaggacgtgcccggccccgcgtcgtctggcgccgccgccgccagcgcgcatgcagcagattggaataaatatgatgaccgattgatgaaagcagcagaaaggggggatgtagaaaaagtgacctcaatccttgctaaaaagggggtcaatccaggcaaactagatgtggaaggcagatctgtcttccatgttgtgacctcaaaggggaatcttgagtgtttgaatgccatccttatacatggagttgatattacaaccagtgacactgcagggagaaatgctcttcacctggctgctaagtatggacatgcattgtgcctacaaaaacttctacagtacaattgtcccactgagcatgcagacctgcagggaagaactgcacttcacgatgccgcaatggcagattgtccttctagcatacagctgctttgtgaccatggggcctctgtgaatgccaaagatgtagacgggcggacaccacttgttctggctactcagatgagtaggccaacaatatgtcaactgctgatagatagaggagcggatgttaattccagagacaaacaaaacagaactgccctcatgctaggttgcgaatatggttgcagagatgcagtagaagtcttaattaaaaatggtgctgatataagcttgctggatgcgcttggccatgatagttcttactatgcaagaattggtgacaatctggacattctaaccttgttgaagactgcatcggaaaataccaacaaagggagagaactttggaagaaagggccatctttgcaacagcgaaatttgacacacatgcaagatgaagtaaatgtgaagtcacatcagagggagcatcaaaatattcaggatttggagattgaaaatgaagatttgaaagagaggttgagaaaaattcagcaagaacaaagaatacttttggataaagtcaatggtttacagttacagctgaatgaggaagttatggttgctgatgatctggaaagcgagagagaaaagctgaagtcccttttggcagctaaagaaaagcaacatgaagaaagcttaaggactattgaggctctgaaaaatagatttaaatattttgagagtgatcatttaggatcaggaagtcatttcagtaaccgaaaagaagatatgcttcttaaacaaggtcagatgtatatggcagactcacagtgtacttccccaggtataccagcccatatgcaaagcagatctatgttaagacctctggaactatctttacccagtcaaacgtcatactctgaaaatgaaattttaaagaaagagttagaagcaatgcgaactttctgtgagtcagcaaaacaagaccgactgaagctccaaaatgaactggcacacaaagtggcagaatgcaaagctttagcattagaatgtgaaagggtcaaggaggattcagatgaacagataaagcaattagaagatgcattaaaagatgtgcagaagaggatgtatgagtcagaaggtaaagttaaacaaatgcagacccattttcttgcccttaaagaacacttaacaagtgaagcagcctcagggaatcacagactaaccgaggaactgaaggatcagttgaaagacttgaaagtaaaatatgaaggtgcttcagcagaagtggggaaattaagaaaccaaatcaaacaaaatgagatgatagtagaagagtttaagagggatgaaggcaagctgatagaagaaaataagcgattacagaaggaacttagtatgtgtgaaatggagcgagagaagaaaggaagaaaggtcacagagatggaaggccaggcaaaagaattgtcagcgaagttggccctttccattccagctgaaaaatttgaaaacatgaagagctcattatcaaatgaagtgaatgagaaagcaaaaaaattagtagaaatggaaagagaacatgaaaaatcacttagtgaaattagacagttaaagagagaacttgagaatgttaaggccaagcttgctcagcacgtcaaaccagaggaacatgaacaggttaagagcagattagaacagaaatcaggagaacttgggaagaagatcactgagttaacattgaaaaatcagacactacaaaaggaaattgaaaaagtttatttggataataagctcctcaaggagcaagcacataacttaacaattgaaatgaaaaatcattatgttcctttaaaagtaagtgaagacatgaaaaagtcacatgatgcaattattgatgatcttaatagaaagcttttagatgtaacacaaaaatatacagaaaagaagttggaaatggagaaattgctactggaaaatgacagcttaagtaaggatgtaagccgcctagaaactgtgtttgtacctcctgagaaacatgaaaaagagataatagctctgaaatccaatattgttgaacttaagaaacagctgtctgaacttaagaaaaaatgtggtgaagaccaggagaaaatacacgctctcacatctgaaaacactaacttgaagaagatgatgagtaatcagtatgtgccagttaaaacccatgaagaggttaaaatgacactgaatgacacgttagccaaaactaacagagaattattagatgtgaagaaaaaatttgaagatataaatcaggaatttgtaaaaataaaagataagaatgaaatattaaaaagaaacctggaaaacactcagaaccaaataaaagctgagtacatcagcctggcagagcacgaggcaaagatgagctcgctaagtcagagcatgagaaaggtgcaggatagtaatgctgaaatcttggccaactacagaaaaggccaagaagagattgtgacactgcatgccgaaattaaagcccagaagaaggagctcgacacaatacaagaatgcattaaggtaaaatacgccccaattgtcagctttgaggagtgcgagagaaaatttaaagcaacagagaaagaactaaaagaccagttatcagagcagacacaaaagtatagtgtcagtgaagaagaagtcaagaaaaacaagcaagagaatgacaagttaaagaaggagatttttacccttcagaaagatttgagagataagacagttctcattgagaagtctcatgaaatggaaagagcattaagcagaaaaacagacgagctaaacaaacagttaaaagacttgtcacagaaatacacggaagtaaagaatgtgaaagagaagctagtagaagaaaatgccaaacagacttctgagatacttgcagtgcaaaatcttttgcaaaaacaacatgttccattggaacaggttgaggctctgaaaaaatctcttaatggcacaattgaaaatctaaaggaagaactgaagagtatgcaaaggtgttacgagaaagagcagcagacagtgaccaaactgcatcaattgttggagaatcaaaagaactcttctgtacccctggcagagcatttgcagattaaagaagcatttgagaaagaagttggaatcataaaagccagcttgagagaaaaggaagaagaaagccaaaacaaaatggaagaagtctccaaacttcagtcggaggttcagaatactaaacaagcattaaaaaaattagagactagagaggtagttgacttgtctaaatataaagcaacaaaaagtgatttggagacacagatttctagcttaaatgaaaaattggccaatctgaatagaaagtatgaggaagtatgtgaggaagttttgcatgccaaaaagaaggaaatatctgcaaaagatgagaaggaattactgcatttcagcattgagcaagaaattaaggatcagaaggaacgatgtgataagtccttaacaacaatcacagagttacaaagaagaatacaagaatctgctaaacaaatagaagcaaaagataataagataactgaactgcttaatgatgtggaaagattaaaacaggcactcaatggcctttcccaactcacctacacaagtgggaaccccaccaagaggcagagccagctgattgacactctgcagcaccaagtgaaatctctggagcaacagctggccgatgctgacagacagcaccaagaagtaattgcaatttatcggacacaccttcttagtgctgcacagggtcacatggatgaagatgttcaggaggctctgctccagatcatacaaatgcggcaggggcttgtgtgctagccgttagcactgactgccagtatctgttttatcttgctggtgctgaacattctttgtgcaactccatggtctttctgggccttactgtgctggtataattaaaataaaatatattttgttctattggtaggtttttttttaaaattagatgaatatgttagtctttttcaatatcagtttgaatcttattttctgtatgtgttaattttacaaataggcaaacaacataactttgccctggattgactacatatttttaaaccttcaagtccctaataaaacatgagccatctgagtgagtccatatgaagcgaggttaggctgaaataattgcttaaagatgtctttcagagaaattaatttggttggtggccacttttaggtggatcaaaagacctttcagatcctcagaaccttgagacataatacagttgtgaggaatgtgttgtaacttggctggccaagttacatgttacagtatctttactgaggtaacttcattagtgtctttggccttttttgtaggtatagatattttttctttttacactaataacttttatgccttttaaaataaatttattttcataaatggtttgcagtgctaaattacatttagattaagaacaggcaggggtggaatatatcaggaatttataataaaattgccttaatctctacaacagtatcttaatttttacttgcggtgactattcttgccacaatattggagaataatgatagatgatatactagatttttcaaagtgtgaaaacctttagactttttttagcaattagtttgacattcgctactatagtaaccaagcactcattatatatgcatcctccaaatgtttcatgcttatttataggaaagttatattaatgagattaataatgtgaaatacagttttcctgcaaaattagcattagagaattgattttagataacagatttttaaagttttagagaaaagtacagtaatacagtaaactgaaagagtatatagatagcaataaaataacataagtggacatgtttatagtaaatactctgaagtaaacaaccgtttttattaactgcatctcattagggaaagtttatatgtcttgttattttttattaacattttatttaccattcagagtgaaaattactaatttgagtattaacaaataactgaataaatggatcattacagttaggttttctcaaattgcaaaatttgccttagcaattatctttgaacatcccgaaccagatttttaaatcccatttttgtttaatagggtaaaaataccatcaaaatgacttctcataccaaagaataagccatcatattttttcggtgttgaaacaacattgaaagtcagaattggatttgtttttaattctttatacggtttacataagcaatatctgtctctttaattattatgattaatgtcgtccttcagcatgagttctgtttcacaagttttgggccacctatttcaataaaaaataaaatataaattaaaaaagttgccgggggtggtggctcatgcctgtaatcccagcactttgggaggctgagggaggtagatcacctgaggtcagaagttcgagaccagccttaccaatatggtgaagccccatctctactaaaaatacaaaaattagccctgcatggtggcaggtgcctgtagtcccaggtactcgggaggctgagacaggagaatcgcttgaacctgggaggcggaggttgcagtgagccaagatctcgccactgcactccagcttgggcaatagcaagactccatctcaaaataaaataaaataaaacttagagcaaagtttaaaactgagtattcatattaagtgttttattttccatattagagatgggaagggaaccttatgtgtattttattttgttttcaaccatcaataaagttttctctagaatattgttttgaacatccttgtaaaagatttgcgagttaaactattttatttactgtctgtgagagcattgggagtaggaaacgatggactccaaagtacaagggagaatacccattttcattcagctatctggagtaaaatatcaagtacttccttcaactaatcttgtctcattcactcaccttttgatatcgaaggcagaaattgcgtttacaacactgaagaccaaagctttttaattagtaaacaagcggaacatagataatggacaatgctggccactgccattctgtgttcagaaagactatgagacctgaacatatggccaagaggaaagaagagtgacgttgtctaagatgtaatgagtgctctctgagagaatcactcaattcctattggagtgcaatccttacttgagaactttattactcttgttctgtgtagttttttttttttgtcacttccccatcagaaaagcatattctttttgatagagggtcagtgttataaataattgtcttttgaaataaaatcaaatattcatgcattgaaaaaaaaaaaaaaaaaa

SEQ ID NO: 11994 - DNA, 3417 bp, Homo sapiens
cggaggcagcgagaaagcgcagccaggcggctgctcggcgttctctcaggtgactgctcggagttctcccagtgtttggtgttgcaagcaggatccaaaggagacctatagtgactcccaggagctcttagtgaccaagtgaaggtacctgtggggctcattgtgcccattgctctttcactgctttcaactggtagttgtgggttgaagcactggacaatgccacatactttgtggatggtgtgggtcttgggggtcatcatcagcctctccaaggaagaatcctccaatcaggcttctctgtcttgtgaccgcaatggtatctgcaagggcagctcaggatctttaaactccattccctcagggctcacagaagctgtaaaaagccttgacctgtccaacaacaggatcacctacattagcaacagtgacctacagaggtgtgtgaacctccaggctctggtgctgacatccaatggaattaacacaatagaggaagattctttttcttccctgggcagtcttgaacatttagacttatcctataattacttatctaatttatcgtcttcctggttcaagcccctttcttctttaacattcttaaacttactgggaaatccttacaaaaccctaggggaaacatctcttttttctcatctcacaaaattgcaaatcctgagagtgggaaatatggacaccttcactaagattcaaagaaaagattttgctggacttaccttccttgaggaacttgagattgatgcttcagatctacagagctatgagccaaaaagtttgaagtcaattcagaatgtaagtcatctgatccttcatatgaagcagcatattttactgctggagatttttgtagatgttacaagttccgtggaatgtttggaactgcgagatactgatttggacactttccatttttcagaactatccactggtgaaacaaattcattgattaaaaagtttacatttagaaatgtgaaaatcaccgatgaaagtttgtttcaggttatgaaacttttgaatcagatttctggattgttagaattagagtttgatgactgtacccttaatggagttggtaattttagagcatctgataatgacagagttatagatccaggtaaagtggaaacgttaacaatccggaggctgcatattccaaggttttacttattttatgatctgagcactttatattcacttacagaaagagttaaaagaatcacagtagaaaacagtaaagtttttctggttccttgtttactttcacaacatttaaaatcattagaatacttggatctcagtgaaaatttgatggttgaagaatacttgaaaaattcagcctgtgaggatgcctggccctctctacaaactttaattttaaggcaaaatcatttggcatcattggaaaaaaccggagagactttgctcactctgaaaaacttgactaacattgatatcagtaagaatagttttcattctatgcctgaaacttgtcagtggccagaaaagatgaaatatttgaacttatccagcacacgaatacacagtgtaacaggctgcattcccaagacactggaaattttagatgttagcaacaacaatctcaatttattttctttgaatttgccgcaactcaaagaactttatatttccagaaataagttgatgactctaccagatgcctccctcttacccatgttactagtattgaaaatcagtaggaatgcaataactacgttttctaaggagcaacttgactcatttcacacactgaagactttggaagctggtggcaataacttcatttgctcctgtgaattcctctccttcactcaggagcagcaagcactggccaaagtcttgattgattggccagcaaattacctgtgtgactctccatcccatgtgcgtggccagcaggttcaggatgtccgcctctcggtgtcggaatgtcacaggacagcactggtgtctggcatgtgctgtgctctgttcctgctgatcctgctcacgggggtcctgtgccaccgtttccatggcctgtggtatatgaaaatgatgtgggcctggctccaggccaaaaggaagcccaggaaagctcccagcaggaacatctgctatgatgcatttgtttcttacagtgagcgggatgcctactgggtggagaaccttatggtccaggagctggagaacttcaatccccccttcaagttgtgtcttcataagcgggacttcattcctggcaagtggatcattgacaatatcattgactccattgaaaagagccacaaaactgtctttgtgctttctgaaaactttgtgaagagtgagtggtgcaagtatgaactggacttctcccatttccgtctttttgatgagaacaatgatgctgccattctcattcttctggagcccattgagaaaaaagccattccccagcgcttctgcaagctgcggaagataatgaacaccaagacctacctggagtggcccatggacgaggctcagcgggaaggattttgggtaaatctgagagctgcgataaagtcctaggttcccatatttaagaccagtctttgtctagttgggatctttatgtcactagttatagttaagttcattcagacataattatataaaaactacgtggatgtaccgtcatttgaggacttgcttactaaaactacaaaacttcaaattttgtctggggtgctgttttataaacatatgccagatttaaaaattggtttttggtttttcttttttctatgagataaccatgatcataagtctattactgatatctgaatatagtcccttggtatccaagggaattggttgcaggatcctcgtggatatcaaaattcatagatgatcaagtcccttataagagtggcatagtatttgcatataacctgtgtacattctcctgtatactttaaatcatctctagattacttatgatacccaatacaatgtaaatactatgtaaatagttgtactgtctttttatttatattattattgttattttttattttcaaaatttttaaaacatacttttgatccacagttggttgacttcatggatgcagaacccatggatatagagggccaactgtaatctgtagcaactggcttagttcattaggaaacagcacaaatgaacttaagattctcaatgactgtgtcattctttcttcctgctaagagactcctctgtggccacaaaaggcattctctgtcctacctagctgtcacttctctgtgcagctgatctcaagagcaacaaggcaaagtatttggggcactccccaaaacttgttgctattcctagaaaaaagtgctgtgtatttcctattaaactttacaggatgagaaaaaaaaaaaaaaaaa

SEQ ID NO: 11995 - DNA, 1593 bp, Homo sapiens
cgcgtgggcgtgcctgtctgctccggcagcaccatgtcgctcttgttcgtcagcatggcgtgtgttgggttcttcttgctgcagggggcctggccacatgagggagtccacagaaaaccttccctcctggcccacccaggtcccctggtgaaatcagaagagacagtcatcctgcaatgttggtcagatgtcatgtttgaacacttccttctgcacagagaggggatgtttaacgacactttgcgcctcattggagaacaccatgatggggtctccaaggccaacttctccatcagtcgcatgacgcaagacctggcagggacctacagatgctacggttctgttactcactccccctatcaggtgtcagctcccagtgaccctctggacatcgtgatcataggtctatatgagaaaccttctctctcagcccagccgggccccacggttctggcaggagagaatgtgaccttgtcctgcagctcccggagctcctatgacatgtaccatctatccagggaaggggaggcccatgaacgtaggctccctgcagggcccaaggtcaacggaacattccaggctgactttcctctgggccctgccacccacggagggacctacagatgcttcggctctttccatgactctccatacgagtggtcaaagtcaagtgacccactgcttgtttctgtcacaggaaacccttcaaatagttggccttcacccactgaaccaagctccaaaaccggtaacccccgacacctgcacattctgattgggacctcagtggtcatcatcctcttcatcctcctcttctttctccttcatcgctggtgctccaacaaaaaaaatgctgcggtaatggaccaagagtctgcaggaaacagaacagcgaatagcgaggactctgatgaacaagaccctcaggaggtgacatacacacagttgaatcactgcgttttcacacagagaaaaatcactcgcccttctcagaggcccaagacacccccaacagatatcatcgtgtacacggaacttccaaatgctgagtccagatccaaagttgtctcctgcccatgagcaccacagtcaggccttgagggcgtcttctagggagacaacagccctgtctcaaaaccgggttgccagctcccatgtaccagcagctggaatctgaaggcatgagtctgcatcttagggcatcgatcttcctcacaccacaaatctgaatgtgcctctcacttgcttacaaatgtctaaggtccccactgcctgctggagaaaaaacacactcctttgcttagcccacagttctccatttcacttgacccctgcccacctctccaacctaactggcttacttcctagtctacttgaggctgcaatcacactgaggaactcacaattccaaacatacaagaggctccctcttaacgcagcacttagacacgtgttgttccaccttccctcatgctgttccacctcccctcagactagctttcagtcttctgtcagcagtaaaacttatatattttttaaaataacttcaatgtagttttccatccttcaaataaacatgtctgcccccatggt

SEQ ID NO: 11996 - DNA, 1101 bp, Homo sapiens
caccggcagcaccatgtcgctcacggtcgtcagcatggcgtgtgttgggttcttcttgctgcagggggcctggccacatgagggagtccacagaaaaccttccctcctggcccacccaggtcgcctggtgaaatcagaagagacagtcatcctgcaatgttggtcagatgtcatgtttgaacacttccttctgcacagagaggggatgtttaacgacactttgcgcctcattggagaacaccatgatggggtctccaaggccaacttctccatcagtcgcatgaagcaagacctggcagggacctacagatgctacggttctgttactcactccccctatcagttgtcagctcccagtgaccctctggacatcgtgatcataggtctatatgagaaaccttctctctcagcccagccgggccccacggttctggcaggagagaatgtgaccttgtcctgcagctcccggagctcctatgacatgtaccatctatccagggaaggggaggcccatgaacgtaggctccctgcagggaccaaggtcaacggaacattccaggccaactttcctctgggccctgccacccatggagggacctacagatgcttcggctctttccgtgactctccatacgagtggtcaaagtcaagtgacccactgcttgtttctgtcacaggaaacccttcaaatagttggccttcacccactgaaccaagctccgaaaccggtaaccccagacacctacatgttctgattgggacctcagtggtcaaaatccctttcaccatcctcctcttctttctccttcatcgctggtgctccgacaaaaaaaatgctgctgtaatggaccaagagcctgcagggaacagaacagtgaacagcgaggattctgatgaacaagaccatcaggaggtgtcatacgcataattggatcactgtgttttcacacagagaaaaatcactcgcccttctgagaggcccaagacacccccaacagataccagcatgtacatagaacttccaaatgctgagcccagatccaaagttgtcttctgtccacgagcaccacagtcaggccttgaggggatcttctagggaga

SEQ ID NO: 11997 - DNA, 2663 bp, Homo sapiens
tgcagctgggagcgcacagacggctgccccgcctgagcgaggcgggcgccgccgcgatgctgcgaggcggacggcgcgggcagcttggctggcacagctgggctgcggggccgggcagcctgctggcttggctgatactggcatctgcgggcgccgcaccctgccccgatgcctgctgcccccacggctcctcgggactgcgatgcacccgggatggggccctggatagcctccaccacctgcccggcgcagagaacctgactgagctctacatcgagaaccagcagcatctgcagcatctggagctccgtgatctgaggggcctgggggagctgagaaacctcaccatcgtgaagagtggtctccgtttcgtggcgccagatgccttccatttcactcctcggctcagtcgcctgaatctctccttcaacgctctggagtctctctcctggaaaactgtgcagggcctctccttacaggaactggtcctgtcggggaaccctctgcactgttcttgtgccctgcgctggctacagcgctgggaggaggagggactgggcggagtgcctgaacagaagctgcagtgtcatgggcaagggcccctggcccacatgcccaatgccagctgtggtgtgcccacgctgaaggtccaggtgcccaatgcctcggtggatgtgggggacgacgtgctgctgcggtgccaggtggaggggcggggcctggagcaggccggctggatcctcacagagctggagcagtcagccacggtgatgaaatctgggggtctgccatccctggggctgaccctggccaatgtcaccagtgacctcaacaggaagaacgtgacgtgctgggcagagaacgatgtgggccgggcagaggtctctgttcaggtcaacgtctccttcccggccagtgtgcagctgcacacggcggtggagatgcaccactggtgcatccccttctctgtggatgggcagccggcaccgtctctgcgctggctcttcaatggctccgtgctcaatgagaccagcttcatcttcactgagttcctggagccggcagccaatgagaccgtgcggcacgggtgtctgcgcctcaaccagcccacccacgtcaacaacggcaactacacgctgctggctgccaaccccttcggccaggcctccgcctccatcatggctgccttcatggacaaccctttcgagttcaaccccgaggaccccatccctgtctccttctcgccggtggacactaacagcacatctggagacccggtggagaagaaggacgaaacaccttttggggtctcggtggctgtgggcctggccgtctttgcctgcctcttcctttctacgctgctccttgtgctcaacaaatgtggacggagaaacaagtttgggatcaaccgcccggctgtgctggctccagaggatgggctggccatgtccctgcatttcatgacattgggtggcagctccctgtcccccaccgagggcaaaggctctgggctccaaggccacatcatcgagaacccacaatacttcagtgatgcctgtgttcaccacatcaagcgccgggacatcgtgctcaagtgggagctgggggagggcgcctttgggaaggtcttccttgctgagtgccacaacctcctgcctgagcaggacaagatgctggtggctgtcaaggcactgaaggaggcgtccgagagtgctcggcaggacttccagcgtgaggctgagctgctcaccatgctgcagcaccagcacatcgtgcgcttcttcggcgtctgcaccgagggccgccccctgctcatggtctttgagtatatgcggcacggggacctcaaccgcttcctccgatcccatggacctgatgccaagctgctggctggtggggaggatgtggctccaggccccctgggtctggggcagctgctggccgtggctagccaggtcgctgcggggatggtgtacctggcgggtctgcattttgtgcaccgggacctggccacacgcaactgtctagtgggccagggactggtggtcaagattggtgattttggcatgagcagggatatctacagcaccgactattaccgtgtgggaggccgcaccatgctgcccattcgctggatgccgcccgagagcatcctgtaccgtaagttcaccaccgagagcgacgtgtggagcttcggcgtggtgctctgggagatcttcacctacggcaagcagccctggtaccagctctccaacacggaggcaatcgactgcatcacgcagggacgtgagttggagcggccacgtgcctgcccaccagaggtctacgccatcatgcggggctgctggcagcgggagccccagcaacgccacagcatcaaggatgtgcacgcccggctgcaagccctggcccaggcacctcctgtctacctggatgtcctgggctagggggccggcccaggggctgggagtggttagccggaatactggggcctgccctcagcatcccccatagctcccagcagccccagggtgatctcaaagtatctaattcaccctcagcatgtgggaagggacaggtgggggctgggagtagaggatgttcctgcttctctaggcaaggtcccgtcatagcaattatatttattatcccttgaaaaaaaa

SEQ ID NO: 11998 - DNA, 4828 bp, Homo sapiens
agtggcgtcggaactgcaaagcacctgtgagcttgcggaagtcagttcagactccagcccgctccagcccggcccgacccgaccgcacccggcgcctgccctcgctcggcgtccccggccagccatgggcccttggagccgcagcctctcggcgctgctgctgctgctgcaggtctcctcttggctctgccaggagccggagccctgccaccctggctttgacgccgagagctacacgttcacggtgccccggcgccacctggagagaggccgcgtcctgggcagagtgaattttgaagattgcaccggtcgacaaaggacagcctatttttccctcgacacccgattcaaagtgggcacagatggtgtgattacagtcaaaaggcctctacggtttcataacccacagatccatttcttggtctacgcctgggactccacctacagaaagttttccaccaaagtcacgctgaatacagtggggcaccaccaccgccccccgccccatcaggcctccgtttctggaatccaagcagaattgctcacatttcccaactcctctcctggcctcagaagacagaagagagactgggttattcctcccatcagctgcccagaaaatgaaaaaggcccatttcctaaaaacctggttcagatcaaatccaacaaagacaaagaaggcaaggttttctacagcatcactggccaaggagctgacacaccccctgttggtgtctttattattgaaagagaaacaggatggctgaaggtgacagagcctctggatagagaacgcattgccacatacactctcttctctcacgctgtgtcatccaacgggaatgcagttgaggatccaatggagattttgatcacggtaaccgatcagaatgacaacaagcccgaattcacccaggaggtctttaaggggtctgtcatggaaggtgctcttccaggaacctctgtgatggaggtcacagccacagacgcggacgatgatgtgaacacctacaatgccgccatcgcttacaccatcctcagccaagatcctgagctccctgacaaaaatatgttcaccattaacaggaacacaggagtcatcagtgtggtcaccactgggctggaccgagagagtttccctacgtataccctggtggttcaagctgctgaccttcaaggtgaggggttaagcacaacagcaacagctgtgatcacagtcactgacaccaacgataatcctccgatcttcaatcccaccacgtacaagggtcaggtgcctgagaacgaggctaacgtcgtaatcaccacactgaaagtgactgatgctgatgcccccaataccccagcgtgggaggctgtatacaccatattgaatgatgatggtggacaatttgtcgtcaccacaaatccagtgaacaacgatggcattttgaaaacagcaaagggcttggattttgaggccaagcagcagtacattctacacgtagcagtgacgaatgtggtaccttttgaggtctctctcaccacctccacagccaccgtcaccgtggatgtgctggatgtgaatgaagcccccatctttgtgcctcctgaaaagagagtggaagtgtccgaggactttggcgtgggccaggaaatcacatcctacactgcccaggagccagacacatttatggaacagaaaataacatatcggatttggagagacactgccaactggctggagattaatccggacactggtgccatttccactcgggctgagctggacagggaggattttgagcacgtgaagaacagcacgtacacagccctaatcatagctacagacaatggttctccagttgctactggaacagggacacttctgctgatcctgtctgatgtgaatgacaacgcccccataccagaacctcgaactatattcttctgtgagaggaatccaaagcctcaggtcataaacatcattgatgcagaccttcctcccaatacatctcccttcacagcagaactaacacacggggcgagtgccaactggaccattcagtacaacgacccaacccaagaatctatcattttgaagccaaagatggccttagaggtgggtgactacaaaatcaatctcaagctcatggataaccagaataaagaccaagtgaccaccttagaggtcagcgtgtgtgactgtgaaggggccgccggcgtctgtaggaaggcacagcctgtcgaagcaggattgcaaattcctgccattctggggattcttggaggaattcttgctttgctaattctgattctgctgctcttgctgtttcttcggaggagagcggtggtcaaagagcccttactgcccccagaggatgacacccgggacaacgtttattactatgatgaagaaggaggcggagaagaggaccaggactttgacttgagccagctgcacaggggcctggacgctcggcctgaagtgactcgtaacgacgttgcaccaaccctcatgagtgtcccccggtatcttccccgccctgccaatcccgatgaaattggaaattttattgatgaaaatctgaaagcggctgatactgaccccacagccccgccttatgattctctgctcgtgtttgactatgaaggaagcggttccgaagctgctagtctgagctccctgaactcctcagagtcagacaaagaccaggactatgactacttgaacgaatggggcaatcgcttcaagaagctggctgacatgtacggaggcggcgaggacgactaggggactcgagagaggcgggccccagacccatgtgctgggaaatgcagaaatcacgttgctggtggtttttcagctcccttcccttgagatgagtttctggggaaaaaaaagagactggttagtgatgcagttagtatagctttatactctctccactttatagctctaataagtttgtgttagaaaagtttcgacttatttcttaaagcttttttttttttcccatcactctttacatggtggtgatgtccaaaagatacccaaattttaatattccagaagaacaactttagcatcagaaggttcacccagcaccttgcagattttcttaaggaattttgtctcacttttaaaaagaaggggagaagtcagctactctagttctgttgttttgtgtatataattttttaaaaaaaatttgtgtgcttctgctcattactacactggtgtgtccctctgcctttttttttttttttaagacagggtctcattctatcggccaggctggagtgcagtggtgcaatcacagctcactgcagccttgtcctcccaggctcaagctatccttgcacctcagcctcccaagtagctgggaccacaggcatgcaccactacgcatgactaattttttaaatatttgagacggggtctccctgtgttacccaggctggtctcaaactcctgggctcaagtgatcctcccatcttggcctcccagagtattgggattacagacatgagccactgcacctgcccagctccccaactccctgccattttttaagagacagtttcgctccatcgcccaggcctgggatgcagtgatgtgatcatagctcactgtaacctcaaactctggggctcaagcagttctcccaccagcctcctttttatttttttgtacagatggggtcttgctatgttgcccaagctggtcttaaactcctggcctcaagcaatccttctgccttggccccccaaagtgctgggattgtgggcatgagctgctgtgcccagcctccatgttttaatatcaactctcactcctgaattcagttgctttgcccaagataggagttctctgatgcagaaattattgggctcttttagggtaagaagtttgtgtctttgtctggccacatcttgactaggtattgtctactctgaagacctttaatggcttccctctttcatctcctgagtatgtaacttgcaatgggcagctatccagtgacttgttctgagtaagtgtgttcattaatgtttatttagctctgaagcaagagtgatatactccaggacttagaatagtgcctaaagtgctgcagccaaagacagagcggaactatgaaaagtgggcttggagatggcaggagagcttgtcattgagcctggcaatttagcaaactgatgctgaggatgattgaggtgggtctacctcatctctgaaaattctggaaggaatggaggagtctcaacatgtgtttctgacacaagatccgtggtttgtactcaaagcccagaatccccaagtgcctgcttttgatgatgtctacagaaaatgctggctgagctgaacacatttgcccaattccaggtgtgcacagaaaaccgagaatattcaaaattccaaattttttcttaggagcaagaagaaaatgtggccctaaagggggttagttgaggggtagggggtagtgaggatcttgatttggatctctttttatttaaatgtgaatttcaacttttgacaatcaaagaaaagacttttgttgaaatagctttactgtttctcaagtgttttggagaaaaaaatcaaccctgcaatcactttttggaattgtcttgatttttcggcagttcaagctatatcgaatatagttctgtgtagagaatgtcactgtagttttgagtgtatacatgtgtgggtgctgataattgtgtattttctttgggggtggaaaaggaaaacaattcaagctgagaaaagtattctcaaagatgcatttttataaattttattaaacaattttgttaaaccataaaaaaaaaaaaa

SEQ ID NO: 11999 - DNA, 3365 bp, Homo sapiens
ctggtccgtccaggctccttcccatcctcacacccgcgcctttctccctgcggccccggctcgctgctccagctgcccagctcttcccccgcccggccgcaccataaagcgcccggccgctgccgcggagcccagcagccagctccccagcaccgcacggcggggacgcgagcgcgcccccgacggcagcccggacgccgagcacgggtcacctgcggcgccggcccgggcgccgaccgaggttcaacgcacggcccggggacccccaggcggggccaacgccgccgtcgcccccggcctcgcggggagcaggaagagccaacatgctggccccgcgcggagccgccgtcctcctgctgcacctggtcctgcagcggtggctagcggcaggcgcccaggccaccccccaggtctttgaccttctcccatcttccagtcagaggctaaacccaggcgctctgctgccagtcctgacagaccccgccctgaatgatctctatgtgatttccaccttcaagctgcagactaaaagttcagccaccatcttcggtctttactcttcaactgacaacagtaaatattttgaatttactgtgatgggacgcttaaacaaagccatcctccgttacctgaagaacgatgggaaggtgcatttggtggttttcaacaacctgcagctggcagacggaaggcggcacaggatcctcctgaggctgagcaatttgcagcgaggggccggctccctagagctctacctggactgcatccaggtggattccgttcacaatctccccagggcctttgctggcccctcccagaaacctgagaccattgaattgaggactttccagaggaagccacaggacttcttggaagagctgaagctggtggtgagaggctcactgttccaggtggccagcctgcaagactgcttcctgcagcagagtgagccactggctgccacaggcacaggggactttaaccggcagttcttgggtcaaatgacacaattaaaccaactcctgggagaggtgaaggaccttctgagacagcaggttaaggaaacatcatttttgcgaaacaccatagctgaatgccaggcttgcggtcctctcaagtttcagtctccgaccccaagcacggtggtgcccccggctccccctgcaccgccaacacgcccacctcgtcggtgtgactccaacccatgtttccgaggtgtccaatgtaccgacagtagagatggcttccagtgtgggccctgccccgagggctacacaggaaacgggatcacctgtattgatgttgatgagtgcaaataccatccctgctacccgggcgtgcactgcataaatttgtctcctggcttcagatgtgacgcctgcccagtgggcttcacagggcccatggtgcagggtgttgggatcagttttgccaagtcaaacaagcaggtctgcactgacattgatgagtgtcgaaatggagcgtgcgttcccaactcgatctgcgttaatactttgggatcttaccgctgtgggccttgtaagccggggtatactggtgatcagataaggggatgcaaagcggaaagaaactgcagaaacccagagctgaacccttgcagtgtgaatgcccagtgcattgaagagaggcagggggatgtgacatgtgtgtgtggagtcggttgggctggagatggctatatctgtggaaaggatgtggacatcgacagttaccccgacgaagaactgccatgctctgccaggaactgtaaaaaggacaactgcaaatatgtgccaaattctggccaagaagatgcagacagagatggcattggcgacgcttgtgacgaggatgctgacggagatgggatcctgaatgagcaggataactgtgtcctgattcataatgtggaccaaaggaacagcgataaagatatctttggggatgcctgtgataactgcctgagtgtcttaaataacgaccagaaagacaccgatggggatggaagaggagatgcctgtgatgatgacatggatggagatggaataaaaaacattctggacaactgcccaaaatttcccaatcgtgaccaacgggacaaggatggtgatggtgtgggggatgcctgtgacagttgtcctgatgtcagcaaccctaaccagtctgatgtggataatgatctggttggggactcctgtgacaccaatcaggacagtgatggagatgggcaccaggacagcacagacaactgccccaccgtcattaacagtgcccagctggacaccgataaggatggaattggtgacgagtgtgatgatgatgatgacaatgatggtatcccagacctggtgccccctggaccagacaactgccggctggtccccaacccagcccaggaggatagcaacagcgacggagtgggagacatctgtgagtctgactttgaccaggaccaggtcatcgatcggatcgacgtctgcccagagaacgcagaggtcaccctgaccgacttcagggcttaccagaccgtggtcctggatcctgaaggggatgcccagatcgatcccaactgggtggtcctgaaccagggcatggagattgtacagaccatgaacagtgatcctggcctggcagtggggtacacagcttttaatggagttgacttcgaagggaccttccatgtgaatacccagacagatgatgactatgcaggctttatctttggctaccaagatagctccagcttctacgtggtcatgtggaagcagacggagcagacatattggcaagccaccccattccgagcagttgcagaacctggcattcagctcaaggctgtgaagtctaagacaggtccaggggagcatctccggaactccctgtggcacacgggggacaccagtgaccaggtcaggctgctgtggaaggactccaggaatgtgggctggaaggacaaggtgtcctaccgctggttcctacagcacaggccccaggtgggctacatcagggtacgattttatgaaggctctgagttggtggctgactctggcgtcaccatagacaccacaatgcgtggaggccgacttggcgttttctgcttctctcaagaaaacatcatctggtccaacctcaagtatcgctgcaatgacaccatccctgaggacttccaagagtttcaaacccagaatttcgaccgcttcgataattaaaccaaggaagcaatctgtaactgcttttcggaacactaaaaccatatatattttaacttcaattttctttagcttttaccaacccaaatatatcaaaacgttttatgtgaatgtggcaataaaggagaagagatcatttttaaaaaaaaaaaaaaa

SEQ ID NO: 12000 - DNA, 2427 bp, Homo sapiens
gagagaaggacggagtcgagtggcaccctagaagacgctctgtgccttcggaggtctttctgcctgcctgtcctcatgcctctcctcctcttgctgctcctgctgccaagccccttacacccccaccccatctgtgaggtctccaaagtggccagccacctagaagtgaactgtgacaagaggaatctgacagcgctgcctccagacctgccgaaagacacaaccatcctccacctgagtgagaacctcctgtacaccttctccctggcaaccctgatgccttacactcgcctcactcagctgaacctagataggtgcgagctcaccaagctccaggtcgatgggacgctgccagtgctggggaccctggatctatcccacaatcagctgcaaagcctgcccttgctagggcagacactgcctgctctcaccgtcctggacgtctccttcaaccggctgacctcgctgcctcttggtgccctgcgtggtcttggcgaactccaagagctctacctgaaaggcaatgagctgaagaccctgcccccagggctcctgacgcccacacccaagctggagaagctcagtctggctaacaacaacttgactgagctccccgctgggctcctgaatgggctggagaatctcgacacccttctcctccaagagaactcgctgtatacaataccaaagggcttttttgggtcccacctcctgccttttgcttttctccacgggaacccctggttatgcaactgtgagatcctctattttcgtcgctggctgcaggacaatgctgaaaatgtctacgtatggaagcaaggtgtggacgtcaaggccatgacctctaacgtggccagtgtgcagtgtgacaattcagacaagtttcccgtctacaaatacccaggaaaggggtgccccacccttggtgatgaaggtgacacagacctatatgattactacccagaagaggacactgagggcgataaggtgcgtgccacaaggactgtggtcaagttccccaccaaagcccatacaaccccctggggtctattctactcatggtccactgcttctctagacagccaaatgccctcctccttgcatccaacacaagaatccactaaggagcagaccacattcccacctagatggaccccaaatttcacacttcacatggaatccatcacattctccaaaactccaaaatccactactgaaccaaccccaagcccgaccacctcagagcccgtcccggagcccgccccaaacatgaccaccctggagcccactccaagcccgaccaccccagagcccacctcagagcccgcccccagcccgaccaccccggagcccaccccaatcccgaccatcgccacaagcccgaccatcctggtgtctgccacaagcctgatcactccaaaaagcacatttttaactaccacaaaacccgtatcactcttagaatccaccaaaaaaaccatccctgaacttgatcagccaccaaagctccgtggggtgctccaagggcatttggagagctccagaaatgacccttttctccaccccgacttttgctgcctcctccccctgggcttctatgtcttgggtctcttctggctgctctttgcctctgtggtcctcatcctgctgctgagctgggttgggcatgtgaaaccacaggccctggactctggccaaggtgctgctctgaccacagccacacaaaccacacacctggagctgcagaggggacggcaagtgacagtgccccgggcctggctgctcttccttcgaggttcgcttcccactttccgctccagcctcttcctgtgggtacggcctaatggccgtgtggggcctctagtggcaggaaggaggccctcagctctgagtcagggtcgtggtcaggacctgctgagcacagtgagcattaggtactctggccacagcctctgagggtgggaggtttggggaccttgagagaagagcctgtgggctctcctattggaatctagttgggggttggaggggtaaggaacacagggtgataggggaggggtcttagttcctttttctgtatcagaagccctgtcttcacaacacaggcacacaatttcagtcccagccaaagcagaaggggtaatgacatggacttggcggggggacaagacaaagctcccgatgctgcatggggcgctgccagatctcacggtgaaccattttggcagaatacagcatggttcccacatgcatctatgcacagaagaaaatctggaaagtgatttatcaggatgtgagcactcgttgtgtctggatgttacaaatatgggtggttttattttctttttccctgtttagcattttctagttttccactattattgtatattatctgtataataaaaaataattttagggttgggaaaa

SEQ ID NO: 12001 - DNA, 3995 bp, Homo sapiens
cgctctctgctcgcgcttgggctcgcgatggggaagaagtcccgggcggtacccggccgtaggcccatcctgcaactctctccgccgggtcctcggggcagcacgccgggccgggacccggagccggaacccgacactgagccggactcaaccgcggcggtccccagccagcccgccccgtcggcggcgacgaccaccgcggtgactgccgccgcggcctcggacgactcgccttcagaagatgaacaggaagcggtgcaggaggttcctagagttgttcagaatcctccaaaaccagtcatgaccactagacccacagctgttaaagcaacaggcggtctatgcttgcttggtgcttatgctgacagtgatgacgatgacaatgatgtttccgaaaaactagcacaatccaaagagacaaatggaaaccagtcaactgatattgatagtacattggccaacttcctagcggagatcgatgccataacagctcctcagcctgcagctcctgtaggagcttctgctccacctccaactccacctcgaccagagccaaaggaagcagcaacatctaccctttcttcttctacttcaaatggaacagactccacccaaacatctggttggcaatatgatactcagtgttcactggcaggagtcggaattgagatgggcgattggcaggaagtctgggatgagaacacgggatgttattattattggaatacacaaacaaatgaagtgacttgggagttaccccaatatcttgccacacaggtacagggattacagcattaccagcccagttctgtgccaggtgctgaaactagttttgtggtaaatacagacatatattctaaggagaaaacgatttctgtttccagtagtaaaagtggaccagtcatagccaagcgagaagttaaaaaggaagtaaatgaaggaattcaggctctctcaaatagtgaggaggagaagaaaggggtggcagcatcgctgcttgctcctttattgcctgagggaataaaagaagaagaagagagatggagaagaaaagtaatttgtaaagaggagccagtttcagaagtaaaagaaacaagtacaacagtagaagaagcaacaacaatagtaaagccacaggaaattatgttggacaatatagaagacccttctcaggaggatctttgcagtgttgtccaatctggagaaagtgaggaggaagaggaacaagatacccttgaactggagctagttttggaaaggaaaaaagcagagttgcgagccttggaggaaggagatggtagtgtgtcagggtctagtccacgttctgatatcagccagccagcatctcaagatggaatgcgtaggcttatgtctaaaagaggaaaatggaagatgtttgttcgagctaccagtccagaatctaccagtaggagttctagtaaaactggacgagatactccagaaaatggagaaactgcaattggtgctgaaaattcagaaaaaatagatgagaattcagataaagagatggaagtagaagaatctccagagaaaataaaagtacagacaacaccaaaagtagaagaagaacaggatttgaaatttcagattggagaactggcaaataccctgacaagtaaattcgagtttctaggcattaatagacaatccatctccaactttcatgtgctgctcttacagactgagactcgaattgcagactggcgggaaggggctcttaatggaaactaccttaaacgaaaacttcaggatgcagcagaacaactaaaacagtatgaaataaacgccactcctaaaggctggtcctgccactgggacagggatcatagacggtatttctatgtaaacgaacagtcgggcgagtctcagtgggagtttccagatggtgaagaggaagaagaagaaagccaagcacaagaaaatagagatgagactcttgccaaacagaccttgaaagacaaaactggcactgattcaaattcaacagaatcctctgaaacttccacaggttctctttgtaaagaatccttttctggtcaagtttcttcttcatcactcatgccacttactccattctggaccctccttcagtcaaatgttcctgtgcttcaacctccattacccttggaaatgccaccacccccacctccacctccagaatcacctccaccccctcctccaccacctcctcctgcggaagatggtgagatccaggaggtagagatggaggatgagggaagtgaggagccccctgccccaggaacagaggaagatacccctttgaaaccttcagcacaaaccacagttgtaactagccagagttcagttgattccaccatctctagttcttcttccactaaaggaataaagaggaaagctacagaaattagcactgcagtggttcagaggtcagctaccattggcagttctccagttctctatagccagtcagctatagctacaggtcaccaggcagcagggattggaaaccaggcaacaggaattggacatcagacaataccagttagccttccagcagcaggaatgggtcatcaggccagaggaatgagcctgcagtcaaattaccttggactagcggcagcacctgcaattatgagttatgcagaatgttctgtcccaattggagtgactgctccctcattgcagccagttcaggcccgaggtgctgtgcctaccgctaccattatagaaccaccaccaccacctcctcctcctcctcctccaccaccaccagctcccaaaatgccaccacctgaaaagacaaaaaaaggaaggaaagacaaggcaaagaagagtaagaccaaaatgccatctttggtaaaaaagtggcagagtatccagcgtgagttagatgaagaggacaattctagttccagtgaagaggatcgggaatcaactgcacagaagcgaattgaagagtggaaacagcagcagctggttagtggcatggcagagagaaatgctaattttgaagcccttcctgaggattggagagcaaggctgaagagaaggaaaatggctccaaacacatagtttttaagtttttaaaacttttttgtattattgtttgttttgtgttcagttcaaagtcttaaccagttttattgtcaaataaactataaatgttatgggggagatcttataaatttcctgggcaagagtgtatgcatacaaagttttcacttttgtgaaatgtaatttttctgtttttgcaaagggatgaggtgattggaattgctttgaccatgctgcctttattctcaaactggcaaacttagcatgttaggtgtattaacctcatcagtcttgaagaacatgtggctcatgagtataacacttctgtagaggactccctgacaaaagtgaagaattaacttctcctccagaacaagtgcaattcagaaggcagctctgcattctaccttgcttgactggaattgtctgaagctttttctggcctcttttctctagtcggccacccctgaagtgctgaggtctaagtggtttacctcgtgctgatagatggccacactctttagagtagttctcataagttctagaactggtagctcggtcgtttcgcacactaggtggcatacaggcagcagcaggtgttcatatccttgattttgagaatttcccctcaagtatgtggcagtaaatacaacaagacactctatgtattaatgtctccattgtcttaaccctgttccaaaacaaaattcacctcctttctttatgtgaatgtattctccataaaattccagtatttaaaaagcagtttactgttctgtactttctgttgtatcacaatcaggtaaaagtcactttaaactgaggaaacggcaaattgtgttttaaagctctttgtatttctccagtttctgaccttgtaaatttgtatatatgcactaataaagctttttttataatcctgaaaaaaaaaaaaaaaa

SEQ ID NO: 12002 - DNA, 4331 bp, Homo sapiens
atgcaaaagtccaggacagtgggccactttcagtcttcaaagagaaagataagaaattctggattttcaaaatccttttgaagccttttaagccattgattattattattcctaaagaaaatgaagataattacatatttttgcatttgggcagtagcatgggccattccagttcctcaaagcaaaccactggagagacatgtcgaaaaatccatgaatttgcatctcctagcaagatcaaatgtgtcagtacaggatgagttaaatgccagtggaaccatcaaagaaagtggtgtcctggtgcatgaaggtgatagaggaaggcaagagaatacccaagatggtcacaagggagaagggaatggctctaagtgggcagaagtaggagggaagagtttttctacatattccacattagcaaacgaagaggggaatattgagggctggaatggggacacaggaaaagcagaaacatatggtcatgatggaatacatgggaaagaagaaaacatcacagcaaatggcatccagggacaagtaagcatcattgacaatgctggagccacaaacagaagcaacactaatggaaatactgataagaatacccaaaatggggatgttggcgatgcaggtcacaatgaggatgtcgctgttgtccaagaagatggacctcaagtagctggaagcaataacagtacagacaatgaggatgaaataattgagaattcctgtagaaacgagggtaatacaagtgaaataacacctcagatcaacagcaagagaaatgggactaaggaagctgaggtaacaccaggcactggagaagatgctggcctggataattccgatgggagtcctagtgggaatggagcagatgaggatgaagacgagggttctggtgatgatgaagatgaagaagcagggaatggaaaagacagtagtaataacagcaagggccaggagggccaggaccatgggaaagaagatgatcatgatagtagcataggtcaaaattcggatagtaaagaatattatgaccctgaaggcaaagaagatccccataatgaagttgatggagacaagacctccaagagtgaggagaattctgctggtattccagaagacaatggcagccaaagaatagaggacacccagaagctcaaccatagagaaagcaaacgcgtagaaaatagaatcaccaaagaatcagagacacatgctgttgggaagagccaagataagggaatagaaatcaagggtcccagcagtggcaacagaaatattaccaaagaagttgggaaaggcaacgaaggtaaagaggataaaggacaacatggaatgatcttgggcaaaggcaatgtcaagacacaaggagaggttgtcaacatagaaggacctggccaaaaatcagaaccaggaaataaagttggacacagcaatacaggtagtgacagcaatagtgatggatatgacagttatgattttgatgataagtccatgcaaggagatgatcccaatagcagtgatgaatctaatggcaatgatgatgctaattcagaaagtgacaataacagcagtagccgaggagatgcttcttataactctgatgaatcaaaagataatggcaatggcagtgactcaaaaggagcagaagatgatgacagtgatagcacatcagacactaataatagtgacagtaatggcaatggtaacaatgggaatgatgacaatgacaaatcagacagtggcaaaggtaaatcagatagcagtgacagtgatagtagtgatagcagcaatagcagtgatagtagtgacagcagtgacagtgacagcagtgatagcaacagtagcagtgatagtgacagcagtgacagtgacagcagtgatagcagtgacagtgatagtagtgatagcagcaatagcagtgacagtagtgacagcagtgatagcagtgacagtagtgatagtagtgacagcagtgacagcaagtcagacagcagcaaatcagagagcgacagcagtgatagtgacagtaagtcagacagcagtgacagcaacagcagtgacagtagtgacaacagtgatagcagcgacagcagcaatagcagtaacagcagtgatagtagtgacagcagtgatagcagtgacagcagcagtagcagtgacagcagcaacagcagtgatagtagtgacagtagtgacagcagcaatagcagtgagagcagtgatagtagtgacagcagtgatagtgacagcagtgatagtagtgacagcagtaatagtaacagcagcgatagtgacagcagcaacagcagcgatagcagtgacagcagcaacagcagtgacagcagtgatagcagtgacagcagcaacagcagtgacagtagcgatagcagtgacagcagcaacagcagtgacagcagtgatagcagtgacagcagtgatagtagtgacagcagcaacagcagtgatagcaacgacagcagcaatagcagtgacagcagtgatagcagcaacagcagtgatagcagcaacagcagtgatagcagtgatagcagtgacagcagtgatagcgacagcagcaatagcagtgacagcagtaatagtagtgacagcagcgatagcagcaacagcagtgatagcagcgacagcagcgatagcagtgacggcagtgatagcgacagcagcaatagaagtgacagtagtaatagtagtgacagcagcgatagcagtgacagcagcaacagcagtgacagcagtgatagcagtgacagcaacgaaagcagcaatagcagtgacagcagtgatagcagcaacagcagtgatagtgacagcagtgatagcagcaacagcagtgacagcagtgatagcagcaacagcagtgatagcagtgaaagcagtaatagtagtgacaacagcaatagcagtgacagcagcaacagcagtgacagcagtgatagcagtgacagcagtaatagtagtgacagcagcaatagcagtgacagcagcaacagcagtgacagcagtgatagcaatagcagcgacagcagtgacagcagcaacagcagcgatagcagtgacagcagtgatagcagtgacagcagtgacagcagtgatagcagcaacagcagtgatagcagtgacagcagtgacagcagtgatagcagtaatagtagtgacagcagcaatagcagtgacagcagcaacagcagtgacagcagcgatagcagtgacagcagcgatagcagtgacagcagcgatagcagtgacagcagtgacagcagcaatagcagtgacagcagtgacagcagcgacagcagtgatagcagtgacagcagtgacagcagcgacagcagtgatagcagtgaaagcagtgatagcagtgacagcagcaatagcagtgacagcagcgatagcagcgacagcagcgacagcagcgatagcagtgacagcagcgatagcagtgacagcagtgacagcagcaatagcagtgacagcagtgacagcagcgacagcagtgatagcagtgacagcagcaacagcagtgacagcagtgacagcagtgaaagcagcgacagcagtgacagcagcgacagcagtgacagcagcgatagcagcgacagcagcgacagcagcgatagcagtgacagcagcaatagcagtgatagcagcgacagcagtgatagcagtgacagcagcgacagcagcgatagcagcgacagcagcgatagtagtgatagcagtgacagcagtgacagcagcgacagcagtgacagcagcgacagcagtgacagcagcgacagcagtgacagcaatgaaagcagcgacagcagtgacagcagcgatagcagtgacagcagcaacagcagtgacagcagcgacagcagtgatagcagtgacagcacatctgacagcaatgatgagagtgacagccagagcaagtctggtaacggtaacaacaatggaagtgacagtgacagtgacagtgaaggcagtgacagtaaccactcaaccagtgatgattagaacaaaagaaaaacccgtaagattccttttgtgaaaagtttggtaatgggataggaaaaaaagatttccaagaaagtaaagaaaggggagaaataaacataagacgtatgtaaacaaaaacaactgggggaatcaaatcaaacagttggattcagaaccaagacctaactcctgcagagacagactctgaatgcatgacctttggtacatgcctgttaatattcatgttctgaaaatattttgttaaaagtgtaaatctaaacataaaagaacaattaaaatattctttaatacttcacacagaa

SEQ ID NO: 12003 - DNA, 3107 bp, Homo sapiens
aatgaaggtggacacccaaatagccccaatacaaatgcctgttcaatcaaccaaacatctaagcagcacatctatgtggtagcatattgccaggccgtgagactgcgaatataaataggaaccgcccctcatctgcaggcgctcacaacctagttagcaaacagtaaaacaattaagcgcgccgtggacataggcccacttgtcctgggaaatgaggggaagctggggtttgcagtggtttgattgaagggggactacatgttagaggcacagactgggtgcaggtacacccaaaggaacgagaagagtggaaggaaacaacatccacaaagtaaccacatgctggcgtatcgaaggccgtgatttacggttttgagactttacctcgccagcaaaggggggccagtctgttagcggtgcagattggaggggtgacattggaagctgtccaggaaaaagaaaatggaactggggagcagaaggcctacgcaagagggcgggacagacaggacttgtgactagtagctctggactgaggaatcctccctgctttctggtgcgggagagctagtggatgatggtgccaataacctggatggggaaagtaagctccctcctggaatgcttcattcacaacctccattttcagcaacatcccatctactggtgcttcctggtcgagatacaagtttcctgaaactgctgctctgttttgggcctcacccggccaacagctcactagctggcaagcagtagtatcaagatggcggccccctaggactggctagtcatgtgacctcgggtttcccaagtttgaagcccggcagtcctttcgggggcaaggttcacctgtcacgaaacgagtgtcaccccttcgactctcgcaagccaatcggcatctgagactgggccactgcggtgaggcgatcggaagattggtcctttccagtcgcctagctagggccaatcacggagcgtcccatacttcgcgggcccgcccgtaggccggggagaagcaggaatatcgtcacagcgtggcggtattattacctaaggactcgataggaggtgggacgcgtgttgattgacaggcagatttccctaccgggatttgagaatttggcgcagtgcccgccttagaggtgcgcttatttgattgccaagtaatattccccaatggagtactagctcatggtgacgggcaggcagcttgagctaatgagtcctccgtggccggcgcagctctccacatgccgggcggcgggccccagtctgagcggcgatggcggcggcggcggcggcggcagcagcagcgggggctgcgggcggtcggggctccgggccggggcggcggcgccatcttgtgcccggggccggtggggaggccggggagggggccccggggggcgcaggggactacgggaacggcctggagtctgaggaactggagcctgaggagctgctgctggagcccgagccggagcccgagcccgaagaggagccgccccggccccgcgcccccccgggagctccgggccctgggcctggttcgggagcccccggcagccaagaggaggaggaggagccgggactggtcgagggtgacccgggggacggcgccattgaggacccggagctggaagctatcaaagctcgagtcagggagatggaggaagaagctgagaagctaaaggagctacagaacgaggtagagaagcagatgaatatgagtccacctccaggcaatgctggcccggtgatcatgtccattgaggagaagatggaggctgatgcccgttccatctatgttggcaatgtggactatggtgcaacagcagaagagctggaagctcactttcatggctgtggttcagtcaaccgtgttaccatactgtgtgacaaatttagtggccatcccaaagggtttgcgtatatagagttctcagacaaagagtcagtgaggacttccttggccttagatgagtccctatttagaggaaggcaaatcaaggtgatcccaaaacgaaccaacagaccaggcatcagcacaacagaccggggttttccacgagcccgctaccgcgcccggaccaccaactacaacagctcccgctctcgattctacagtggttttaacagcaggccccggggtcgcgtctacaggggccgggctagagcgacatcatggtattccccttactaaaaaaagtgtgtattaggaggagagagaggaaaaaaagaggaaagaaggaaaaaaaaaagaattaaaaaaaaaaaaaagaaaaacagaagatgaccttgatggaaaaaaaatattttttaaaaaaaagatatactgtggaaggggggagaatcccataactaactgctgaggagggacctgctttggggagtaggggaaggcccagggagtggggcagggggctgcttattcactctggggattcgccatggacacgtctcaactgcgcaagctgcttgcccatgtttccctgcccccttcacccccttgggcctgctcaagggtaggtgggcgtgggtggtaggagggttttttttacccagggctctggaaggacaccaaactgttctgcttgttaccttccctcccgtcttctcctcgcctttcacagtcccctcctgcctgctcctgtccagccaggtctaccacccaccccacccctctttctccggctccctgcccctccagattgcctggtgatctattttgtttccttttgtgtttctttttctgttttgagtgtctttctttgcaggtttctgtagccggaagatctccgttccgctcccagcggctccagtgtaaattccccttccccctggggaaatgcactaccttgttttggggggtttaggggtgtttttgtttttcagttgttttgtttttttgttttttttttttcctttgccttttttcccttttatttggagggaatgggaggaagtgggaacagggaggtgggaggtggattttgtttatttttttagctcatttccaggggtgggaatttttttttaatatgtgtcatgaataaagttgtttttgaaaataaaaaaaaaaaaaaaaaaaaaaaaaaaaaaaaaaa

SEQ ID NO: 12004 - DNA, 1618 bp, Homo sapiens
atgtcccggccgcagcttcgacgctggcgcctcgtctctagcccgccgagcggcgtcccgggtctagcgctgctggcgctgctggcgctgctggcgctgcggctcgcggccgggaccgactgcccatgcccggagcctgagctctgccgcccgattcgccaccatccagatttcgaggtctttgtgtttgatgttggacagaaaacttggaaatcttatgattggtcacagattacaactgtggcaacatttggaaaatatgactcagaacttatgtgctacgctcattcaaaaggagccagagtagtacttaaaggagatgtatccttaaaggatatcattgatcctgctttcagagcatcctggatagctcaaaaacttaatttggccaaaacacaatatatggatggaattaatatagatatagagcaagaagttaattgtttatcacctgaatatgatgcattaactgctttagtcaaagaaactacagactctttccatcgtgaaattgagggatcacaggtaacctttgatgtagcttggtctccaaagaacatagacagaagatgctataattatactggaatcgcagatgcttgtgacttcctctttgtgatgtcttatgatgaacaaagtcagatctggtcagaatgtattgcagcagccaatgctccctataatcagacattaactggatataatgactacatcaagatgagcattaatcctaagaaacttgtaatgggtgttccttggtatggttatgattatacctgcctgaatctgtctgaggatcatgtttgtaccattgcaaaagtccctttccggggggctccttgtagtgacgctgcaggacgtcaggtgccctacaaaacgatcatgaagcaaataaatagttctatttctggaaacctatgggataaagatcagcgggctccttattataactataaagatcctgctggccactttcatcaagtatggtatgataaccctcagagtatttctttaaaggcaacatatatacaaaactatcgcttacggggcattggcatgtggaatgcaaactgtcttgactactctggagatgctgtagccaaacagcaaactgaagaaatgtgggaagtcttaaagccaaagctgttacagagatgaacatcttttgtcaaaccattaagagttagaaagatgatctgtatcaacagatctagtttcttgcatttttattatgttgctatatacttttgttatccgtatactaaaaaaaaagaataaataaatgttttgattgtttgaatttgaaaaatacacacgaatgtcctcagtatccaggaacataaaggcaagaagcaagtcaacttacctattaaatattcctctattagatgtttcaacactataatttaattgggaaaaattgctttcagaattttattatgccatatttcccttcattatagtaaaatatatgctcacgaatcaatgctgatttttaaaatatgtataatctgaagtggaaattgtttgcttagagtttttaaaaacctagtctttgaaaagcagtttgtgctatacttttcccccaaccctccaataaatcttaaatttaaaacct

SEQ ID NO: 12005 - DNA, 4939 bp, Homo sapiens
tctttttagcagcaacatacaagccggccatattagagagatggaaataaagcttccttaatgttgtatatgtctttgaagtacatccgtgcatttttttttagcatccaaccattcctcccttgtagttctcgccccctcaaatcaccctctcccgtagcccacccgactaacatctcagtctctgaaaatgcacagagatgcctggctacctcgccctgccttcagcctcacggggctcagtctctttttctctttggtgccaccaggacggagcatggaggtcacagtacctgccaccctcaacgtcctcaatggctctgacgcccgcctgccctgcaccttcaactcctgctacacagtgaaccacaaacagttctccctgaactggacttaccaggagtgcaacaactgctctgaggagatgttcctccagttccgcatgaagatcattaacctgaagctggagcggtttcaagaccgcgtggagttctcagggaaccccagcaagtacgatgtgtcggtgatgctgagaaacgtgcagccggaggatgaggggatttacaactgctacatcatgaacccccctgaccgccaccgtggccatggcaagatccatctgcaggtcctcatggaagagccccctgagcgggactccacggtggccgtgattgtgggtgcctccgtcgggggcttcctggctgtggtcatcttggtgctgatggtggtcaagtgtgtgaggagaaaaaaagagcagaagctgagcacagatgacctgaagaccgaggaggagggcaagacggacggtgaaggcaacccggatgatggcgccaagtagtgggtggccggccctgcagcctcccgtgtcccgtctcctcccctctccgccctgtacagtgaccctgcctgctcgctcttggtgtgcttcccgtgacctaggaccccagggcccacctggggcctcctgaacccccgacttcgtatctcccaccctgcaccaagagtgacccactctcttccatccgagaaacctgccatgctctgggacgtgtgggccctggggagaggagagaaagggctcccacctgccagtccctggggggaggcaggaggcacatgtgagggtccccagagagaagggagtgggtgggcaggggtagaggagggggccgctgtccacctgcccagtgcttggcctggcagtggcttcagagaggacctggtggggagggagggctttcctgtgctgacagcgctccctcaggagggccttggcctggcacggctgtgctcctcccctgctcccagcccagagcagccatcaggctggaggtgacgatgagttcctgaaacttggaggggcatgttaaagggatgactgtgcattccagggcactgacggaaagccagggctgcaggcaaagctggacatgtgccctggcccaggaggccatgttgggccctcgtttccattgctagtggcctccttggggctcccgttggctcctaatcccttaggactgtggatgaggccagactggaagagcagctccaggtagggggccatgtttcccagcggggacccaccaacagaggccagtttcaaagtcagctgaggggctgaggggtggggctccatggtgaatgcaggttgctgcaggctctgccttctccatggggtaaccaccctcgcctgggcaggggcagccaaggctgggaaatgaggaggccatgcacagggtggggcagctttctttggggcttcagtgagaactctcccagttgcccttggtggggtttccacctggcttttggctacagagagggaagggaaagcctgaggccggcataaggggaggccttggaacctgagctgccaatgccagccctgtcccatctgcagccacactactcgctcctctcccaacaactcccttcgtggggacaaaagtgacaattgtaggccaggcacagtggctcacgcctgtaatcccagcactttgggaggccaaggcgggtggattacctccatctgtttagtagaaatgggcaaaaccccatctctactaaaaatacaagaattagctgggcgtggtggcgtgtgcctgtaatcccagctatttgggaggctgaggcaggagaatcgcttgagcccgggaagcagaggttgcagtgaactgagatagtgatagtgccactgcaattcagcctgggtgacatagagagactccatctcaaaaaaaaaaaaaaaaaaaaaaaaaggcaattgtgcggagccaaccatcactgccattacactcacattcaatggaaattgattaggcctgagagaaggagcaagaggcagaaacactgactctgagaccatgaccttggaagatcctcagagatcaactagccaagtcactcacttaaaatggggaaactgaggttccaactgacagaaactgagggtcctgccctcttctctggctcctcagtctccagtttgaagcaacagagccatcattttcccagtgggaggggcctctgtgtcctggtctatgatggggcgagttggaggggtgggcttctctagccctgccccctcccaggagcccagcccctctggccaggactgaggaggagtggagggaagcagggagggagggagcaagtgtgaagggcacagctgctggcaaatgccccattccctgccccagcacttcccagcctttccaggagctctgccccacccctactcaaggagtcaggtgcccagggtagggaataagtctaggaaagggggtggagacaggaccgtgacagtctcagggaccaatccctgcctctgcccatcagattgccaatttggggagacagcaatatcatctgggagattcagcttaatttgcttcaattcagcaaccatttattgagcatctattatgtgccaggcactgtgccgggcactggggatatacacaaagccataagcactggggactgccaggttggcactgtagggaccaagattaactttttggtgcatctaattccacctctgcaagacactgcttccaaggctacagttggggaagatgaagagattctagaatctgtgccctgggaagggagaaacagcagggaagaggggcaatacaacagggtcaagggtgcagaggccaggcagagtgggtgcagagtgggggatgggcaaccagcctggtaacacctgggtgaggtgagcgagtcaagcccatctggaaatgctaaactcatcagctcagtacctaactgccaatcaacacactgccaatgcgggtgggctaagccgccaggatgcctgcagcagatggacgctgcccatccttgagccagccagctgggggcagagaggtgggtggcgggcacctcatgccagctgagaccaagagtggttgtatacatttctgcagcttgcagatttcatttttttggtcaccctttaagtgtccttctctcccaggatgagtgaggagctgtgctgatgttgggaacttatctttttccaggatccataacatttaggggaattatttgcgggctttcctagtgtattctaagaagttctaactctccatcaagaagcccaagattcctggagtctttttttcctctgccctgatcaactggggcccaggaaaagcaatgtctcttcacgggcctcagggccccagcagatggggctgggtcaggaaccatctctgtcccaggtgctcagccctcatatgcattttcttctggagcctcttagaatctcctccagaggactcatagagctgcctcccccaggatggtgaagttgggagcaaaatggggcttctgtaagtagaggtggaaaaccagagagatgtttccacagcagccatttccctaccctgtttcctaacttatgctgacaagttcttcctcttcctaccgtggggttcgagccccacttctggttgcatgttcccaccaccacgctctgctggttttagtcggctgactttctcaactgccccagcctctcctgctctctcagaacctccctctgcccccaccccccatctgtctcttcctcctaattaagggccactgcaaagagagacgggctggctaacccatgggatttagcttataagaacaaagcacaattattcaggactgaactgctttgaggtgccttggaactggctttggaaatagctatctgccccctagctatggactcttcacagttatttccagtttataaaaaggaaaagctgatcggatccatgtttctctctgcgagtctccttggggaggttgggctggtaaatatttgcaaggtcaggttaagcagacagacaattgaaaatactgggcaggtccaaaaggatagttccaggccataggaatggcttggtgcagttaacgggtgatgaagcaagaaatcttccttcctacttatgtcttaaagatggacagcctgtgtctcttgctgtgcctcttgctggcgtcttcctttattgaagcttgctgatgcactgtacatagtctctctctctaggtatagatatattatatatacaaatatcaaacatctcaccacacccaccccaaaagttacactgtgtgtgtgtggggaggtgtaataacttctcagtgttttgagttgattcaccaaaggcaaattttggaatgttcttgcgctttgtgcacttggaggggaaaacccaactacatatgcactttcttggttgtgtgtgctatagagaggttggaaggggtggttggaaggggagagaaactgagatggccctctgtgactcgactgctgggatgtatctgcttttgggagcagactgagtttcttttgcaatttgtcttattgtttgggtctactggcaacaataaactatctcccctgaaaatcaaaaaaaaaaaaaaaaaa

SEQ ID NO: 12006 - DNA, 1895 bp, Homo sapiens
atatgagctcaggcctggctgggctccaggagaatctttccacaaggcaagagataacacaaagtcaaggtgaagatcagggtagccctttaaaaggcctccttgtgccctagagttgccacagctcttctactccactgctgtctatcttgcctgccggcacccagccaccatgtgggagctcgtggctctcttgctgcttaccctagcttatttgttttggcccaagagaaggtgccctggtgccaagtaccccaagagcctcctgtccctgcccctggtgggcagcctgccattcctccccagacacggccatatgcataacaacttcttcaagctgcagaaaaaatatggccccatctattcggttcgtatgggcaccaagactacagtgattgtcggccaccaccagctggccaaggaggtgcttattaagaagggcaaggacttctctgggcggcctcaaatggcaactctagacatcgcgtccaacaaccgtaagggtatcgccttcgctgactctggcgcacactggcagctgcatcgaaggctggcgatggccacctttgccctgttcaaggatggcgatcagaagctggagaagatcatttgtcaggaaatcagtacattgtgtgatatgctggccacccacaacggacagtccatagacatctcctttcctgtcttcgtggcggtaaccaatgtcatctccttgatctgcttcaatacctcctacaagaatggggaccctgagttgaatgtcatacagaattacaatgaaggcatcatagacaacctgagcaaagacagcctggtggacctagtcccctggttgaagattttccccaacaaaaccctggaaaaattaaagagccatgttaaaatacgaaatgatctgctgaataaaatacttgaaaattacaaggagaaattccggagtgactctatcaccaacatgctggacacactgatgcaagccaagatgaactcagataatggcaatgctggcccagatcaagactcagagctgctttcagataaccacattctcaccaccataggggacatctttggggctggcgtggagaccaccacctctgtggttaaatggaccctggccttcctgctgcacaatcctcaggtgaagaagaagctctacgaggagattgaccagaatgtgggtttcagccgcacaccaactatcagtgaccgtaaccgtctcctcctgctggaggccaccatccgagaggtgcttcgcctcaggcccgtggcccctatgctcatcccccacaaggccaacgttgactccagcatcggtgagtttgctgtggacaagggcacagaagttatcatcaatctgtgggcgctgcatcacaatgagaaggagtggcaccagccggatcagttcatgcctgagcgtttcttgaatccagcggggacccagctcatctcaccgtcagtaagctatttgcccttcggagcaggacctcgctcctgtataggtgagatcctggcccgccaggagctcttcctcatcatggcctggctgctgcagaggttcgacctggaggtgccagatgatgggcagctgccctccctggaaggcatccccaaggtggtctttctgatcgactctttcaaagtgaagatcaaggtgcgccaggcctggagggaagcccaggctgagggtagcacctaaaggctgtaactcacagcccctgtccaccctatgtggccccacaacacagatttagagatacaaccccccacccttctccgccattcttccctactcccaacccactctgccttctttttcagcttgtggcaatgccagtgatgtgcataaacagtttttttttttccataaaaaaaaaaaaaaaaaaaaaaaaaaa

SEQ ID NO: 12007 - DNA, 3594 bp, Homo sapiens
gaatcatccacgcacctgcagctctgctgagagagtgcaagccgtgggaattcagcagctgaatatcaagacctttgaattcaacaagaagttaagacatttatagttgtctaacaacagactgaagattgtggcttggtattcactggcaggtttcagacatttagatctttcttttaatgactaacaccatgcctatctgtggagaagctggcaacatgtcacacctggaaattgtttttcaacattaatactattatttggcagtaatccagattgcttttgccaccaacctgaagacatatagaggcagaaggacaggaataattctatttgtttcctgttttgaaacttccatctgtaaggctatcaaaaggagatgtgagagagggtattgagtctggcctgacaatgcagttcttaaaccaaaggtccattatgcttctcctctctgagaatcctgacttacctcaacaacggagacatggcacagtagccagcttggagacttctcagccaatgctctgagatcaagtcgaagacccaatatacagggttttgagctcatcttcatcattcatatgaggaaataagtggtaaaatccttggaaatacaatgagactcatcagaaacatttacatattttgtagtattgttatgacagcagagggtgatgctccagagctgccagaagaaagggaactgatgaccaactgctccaacatgtctctaagaaaggttcccgcagacttgaccccagccacaacgacactggatttatcctataacctcctttttcaactccagagttcagattttcattctgtctccaaactgagagttttgattctatgccataacagaattcaacagctggatctcaaaacctttgaattcaacaaggagttaagatatttagatttgtctaataacagactgaagagtgtaacttggtatttactggcaggtctcaggtatttagatctttcttttaatgactttgacaccatgcctatctgtgaggaagctggcaacatgtcacacctggaaatcctaggtttgagtggggcaaaaatacaaaaatcagatttccagaaaattgctcatctgcatctaaatactgtcttcttaggattcagaactcttcctcattatgaagaaggtagcctgcccatcttaaacacaacaaaactgcacattgttttaccaatggacacaaatttctgggttcttttgcgtgatggaatcaagacttcaaaaatattagaaatgacaaatatagatggcaaaagccaatttgtaagttatgaaatgcaacgaaatcttagtttagaaaatgctaagacatcggttctattgcttaataaagttgatttactctgggacgaccttttccttatcttacaatttgtttggcatacatcagtggaacactttcagatccgaaatgtgacttttggtggtaaggcttatcttgaccacaattcatttgactactcaaatactgtaatgagaactataaaattggagcatgtacatttcagagtgttttacattcaacaggataaaatctatttgcttttgaccaaaatggacatagaaaacctgacaatatcaaatgcacaaatgccacacatgcttttcccgaattatcctacgaaattccaatatttaaattttgccaataatatcttaacagacgagttgtttaaaagaactatccaactgcctcacttgaaaactctcattttgaatggcaataaactggagacactttctttagtaagttgctttgctaacaacacacccttggaacacttggatctgagtcaaaatctattacaacataaaaatgatgaaaattgctcatggccagaaactgtggtcaatatgaatctgtcatacaataaattgtctgattctgtcttcaggtgcttgcccaaaagtattcaaatacttgacctaaataataaccaaatccaaactgtacctaaagagactattcatctgatggccttacgagaactaaatattgcatttaattttctaactgatctccctggatgcagtcatttcagtagactttcagttctgaacattgaaatgaacttcattctcagcccatctctggattttgttcagagctgccaggaagttaaaactctaaatgcgggaagaaatccattccggtgtacctgtgaattaaaaaatttcattcagcttgaaacatattcagaggtcatgatggttggatggtcagattcatacacctgtgaataccctttaaacctaaggggaactaggttaaaagacgttcatctccacgaattatcttgcaacacagctctgttgattgtcaccattgtggttattatgctagttctggggttggctgtggccttctgctgtctccactttgatctgccctggtatctcaggatgctaggtcaatgcacacaaacatggcacagggttaggaaaacaacccaagaacaactcaagagaaatgtccgattccacgcatttatttcatacagtgaacatgattctctgtgggtgaagaatgaattgatccccaatctagagaaggaagatggttctatcttgatttgcctttatgaaagctactttgaccctggcaaaagcattagtgaaaatattgtaagcttcattgagaaaagctataagtccatctttgttttgtctcccaactttgtccagaatgagtggtgccattatgaattctactttgcccaccacaatctcttccatgaaaattctgatcatataattcttatcttactggaacccattccattctattgcattcccaccaggtatcataaactgaaagctctcctggaaaaaaaagcatacttggaatggcccaaggataggcgtaaatgtgggcttttctgggcaaaccttcgagctgctattaatgttaatgtattagccaccagagaaatgtatgaactgcagacattcacagagttaaatgaagagtctcgaggttctacaatctctctgatgagaacagattgtctataaaatcccacagtccttgggaagttggggaccacatacactgttgggatgtacattgatacaacctttatgatggcaatttgacaatatttattaaaataaaaaatggttattcccttcatatcagtttctagaaggatttctaagaatgtatcctatagaaacaccttcacaagtttataagggcttatggaaaaaggtgttcatcccaggattgtttataatcatgaaaaatgtggccaggtgcagtggctcactcttgtaatcccagcactatgggaggccaaggtgggtgacccacgaggtcaagagatggagaccatcctggccaacatggtgaaaccctgtctctactaaaaatacaaaaattagctgggcgtgatggtgcacgcctgtagtcccagctacttgggaggctgaggcaggagaatcgcttgaacccgggaggtggcagttgcagtgagctgagatcgagccactgcactccagcctggtgacagagcgagactccatctcaaaaaaaagaaaaaaaaaaaagaaaaaaa

SEQ ID NO: 12008 - DNA, 1099 bp, Homo sapiens
gcacagcccagggccatgctcctgttctcagtgttgctgctcctgtccctggtcacgggaactcagctcggtccacggactcctctcccagaggctggagtggctatcctaggcagggctaggggagcccaccgccctcagccccgtcatccccccagcccagtcagtgaatgtggtgacagatctattttcgagggaagaactcggtattccagaatcacaggggggatggaggcggaggtgggtgagtttccgtggcaggtgagtattcaggcaagaagtgaacctttctgtggcggctccatcctcaacaagtggtggattctcactgcggctcactgcttatattccgaggagctgtttccagaagaactgagtgtcgtgctggggaccaacgacttaactagcccatccatggaaataaaggaggtcgccagcatcattcttcacaaagactttaagagagccaacatggacaatgacattgccttgctgctgctggcttcgcccatcaagctcgatgacctgaaggtgcccatctgcctccccacgcagcccggccctgccacatggcgcgaatgctgggtggcaggttggggccagaccaatgctgctgacaaaaactctgtgaaaacggatctgatgaaagtgccaatggtcatcatggactgggaggagtgttcaaagatgtttccaaaacttaccaaaaatatgctgtgtgccggatacaagaatgagagctatgatgcctgcaagggtgacagtggggggcctctggtctgcaccccagagcctggtgagaagtggtaccaggtgggcatcatcagctggggaaagagctgtggagagaagaacaccccagggatatacacctcgttggtgaactacaacctctggatcgagaaagtgacccagctagagggcaggcccttcaatgcagagaaaaggaggacttctgtcaaacagaaacctatgggctccccagtctcgggagtcccagagccaggcagccccagatcctggctcctgctctgtcccctgtcccatgtgttgttcagagctattttgtactgataataaaatagaggctattctttca

SEQ ID NO: 12009 - DNA, 3158 bp, Homo sapiens
gtccgttaggacgtgttgccctttctgtgtaagctgtgagcgtaggcggccctgagggggtgtgttgcaggggtttccaagcccagcaccagcacccttgcccttttccatcaggggttcagcctagggtccccgctggtgggcggctcccgagtcttggagaagagcacgagaacctagaccgcccccgaagtgcggagaccccctgggcaggctgaaagatggcggcggcgtctgtctctgcggcttctggttctcacttgtcgaacagctttgctgagccatcaaggtctaatggaagcatggttcggcattcttcatctccatatgtagtatatccttcggataagcctttccttaatagtgatctacgacgctccccaagtaagcctacacttgcctatccagaaagcaacagcagagccatattttctgctcttaagaatcttcaagataagattcgacgcttggaacttgagaggattcaggcagaagaaagtgtgaaaaccttgtctagagaaacaattgaatataagaaagtactggatgaacagatacaagaaagggagaattcaaagaatgaggaatcaaagcacaatcaagaactgacatctcagttgttagctgcagaaaataaatgcaatctattagaaaaacaattggaatacatgcgaaatatgataaagcatgccgaaatggagaggacatctgtcttagagaaacaagtttccctagaaagagaacgacaacatgatcaaacacatgttcagagccaacttgaaaaattggatcttcttgaacaggagtataacaaacttaccacaatgcaggcccttgcagaaaaaaaaatgcaagagttggaagcaaaactccatgaagaagaacaggaaaggaaacgcatgcaagctaaggcagctgagttgcagactggtctagaaacaaatagacttatctttgaagataaggcaactccgtgtgttcccaatgcaagaagaattaaaaaaaagaagtcaaaaccaccagaaaagaaaagttctaggaactattttggtgcacaaccacattatagattatgcttgggtgatatgccatttgtagctgggaagtccacaagccctagccatgccgtggtagccaatgttcagcttgtcttgcatctaatgaagcaacacagtaaagctttgtgcaatgatcgagtcatcaacagtattcctttggcaaagcaagtatcttcacgaggtggtaaaagtaagaagttgtcagtaacacctccctcctccaacggtattaatgaggagttgtcagaagtcttacagactttacaggatgaatttgggcaaatgagctttgatcaccagcagcttgcaaaacttatccaggagtcgccaaccgttgaactgaaagacaagttggagtgtgaattggaggcattagtgggaaggatggaagcaaaagccaaccaaataactaaagttcgaaaataccaagcccagctggagaaacagaagttagagaagcagaagaaggaattaaaagctaccaaaaagactcttgatgaagaaagaaacagcagcagccgttctggaatcacagggaccacaaataagaaagattttatgaaactgagacctggagaaaaaaggagaaaaaatcttcagttattgaaggacatgcaaagcatacagaattcattacaaagcagtagtttgtgttgggattactgactcataaccaggtcagaaattttattcagataatctgtacctcatcaatcagatgatgacaatttacttcccaggtctcatactcacttatgttggaattaattaatagcaggtgttaaaggacccaggcttcattacacaggcttttcatgtatgcaggatgactcaatgttaaagcatttaaatggaaaccaggggagttttaaagcccgagaaaccacacataatcttttgttgagatgagtttgctgtactgacgctgcactttgtaaacagattaccagttttttacttgtgggtgtgattttttaaaatagttctttatatataattaaaattaggtttaaattttcaaaatatgagactatgctataggcagtgcttgcttgaaaagtctcatttttaaatctccctggcatgaggtgcccacttcccctttccaaagcaaccattaaacatactttgtttctactattggtggagtttttctatatttaaaaatacatatatatttcagaggatttttattttgctttttggcatttcagactttgatcagtgttaagtgcacttgtattgctttttaatctgttaattttttaaagacccaagcagtcattttgagttatatctataaaaattataaaaggatttttgaaagtataaacaaattgtcagtgaaataaatgagattttggaataaagtgagaatgggagaagggatatgttgtgagcatataccttcacagttcttaatacctgttttgtaatcatgatattcagtcaaggcattatggtttttaatcttgaaacttagagaaccctttgaatatttgcttttactggtgtacagtatgagtggaatataaactgtacacataattatcatgttgatataaatcataatttcaactagatcaagacatgttaaccttttataaatttaaagtcaataaagcacctttttaaaggaaacactgcaactttccttaacagcctgttaataaaggctttgtgacaagctctcaaaaaatgcatttctaaataggaggacatcaatgtattgatgaagagaaaaaactagtacttagttgccacactcatgcttacatagaaagagagcccaagaatattagatttcctcatgatacaagatactacagtaacaggctttaatttaggatccttaagattttggggtattatttgtgactctcctgaaattgtaaacttgtgcttctgtgtccagttttctaatgagtaggttcgtagcttgattgaattaataattgtgagcccatagacacaagggaagtgagaaacagtgctctggtgacatgataaatatatgtgtcaaccaccatttcagctattaaaaactcctgttatctccttgtttgaatttcaggtcattaaattgtataaccatcattt

SEQ ID NO: 12010 - DNA, 7253 bp, Homo sapiens
gcgtcccctgaggcgtgcgcctggatggactgaaggacggtccgacgcgcgcggagggagagggccaggggcgagaaatctgctcgcgctggggtaccgcttcagggctgccgaacgccaacttgcttcgtgtgccctaggcaggcgtggggcaggtggcgcctccgtgacctaccaccatggatggaaacggactttttggtgaagaaacccaaacggttgatgccaggcagggtgatttggccgtcaaaggttttgacgaaacctgccctgttctctctggggaatccgaatgagggagatcacagacaccttcactgagaagccaaggacatttctgtataatcagtggatgaaaggattttctcagacccttttttccgtgcttctggaggattaatccactacagtctgcaatttcagtggaaactgcaaggcacacgatgtggcaggagccgggagcgacttccgaattgttgtggacccttcctgtagcataggggagttttcacacttgcctccactcctccccttccccccaactccctccttctgatctcttctttttaatctgttcccattttccgagttaagttctatttccaaaactgttctctggagctataagtggattgccagaaatgagagattaggagctgggagaagaggaagcgccttgtgttgtgtctcctggaggctgccgacatgaagtgctttttcccggtgctgagctgtctggctgtgctgggtgtggtgtcagcacagcggcaggtcaccgttcaggaaggacccttgtaccgcacggagggctcccacatcactatctggtgcaatgtgagtggctaccagggaccttctgagcagaatttccagtggtccatttacctgccttcgtcgccagagcgagaggtgcagatcgtcagcaccatggactcttccttcccctatgccatctacacccagcgcgtccgcggagggaagatcttcatagaaagagtccaggggaactcaaccctattgcacatcacagatcttcaggcccgggatgccggggagtatgaatgccacacacccagcactgataagcaatactttgggagttacagtgcaaagatgaacctagtggtgatcccagactccctgcagaccactgccatgccccagactctgcacagagtggagcaggacccgctggagctcacttgtgaggtggcctcagagaccattcagcacagccacctgtctgtggcctggctccggcagaaagttggcgagaagcccgtggaggtcatctccctgagccgagatttcatgcttcactccagcagcgaatatgcccagaggcagagcctgggggaggtgcggctggacaagctggggaggaccaccttccgcctcaccatcttccacctgcagccttctgaccagggcgaattctactgcgaggccgccgagtggatccaggatccggatgggtcgtggtatgctatgacccgaaagcgttccgagggagccgtggtcaacgtccagccaactgacaaagaattcactgttcggctggagacagagaagcggctgcacacggtgggcgagccggtggagttcagatgcatcctggaggctcagaatgttcccgaccgttactttgctgtctcctgggccttcaacagctcgctcatcgccaccatgggtcctaacgctgtgcctgtcctcaacagcgaatttgctcaccgggaagccaggggacagcttaaggtggccaaagagagcgacagtgtctttgtgctgaagatctaccacctccgccaggaagatagcgggaaatacaactgccgggtgactgagcgagagaaaaccgtgaccggggaattcattgataaggagagcaagcgtcccaagaacatccccatcatagtcctccccctcacagataactgggtagttaaagtcccccagcaccaccagctcctgtcccaaggccacttggagagcagcatctccgtggaggtggccagcaatgccagcgtcatccttgagggcgaggacctgcgcttctcctgcagtgtccgcacggcaggcaggccgcagggtcgcttctctgtcatctggcagcttgtggacaggcagaaccgccgcagcaatatcatgtggctagaccgggatggcaccgtgcagccaggctcgtcctactgggagcgcagcagctttgggggcgtccagatggagcaggtgcagcccaactcgttcagcctgggcatcttcaacagcaggaaggaggacgagggccagtatgaatgccatgtgactgaatgggtgcgggcagtggatggcgagtggcagattgttggggagcgccgggccagcactcccatctccatcacagctcttgaaatgggcttcgcagtcacagccatctcccggacaccgggggtgacctacagcgactcctttgacttgcagtgtatcatcaaaccccactaccctgcctgggtccccgtgtcggtgacatggcggttccagccggtgggcacggtggagttccatgacttggtgaccttcacccgggacggaggggtccagtggggggacaggtcctccagcttccgaacccgaactgccatcgagaaggctgagtccagcaacaacgtccgcctaagcatcagccgagccagtgacacggaagcaggcaagtaccagtgtgtggcagagctgtggcggaagaactacaacaacacctggacgcgactggcggagaggacctccaacctgctggagatcagggtgctgcagccagtgacaaagctgcaggtgagcaaatcgaagaggaccctcaccctggtggaaaacaagcccattcagttgaactgctcagtcaagtctcagactagccagaactcccactttgcggtgctctggtatgtccacaagccctcggatgccgatggcaagcttatcctgaagaccacccacaactccgcctttgaatacggtacttacgccgaggaggagggcctgagagccaggctccagtttgagaggcatgtgtcggggggcctgttcagcctcaccgtccagagagccgaggtcagcgacagcggcagctactactgccacgtggaggagtggctgctgagccccaactacgcctggtacaagctggcagaggaggtttctgggcgcacagaagtcactgtgaaacagccagacagccgcctgaggctcagccaagcccaggggaacctgtcggttctggagacccggcaggtacagctggagtgtgtggttctcaaccgcaccagcataacctcccagctcatggtggaatggtttgtatggaagcccaaccaccctgagcgggagactgtggcccgcttgagccgtgacgccaccttccactatggagagcaggcagccaagaacaatctgaaggggcggctgcatttggagagtccttcccccggcgtgtaccgtctcttcatccagaacgtggctgtgcaggacagcgggacctacagctgccatgtggaggagtggctgcccagccccagtggcatgtggtataagcgggcagaggacaccgctgggcagacagctctgacagtcatgcgaccagatgcttccctgcaggtggacacagtggtccccaatgccacggtctctgagaaggcagctttccagctggactgtagcatcgtgtcccgctccagccaggactcccgcttcgctgtggcctggtattccctgaggactaaagctggggggaaaaggagcagccctggcctggaagaacaggaagaggaaagggaggaggaggaggaggaggacgacgacgacgacgacgacccaacagagcggacggccctgctgagcgtgggcccagatgctgtctttggcccagagggcagtccttgggagggcaggcttcgcttccagaggctctccccggtgctctaccggctcacagtgctgcaggcaagcccccaagatacaggcaattactcctgccatgtggaggagtggctgcccagccctcagaaggaatggtaccggctgacggaggaggagtcagcccccatcggcatccgtgttctagatacaagtcccaccctccagtccatcatctgctccaacgacgcactcttctacttcgtcttcttctaccctttccccatctttggcattcttatcatcaccatccttctggtgcgtttcaagagccggaactccagcaagaactctgatgggaagaatggggtgcctctgctgtggatcaaagagccacacctcaactactcccctacttgcctggagccccctgttctcagtatccatccaggggccatagactaagcgggtgatgccccagcggatgttggccacggaggagctgaggctctccctttctctgtgattggacagttgacagcacccaaactctggggtgcatgtgtgtggaaagttgtcagacttgaaaagtgttccaagttcccagtcagtcacagagacagactgcctctcggtggcagtcttggttggttagctatttgcgcgcaaatgttgtgatcctgccattatagatttcttgtttctgtttttagtaatgtagtgagtagctccaggtgccacatctactcacagatttatctagtattctcagatagatgttacagggcttcttattctttgtaatgtactctttttaaatccctttagtttaccctttttggattccttaatgtggacgaatttctcttacgtacaactgacagcaaaaggaagggcgaactttctagtgacaaggaatctcttccaagactttgtttttgcacatttgaaaatgccacccatggatcaaaatatacccaaacgttttttactttcttaacaagacttaagaattgtgtgtagtgtgggcaaaatttgtatgttgtcttttccctcagctggagttattggaaccactttgtagtcaagacgaaagcactgaattttgcttcaaagaactgtgtatgtacaagagaaatcctgcataaccccattaggagtagatggtgcccggcctatctgtcagggaggcaaaaaaggcttcatcccatccttgccaaaaaataagaaaactgtcttggagaatgggtcagaagccccaaacggcacacactttccaaattaaagtgggcaggggctgcttttagcagctgctgacctgcagatttgtcaaagccagtgactagagaaggaagggagaaaggctggctgttggcttgctctgagctgcaaggatggtctctaactgattaactgtgagcaggtgggcctgtgtcttcaggtgctttgccaaactcttaaaagaaagtgtccagtgaacttggaagtgggcccctgagctgagcacagggccaaagcagccatggcagacacctgacggagggcacggggctggctgacactaagtttggtgggacagtgaggggtgggaggggggtttccagggcctggtgttggagagtgcagagaaatatctacctccctggaggtgtgaagactaggtttttcttcttccttccaattagattttccttaattatagtgatgtcttccttattcatttttctctccctgcctctcactgccataagaatatcagcctgggggcagtccagacgcagccctttgtcatcctttctgtttgcctagtctcagcagactgtgatcacaaggcattgtctgtgggatttttcctttccctttcttgatctctcttgtggttctaggttgtttggttgttcattgttatggtggctttttattttaacgccccttgagccccatgatggctggtgtcaccctgttcttttacactgttgggccaggtgctgcttgtccttcttagggcatcatcaattgcaaatatttccttttgctccctttatgaagatgttcttatacccttgctttcccatatttttctggccaagcatgccatctcctttactctgggaacttacatcctgaatcccaagagggggtcacagtttggaaaaagtcatcagggattctggaactaagtctgataaaagattccagtgaagccctgttctgagaacgagcagactgcaggggaggccatgggattccccaggccagtgtctgtgctgatccttcaagggtctgcaggtatgcaggtggcctgggctgctcggcagatactttgctgattcccagctgaggggagcatggtggcgattgctcagccattttctgacagacacacagacctgccttttctcccccaagtataccgtaccctcctgtgagacagtgtgtgcaggcaccaccaccttaatcctgctgttgcctgacatgctgattctcatttattatgctgcatcaacacattagaggtacaggagcggctcagtcatgaaaaaagaaggtcttttgccccatttctttatttcagagatgtgggctttcagtgggaatttgctgactcctactttataggctgagtcaatgagggaagatgactggcgtttcctctgtctaaatgggaggttgccagagcgctggctgggactaggatgtgtaactaagatttcagtttgaaatcttagatttcagttcacggcgataaagaagtaggtgctgcacacaaatatgtaaagcaattgtaggaaatttgaaaggaaaaaaagaaaccgaagccagtattttaataattgctttttctgtgtattttgtattgggctgggggatagcatcaaaggttgaactttttgagctttctatgaaaaaccccaggaccttctttctttggccatttctatggaaatgcgatgtcagatggatggtaatggtgccctccagtggctgtgagacctcattgcgcattgtctactggagctttagtcttctgagacggaggaaaactgctgaatactctggattcatctatgtctacaatgttgcatttatgaaaaactacactgtgctaggcgcattctaggacatgaatatgaccacaccctctttcaccgggtgtttctgtagcaagttttcatattcttttcaaacaatggtttctctgcgttaattattgaggaaaaaaaaagatggggtaagaaaactacccatgcatgatgtagagagctgttgatttgtttctgtttttttaaaggaaaactatttgtaagatgttgcactaaaacattttatatacacttcagagacctgtagtaaattatgttgaaaat

SEQ ID NO: 12011 - DNA, 3773 bp, Homo sapiens
gtgtgcagtaaactggaatgctctccctcgctcactcctcagtgtaggagtgatctgaagcaggacaagctcagcctgcagctgccgtgggctttgtgtggactggacgcagagcttgggagacgggggagggctattactccaattcactgtcaatggaattacagctatagcggcagtgtatataggattgctttttctcgtcttcctgggttctgaagtaacggaagctaccttgtataaagacctcaacactgctgaccatgatcagcgcagcctggagcatcttcctcatcgggactaaaattgggctgttccttcaagtagcacctctatcagttatggctaaatcctgtccatctgtgtgtcgctgcgatgcgggtttcatttactgtaatgatcgctttctgacatccattccaacaggaataccagaggatgctacaactctctaccttcagaacaaccaaataaataatgctgggattccttcagatttgaaaaacttgctgaaagtagaaagaatatacctataccacaacagtttagatgaatttcctaccaacctcccaaagtatgtaaaagagttacatttgcaagaaaataacataaggactatcacttatgattcactttcaaaaattccctatctggaagaattacatttagatgacaactctgtctctgcagttagcatagaagagggagcattccgagacagcaactatctccgactgcttttcctgtcccgtaatcaccttagcacaattccctggggtttgcccaggactatagaagaactacgcttggatgataatcgcatatccactatttcatcaccatctcttcaaggtctcactagtctaaaacgcctggttctagatggaaacctgttgaacaatcatggtttaggtgacaaagttttcttcaacctagttaatttgacagagctgtccctggtgcggaattccctgactgctgcaccagtaaaccttccaggcacaaacctgaggaagctttatcttcaagataaccacatcaatcgggtgcccccaaatgctttttcttatctaaggcagctctatcgactggatatgtccaataataacctaagtaatttacctcagggtatctttgatgatttggacaatataacacaactgattcttcgcaacaatccctggtattgcgggtgcaagatgaaatgggtacgtgactggttacaatcactacctgtgaaggtcaacgtgcgtgggctcatgtgccaagccccagaaaaggttcgtgggatggctattaaggatctcaatgcagaactgtttgattgtaaggacagtgggattgtaagcaccattcagataaccactgcaatacccaacacagtgtatcctgcccaaggacagtggccagctccagtgaccaaacagccagatattaagaaccccaagctcactaaggatcaccaaaccacagggagtccctcaagaaaaacaattacaattactgtgaagtctgtcacctctgataccattcatatctcttggaaacttgctctacctatgactgctttgagactcagctggcttaaactgggccatagcccggcatttggatctataacagaaacaattgtaacaggggaacgcagtgagtacttggtcacagccctggagcctgattcaccctataaagtatgcatggttcccatggaaaccagcaacctctacctatttgatgaaactcctgtttgtattgagactgaaactgcaccccttcgaatgtacaaccctacaaccaccctcaatcgagagcaagagaaagaaccttacaaaaaccccaatttacctttggctgccatcattggtggggctgtggccctggttaccattgcccttcttgctttagtgtgttggtatgttcataggaatggatcgctcttctcaaggaactgtgcatatagcaaagggaggagaagaaaggatgactatgcagaagctggcactaagaaggacaactctatcctggaaatcagggaaacttcttttcagatgttaccaataagcaatgaacccatctcgaaggaggagtttgtaatacacaccatatttcctcctaatggaatgaatctgtacaaaaacaatcacagtgaaagcagtagtaaccgaagctacagagacagtggtattccagactcagatcactcacactcatgatgctgaaggactcacagcagacttgtgttttgggttttttaaacctaagggaggtgatggtaggaaccctgttctactgcaaaacactggaaaaagagactgaaaaaaagcaatgtactgtacatttgccatataatttatatttaagaactttttattaaaagtttcaaatttcaggttactgctgcgattgatgtagtggagatgcctgaacacaattctatattttagtattttttagtaatttgtactgtattttccttgcaaatattggagttataaaccatttactttgtgttctactgagtaagatgacttgttgactgtgaaagtgaattttcttgctgtgtcgaacaatcaggactgcattcatatgagatccttgtagtataagcacaggccatttttcactttggtattaataaaatgtaaaaaaaaaaaactggctgaatggctgaatgagataaaatttaattttaaaaaatggttatgaaataatgttccaattattaaatttgtattatcccagtggtattcaataaatcaaaatgtgtgaagtaatgggcaatatcaaacttcctgcatatctccatttttgctctaggcaaattaattatccttaaaaaagttaagcatatcttctgaactgaatacatcagctggcataaaaggagcatgaagtctgttaaagccattgtcagcaaagctttgaaaataaaggacttcacaaaaacggtaatgtaaatgtgcttccaagttggggggaaaatgtgtacttaggaaaacatggaaacttagacttgtatagtgtaatgaacacaaataccaaaactgcattttggttttgcctataccatcctgatttttgaaaagtgaattataaacacaaaattgttagtgtttatgatgtttttatcataaaggatgtcagagaaactttatgcatattaaaaatgtaatgtaattataagcgattcccctcaacaatccagagaaagtagttctttaaataagagataatttaaagaaaaataaatactagacatcaaatttagatctggtttatgtcaaaggttttaacactgtacataaatgttcaatttacttttacaaagatcaagaatactgcccattactgtcacaattttccagatattatataatgaactcgtaatgtaacatttccttctagcttcctactgaattgtgagctgttacttgttgaaaaaccatatcacttttctgttgccatgattttttttttttcaacaaaaaaccaaagtgcattgtacgccctttggccagtcttgtatgtgccttgatccaacgctacatgtattcagcttttaaaactccacaaatttttcatactccttaaatatgaaaaattatggtcttattgctgaataaaacttttaaaaagtacagaataattgtgcttgctttttcaggattgtgttactatcactaagtagcaaattgcccagcacattagtcctaaacgtcccatgtatttttctaggcataaaaataaaagttggctaaaaattttaaaaaatc

SEQ ID NO: 12012 - DNA, 3977 bp, Homo sapiens
gaggtgggctgtgtgcagtaaactggaatgctctccctcgctcactcctcagtgtaggagtgatctgaagcaggacaagctcagcctgcagctgccgtgggctttgtgtggactggacgcagagcttgggagacgggggagggctattactccaattcactgtcaatggaattacagctatagcggcagtgtatataggattgctttttctcgtcttcctggagatgctcagtcccagtatattttaaggaagagaaatataaaggaaatttagtatgcctccttttctttaaatgaagaatttagtttcctttacttcttaaaagagaatacctgttcttgtataacgtgactgcaccagacattctgaaaaatcagcaagaagcaaaagctggaaatagctatttcacagcagggttctgaagtaacggaagctaccttgtataaagacctcaacactgctgaccatgatcagcgcagcctggagcatcttcctcatcgggactaaaattgggctgttccttcaagtagcacctctatcagttatggctaaatcctgtccatctgtgtgtcgctgcgatgcgggtttcatttactgtaatgatcgctttctgacatccattccaacaggaataccagaggatgctacaactctctaccttcagaacaaccaaataaataatgctgggattccttcagatttgaaaaacttgctgaaagtagaaagaatatacctataccacaacagtttagatgaatttcctaccaacctcccaaagtatgtaaaagagttacatttgcaagaaaataacataaggactatcacttatgattcactttcaaaaattccctatctggaagaattacatttagatgacaactctgtctctgcagttagcatagaagagggagcattccgagacagcaactatctccgactgcttttcctgtcccgtaatcaccttagcacaattccctggggtttgcccaggactatagaagaactacgcttggatgataatcgcatatccactatttcatcaccatctcttcaaggtctcactagtctaaaacgcctggttctagatggaaacctgttgaacaatcatggtttaggtgacaaagttttcttcaacctagttaatttgacagagctgtccctggtgcggaattccctgactgctgcaccagtaaaccttccaggcacaaacctgaggaagctttatcttcaagataaccacatcaatcgggtgcccccaaatgctttttcttatctaaggcagctctatcgactggatatgtccaataataacctaagtaatttacctcagggtatctttgatgatttggacaatataacacaactgattcttcgcaacaatccctggtattgcgggtgcaagatgaaatgggtacgtgactggttacaatcactacctgtgaaggtcaacgtgcgtgggctcatgtgccaagccccagaaaaggttcgtgggatggctattaaggatctcaatgcagaactgtttgattgtaaggacagtgggattgtaagcaccattcagataaccactgcaatacccaacacagtgtatcctgcccaaggacagtggccagctccagtgaccaaacagccagatattaagaaccccaagctcactaaggatcaccaaaccacagggagtccctcaagaaaaacaattacaattactgtgaagtctgtcacctctgataccattcatatctcttggaaacttgctctacctatgactgctttgagactcagctggcttaaactgggccatagcccggcatttggatctataacagaaacaattgtaacaggggaacgcagtgagtacttggtcacagccctggagcctgattcaccctataaagtatgcatggttcccatggaaaccagcaacctctacctatttgatgaaactcctgtttgtattgagactgaaactgcaccccttcgaatgtacaaccctacaaccaccctcaatcgagagcaagagaaagaaccttacaaaaaccccaatttacctttggctgccatcattggtggggctgtggccctggttaccattgcccttcttgctttagtgtgttggtatgttcataggaatggatcgctcttctcaaggaactgtgcatatagcaaagggaggagaagaaaggatgactatgcagaagctggcactaagaaggacaactctatcctggaaatcagggaaacttcttttcagatgttaccaataagcaatgaacccatctcgaaggaggagtttgtaatacacaccatatttcctcctaatggaatgaatctgtacaaaaacaatcacagtgaaagcagtagtaaccgaagctacagagacagtggtattccagactcagatcactcacactcatgatgctgaaggactcacagcagacttgtgttttgggttttttaaacctaagggaggtgatggtaggaaccctgttctactgcaaaacactggaaaaagagactgaaaaaaagcaatgtactgtacatttgccatataatttatatttaagaactttttattaaaagtttcaaatttcaggttactgctgcgattgatgtagtggagatgcctgaacacaattctatattttagtattttttagtaatttgtactgtattttccttgcaaatattggagttataaaccatttactttgtgttctactgagtaagatgacttgttgactgtgaaagtgaattttcttgctgtgtcgaacaatcaggactgcattcatatgagatccttgtagtataagcacaggccatttttcactttggtattaataaaatgtaaaaaaaaaaaactggctgaatggctgaatgagataaaatttaattttaaaaaatggttatgaaataatgttccaattattaaatttgtattatcccagtggtattcaataaatcaaaatgtgtgaagtaatgggcaatatcaaacttcctgcatatctccatttttgctctaggcaaattaattatccttaaaaaagttaagcatatcttctgaactgaatacatcagctggcataaaaggagcatgaagtctgttaaagccattgtcagcaaagctttgaaaataaaggacttcacaaaaacggtaatgtaaatgtgcttccaagttggggggaaaatgtgtacttaggaaaacatggaaacttagacttgtatagtgtaatgaacacaaataccaaaactgcattttggttttgcctataccatcctgatttttgaaaagtgaattataaacacaaaattgttagtgtttatgatgtttttatcataaaggatgtcagagaaactttatgcatattaaaaatgtaatgtaattataagcgattcccctcaacaatccagagaaagtagttctttaaataagagataatttaaagaaaaataaatactagacatcaaatttagatctggtttatgtcaaaggttttaacactgtacataaatgttcaatttacttttacaaagatcaagaatactgcccattactgtcacaattttccagatattatataatgaactcgtaatgtaacatttccttctagcttcctactgaattgtgagctgttacttgttgaaaaaccatatcacttttctgttgccatgattttttttttttcaacaaaaaaccaaagtgcattgtacgccctttggccagtcttgtatgtgccttgatccaacgctacatgtattcagcttttaaaactccacaaatttttcatactccttaaatatgaaaaattatggtcttattgctgaataaaacttttaaaaagtacagaataattgtgcttgctttttcaggattgtgttactatcactaagtagcaaattgcccagcacattagtcctaaacgtcccatgtatttttctaggcataaaaataaaagttggctaaaaattttaaaaaatc

SEQ ID NO: 12013 - DNA, 10300 bp, Homo sapiens
aactgctagtggctgagtccctggcggggcgcggcggtggaaggtgtcgcgtacgggcttcccgagctgacgtggcttgaattgggaggggggcagctggagcctcaggcggcagcgcttctagaaatgctgagccgattatcaggattagcaaatgttgttttgcatgaattatcaggagatgatgacactgatcagaatatgagggctcccctagaccctgaattacaccaagaatctgacatggaatttaataatactacacaagaagatgttcaggagcgcctggcttatgcagagcaattggtggtggagctaaaagatattattagacagaaggatgttcaactgcagcagaaagatgaagctctacaggaagagagaaaagctgctgataacaaaattaaaaaactaaaacttcatgcgaaggccaaattaacttctttgaataaatacatagaagaaatgaaagcacaaggagggactgttctgcctacagaacctcagtcagaggagcaactttccaagcatgacaagagttctacagaggaagagatggaaatagaaaagataaaacataagctccaggagaaggaggaactaatcagcactttgcaagcccagcttactcaggcacaggcagaacaacctgcacagagttctacagagatggaagaatttgtaatgatgaagcaacagctccaggagaaggaagaattcattagcactttacaagcccagctcagccagacacaggcagagcaagctgcacagcaggtggtccgagagaaagatgcccgctttgaaacacaagttcgtcttcatgaagatgagcttcttcagttagtaacccaggcagatgtggaaacagagatgcaacagaaattgagggtgctgcaaaggaagcttgaggaacacgaagaatccttggtgggccgtgctcaggtcgttgacttgctgcaacaggagctgactgctgctgagcagagaaaccagattctctctcagcagttacagcagatggaagctgagcataatactttgaggaacactgtggaaacagaaagagaggagtccaagattctactggaaaagatggaacttgaagtggcagagagaaaattatccttccataatctgcaggaagaaatgcatcatcttttagaacagtttgagcaagcaggccaagcccaggctgaactagagtctcggtatagtgctttggagcagaagcacaaagcagaaatggaagagaagacctctcatattttgagtcttcaaaagactggacaagagctgcagtctgcctgtgatgctctaaaggatcaaaattcaaagcttctccaagataagaatgaacaggcagttcagtcagcccagaccattcagcaactggaagatcagctccagcaaaaatccaaagaaattagccaatttctaaatagactgcccttgcaacaacatgaaacagcatctcagacttctttcccagatgtttataatgagggcacacaggcagtcactgaggagaatattgcttctttgcagaagagagtggtagaactagagaatgaaaagggagccttgctccttagttctatagagctggaggagctgaaagctgagaatgaaaaactgtcttctcagattactctcctagaggctcagaatagaactggggaggcagacagagaagtcagtgagatcagcattgttgatattgccaacaagaggagctcttctgctgaggaaagtggacaagatgttctagaaaacacattttctcagaaacataaagaattatcagttttattgttggaaatgaaagaagctcaagaggaaattgcatttcttaaattacagctccagggaaaaagggctgaggaagcagatcatgaggtccttgaccagaaagaaatgaaacagatggagggtgagggaatagctccaattaaaatgaaagtatttcttgaagatacagggcaagattttcccttaatgccaaatgaagagagcagtcttccagcagttgaaaaagaacaggcgagcactgaacatcaaagtagaacatctgaggaaatatctttaaatgatgctggagtagaattgaaatcaacaaagcaggatggtgataaatccctttctgctgtaccagatattggtcagtgtcatcaggatgagttggaaaggttaaaaagtcaaattttggagctcgagctaaactttcataaagcacaagaaatctatgagaaaaatttagatgagaaagctaaggaaattagcaacctaaaccagttgattgaggagtttaagaaaaatgctgacaacaacagcagtgcattcactgctttgtctgaagaaagagaccagcttctctctcaggtgaaggaacttagcatggtaacagaattgagggctcaggtaaagcaactggaaatgaaccttgcagaagcagaaaggcaaagaagacttgattatgaaagccaaactgcccatgacaacctgctcactgaacagatccatagtctcagcatagaagccaaatctaaagatgtgaaaattgaagttttacagaatgaactggatgatgtgcagcttcagttttctgagcagagtaccctgataagaagcctgcaaagccagctgcaaaataaggaaagtgaagtgcttgagggggcagaacgtgtaaggcatatctcaagtaaagtggaagaactgtcccaggctctttcacagaaggaacttgaaataacaaaaatggatcagctcttactagagaaaaagagagatgtggaaaccctccaacaaaccatcgaggagaaggatcaacaagtgacagaaatcagctttagtatgactgagaaaatggttcagcttaatgaagagaagttttctcttggggttgaaattaagactcttaaagaacagctaaatttattatccagagctgaggaagcaaaaaaagagcaggtggaagaagataatgaagtttcttctggccttaaacaaaattatgatgagatgagcccagcaggacaaataagtaaggaagaacttcagcatgaatttgaccttctgaagaaagaaaatgagcagagaaagagaaagctccaggcagctcttattaacagaaaggagcttctgcaaagagtcagtagattggaagaagaattagccaacttgaaagatgaatctaagaaagaaatcccactcagtgagactgagaggggagaagtggaagaagataaagaaaacaaagaatactcagaaaaatgtgtgacttctaagtgccaagaaatagaaatttatttaaaacagacaatatctgagaaagaagtggaactacagcatataaggaaggatttggaagaaaagctggcagctgaagagcaattccaggctctggtcaaacagatgaatcagaccttgcaagataaaacaaaccaaatagatttgctccaagcagaaatcagtgaaaaccaagcaattatccagaagttaatcacaagtaacacggatgcaagtgatggggactccgtagcacttgtaaaggaaacagtggtgataagtccaccttgtacaggtagtagtgaacactggaaaccagaactagaagaaaagatactggcccttgaaaaagaaaaggagcaacttcaaaagaagctacaggaagccttaacctcccgcaaggcaattcttaaaaaggcacaggagaaagaaagacatctcagggaggagctaaagcaacagaaagatgactataatcgcttgcaagaacagtttgatgagcaaagcaaggaaaatgagaatattggagaccagctaaggcaactccagattcaagtaagggaatccatagacggaaaactcccaagcacagaccagcaggaatcgtgttcttccactccaggtttagaagaacctttattcaaagccacagaacagcatcacactcaacctgttttagagtccaacttgtgcccagactggccttctcattctgaagatgcgagtgctctgcagggcggaacttctgttgcccagattaaggcccagctgaaggaaatagaggctgagaaagtagagttagaattgaaagttagttctacaacaagtgagcttactaaaaaatcagaagaggtatttcagttacaagagcagataaataaacagggtttagaaatcgagagtctaaagacagtatcccatgaagctgaagtccatgccgaaagcctgcagcagaaattggaaagcagccaactacaaattgctggcctagaacatctaagagaattgcaacctaaactggatgaactgcaaaaactcataagcaaaaaggaagaagacgttagctacctttctggacaacttagtgagaaagaagcagctctcactaaaatacagacagagataatagaacaagaagatttaattaaggctctgcatacacagctagaaatgcaagccaaagagcatgatgagaggataaagcagctacaggtggaactttgtgaaatgaagcaaaaaccagaagagattggagaagaaagtagagcaaagcaacaaatacaaaggaaactgcaagctgcccttatttcccgaaaagaagcactaaaagaaaacaaaagtctccaagaggaattgtctttggccagaggtaccattgaacgtctcaccaagtctctggcagatgtggaaagccaagtttctgctcaaaataaagaaaaagatacggtcttaggaaggttagctcttcttcaagaagaaagagacaaactcattacagaaatggacaggtctttattggaaaatcagagtctcagcagctcctgtgaaagtctaaaactagctctagagggtcttactgaagacaaggaaaagttagtgaaggaaattgaatctttgaaatcttctaagattgcagaaagtactgagtggcaagagaaacacaaggagctacaaaaagagtatgaaattcttctgcagtcctatgagaatgttagtaatgaagcagaaaggattcagcatgtggtggaagctgtgaggcaagagaaacaagaactgtatggcaagttaagaagcacagaggcaaacaagaaggagacagaaaagcagttgcaggaagctgagcaagaaatggaggaaatgaaagaaaagatgagaaagtttgctaaatctaaacagcagaaaatcctagagctggaagaagagaatgaccggcttagggcagaggtgcaccctgcaggagatacagctaaagagtgtatggaaacacttctttcttccaatgccagcatgaaggaagaacttgaaagggtcaaaatggagtatgaaaccctttctaagaagtttcagtctttaatgtctgagaaagactctctaagtgaagaggttcaagatttaaagcatcagatagaagataatgtatctaaacaagctaacctagaggccaccgagaaacatgataaccaaacgaatgtcactgaagagggaacacagtctataccaggtgagactgaagagcaagactctctgagtatgagcacaagacctacatgttcagaatcggttccatcagcgaagagtgccaaccctgctgtaagtaaggatttcagctcacatgatgaaattaataactacctacagcagattgatcagctcaaagaaagaattgctggattagaggaggagaagcagaaaaacaaggaatttagccagactttagaaaatgagaaaaataccttactgagtcagatatcaacaaaggatggtgaactaaaaatgcttcaggaggaagtaaccaaaatgaacctgttaaatcagcaaatccaagaagaactctccagagttaccaaactaaaggagacagcagaagaagagaaagatgatttggaagagaggcttatgaatcaattagcagaacttaatggaagcattgggaattactgtcaggatgttacagatgcccaaataaaaaatgagctattggaatctgaaatgaagaaccttaaaaagtgtgtgagtgaattggaagaagaaaagcagcagttagtcaaggaaaaaactaaggtggaatcagaaatacgaaaggaatatttggagaaaatacaaggtgctcagaaagaacccggaaataaaagccatgcaaaggaacttcaggaactgttaaaagaaaaacaacaagaagtaaagcagctacagaaggactgcatcaggtatcaagagaaaattagtgctctggagagaactgttaaagctctagaatttgttcaaactgaatctcaaaaagatttggaaataaccaaagaaaatctggctcaagcagttgaacaccgcaaaaaggcacaagcagaattagctagcttcaaagtcctgctagatgacactcaaagtgaagcagcaagggtcctagcagacaatctcaagttgaaaaaggaacttcagtcaaataaagaatcagttaaaagccagatgaaacaaaaggatgaagatcttgagcgaagactggaacaggcagaagagaagcacctgaaagagaagaagaatatgcaagagaaactggatgctttgcgcagagaaaaagtccacttggaagagacaattggagagattcaggttactttgaacaagaaagacaaggaagttcagcaacttcaggaaaacttggacagtactgtgacccagcttgcagcctttactaagagcatgtcttccctccaggatgatcgtgacagggtgatagatgaagctaagaaatgggagaggaagtttagtgatgcgattcaaagcaaagaagaagaaattagactcaaagaagataattgcagtgttctaaaggatcaacttagacagatgtccatccatatggaagaattaaagattaacatttccaggcttgaacatgacaagcagatttgggagtccaaggcccagacagaggtccagcttcagcagaaggtctgtgatactctacagggggaaaacaaagaacttttgtcccagctagaagagacacgccacctataccacagttctcagaatgaattagctaagttggaatcagaacttaagagtctcaaagaccagttgactgatttaagtaactctttagaaaaatgtaaggaacaaaaaggaaacttggaagggatcataaggcagcaagaggctgatattcaaaattctaagttcagttatgaacaactggagactgatcttcaggcctccagagaactgaccagtaggctgcatgaagaaataaatatgaaagagcaaaagattataagcctgctttctggcaaggaagaggcaatccaagtagctattgctgaactgcgtcagcaacatgataaagaaattaaagagctggaaaacctgctgtcccaggaggaagaggagaatattgttttagaagaggagaacaaaaaggctgttgataaaaccaatcagcttatggaaacactgaaaaccatcaaaaaggaaaacattcagcaaaaggcacagttggattcctttgttaaatccatgtcttctctccaaaatgatcgagaccgcatagtgggtgactatcaacagctggaagagcgacatctctctataatcttggaaaaagaccaactcatccaagaggctgctgcagagaataataagcttaaagaagaaatacgaggcttgagaagtcatatggatgatctcaattctgagaatgccaagctagatgcagaactgatccaatatagagaagacctgaaccaagtgataacaataaaggacagccaacaaaagcagcttcttgaagttcaacttcagcaaaataaggagctggaaaataaatatgctaaattagaagaaaagctgaaggaatctgaggaagcaaatgaggatctgcggaggtcctttaatgccctacaagaagagaaacaagatttatctaaagagattgagagtttgaaagtatctatatcccagctaacaagacaagtaacagccttgcaagaagaaggtactttaggactctatcatgcccagttaaaagtaaaagaagaagaggtacacaggttaagtgctttgttttcctcctctcaaaagagaattgcagaactggaagaagaattggtttgtgttcaaaaggaagctgccaagaaggtaggtgaaattgaagataaactgaagaaagaattaaagcatcttcatcatgatgcagggataatgagaaatgaaactgaaacagcagaagagagagtggcagagctagcaagagatttggtggagatggaacagaaattactcatggtcaccaaagaaaataaaggtctcacagcacaaattcagtcttttggaaggtctatgagttccttgcaaaatagtagagatcatgccaatgaggaacttgatgaactgaaaaggaaatatgatgccagtctgaaggaattggcacagttgaaagaacagggactcttaaacagagagagagatgctcttctttctgaaaccgccttttcaatgaactccactgaggagaatagcttgtctcaccttgagaaacttaaccaacagctcctatccaaagatgagcaattgcttcacttgtcctcacaactagaagattcttataaccaagtgcagtccttttccaaggctatggccagtctgcagaatgagagagatcacctgtggaatgagctggagaaatttcgaaagtcagaggaagggaagcagaggtctgcagctcagccttccaccagcccagctgaagtacagagtttaaaaaaagctatgtcttcactccaaaatgacagagacagactactgaaggaattgaagaatctgcagcagcaatacttacagattaatcaagagatcactgagttacatccactgaaggctcaacttcaggagtatcaagataagacaaaagcatttcagattatgcaagaagagctcaggcaggaaaacctctcctggcagcatgagctgcatcagctcaggatggagaagagttcctgggaaatacatgagaggagaatgaaggaacagtaccttatggctatctcagataaagatcagcagctcagtcatctgcagaatcttataagggaattgaggtcttcttcctcccagactcagcctctcaaagtgcaataccaaagacaggcatccccagagacatcagcttccccagatgggtcacaaaatctggtttatgagacagaacttctcaggacccagctcaatgacagcttaaaggaaattcaccaaaaggagttaagaattcagcaactgaacagcaacttctctcagctactggaagagaaaaacaccctttccattcagctctgcgataccagtcagagtcttcgtgagaaccagcagcactatggtgaccttttaaatcactgtgcagtcttggagaagcaggttcaagagctgcaggcggggccactaaatatagatgttgctccaggagctccccaggaaaagaatggagttcacagaaagagtgaccctgaggaactaagggaaccgcagcaaagcttttctgaagctcagcagcagctatgcaacaccagacaggaagtgaatgaattaaggaagctgctggaagaagaacgagaccaaagagtggctgctgagaatgctctctctgtggccgaggagcagatcagacggttagagcacagtgaatgggactcttcccggactcctatcattggctcctgtggcactcaggagcaggcactgttaatagatcttacaagcaacagttgtcgaaggacccggagtggcgttggatggaagcgagtcctgcgttcactctgtcattcacggacccgagtgccacttctagcagccatctactttctaatgattcatgtcctgctcattctgtgttttacgggccatctatagacttagttgttactctttggaccactcccttcaaaacttggaattctctcacctctaacatcagaacatcaattccagtggaacagtcttcccatttacaggtcttctctccaactcttcacggaaagtgcctgcaaaaacagaggtggatacgaggacaggttggagctgcagggactggcgagtctgctttcttctactgccctgagcctgaacgcttctgcttaatctgagaatcacatttggtttgttgagcctaatatttgttgagattttgcaggaccctgatcttttgtggtcctgtaaaagatactgaggaatgtctttcagccaagccaagaggatggtttcaataaacctaataatctgaagttcagctttttttttttttttt

SEQ ID NO: 12014 - DNA, 2672 bp, Homo sapiens
cttccagagagcaatatggctggttccccaacatgcctcaccctcatctatatcctttggcagctcacagggtcagcagcctctggacccgtgaaagagctggtcggttccgttggtggggccgtgactttccccctgaagtccaaagtaaagcaagttgactctattgtctggaccttcaacacaacccctcttgtcaccatacagccagaagggggcactatcatagtgacccaaaatcgtaatagggagagagtagacttcccagatggaggctactccctgaagctcagcaaactgaagaagaatgactcagggatctactatgtggggatatacagctcatcactccagcagccctccacccaggagtacgtgctgcatgtctacgagcacctgtcaaagcctaaagtcaccatgggtctgcagagcaataagaatggcacctgtgtgaccaatctgacatgctgcatggaacatggggaagaggatgtgatttatacctggaaggccctggggcaagcagccaatgagtcccataatgggtccatcctccccatctcctggagatggggagaaagtgatatgaccttcatctgcgttgccaggaaccctgtcagcagaaacttctcaagccccatccttgccaggaagctctgtgaaggtgctgctgatgacccagattcctccatggtcctcctgtgtctcctgttggtgcccctcctgctcagtctctttgtactggggctatttctttggtttctgaagagagagagacaagaagagtacattgaagagaagaagagagtggacatttgtcgggaaactcctaacatatgcccccattctggagagaacacagagtacgacacaatccctcacactaatagaacaatcctaaaggaagatccagcaaatacggtttactccactgtggaaataccgaaaaagatggaaaatccccactcactgctcacgatgccagacacaccaaggctatttgcctatgagaatgttatctagacagcagtgcactcccctaagtctctgctcaaaaaaaaaacaattctcggcccaaagaaaacaatcagaagaattcactgatttgactagaaacatcaaggaagaatgaagaacgttgacttttttccaggataaattatctctgatgcttctttagatttaagagttcataattccatccactgctgagaaatctcctcaaacccagaaggtttaatcacttcatcccaaaaatgggattgtgaatgtcagcaaaccataaaaaaagtgcttagaagtattcctatagaaatgtaaatgcaaggtcacacatattaatgacagcctgttgtattaatgatggctccaggtcagtgtctggagtttcattccatcccagggcttggatgtaaggattataccaagagtcttgctaccaggagggcaagaagaccaaaacagacagacaagtccagcagaagcagatgcacctgacaaaaatggatgtattaattggctctataaactatgtgcccagcactatgctgagcttacactaattggtcagacgtgctgtctgccctcatgaaattggctccaaatgaatgaactactttcatgagcagttgtagcaggcctgaccacagattcccagagggccaggtgtggatccacaggacttgaaggtcaaagttcacaaagatgaagaatcagggtagctgaccatgtttggcagatactataatggagacacagaagtgtgcatggcccaaggacaaggacctccagccaggcttcatttatgcacttgtgctgcaaaagaaaagtctaggttttaaggctgtgccagaacccatcccaataaagagaccgagtctgaagtcacattgtaaatctagtgtaggagacttggagtcaggcagtgagactggtggggcacggggggcagtgggtacttgtaaacctttaaagatggttaattcattcaatagatatttattaagaacctatgcggcccggcatggtggctcacacctgtaatcccagcactttgggaggccaaggtgggtgggtcatctgaggtcaggagttcaagaccagcctggccaacatggtgaaaccccatctctactaaagatacaaaaatttgctgagcgtggtggtgtgcacctgtaatcccagctactcgagaggccaaggcatgagaatcgcttgaacctgggaggtggaggttgcagtgagctgagatggcaccactgcactccggcctaggcaacgagagcaaaactccaatacaaacaaacaaacaaacacctgtgctaggtcagtctggcacgtaagatgaacatccctaccaacacagagctcaccatctcttatacttaagtgaaaaacatggggaaggggaaaggggaatggctgcttttgatatgttccctgacacatatcttgaatggagacctccctaccaagtgatgaaagtgttgaaaaacttaataacaaatgcttgttgggcaagaatgggattgaggattatcttctctcagaaaggcattgtgaaggaattgagccagatctctctccctactgcaaaaccctattgtagtaaaaaagtcttctttactatcttaataaaacagatattgtgagattcaaaaaaaaaaaaaaaa

SEQ ID NO: 12015 - DNA, 5480 bp, Homo sapiens
cgcctctcttcccccacccggagtggccggcagtccccggcaggcgtgcgccgggcagcagacagccgggagagctcgagcgccaggaagctggggacccgtgaccgtcacggagagatagagaacccctagcggacctgaggaacctgggctctgcttcctccgcctgctgcctggactgctcagtgaggtggggggatccccggccaccggtgctgtggctgtagctgacctctttggaccgggatgtgggtatcctgggctcctggcctgtggctgctcggtctttgggctaccttcggccatggggcaaatacaggtgcacaatgcccaccttcacagcaggaaggactcaaattggaacacagtagtagcctgccagccaacgtgactggcttcaacctcatccaccgactcagcctcatgaagaagtctgccatcaagaagatccgcaaccccaaggggcctctcatcctgcgcctgggggcggcccccgtgacccagcccacgcgacgagtattccctcggggtctcccggaggagtttgccctggtgctgacactactgctgaagaaacacacccaccagaagacgtggtatctgtttcaagtgaccgatgcaaatgggtatccacagatatccctggaagtcaacagccaagagcggagcctggagctcagggcccagggccaggatggcgactttgtgtcctgcatcttcccagtgccccagctcttcgacttgcgttggcacaagctgatgctgagtgtggctggacgtgtggcctctgtgcacgtggactgcagctcagcctcctcccagcctctggggccccgacgacccatgaggcctgtgggccatgtatttctaggcttggatgctgagcagggcaagcctgtctcgtttgaccttcagcaggtgcacatctactgtgacccggagctcgtgctggaggagggctgctgtgagattttaccagcagggtgccccccagagacctccaaggcccgccgggacacccagagcaatgagctcattgagatcaatccacagtctgaaggcaaggtctacacccgctgcttctgcctggaggagcctcaaaacagcgaggtggatgcccagctgacgggaagaatcagccagaaggcagaaaggggagcaaaggtccatcaggagacagcagccgatgagtgtccgccctgtgtccatggtgcccgggacagcaatgtcacacttgctccctctggccccaagggagggaaaggtgagcggggcctgcctggtccaccaggctccaagggagagaagggagcacggggcaatgactgtgttcgaatctccccggatgccccgcttcagtgtgcagaaggcccgaagggagagaagggggagtcaggagctctgggaccctcaggactcccaggctcaacaggcgagaagggccagaaaggcgagaagggcgacggaggcatcaagggcgtgccgggaaagccaggccgggacgggccaggagagatctgtgtcattgggcccaaagggcagaagggagaccctggctttgttgggcctgaggggctggcaggagagcctgggccccccggcctccctggaccccctgggataggactgcctgggaccccgggggatccaggtggcccaccaggccccaagggagacaagggcagctcggggatcccaggaaaggaaggccctggtgggaaacctgggaagccaggtgtgaagggagagaagggtgacccctgtgaagtgtgcccaacactgcctgaagggttccagaactttgttggacttcctggaaagccagggcccaaaggggagcctggtgatcctgtacgagccaggggagaccctggcatccaaggcatcaaaggagagaagggggagccctgcttgtcctgcagctcggttgtaggggcccagcatcttgtgtcctccacaggggccagtggagatgtgggttcccctggctttggtctgcctggccttccgggtagagctggggttccagggctgaaaggagagaagggtaacttcggggaggcagggccagctggcagtccagggccaccaggaccagtggggccagcaggcatcaaaggggcgaagggggagccctgtgagccgtgcccagccctgtccaaccttcaggatggggatgtccgtgtggtggccttgcctggcccatccggagagaagggggaacctgggcctccaggctttggcttgccaggaaaacagggcaaggctggagagcgtggactgaaggggcagaagggtgatgctgggaatcctggagaccctggaacgccgggcaccacagggcggccaggactgtcaggagagcctggagttcagggccccgcggggccaaaaggagaaaagggtgatggctgcactgcctgccccagcctgcaggggacagtgacagacatggcaggacggcctgggcagcccgggcccaaaggagagcagggccccgaaggcgtgggccgacctggtaaacccggccaacccggtctaccaggagttcaagggcccccaggactgaagggcgtgcagggagagccagggcctccaggaaggggagtccagggaccccagggggagcctggagccccgggtttgcctggcattcagggacttccgggacctcggggaccacctggccccactggagagaagggtgcccagggatctccaggggtgaaaggagccaccggacccgtgggacctcctggggccagtgtctctgggcctccgggccgtgatgggcagcaaggacagacgggactcagaggaacaccaggtgaaaaaggaccacgaggagagaagggtgagccaggggagtgctcctgcccctctcaaggagacctcatcttctctggcatgccgggtgctccgggactttggatgggcagctcctggcagccgggcccgcagggtccaccaggtattcccggaccaccaggcccccctggagtacctgggctgcagggagtgcctggaaacaacggtttgccaggacagcctgggctcactgcagaactgggatccttaccaattgaacagcacctccttaagagtatctgcggggactgtgtccaggggcagagggcccacccagggtacctcgtggagaagggagagaagggagaccagggcatccctggtgtgccaggcctcgacaactgcgcccagtgctttttgtcactggagcgcccaagagccgaggaggcccggggtgacaacagtgagggagatcctggctgtgttgggagcccaggcctacctggtcctccgggattgccaggccagagaggagaagagggtccgcctggcatgaggggctccccgggtcctccaggccctatcggccccccaggttttcctggtgctgttggctcccccggattgcctggccttcaaggagagcgaggtctcacgggcctgactggagacaagggggagccgggtcctccagggcaaccaggttacccaggtgccacgggccccccaggactgcctggcatcaagggggagcgtggctacaccgggtcagcgggagagaaaggagagccgggccccccaggatctgaaggcctcccaggccccccaggcccagcgggtcccagaggagagcgaggaccccaaggtaactccggtgagaagggcgaccagggatttcaaggccagccaggctttaccgggcccaccgggtcccctggattcccaggcaaagttggatcacctggcccacctggccctcaagcagagaagggcagcgaagggattcgaggcccatcaggcctgcctggctcccctgggccaccgggacctcctgggattcagggccccgccggtctggatggtttggatgggaaggacggcaagcctggcttgaggggggaccctggtcctgctggcccccctggactcatgggaccaccgggctttaaggggaaaacaggacatcctggcctcccaggacctaagggtgactgtggcaaaccaggtccccctggcagcactggccggcctggcgcagagggtgaacctggtgccatgggaccccagggaagacccggtcccccgggacacgttgggccaccagggcctccaggccagccaggaccagctgggatctctgcagtgggtctgaaaggagaccgaggagccaccggagaaaggggccttgcaggcctcccaggccagcccggcccccctggacaccctggccccccaggcgaacctggtacggatggtgcagctggcaaagagggaccccctggaaagcagggattctatggacctcctggtcccaagggtgatccaggagctgcaggacagaagggccaggcaggagagaaggggagagccggcatgcctggtggacctggcaagagtggttccatggggcctgttgggccaccgggccctgcaggagagagaggccaccctggagctccggggccttcggggagccctggcttgcctggtgtgcctggctccatgggagacatggtgaattatgatgaaatcaagaggttcatcagacaagagatcattaaaatgtttgatgagagaatggcttactacacctccaggatgcagttccccatggagatggcggcagctccgggacgaccagggcctccagggaaggatggtgctccgggcaggccaggtgctccagggtcacctgggctccctggtcagattggcagagaaggacggcagggcttgccaggagtaagaggattgcctggtaccaaaggtgaaaaaggggacattggtattggcattgcaggagaaaatggtcttcccggccccccaggtcctcaaggtcctccaggctatggcaagatgggtgcaacaggaccaatgggccagcaaggcatccctggcatccctgggcccccgggtcccatgggccagccaggcaaggctggccactgtaatccctctgactgctttggggccatgccgatggagcagcagtacccacccatgaaaaccatgaaggggccttttggctgaaattccccacctgcctttggatgaaagactccgttgggaataaatggccaaagcttataggactctgtgacaggttgtgaatgttttttttttttgttgttgttgtttttaattgctgttaatattttttaaataataaagaaacaaaactatctgccctttcccttccagtgggttcctctggtgctgcagccagagctccctgttgccctccttttcccgtttagtcccaggaacaaaaagggcatttgggtacaggggcatatacctgtaatcctagctattcaaggggctgaggtgggaggatcgcctgagcccaggagtttgagaccagtctaagcaacataatgagactcagtctccgaaaaataaaaattaaaaaataaagggtatttccctccttaaaaaaaaaaaaaaaaaaa

SEQ ID NO: 12016 - DNA, 3606 bp, Homo sapiens
aaaggtgactagagtgctaagccagtcaacagggaaaacttggctcctgactttgggtctttcttctcagtctatatggaagaaaactgagaaaaaatataaaaaagaagaacacaactagttgcgcatctcctaaagagatggaatcgccacttatatatgtttcagttttgcttttgaacatatttgaattttcatcaggaatagtatataataaagatgatacagagaaacgctttgcatgttctaacaaagggttccctcaagagaatgaaataatcaagttgtatcttttcttagaaaacttgaaaatccagtgtttcttccaaactgaaaatgaaattgcatcaaaagcaatgctaagtgtgttcacatcaggaggacttgctcccagcttgggaatcatgaatagtacatataatggcatcttccactttaatttaacgttgttcagtgatcggattttgtggttggttgatattcctagagaaaacatcacacaaagcacagatattgcagctgtagaagaatggttagtaagaatcactttacatcatggactaaatatttatgctactgaaggaactctattggatgttattcgagaaccgattcttcagtggactcctggggatgtgattccagaaagtgaaatcagtaaattatatccacatgtggtagatctcaaagtgacaaaatgcccctgtgccaatgatgtggcattactaggcttcattgtggatacaatagttgatggtgtttacataggcataacctttggtggattctggcatgattatgataccacatggtttaacatgacacagactatctattcccaacttcaagaagaatatgaagacctttcattggtggatatggttttaacgaatcattttttagttatcctcacctctttgggcctttttgtaagtgaagatcttcgttatccatcacgccacagcttatcgttttccagggcagacttttgtggttttgaaagggttgactatgtgaaaggaaaactgtggtataatgaaagatgttttgctaacagagagcactttgaagttgattatgttacagttacctttgagagaaacagaaccctaagtgagtcaagctcttgtttttatagtcaggaaccatttcttgaatgggtaccctgcttacctcacatttttaaaggaataaaaatttttccaactgtgctaacatttcttgttgaccaagagcgtggtactggagtttacctcttctataacaaggtcaggaaaactgccattgcctctgtgagcaccctgagaaataatgaaccaaattcacaatcaaaatttccaatttttcggtttccttcatcattctcttctcccgttggaatggtatttcatccccgaagccactttttgtatgcttatggcaatcagatatggctttcagttgatggcggcaacacctttcaattaatagctaactttcatgatgatatcataaagaagacttttcatagtttttatacatcagctattacttttgtttctcaacgtggaaaggtttactcgacaaaggcaggaatgggaagatacagtgcagtcggaagtgttactgagagaattttcacattatactatgatcacttgggattcctacataagctgactctgggtcgctttgaagctagtggaccacccacagcctttggaaattctagaaatctttttggacagcctccagatatgggctttgagactgcgcttgccccacagcacacctccttagatgaaattatcttttttgcatatgtacctgagaacgaaccccaggaaacgatctacagcaagaagttcggcaatatacactatggaaaagtgatacactctgggaaaactggaagagcttacataagaaaggtattgcaacatacgactcctaaaggatttttgtcctcagttattgcagaaatgaaagagccctttggattagaagaagtgaatgagagctcttgtttgtctagttcccttttgattaataaagctggaaatgtctataaactcactcttgattcacaagttgttcaggccttgtttgaagatacagatatagagaagactgtagtgcttcccgggtacagcagcttcctcatcacaagcattttagataataagaatgcattagccattgctaccatgcctgaaagtgcacccaacaatatgacctttctaaagagcacatggttcttatacaactttgggcaaaggaatggacgaacatggaaaatatattcaaaaccatgtaattattggtttcaacatgatgattcaccatccctcaacattgtgaaatacattgatctgggaaactcttatgttttaaaagctaaggtcatacggaatgcaaaaggttttcgaatgcttgaaataccactactgactgtgtttgttggaaaccctaatttgttggaagttacagctgaagtcacttttgatgatactgacagttatgtaataacaatttctgcagctagcaaagttttacatcagggttcaacttcactggcatttattatgtggtcagcctctactgagtgctttgttacgacaatggtgccaacactgaaaagcagctgtagttatctcagatctatgcatcacattcctagcaaatttatcccatttgaagactggattagtggagttcataaagacagtcagggttttaacctcatcaaaactttgccgataaactacaggcctccatctaatatgggaattgctattccactcacagataatttttatcatgcagatcctagcaaacccataccaagaaacatgtttcacatgtcaaagaaaaccggtaaattcaaacagtgtgctaatgtttccactcgggaggagtgtaactgcacaaaggatcagaagttttcacatgctgttgctttctcggattgcagggaaaaagttcctcgctttaagtttccaattacacaatatccagtttctttggaaattatcaacgaggatggacgtgtcccattgcaatctccatatctggttactgtgactgaagtgaacatgaggcacaactggaaactgaaacacactgtgccagaaaatattaaaagaatgaaacaattagtagaaccaattcttggtgctgcagtgtataatccttcaggtctcaacttaagcataaagggctctgaacttttccactttagagtgaccgtcatttcaggagtaactttttgtaacttaattgaagaatttcagatttatgttgatgaggcaccattgccattcccaggacacacgcttattgccgtggcaacagcggtagtgctagggggattaatttttatagcatttatgtttcaactgcaaggcatccatccgtggaggacattccaaagatggattagaagaaaccaagagaagttttcaagtatctctctcagtgagctgattcatagatcaaagtctgaagagtgaacacatggtgatcataatttctctttattttctagttttatcagccaattcctagaacaatatatttaaatgttaaatatgcaagctacataaaatcctaaagaattgtcattat

SEQ ID NO: 12017 - DNA, 3489 bp, Homo sapiens
agagcccctgcaccaactcaccctgtaccctctctccttcttcgttagtcttctttcccccttttccctcctctgtctgtgcctatcccccgacttttgcatctgaccaaaggacgaatgagggagacgttcctgcagatcggggcagcaactttcctcagctggtctctgggctccgggagccagagagcgctgatcctccgcggtctgcggcccatggaagaggaggaggaggagccgtgatgggctagcgacagcactgaggagccccgagagagctcagccttgccagccagctccgcggtcccacgcgggttccctcgagctcgctccgtggggagcgcgcagcgtgcttggaaccggagcatccagagaggatgaggcggggacccggcccaagttgggtgcatctctcgggcgtccggcagcggctgtatctcggcatgaattaagaagctaggaagatggagcacggcacactcctcgcccagcccgggctctggaccagggacaccagctgggcactcctctatttcctctgctatatcctccctcagaccgccccgcaagtactcaggatcggagggatttttgaaacagtggaaaatgagcctgttaatgttgaagaattagctttcaagtttgcagtcaccagcattaacagaaaccgaaccctgatgcctaacaccacattaacctatgacatccagagaattaacctttttgatagttttgaagcctcgcggagagcatgtgaccagctggctcttggtgtggctgctctctttggcccttcccatagctcctccgtcagtgctgtgcagtctatttgcaatgctctcgaagttccacacatacagacccgctggaaacacccctcggtggacaacaaagatttgttttacatcaacctttacccagattatgcagctatcagcagggcgatcctggatctggtcctctattacaactggaaaacagtgacagtggtgtatgaagacagcacaggtctaattcgtctacaagagctcatcaaagctccctccagatataatattaaaatcaaaatccgccagctgccctctgggaataaagatgccaagcctttactcaaggagatgaagaaaggcaaggagttctatgtgatatttgattgttcacatgaaacagccgctgaaatccttaagcagattctgttcatgggcatgatgaccgagtactatcactactttttcacaaccctggacttatttgctttggatctggaactctataggtacagtggcgtaaacatgaccgggtttcggctgcttaacattgacaaccctcacgtgtcatccatcattgagaagtggtccatggagagactgcaggccccacccaggcccgagactggccttttggatggcatgatgacaactgaagcggctctgatgtacgatgctgtgtacatggtggccattgcctcgcaccgggcatcccagctgaccgtcagctccctgcagtgccatagacataagccatggcgcctcggacccagatttatgaacctgatcaaagaggcccggtgggatggcttgactgggcatatcacctttaataaaaccaatggcttgaggaaggattttgatctggacattattagtctcaaagaggaaggaactgaaaagattgggatttggaattccaacagtgggcttaacatgacggacagcaacaaagacaagtccagcaatatcactgattcattggccaacagaacactcattgtcaccaccattctggaagaaccctatgttatgtacaggaaatctgataagcctctatatggaaatgacagatttgaaggatattgcctagacctgttgaaagaattgtcaaacatcctgggtttcatttatgatgttaaactagttcccgatggcaaatatggggcccagaatgacaaaggggagtggaacgggatggttaaagaactcatagatcacagggctgacctggcagtggctcctcttaccatcacctacgtgcgggagaaagtcattgacttctccaaacccttcatgaccctaggcatcagcattctctaccggaagcccaatggtaccaatccaggcgttttctccttcctcaaccccctgtctccagatatttggatgtatgtgctcttagcctgcttgggagtcagctgtgtactctttgtgattgcaaggtttacaccctacgagtggtataacccccacccatgcaaccctgactcagacgtggtggaaaacaattttactttactaaatagtttctggtttggagttggagctctcatgcagcaaggatcagagctgatgcccaaagctctatcgaccagaatagttggagggatatggtggtttttcaccctaatcatcatttcatcctacacggccaatctggctgccttcttgacagtagagagaatggaatcccccatagattcggcagatgatctggcaaagcaaaccaagatagaatatggggcggttagagatggatcaacaatgaccttcttcaagaaatcaaaaatctccacctatgagaagatgtgggctttcatgagcagcaggcagcagaccgccctggtaagaaacagtgatgaggggatccagagagtgctcaccacagactacgcgctgctgatggagtccaccagcattgagtatgtgacgcagagaaactgcaacctcactcagatcgggggcctcattgactccaaaggttacggagtgggaacacctattggttctccttaccgggataaaattactattgctattcttcaactccaagaagaagggaagctgcatatgatgaaagagaagtggtggcgtgggaatggctgccccgaggaagacaacaaagaagccagtgccctgggagtggaaaatattggaggcatcttcattgttctggctgccggactggtcctttctgtatttgtagctattggagaattcatatacaaatcacggaagaataatgatattgaacagtgtctctctttcaacgctatcatggaagaactgggaatctcactgaagaatcagaaaaaaataaagaaaaagtcaagaactaaggggaaatcttccttcacaagtatccttacttgtcatcagagacgaactcagagaaaagagactgtggcgtgatccaaggaaacgcctgtaggaagaaaaaggatgcattccctacagatttttggagaaaggatttctgaggagtgtgtgatgtgtttccatatatctatatccataactctgattatgaatacagatataagaaatacaaaagtttaaaaagctcacatagatatgacttgggaagtgacaccagttcttttaaaataaatttgtatgctcaattattttgcattttttctttttccccaataaattgttgtgtgtgctttctaaataataataaaacaacagggtttttttccagaaaaaaaaaaaa

SEQ ID NO: 12018 - DNA, 3231 bp, Homo sapiens
agagcccctgcaccaactcaccctgtaccctctctccttcttcgttagtcttctttcccccttttccctcctctgtctgtgcctatcccccgacttttgcatctgaccaaaggacgaatgagggagacgttcctgcagatcggggcagcaactttcctcagctggtctctgggctccgggagccagagagcgctgatcctccgcggtctgcggcccatggaagaggaggaggaggagccgtgatgggctagcgacagcactgaggagccccgagagagctcagccttgccagccagctccgcggtcccacgcgggttccctcgagctcgctccgtggggagcgcgcagcgtgcttggaaccggagcatccagagaggatgaggcggggacccggcccaagttgggtgcatctctcgggcgtccggcagcggctgtatctcggcatgaattaagaagctaggaagatggagcacggcacactcctcgcccagcccgggctctggaccagggacaccagctgggcactcctctatttcctctgctatatcctccctcagaccgccccgcaagtactcaggatcggagggatttttgaaacagtggaaaatgagcctgttaatgttgaagaattagctttcaagtttgcagtcaccagcattaacagaaaccgaaccctgatgcctaacaccacattaacctatgacatccagagaattaacctttttgatagttttgaagcctcgcggagagcatgtgaccagctggctcttggtgtggctgctctctttggcccttcccatagctcctccgtcagtgctgtgcagtctatttgcaatgctctcgaagttccacacatacagacccgctggaaacacccctcggtggacaacaaagatttgttttacatcaacctttacccagattatgcagctatcagcagggcgatcctggatctggtcctctattacaactggaaaacagtgacagtggtgtatgaagacagcacaggtctaattcgtctacaagagctcatcaaagctccctccagatataatattaaaatcaaaatccgccagctgccctctgggaataaagatgccaagcctttactcaaggagatgaagaaaggcaaggagttctatgtgatatttgattgttcacatgaaacagccgctgaaatccttaagcagattctgttcatgggcatgatgaccgagtactatcactactttttcacaaccctggacttatttgctttggatctggaactctataggtacagtggcgtaaacatgaccgggtttcggctgcttaacattgacaaccctcacgtgtcatccatcattgagaagtggtccatggagagactgcaggccccacccaggcccgagactggccttttggatggcatgatgacaactgaagcggctctgatgtacgatgctgtgtacatggtggccattgcctcgcaccgggcatcccagctgaccgtcagctccctgcagtgccatagacataagccatggcgcctcggacccagatttatgaacctgatcaaagaggcccggtgggatggcttgactgggcatatcacctttaataaaaccaatggcttgaggaaggattttgatctggacattattagtctcaaagaggaaggaactgaaaaggctgctggcgaagtgtctaaacacttgtataaagtgtggaagaagattgggatttggaattccaacagtgggcttaacatgacggacagcaacaaagacaagtccagcaatatcactgattcattggccaacagaacactcattgtcaccaccattctggaagaaccctatgttatgtacaggaaatctgataagcctctatatggaaatgacagatttgaaggatattgcctagacctgttgaaagaattgtcaaacatcctgggtttcatttatgatgttaaactagttcccgatggcaaatatggggcccagaatgacaaaggggagtggaacgggatggttaaagaactcatagatcacagggctgacctggcagtggctcctcttaccatcacctacgtgcgggagaaagtcattgacttctccaaacccttcatgaccctaggcatcagcattctctaccggaagcccaatggtaccaatccaggcgttttctccttcctcaaccccctgtctccagatatttggatgtatgtgctcttagcctgcttgggagtcagctgtgtactctttgtgattgcaaggtttacaccctacgagtggtataacccccacccatgcaaccctgactcagacgtggtggaaaacaattttactttactaaatagtttctggtttggagttggagctctcatgcagcaaggatcagagctgatgcccaaagctctatcgaccagaatagttggagggatatggtggtttttcaccctaatcatcatttcatcctacacggccaatctggctgccttcttgacagtagagagaatggaatcccccatagattcggcagatgatctggcaaagcaaaccaagatagaatatggggcggttagagatggatcaacaatgaccttcttcaagaaatcaaaaatctccacctatgagaagatgtgggctttcatgagcagcaggcagcagaccgccctggtaagaaacagtgatgaggggatccagagagtgctcaccacagactacgcgctgctgatggagtccaccagcattgagtatgtgacgcagagaaactgcaacctcactcagatcgggggcctcattgactccaaaggttacggagtgggaacacctattggttctccttaccgggataaaattactattgctattcttcaactccaagaagaagggaagctgcatatgatgaaagagaagtggtggcgtgggaatggctgccccgaggaagacaacaaagaagccagtgccctgggagtggaaaatattggaggcatcttcattgttctggctgccggactggtcctttctgtatttgtagctattggagaattcatatacaaatcacggaagaataatgatattgaacaggctttttgtttcttttatggactgcaatgtaagcaaacccatccaaccaactccacttctggaactactttatctacggatttagaatgtggtaaattaattcgagaggagagagggattcgaaaacagtcctcagttcatactgtgtaatcagtttaaa

SEQ ID NO: 12019 - DNA, 3409 bp, Homo sapiens
ggttgttccttggcgcagtgagtgaagaacatgcagcgattgctaatgggtttgggaagcggagactccttcctctctctatgaccatgccgtgatcgtgtctgcggtcaccactcgacgcatcctcatttctacccgaacccaggagccgaacgctagatcggggaagtgggtgccgtgcgtgtgggcacagaaacaccatgaagattattttcccgattctaagtaatccagtcttcaggcgcaccgttaaactcctgctctgtttactgtggattggatattctcaaggaaccacacatgtattaagatttggtggtatttttgaatatgtggaatctggcccaatgggagctgaggaacttgcattcagatttgctgtgaacacaattaacagaaacagaacattgctacccaatactacccttacctatgatacccagaagataaacctttatgatagttttgaagcatccaagaaagcctgtgatcagctgtctcttggggtggctgccatcttcgggccttcacacagctcatcagcaaacgcagtgcagtccatctgcaatgctctgggagttccccacatacagacccgctggaagcaccaggtgtcagacaacaaagattccttctatgtcagtctctacccagacttctcttcactcagccgtgccattttagacctggtgcagtttttcaagtggaaaaccgtcacggttgtgtatgatgacagcactggtctcattcgtttgcaagagctcatcaaagctccatcaaggtataatcttcgactcaaaattcgtcagttacctgctgatacaaaggatgcaaaacccttactaaaagaaatgaaaagaggcaaggagtttcatgtaatctttgattgtagccatgaaatggcagcaggcattttaaaacaggcattagctatgggaatgatgacagaatactatcattatatctttaccactctggacctctttgctcttgatgttgagccctaccgatacagtggtgttaacatgacagggttcagaatattaaatacagaaaatacccaagtctcctccatcattgaaaagtggtcgatggaacgattgcaggcacctccgaaacccgattcaggtttgctggatggatttatgacgactgatgctgctctaatgtatgatgctgtgcatgtggtgtctgtggccgttcaacagtttccccagatgacagtcagttccttgcagtgtaatcgacataaaccctggcgcttcgggacccgctttatgagtctaattaaagaggcacattgggaaggcctcacaggcagaataactttcaacaaaaccaatggcttgagaacagattttgatttggatgtgatcagtctgaaggaagaaggtctagaaaagattggaacgtgggatccagccagtggcctgaatatgacagaaagtcaaaagggaaagccagcgaacatcacagattccttatccaatcgttctttgattgttaccaccattttggaagagccttatgtcctttttaagaagtctgacaaacctctctatggtaatgatcgatttgaaggctattgcattgatctcctcagagagttatctacaatccttggctttacatatgaaattagacttgtggaagatgggaaatatggagcccaggatgatgccaatggacaatggaatggaatggttcgtgaactaattgatcataaagctgaccttgcagttgctccactggctattacctatgttcgagagaaggtcatcgacttttccaagccctttatgacacttggaataagtattttgtaccgcaagcccaatggtacaaacccaggcgtcttctccttcctgaatcctctctcccctgatatctggatgtatattctgctggcttacttgggtgtcagttgtgtgctctttgtcatagccaggtttagtccttatgagtggtataatccacacccttgcaaccctgactcagacgtggtggaaaacaattttaccttgctaaatagtttctggtttggagttggagctctcatgcagcaaggttctgagctcatgcccaaagcactgtccaccaggatagtgggaggcatttggtggtttttcacacttatcatcatttcttcgtatactgctaacttagccgcctttctgacagtggaacgcatggaatcccctattgactctgctgatgatttagctaaacaaaccaagatagaatatggagcagtagaggatggtgcaaccatgacttttttcaagaaatcaaaaatctccacgtatgacaaaatgtgggcctttatgagtagcagaaggcagtcagtgctggtcaaaagtaatgaagaaggaatccagcgagtcctcacctctgattatgctttcctaatggagtcaacaaccatcgagtttgttacccagcggaactgtaacctgacacagattggcggccttatagactctaaaggttatggcgttggcactcccatgggttctccatatcgagacaaaattaccatagcaattcttcagctgcaagaggaaggcaaactgcatatgatgaaggagaaatggtggaggggcaatggttgcccagaagaggagagcaaagaggccagtgccctgggggttcagaatattggtggcatcttcattgttctggcagccggcttggtgctttcagtttttgtggcagtgggagaatttttatacaaatccaaaaaaaacgctcaattggaaaaggaatcttctatttggttagtgccaccataccatccagacactgtttagtaatcttttgaaacttactaaaagaggtttttaataatgaggtccttctgtagtgccatggtagaagaattgaggatgtccctgaagtgccagcgtcggttaaaacataagccacaggccccagttattgtgaaaacagaagaagttatcaacatgcacacatttaacgacagaaggttgccaggtaaagaaaccatggcataaagctgggaggccaaacacccaagcacaaactgtcgtctttttccaaacaatttagccagaatgtttcctgtggaaatatgcaacctgtgcaaaataaaatgagttacctcatgccgctgtgtctatgaactagagactctgtgatctaagcagttgcaatgatcagacttgatttacaagcatcatggatcaaccaagttacacggggttacactgttaatcatgggttcctcccttcttctgagtgaatgttaacatgcgcattttgtggctgatttcaaatgcagtccagtgagaaattacaggttccttttgaagctcaactgttgccaggagatggaatatcaatgcccaacagggcaaccaataaaagtgtcactaagaatataaatatt

SEQ ID NO: 12020 - DNA, 3322 bp, Homo sapiens
ggttgttccttggcgcagtgagtgaagaacatgcagcgattgctaatgggtttgggaagcggagactccttcctctctctatgaccatgccgtgatcgtgtctgcggtcaccactcgacgcatcctcatttctacccgaacccaggagccgaacgctagatcggggaagtgggtgccgtgcgtgtgggcacagaaacaccatgaagattattttcccgattctaagtaatccagtcttcaggcgcaccgttaaactcctgctctgtttactgtggattggatattctcaaggaaccacacatgtattaagatttggtggtatttttgaatatgtggaatctggcccaatgggagctgaggaacttgcattcagatttgctgtgaacacaattaacagaaacagaacattgctacccaatactacccttacctatgatacccagaagataaacctttatgatagttttgaagcatccaagaaagcctgtgatcagctgtctcttggggtggctgccatcttcgggccttcacacagctcatcagcaaacgcagtgcagtccatctgcaatgctctgggagttccccacatacagacccgctggaagcaccaggtgtcagacaacaaagattccttctatgtcagtctctacccagacttctcttcactcagccgtgccattttagacctggtgcagtttttcaagtggaaaaccgtcacggttgtgtatgatgacagcactggtctcattcgtttgcaagagctcatcaaagctccatcaaggtataatcttcgactcaaaattcgtcagttacctgctgatacaaaggatgcaaaacccttactaaaagaaatgaaaagaggcaaggagtttcatgtaatctttgattgtagccatgaaatggcagcaggcattttaaaacaggcattagctatgggaatgatgacagaatactatcattatatctttaccactctggacctctttgctcttgatgttgagccctaccgatacagtggtgttaacatgacagggttcagaatattaaatacagaaaatacccaagtctcctccatcattgaaaagtggtcgatggaacgattgcaggcacctccgaaacccgattcaggtttgctggatggatttatgacgactgatgctgctctaatgtatgatgctgtgcatgtggtgtctgtggccgttcaacagtttccccagatgacagtcagttccttgcagtgtaatcgacataaaccctggcgcttcgggacccgctttatgagtctaattaaagaggcacattgggaaggcctcacaggcagaataactttcaacaaaaccaatggcttgagaacagattttgatttggatgtgatcagtctgaaggaagaaggtctagaaaagattggaacgtgggatccagccagtggcctgaatatgacagaaagtcaaaagggaaagccagcgaacatcacagattccttatccaatcgttctttgattgttaccaccattttggaagagccttatgtcctttttaagaagtctgacaaacctctctatggtaatgatcgatttgaaggctattgcattgatctcctcagagagttatctacaatccttggctttacatatgaaattagacttgtggaagatgggaaatatggagcccaggatgatgccaatggacaatggaatggaatggttcgtgaactaattgatcataaagctgaccttgcagttgctccactggctattacctatgttcgagagaaggtcatcgacttttccaagccctttatgacacttggaataagtattttgtaccgcaagcccaatggtacaaacccaggcgtcttctccttcctgaatcctctctcccctgatatctggatgtatattctgctggcttacttgggtgtcagttgtgtgctctttgtcatagccaggtttagtccttatgagtggtataatccacacccttgcaaccctgactcagacgtggtggaaaacaattttaccttgctaaatagtttctggtttggagttggagctctcatgcagcaaggttctgagctcatgcccaaagcactgtccaccaggatagtgggaggcatttggtggtttttcacacttatcatcatttcttcgtatactgctaacttagccgcctttctgacagtggaacgcatggaatcccctattgactctgctgatgatttagctaaacaaaccaagatagaatatggagcagtagaggatggtgcaaccatgacttttttcaagaaatcaaaaatctccacgtatgacaaaatgtgggcctttatgagtagcagaaggcagtcagtgctggtcaaaagtaatgaagaaggaatccagcgagtcctcacctctgattatgctttcctaatggagtcaacaaccatcgagtttgttacccagcggaactgtaacctgacacagattggcggccttatagactctaaaggttatggcgttggcactcccatgggttctccatatcgagacaaaattaccatagcaattcttcagctgcaagaggaaggcaaactgcatatgatgaaggagaaatggtggaggggcaatggttgcccagaagaggagagcaaagaggccagtgccctgggggttcagaatattggtggcatcttcattgttctggcagccggcttggtgctttcagtttttgtggcagtgggagaatttttatacaaatccaaaaaaaacgctcaattggaaaagaggtccttctgtagtgccatggtagaagaattgaggatgtccctgaagtgccagcgtcggttaaaacataagccacaggccccagttattgtgaaaacagaagaagttatcaacatgcacacatttaacgacagaaggttgccaggtaaagaaaccatggcataaagctgggaggccaaacacccaagcacaaactgtcgtctttttccaaacaatttagccagaatgtttcctgtggaaatatgcaacctgtgcaaaataaaatgagttacctcatgccgctgtgtctatgaactagagactctgtgatctaagcagttgcaatgatcagacttgatttacaagcatcatggatcaaccaagttacacggggttacactgttaatcatgggttcctcccttcttctgagtgaatgttaacatgcgcattttgtggctgatttcaaatgcagtccagtgagaaattacaggttccttttgaagctcaactgttgccaggagatggaatatcaatgcccaacagggcaaccaataaaagtgtcactaagaatataaatatt

SEQ ID NO: 12021 - DNA, 1967 bp, Homo sapiens
tccaggtttgttctggaaaacactaggtctgagagacagcaacaacaaaagtatactctaccattaaagaaataatgccgtatatgtagtagcacttttcaaagaaggaagaaaggtgggagtcatttccagggtaattttgacaagaggaactgtcattatgaacatggtgggtatgaacttctgccttcacgctgccaggagaatgatggaagcatggagatgagggatgtccacaaggaccgccaactaagacacactccttatagaatccaatgcaacaggaagctagtgaaatgacatagtgaagatcaaatccatattaccatttggagaaatagaaaacctccagagagaaaaatgaggcggaacacacaagatgaaaacatgaggaaatggttcaaggtcacaatatgtatatttgtcagtcattttactgcgccctactctgtgaagaataagttgaagccaggccaaatggagatgctaaagctgaccatgaacaaacggtacaatgtctcccagcaagctcttgatctccagaatctccgctttgacccagacttgatgggccgtgacattgatataatcctgaatcgaagaaactgcatggctgccaccctgaagatcactgaaagaaatttccctgagctgttgtctttgaacttgtgcaacaacaaactgtaccagctggatggcctttctgacattacagagaaggctcccaaagtcaagaccctgaatctctccaaaaataagctggagtcggcgtgggagttgggcaaggtgaaagggctgaagctcgaagagctatggctagaagggaacccgttgtgcagcaccttctcggaccagtctgcctatgtaagtgccatccgggattgtttccccaagttgttacgcctggacggccgagagttatccgcaccagtgattgttgacattgacagctctgagacaatgaaaccctgcaaggaaaactttactggatctgagaccctaaagcatttagtcctgcaattcctgcagcagagcaacttgtgcaagtacttcaaggatagcaggaatataaaaattctcaaagacccctacctgcagaggaagctgctaaagcacacaaaatgtccacgaaacgtggactccctcagtgcattgcctgaaactcagcatgacttcacctccatcctggtggacatgtggtaccagaccgtgaacacctgcttcctccctcgggcaggcccagagagccagaggtgggtaggaggttgaggaggatcctgagcacctgagcgcttccttttcaggaaaggatgctctgcttttctgtcaacggagtgttcaaggaaggtggtggtgtttgttgtctctgaagtggaaggatggtctcagggttctgatcttgccttcatgtggaccttcatcactacctctggccgcaattccagtctgtgcatcatgaatgataagctgtttctgagggatgccagcccccaagagactcagagtgccttctccatcccagtgtccacactctcctccagctctgagccctccctctcctaggagcacaggaaatggtgcaggctttctctgcccagtctgggatgaaactagagtggtctcagaagtgccttcaggacaataagtggaactacattagagctggtcaggtcttcactatgctccagactgagggcaagatcccagtggaggccttcaagcaaatcccctaaaaggagccctttgatgtcatctttgtcttccttctcatcctctttgtttcctcttttcaccagcctaagaccactctaaggactggggttggaggcctggctgaccaagaagccaaagttaacttgcaggccacaggacatagccacctgaagagccagttgttctgtgtatttgccccactcatgatcaccgtttattttcataataaacagtgacgttacatgttgtatgtt

SEQ ID NO: 12022 - DNA, 2037 bp, Homo sapiens
tccaggtttgttctggaaaacactaggtctgagagacagcaacaacaaaagtatactctaccattaaagaaataatgccgtatatgtagtagcacttttcaaagaaggaagaaaggtgggagtcatttccagggtaattttgacaagaggaactgtcattatgaacatggtgggtatgaacttctgccttcacgctgccaggagaatgatggaagcatggagatgagggatgtccacaaggaccgccaactaagacacactccttatagaatccaatgcaacaggaagctagtgaaatgacatagtgaagatcaaatccatattaccatttggagaaatagaaaacctccagagagaaaaatgaggcggaacacacaagatgaaaacatgaggaaatggttcaaggtcacaattccttatgggataaagtatgacaaggcatggctaatgaattcaatccagagcaattgcagtgtccccttcactccggttgatttccactacatccgaaatcgggcatgcttctttgtccaggttgctagtgctgcctctgcattgaaggatgtcagttataagatttatgatgatgagaaccaaaagatatgtatatttgtcagtcattttactgcgccctactctgtgaagaataagttgaagccaggccaaatggagatgctaaagctgaccatgaacaaacggtacaatgtctcccagcaagctcttgatctccagaatctccgctttgacccagacttgatgggccgtgacattgatataatcctgaatcgaagaaactgcatggctgccaccctgaagatcactgaaagaaatttccctgagctgttgtctttgaacttgtgcaacaacaaactgtaccagctggatggcctttctgacattacagagaaggctcccaaagtcaagaccctgaatctctccaaaaataagctggagtcggcgtgggagttgggcaaggtgaaagggctgaagctcgaagagctatggctagaagggaacccgttgtgcagcaccttctcggaccagtctgcctatgtaagtgccatccgggattgtttccccaagttgttacgcctggacggccgagagttatccgcaccagtgattgttgacattgacagctctgagacaatgaaaccctgcaaggaaaactttactggatctgagaccctaaagcatttagtcctgcaattcctgcagcagagcaacttgtgcaagtacttcaaggatagcaggaatataaaaattctcaaagacccctacctgcagaggaagctgctaaagcacacaaaatgtccacgaaacgtggactccctcagtgcattgcctgaaactcagcatgacttcacctccatcctggtggacatgtggtaccagaccgtgaacacctgcttcctccctcgggcaggcccagagagccagagtggaaggatggtctcagggttctgatcttgccttcatgtggaccttcatcactacctctggccgcaattccagtctgtgcatcatgaatgataagctgtttctgagggatgccagcccccaagagactcagagtgccttctccatcccagtgtccacactctcctccagctctgagccctccctctcctaggagcacaggaaatggtgcaggctttctctgcccagtctgggatgaaactagagtggtctcagaagtgccttcaggacaataagtggaactacattagagctggtcaggtcttcactatgctccagactgagggcaagatcccagtggaggccttcaagcaaatcccctaaaaggagccctttgatgtcatctttgtcttccttctcatcctctttgtttcctcttttcaccagcctaagaccactctaaggactggggttggaggcctggctgaccaagaagccaaagttaacttgcaggccacaggacatagccacctgaagagccagttgttctgtgtatttgccccactcatgatcaccgtttattttcataataaacagtgacgttacatgttgtatgtt

SEQ ID NO: 12023 - DNA, 2062 bp, Homo sapiens
tccaggtttgttctggaaaacactaggtctgagagacagcaacaacaaaagtatactctaccattaaagaaataatgccgtatatgtagtagcacttttcaaagaaggaagaaaggtgggagtcatttccagggtaattttgacaagaggaactgtcattatgaacatggtgggtatgaacttctgccttcacgctgccaggagaatgatggaagcatggagatgagggatgtccacaaggaccgccaactaagacacactccttatagaatccaatgcaacaggaagctagtgaaatgacatagtgaagatcaaatccatattaccatttggagaaatagaaaacctccagagagaaaaatgaggcggaacacacaagatgaaaacatgaggaaatggttcaaggtcacaattccttatgggataaagtatgacaaggcatggctaatgaattcaatccagagcaattgcagtgtccccttcactccggttgatttccactacatccgaaatcgggcatgcttctttgtccaggttgctagtgctgcctctgcattgaaggatgtcagttataagatttatgatgatgagaaccaaaagatatgtatatttgtcagtcattttactgcgccctactctgtgaagaataagttgaagccaggccaaatggagatgctaaagctgaccatgaacaaacggtacaatgtctcccagcaagctcttgatctccagaatctccgctttgacccagacttgatgggccgtgacattgatataatcctgaatcgaagaaactgcatggctgccaccctgaagatcactgaaagaaatttccctgagctgttgtctttgaacttgtgcaacaacaaactgtaccagctggatggcctttctgacattacagagaaggctcccaaagtcaagaccctgaatctctccaaaaataagctggagtcggcgtgggagttgggcaaggtgaaagggctgaagctcgaagagctatggctagaagggaacccgttgtgcagcaccttctcggaccagtctgcctatgtaagtgccatccgggattgtttccccaagttgttacgcctggacggccgagagttatccgcaccagtgattgttgacattgacagctctgagacaatgaaaccctgcaaggaaaactttactggatctgagaccctaaagcatttagtcctgcaattcctgcagcagagcaacttgtgcaagtacttcaaggatagcaggaatataaaaattctcaaagacccctacctgcagaggaagctgctaaagcacacaaaatgtccacgaaacgtggactccctcagtgcattgcctgaaactcagcatgacttcacctccatcctggtggacatgtggtaccagaccgtgaacacctgcttcctccctcgggcaggcccagagagccagaggtggtggtgtttgttgtctctgaagtggaaggatggtctcagggttctgatcttgccttcatgtggaccttcatcactacctctggccgcaattccagtctgtgcatcatgaatgataagctgtttctgagggatgccagcccccaagagactcagagtgccttctccatcccagtgtccacactctcctccagctctgagccctccctctcctaggagcacaggaaatggtgcaggctttctctgcccagtctgggatgaaactagagtggtctcagaagtgccttcaggacaataagtggaactacattagagctggtcaggtcttcactatgctccagactgagggcaagatcccagtggaggccttcaagcaaatcccctaaaaggagccctttgatgtcatctttgtcttccttctcatcctctttgtttcctcttttcaccagcctaagaccactctaaggactggggttggaggcctggctgaccaagaagccaaagttaacttgcaggccacaggacatagccacctgaagagccagttgttctgtgtatttgccccactcatgatcaccgtttattttcataataaacagtgacgttacatgttgtatgtt

SEQ ID NO: 12024 - DNA, 2884 bp, Homo sapiens
cctcctcctctgggatcttgaaaacgtagaattcccagagactctgctgatggacagaatccggctccaggaactggcattccagttgcaccagttaactgtcctggcctcagtcttgctagtggccagaagcttctctggtgaagttttattcagatcacctgaatttgtggatagactgaaatgcaccaccaaggccctaactgaggaatttatctccaggcctgaagagactatgctgagtgtgagtgaacaggtgtctcaggaagtccatcaaggccttaaggacatgggcctcactactctgagcagtgaaaacacagcatctcttctaggccaactccagaacatcaccaagaaagagaactgcattcgtagcattgttggagtctctgctacactttcctggaggcctcattctcattgaaaaggagttggcagaactgggctggaagtttctcaatctgatgcatcataatcagcagagtcatttttcacaaaacgaaatctttccagaagatcacgaataagagagatcaaagctaggcagcttgagttgaagtagagctggaagaaggagttttgaggactgtttcaaaaccactggactagatgatctctaaaggatcttatccaggacgcttcattgcatttggtcttcatttctccttagtctcctccaggctgacatttcctcaatctttattggtcttccacagccctgacacttttggagataccagtcagcatttccaagttcgttctgtgagactgtagtgtcaggacaaagcaacaacaaaatgtgctctactctaaagaagtgtgggacatacagaactgaagttgcagaatgccatgaccatggtagcacttttcaaggaagaaagaaaggtgggagttctttccgggataattttgacaagaggagctgtcattatgaacatggtgggtatgagcgcccgccttcacactgccaggagaatgatggaagcgtggagatgagggatgtccacaaggaccaacaactaagacacactccttatagcatccgatgcgaaagaagaatgaaatggcatagtgaagacgaaatccgtattaccacgtggagaaatagaaaacctccggagagaaaaatgagtcagaacacacaggatggatacacaaggaactggtttaaggtcacaattccttacgggataaagtatgacaaggcatggctaatgaattcaatccagagccattgcagtgaccgcttcactccggttgatttccactacgtccgaaatcgggcatgcttctttgtccaggatgctagcgctgcctccgcattgaaggatgtcagttataagatttatgatgatgagaaccaaaagatatgtatatttgtcaatcattctactgcgccctactctgtgaagaataagttgaagccaggccaaatggagatgctaaagctgaccatgaacaaacggtacaatgtctcccagcaagctcttgatctccagaatctccgctttgacccagacttgatgggccgtgacattgatataatcctgaatcgaagaaactgcatggctgccaccctgaagatcattgaaagaaatttccctgagctgttgtctttgaacttgtgcaacaacaagctgtaccagctggatggcctttctgacattacagagaaggctcccaaagtcaagaccctgaatctctccaaaaataagctggagtcggcgtgggagttgggcaaggtgaaagggctgaagctcgaagagctatggctagaagggaacccgttgtgcagcaccttctcggaccagtccgcctatgtaagtgccatccgggattgtttccccaagttgttacgcctggacggccgagagttatccgcaccagtgattgttgacattgacagctctgagacaatgaaaccctgcaaggaaaactttactggatctgagaccctaaagcatttagtcctgcaattcctgcagcagtattactcgatctatgactctggagatcgacagggtctcctcggtgcttaccacgatgaggcctgcttctccttggctattcccttcgaccccaaggactcagccccgagcagcttgtgcaagtactttgaggatagcaggaatatgaaaacactcaaggacccctacctgaagggggaactgctgaggcgcacaaaacgtgacattgtggactccctcagtgcgttgcccaaaactcagcatgacctcagctccatcctggtggacgtgtggtgccagacggaaaggatgctctgcttttctgtcaatggggttttcaaggaagtggaaggacagtctcagggttctgttctcgccttcacccggaccttcattgctacccctggcagcagttccagtctgtgcatcgtgaatgacgagctgtttgtgagggatgccagcccccaagagactcagagtgccttctccatcccagtgtccacactctcctccagctctgagccctccctctcccaggagcagcaggaaatggtgcaggctttctctgcccagtctgggatgaaactggagtggtctcagaagtgccttcaggacaatgagtggaactacactagagctggccaggccttcactatgctccagaccgagggcaagatccccgcagaggccttcaagcaaatctcctaaaaggagccctccgatgtcttctttgtcttcgttcacatcctctttgtttcctcttttcaccagcctaaggcctggctgaccaggaagccaacgttaacttgcaggccacgtgacataaccacccaaagagccagttgctctgtgtattcgccccactcatgatcaccattttattttcataataaagagtgacgttacacgtt

SEQ ID NO: 12025 - DNA, 2346 bp, Homo sapiens
ttgtggcaagattctgaggggaagtgtagctcccaggttggttccaagtcttcttccaattaggatcttatccaggacgcttcattgcatttggtcttcatttctccttagtctcctccaggctgacatttcctcaatctttattggtcttccacagccctgacacttttggagataccagtcagcatttccaagttcgttctgtgagactgtagtgtcaggacaaagcaacaacaaaatgtgctctactctaaagaagtgtgggacatacagaactgaagttgcagaatgccatgaccatggtagcacttttcaaggaagaaagaaaggtgggagttctttccgggataattttgacaagaggagctgtcattatgaacatggtgggtatgagcgcccgccttcacactgccaggagaatgatggaagcgtggagatgagggatgtccacaaggaccaacaactaagacacactccttatagcatccgatgcgaaagaagaatgaaatggcatagtgaagacgaaatccgtattaccacgtggagaaatagaaaacctccggagagaaaaatgagtcagaacacacaggatggatacacaaggaactggtttaaggtcacaattccttacgggataaagtatgacaaggcatggctaatgaattcaatccagagccattgcagtgaccgcttcactccggttgatttccactacgtccgaaatcgggcatgcttctttgtccaggatgctagcgctgcctccgcattgaaggatgtcagttataagatttatgatgatgagaaccaaaagatatgtatatttgtcaatcattctactgcgccctactctgtgaagaataagttgaagccaggccaaatggagatgctaaagctgaccatgaacaaacggtacaatgtctcccagcaagctcttgatctccagaatctccgctttgacccagacttgatgggccgtgacattgatataatcctgaatcgaagaaactgcatggctgccaccctgaagatcattgaaagaaatttccctgagctgttgtctttgaacttgtgcaacaacaagctgtaccagctggatggcctttctgacattacagagaaggctcccaaagtcaagaccctgaatctctccaaaaataagctggagtcggcgtgggagttgggcaaggtgaaagggctgaagctcgaagagctatggctagaagggaacccgttgtgcagcaccttctcggaccagtccgcctatgtaagtgccatccgggattgtttccccaagttgttacgcctggacggccgagagttatccgcaccagtgattgttgacattgacagctctgagacaatgaaaccctgcaaggaaaactttactggatctgagaccctaaagcatttagtcctgcaattcctgcagcagtattactcgatctatgactctggagatcgacagggtctcctcggtgcttaccacgatgaggcctgcttctccttggctattcccttcgaccccaaggactcagccccgagcagcttgtgcaagtactttgaggatagcaggaatatgaaaacactcaaggacccctacctgaagggggaactgctgaggcgcacaaaacgtgacattgtggactccctcagtgcgttgcccaaaactcagcatgacctcagctccatcctggtggacgtgtggtgccagacggaaaggatgctctgcttttctgtcaatggggttttcaaggaagtggaaggacagtctcagggttctgttctcgccttcacccggaccttcattgctacccctggcagcagttccagtctgtgcatcgtgaatgacgagctgtttgtgagggatgccagcccccaagagactcagagtgccttctccatcccagtgtccacactctcctccagctctgagccctccctctcccaggagcagcaggaaatggtgcaggctttctctgcccagtctgggatgaaactggagtggtctcagaagtgccttcaggacaatgagtggaactacactagagctggccaggccttcactatgctccagaccgagggcaagatccccgcagaggccttcaagcaaatctcctaaaaggagccctccgatgtcttctttgtcttcgttcacatcctctttgtttcctcttttcaccagcctaaggcctggctgaccaggaagccaacgttaacttgcaggccacgtgacataaccacccaaagagccagttgctctgtgtattcgccccactcatgatcaccattttattttcataataaagagtgacgttacacgttaaaaaaaaaaaaaaaaaaaaaaaa

SEQ ID NO: 12026 - DNA, 1848 bp, Homo sapiens
tccaggtttgttctggaaaacactaggtctgagagacagcaacaacaaaagtatactctaccattaaagaaataatgccgtatatgtagtagcacttttcaaagaaggaagaaaggtgggagtcatttccagggtaattttgacaagaggaactgtcattatgaacatggtgggtatgaacttctgccttcacgctgccaggagaatgatggaagcatggagatgagggatgtccacaaggaccgccaactaagacacactccttatagaatccaatgcaacaggaagctagtgaaatgacatagtgaagatcaaatccatattaccatttggagaaatagaaaacctccagagagaaaaatgaggcggaacacacaagatgaaaacatgaggaaatggttcaaggtcacaatatgtatatttgtcagtcattttactgcgccctactctgtgaagaataagttgaagccaggccaaatggagatgctaaagctgaccatgaacaaacggtacaatgtctcccagcaagctcttgatctccagaatctccgctttgacccagacttgatgggccgtgacattgatataatcctgaatcgaagaaactgcatggctgccaccctgaagatcactgaaagaaatttccctgagctgttgtctttgaacttgtgcaacaacaaactgtaccagctggatggcctttctgacattacagagaaggctcccaaagtcaagaccctgaatctctccaaaaataagctggagtcggcgtgggagttgggcaaggtgaaagggctgaagctcgaagagctatggctagaagggaacccgttgtgcagcaccttctcggaccagtctgcctatgtaagtgccatccgggattgtttccccaagttgttacgcctggacggccgagagttatccgcaccagtgattgttgacattgacagctctgagacaatgaaaccctgcaaggaaaactttactggatctgagaccctaaagcatttagtcctgcaattcctgcagcagagcaacttgtgcaagtacttcaaggatagcaggaatataaaaattctcaaagacccctacctgcagaggaagctgctaaagcacacaaaatgtccacgaaacgtggactccctcagtgcattgcctgaaactcagcatgacttcacctccatcctggtggacatgtggtaccagaccgtgaacacctgcttcctccctcgggcaggcccagagagccagagtggaaggatggtctcagggttctgatcttgccttcatgtggaccttcatcactacctctggccgcaattccagtctgtgcatcatgaatgataagctgtttctgagggatgccagcccccaagagactcagagtgccttctccatcccagtgtccacactctcctccagctctgagccctccctctcctaggagcacaggaaatggtgcaggctttctctgcccagtctgggatgaaactagagtggtctcagaagtgccttcaggacaataagtggaactacattagagctggtcaggtcttcactatgctccagactgagggcaagatcccagtggaggccttcaagcaaatcccctaaaaggagccctttgatgtcatctttgtcttccttctcatcctctttgtttcctcttttcaccagcctaagaccactctaaggactggggttggaggcctggctgaccaagaagccaaagttaacttgcaggccacaggacatagccacctgaagagccagttgttctgtgtatttgccccactcatgatcaccgtttattttcataataaacagtgacgttacatgttgtatgtt

SEQ ID NO: 12027 - DNA, 1973 bp, Homo sapiens
tccaggtttgttctggaaaacactaggtctgagagacagcaacaacaaaagtatactctaccattaaagaaataatgccgtatatgtagtagcacttttcaaagaaggaagaaaggtgggagtcatttccagggtaattttgacaagaggaactgtcattatgaacatggtgggtatgaacttctgccttcacgctgccaggagaatgatggaagcatggagatgagggatgtccacaaggaccgccaactaagacacactccttatagaatccaatgcaacaggaagctagtgaaatgacatagtgaagatcaaatccatattaccatttggagaaatagaaaacctccagagagaaaaatgaggcggaacacacaagatgaaaacatgaggaaatggttcaaggtcacaattccttatgggataaagtatgacaaggcatggctaatgaattcaatccagagcaattgcagtgtccccttcactccggttgatttccactacatccgaaatcgggcatgcttctttgtccaggttgctagtgctgcctctgcattgaaggatgtcagttataagatttatgatgatgagaaccaaaagatatgtatatttgtcagtcattttactgcgccctactctgtgaagaataagttgaagccaggccaaatggagatgctaaagctgaccatgaacaaacggtacaatgtctcccagcaagctcttgatctccagaatctccgctttgacccagacttgatgggccgtgacattgatataatcctgaatcgaagaaactgcatggctgccaccctgaagatcactgaaagaaatttccctgagagaaggctcccaaagtcaagaccctgaatctctccaaaaataagctggagtcggcgtgggagttgggcaaggtgaaagggctgaagctcgaagagctatggctagaagggaacccgttgtgcagcaccttctcggaccagtctgcctatgtaagtgccatccgggattgtttccccaagttgttacgcctggacggccgagagttatccgcaccagtgattgttgacattgacagctctgagacaatgaaaccctgcaaggaaaactttactggatctgagaccctaaagcatttagtcctgcaattcctgcagcagagcaacttgtgcaagtacttcaaggatagcaggaatataaaaattctcaaagacccctacctgcagaggaagctgctaaagcacacaaaatgtccacgaaacgtggactccctcagtgcattgcctgaaactcagcatgacttcacctccatcctggtggacatgtggtaccagaccgtgaacacctgcttcctccctcgggcaggcccagagagccagagtggaaggatggtctcagggttctgatcttgccttcatgtggaccttcatcactacctctggccgcaattccagtctgtgcatcatgaatgataagctgtttctgagggatgccagcccccaagagactcagagtgccttctccatcccagtgtccacactctcctccagctctgagccctccctctcctaggagcacaggaaatggtgcaggctttctctgcccagtctgggatgaaactagagtggtctcagaagtgccttcaggacaataagtggaactacattagagctggtcaggtcttcactatgctccagactgagggcaagatcccagtggaggccttcaagcaaatcccctaaaaggagccctttgatgtcatctttgtcttccttctcatcctctttgtttcctcttttcaccagcctaagaccactctaaggactggggttggaggcctggctgaccaagaagccaaagttaacttgcaggccacaggacatagccacctgaagagccagttgttctgtgtatttgccccactcatgatcaccgtttattttcataataaacagtgacgttacatgttgtatgtt

SEQ ID NO: 12028 - DNA, 3279 bp, Homo sapiens
gcgctcggaccccggccgctgccgccatcactgtcgcccgcccagtcgcccctcagccgcttcccctcgccatggaggcgaggccgccgccgccgccgcggggctcggagccgcgggccgggcggcggccctgagggctagtggcggcccgaaacgccgccgcggagccgaggcggagccgctgtcctcgtccccagcggtcccgcccaacgcccgactctgtgacacaactaaaaaaaaacaaaggtatttatggaattccactgagtggtaatggatgatgcagttcaaataactaaggacacatgttcaaagagcataattaactttttaaaagaagctaataagcatggattcctggttcattcttgttctgctcggcagtggtctgatatgtgtcagtgccaacaatgctaccacagttgcaccttctgtaggaattacaagattaattaactcatcaacggcagaaccagttaaagaagaggccaaaacttcaaatccaacttcttcactaacttctctttctgtggcaccaacattcagcccaaatataactctgggacccacctatttaaccactgtcaattcttcagactctgacaatgggaccacaagaacagcaagcaccaattctataggcattacaatttcaccaaatggaacgtggcttccagataaccagttcacggatgccagaacagaaccctgggaggggaattccagcaccgcagcaaccactccagaaactttccctccttcagatgagacaccaattattgcggtgatggtggccctgtcctctctgctagtgatcgtgtttattatcatagttttgtacatgttaaggtttaagaaatacaagcaagctgggagccattccaattctttccgcttatccaacggccgcactgaggatgtggagccccagagtgtgccacttctggccagatccccaagcaccaacaggaaatacccacccctgcccgtggacaagctggaagaggaaattaaccggagaatggcagacgacaataagctcttcagggaggaattcaacgctctccctgcatgtcctatccaggccacctgtgaggctgcttccaaggaggaaaacaaggaaaaaaatcgatatgtaaacatcttgccttatgaccactctagagtccacctgacaccggttgaaggggttccagattctgattacatcaatgcttcattcatcaacggttaccaagaaaagaacaaattcattgctgcacaaggaccaaaagaagaaacggtgaatgatttctggcggatgatctgggaacaaaacacagccaccatcgtcatggttaccaacctgaaggagagaaaggagtgcaagtgcgcccagtactggccagaccaaggctgctggacctatgggaatattcgggtgtctgtagaggatgtgactgtcctggtggactacacagtacggaagttctgcatccagcaggtgggcgacatgaccaacagaaagccacagcgcctcatcactcagttccactttaccagctggccagactttggggtgccttttaccccgatcggcatgctcaagttcctcaagaaggtgaaggcctgtaaccctcagtatgcaggggccatcgtggtccactgcagtgcaggtgtagggcgtacaggtacctttgtcgtcattgatgccatgctggacatgatgcatacagaacggaaggtggacgtgtatggctttgtgagccggatccgggcacagcgctgccagatggtgcaaaccgatatgcagtatgtcttcatataccaagcccttctggagcattatctctatggagatacagaactggaagtgacctctctagaaacccacctgcagaaaatttacaacaaaatcccagggaccagcaacaatggattagaggaggagtttaagaagttaacatcaatcaaaatccagaatgacaagatgcggactggaaaccttccagccaacatgaagaagaaccgtgttttacagatcattccatatgaattcaacagagtgatcattccagttaagcggggcgaagagaatacagactatgtgaacgcatcctttattgatggctaccggcagaaggactcctatatcgccagccagggccctcttctccacacaattgaggacttctggcgaatgatctgggagtggaaatcctgctctatcgtgatgctaacagaactggaggagagaggccaggagaagtgtgcccagtactggccatctgatggactggtgtcctatggagatattacagtggaactgaagaaggaggaggaatgtgagagctacaccgtccgagacctcctggtcaccaacaccagggagaataagagccggcagatccggcagttccacttccatggctggcctgaagtgggcatccccagtgacggaaagggcatgatcagcatcatcgccgccgtgcagaagcagcagcagcagtcagggaaccaccccatcaccgtgcactgcagcgccggggcaggaaggacggggaccttctgtgccctgagcaccgtcctggagcgtgtgaaagcagaggggattttggatgtcttccagactgtcaagagcctgcggctacagaggccacacatggtccagacactggaacagtatgagttctgctacaaggtggtgcaggagtatattgatgcattctcagattatgccaacttcaagtaagcggcaacaagggtccgtggaccaggaggattgcctttaatattttgtaatattctgttttgttaatataccccaaattgtgtatatatcttataactgttttagaaattggtacataggcttctattacctattaggtggaaattttatatgtaaatgtgttagcactgatagtcctttttccaatgttttattggggaattaaatagtgtgatgtttggattgatatcgtgaaatcctcagccgagaaattgggctggattgtgctttggttaatacatctttccctaaagaagataaacacaaaatccattccaggtagctcggcaccaactaagaaaaaaagcacaaagttctcagagctctcgaggaaagtggttgtccccgtaccaccatgcactgtaaatatccctcccctctctccctggtcccctcccccatccccaccactgatatcatggggagtaataggaccagagcggtatctctggcaccacactagggactatcaggtaataaaagctttgactccctgaaaaaaaaaaaaa

SEQ ID NO: 12029 - DNA, 3148 bp, Homo sapiens
gtgacacaactaaaaaaaaacaaaggtatttatggaattccactgagtggtaatggatgatgcagttcaaataactaaggacacatgttcaaagagcataattaactttttaaaagaagctagacttcttcagaagcttgccagtttttcaagctgatttctctcactggcaactcttcagagtgctgttcctactccaccctcccctggtgataagcatggattcctggttcattcttgttctgctcggcagtggtctgatatgtgtcagtgccaacaatgctaccacagttgcaccttctgtaggaattacaagattaattaactcatcaacggcagaaccagttaaagaagaggccaaaacttcaaatccaacttcttcactaacttctctttctgtggcaccaacattcagcccaaatataactctgggacccacctatttaaccactgtcaattcttcagactctgacaatgggaccacaagaacagcaagcaccaattctataggcattacaatttcaccaaatggaacgtggcttccagataaccagttcacggatgccagaacagaaccctgggaggggaattccagcaccgcagcaaccactccagaaactttccctccttcagatgagacaccaattattgcggtgatggtggccctgtcctctctgctagtgatcgtgtttattatcatagttttgtacatgttaaggtttaagaaatacaagcaagctgggagccattccaattctttccgcttatccaacggccgcactgaggatgtggagccccagagtgtgccacttctggccagatccccaagcaccaacaggaaatacccacccctgcccgtggacaagctggaagaggaaattaaccggagaatggcagacgacaataagctcttcagggaggaattcaacgctctccctgcatgtcctatccaggccacctgtgaggctgcttccaaggaggaaaacaaggaaaaaaatcgatatgtaaacatcttgccttatgaccactctagagtccacctgacaccggttgaaggggttccagattctgattacatcaatgcttcattcatcaacggttaccaagaaaagaacaaattcattgctgcacaaggaccaaaagaagaaacggtgaatgatttctggcggatgatctgggaacaaaacacagccaccatcgtcatggttaccaacctgaaggagagaaaggagtgcaagtgcgcccagtactggccagaccaaggctgctggacctatgggaatattcgggtgtctgtagaggatgtgactgtcctggtggactacacagtacggaagttctgcatccagcaggtgggcgacatgaccaacagaaagccacagcgcctcatcactcagttccactttaccagctggccagactttggggtgccttttaccccgatcggcatgctcaagttcctcaagaaggtgaaggcctgtaaccctcagtatgcaggggccatcgtggtccactgcagtgcaggtgtagggcgtacaggtacctttgtcgtcattgatgccatgctggacatgatgcatacagaacggaaggtggacgtgtatggctttgtgagccggatccgggcacagcgctgccagatggtgcaaaccgatatgcagtatgtcttcatataccaagcccttctggagcattatctctatggagatacagaactggaagtgacctctctagaaacccacctgcagaaaatttacaacaaaatcccagggaccagcaacaatggattagaggaggagtttaagaagttaacatcaatcaaaatccagaatgacaagatgcggactggaaaccttccagccaacatgaagaagaaccgtgttttacagatcattccatatgaattcaacagagtgatcattccagttaagcggggcgaagagaatacagactatgtgaacgcatcctttattgatggctaccggcagaaggactcctatatcgccagccagggccctcttctccacacaattgaggacttctggcgaatgatctgggagtggaaatcctgctctatcgtgatgctaacagaactggaggagagaggccaggagaagtgtgcccagtactggccatctgatggactggtgtcctatggagatattacagtggaactgaagaaggaggaggaatgtgagagctacaccgtccgagacctcctggtcaccaacaccagggagaataagagccggcagatccggcagttccacttccatggctggcctgaagtgggcatccccagtgacggaaagggcatgatcagcatcatcgccgccgtgcagaagcagcagcagcagtcagggaaccaccccatcaccgtgcactgcagcgccggggcaggaaggacggggaccttctgtgccctgagcaccgtcctggagcgtgtgaaagcagaggggattttggatgtcttccagactgtcaagagcctgcggctacagaggccacacatggtccagacactggaacagtatgagttctgctacaaggtggtgcaggagtatattgatgcattctcagattatgccaacttcaagtaagcggcaacaagggtccgtggaccaggaggattgcctttaatattttgtaatattctgttttgttaatataccccaaattgtgtatatatcttataactgttttagaaattggtacataggcttctattacctattaggtggaaattttatatgtaaatgtgttagcactgatagtcctttttccaatgttttattggggaattaaatagtgtgatgtttggattgatatcgtgaaatcctcagccgagaaattgggctggattgtgctttggttaatacatctttccctaaagaagataaacacaaaatccattccaggtagctcggcaccaactaagaaaaaaagcacaaagttctcagagctctcgaggaaagtggttgtccccgtaccaccatgcactgtaaatatccctcccctctctccctggtcccctcccccatccccaccactgatatcatggggagtaataggaccagagcggtatctctggcaccacactagggactatcaggtaataaaagctttgactccctgaaaaaaaaaaaaa

SEQ ID NO: 12030 - DNA, 3643 bp, Homo sapiens
ggagtatgagtcacgctcaggggagcaggtaccccttctcctaaagatgaagaggagcaaactggcactaagcaaggccatcgagagcggggacactgacctggtgttcacggtgttgctgcacctgaagaacgagctgaaccgaggagattttttcatgacccttcggaatcagcccatggccctcagtttgtaccgacagttctgtaagcatcaggagctagagacgctgaaggacctttacaatcaggatgacaatcaccaggaattgggcagcttccacatccgagccagctatgctgcagaagagcgtattgaggggcgagtagcagctctgcagacagccgccgatgccttctacaaggccaagaatgagtttgcagccaaggctacagaggatcaaatgcggctcctacggctgcagcggcgcctagaagacgagctggggggccagttcctagacctgtctctacatgacacagttaccaccctcattcttggcggtcacaacaagcgtgcagagcagctggcacgtgacttccgcatccctgacaagaggtgacacaactaaaaaaaaacaaaggtatttatggaattccactgagtggtaatggatgatgcagttcaaataactaaggacacatgttcaaagagcataattaactttttaaaagaagctaataagcatggattcctggttcattcttgttctgctcggcagtggtctgatatgtgtcagtgccaacaatgctaccacagttgcaccttctgtaggaattacaagattaattaactcatcaacggcagaaccagttaaagaagaggccaaaacttcaaatccaacttcttcactaacttctctttctgtggcaccaacattcagcccaaatataactctgggacccacctatttaaccactgtcaattcttcagactctgacaatgggaccacaagaacagcaagcaccaattctataggcattacaatttcaccaaatggaacgtggcttccagataaccagttcacggatgccagaacagaaccctgggaggggaattccagcaccgcagcaaccactccagaaactttccctccttcaggtaattctgactcgaaggacagaagagatgagacaccaattattgcggtgatggtggccctgtcctctctgctagtgatcgtgtttattatcatagttttgtacatgttaaggtttaagaaatacaagcaagctgggagccattccaattctttccgcttatccaacggccgcactgaggatgtggagccccagagtgtgccacttctggccagatccccaagcaccaacaggaaatacccacccctgcccgtggacaagctggaagaggaaattaaccggagaatggcagacgacaataagctcttcagggaggaattcaacgctctccctgcatgtcctatccaggccacctgtgaggctgcttccaaggaggaaaacaaggaaaaaaatcgatatgtaaacatcttgccttatgaccactctagagtccacctgacaccggttgaaggggttccagattctgattacatcaatgcttcattcatcaacggttaccaagaaaagaacaaattcattgctgcacaaggaccaaaagaagaaacggtgaatgatttctggcggatgatctgggaacaaaacacagccaccatcgtcatggttaccaacctgaaggagagaaaggagtgcaagtgcgcccagtactggccagaccaaggctgctggacctatgggaatattcgggtgtctgtagaggatgtgactgtcctggtggactacacagtacggaagttctgcatccagcaggtgggcgacatgaccaacagaaagccacagcgcctcatcactcagttccactttaccagctggccagactttggggtgccttttaccccgatcggcatgctcaagttcctcaagaaggtgaaggcctgtaaccctcagtatgcaggggccatcgtggtccactgcagtgcaggtgtagggcgtacaggtacctttgtcgtcattgatgccatgctggacatgatgcatacagaacggaaggtggacgtgtatggctttgtgagccggatccgggcacagcgctgccagatggtgcaaaccgatatgcagtatgtcttcatataccaagcccttctggagcattatctctatggagatacagaactggaagtgacctctctagaaacccacctgcagaaaatttacaacaaaatcccagggaccagcaacaatggattagaggaggagtttaagaagttaacatcaatcaaaatccagaatgacaagatgcggactggaaaccttccagccaacatgaagaagaaccgtgttttacagatcattccatatgaattcaacagagtgatcattccagttaagcggggcgaagagaatacagactatgtgaacgcatcctttattgatggctaccggcagaaggactcctatatcgccagccagggccctcttctccacacaattgaggacttctggcgaatgatctgggagtggaaatcctgctctatcgtgatgctaacagaactggaggagagaggccaggagaagtgtgcccagtactggccatctgatggactggtgtcctatggagatattacagtggaactgaagaaggaggaggaatgtgagagctacaccgtccgagacctcctggtcaccaacaccagggagaataagagccggcagatccggcagttccacttccatggctggcctgaagtgggcatccccagtgacggaaagggcatgatcagcatcatcgccgccgtgcagaagcagcagcagcagtcagggaaccaccccatcaccgtgcactgcagcgccggggcaggaaggacggggaccttctgtgccctgagcaccgtcctggagcgtgtgaaagcagaggggattttggatgtcttccagactgtcaagagcctgcggctacagaggccacacatggtccagacactggaacagtatgagttctgctacaaggtggtgcaggagtatattgatgcattctcagattatgccaacttcaagtaagcggcaacaagggtccgtggaccaggaggattgcctttaatattttgtaatattctgttttgttaatataccccaaattgtgtatatatcttataactgttttagaaattggtacataggcttctattacctattaggtggaaattttatatgtaaatgtgttagcactgatagtcctttttccaatgttttattggggaattaaatagtgtgatgtttggattgatatcgtgaaatcctcagccgagaaattgggctggattgtgctttggttaatacatctttccctaaagaagataaacacaaaatccattccaggtagctcggcaccaactaagaaaaaaagcacaaagttctcagagctctcgaggaaagtggttgtccccgtaccaccatgcactgtaaatatccctcccctctctccctggtcccctcccccatccccaccactgatatcatggggagtaataggaccagagcggtatctctggcaccacactagggactatcaggtaataaaagctttgactccctgaaaaaaaaaaaaa

SEQ ID NO: 12031 - DNA, 5374 bp, Homo sapiens
cccttcacacccgacccagccttgaattaggattccataggagagctgggggcaggagaatggggtgttccctgctgtccagcttcagacccactctttgagatattggattctgacaagtttccagagctgagaagacagccagatgtcaaggtctgaagggttgtggataccccctggctgggcttcatggagaaatcttctctgatcaccaacctgaatcccagagtagcctccatcttaggacagaatgagaggccttctgtaaccagatataactggccagcatggggaaattgatcaggatggggccgcaagagaggtggttactccggacaaagcggcttcattggagtcgcctcctcttcttactgggaatgttgatcatcggttctacttatcagcaccttaggagaccccggggcctttcctcattgtgggcagcagtctcttctcatcagcctataaaactggccagtcgggacctctccagtgaagagatgatgatgatgagcagcagcccttcaaaacctagctccgaaatggggggtaagatgctggtaccccaagcctcagtgggcagtgatgaagcaacactgagcatgacagtggagaatatccccagtatgcctaaaagaacagccaagatgatcccaacaacaaccaagaataattacagcccaacagcagcaggtacagaaagaaggaaggaagacaccccaacatccagtagaacactgacttactacacctcaacttcaagcagacaaatagtaaaaaagtataccccaacacccaggggagaaatgaagagctacagcccaactcaagtgagggaaaaggtgaagtatactccttccccacgtggtagaagagtaggcacttacgtgccgtccacattcatgacaatggaaacaagccatgcgatcacccccaggacaacagtgaaagacagtgacattacagcaacctataaaatactcgaaaccaactctcttaagagaataatggaggaaaccaccccaaccactctcaagggaatgtttgatagcaccccaacttttctgacacatgaggtagaagcaaacgtcttgacttctccaaggagcgtcatggaaaaaaacaacctgtttccccccagaagagtggaaagtaacagctcagcccatccctgggggttagtgggaaagagcaacccgaagactccccagggaacagtcctgttgcataccccagccacctctgaggggcaggtgacaataagcaccatgacaggcagcagcccagcagaaaccaaagccttcactgctgcctggagtcttaggaatccttcacccaggaccagtgtatcagccatcaaaacagccccagccatagtctggaggctggcaaagaaaccttccacagcacccagcacctcaacaacccctacggtcagggcaaagctgaccatgcaggtccatcactgtgtggttgtgaagccaaccccagccatgctcaccactccctccccaagcctcacaacagccctgctcccagaggagctcagtcctagtccctcagtgctgcctcccagcttgccagacctccaccccaagggagagtaccccccagatctgttcagtgtggaggagcggcggcagggctgggtggtcctgcacgtttttggcatgatgtatgtgtttgtggccttggccattgtttgcgacgagtacttcgttccagccctgggtgtcatcacagacaagctgcagatctccgaggatgtggcaggcgccacattcatggctgctggaggctctgctcctgagctcttcacctccctcatcggtgtcttcatttcccacagcaacgtgggcattggtaccattgtgggctctgctgtgttcaacattctctttgtcattggcacttgttccctcttctcccgagagatcctcaacctcacctggtggcccttattccgtgatgtctccttctacatccttgacctgataatgctcatcctcttcttcctggacagcctcattgcctggtgggagagcctgctgctgctgctggcctatgccttctatgtgttcaccatgaagtggaacaagcatatcgaggtctgggtgaaggagcagctcagcaggaggccagtggccaaggtcatggccttagaagacctcagcaagccgggcgatggggccattgcggtggatgagctacaggataacaagaagctgaagctcccgtccttgctgacccgagggagcagctcgacctctctgcacaacagcaccatccgcagcaccatctaccagctcatgctccacagcctggaccccctgagggaagttcgccttgccaaggagaaggaggaggagagcttgaatcaaggggccagagcccaaccccaggccaaagcagaaagcaaaccagaagaggaggagccagccaagctccctgcggtcacggtcacaccagcccctgttccagacatcaagggagatcagaaggagaatccaggcggtcaggaagatgtggctgaggccgagagcacaggtgaaatgccaggcgaagagggcgaaactgctggtgaaggtgaaactgaagagaaaagtggaggtgaaactcaaccagaaggtgaaggtgaaactgaaacacaaggaaaaggagaagaatgtgaagatgaaaatgaagcagaaggaaaaggagacaatgaaggtgaagatgagggtgaaatccacgcagaagatggtgaaatgaaaggtaatgaaggtgaaactgaaagccaggaactcagtgctgaaaatcacggtgaagccaaaaatgatgagaaaggtgtagaagatggagggggaagtgatggaggggatagcgaagaggaggaagaggaggaggaagagcaggaggaagaggaggaggaggaagagcaggaggaagaggaggaggaggaggaggaagaggaggagaagggaaatgaagagcctctgtccctggactggcctgaaaccaggcagaagcaggccatttacctcttccttctgcccatcgtgttcccactgtggctgacagtccccgacgtccgaaggcaggagtctaggaagttttttgttttcaccttcctgggatctatcatgtggatagccatgttctcatacctcatggtgtggtgggctcaccaggttggtgaaacaatagggatttctgaagagatcatgggcctgacaatccttgcagcaggcacatcaattcctgacctcatcaccagtgtgattgtcgctcgaaaaggcctgggagacatggctgtgtcaagctctgtgggcagtaacatatttgatatcactgtgggcttgcctgttccttggttgcttttctctcttatcaatggattacagccagttccagtcagcagcaatggcttgttttgtgcaattgttttgctttttctcatgcttctgtttgtgatctcttcaattgcgtcatgtaaatggagaatgaacaagatcctgggcttcacaatgttcctcctttactttgtattcctgataatcagtgtgatgttagaagatcgaatcatatcctgtcctgtatctgtctgaatcagtcactcttgctcacaatgggcatggatcagaagaccatgcagaagttactgtatctcttgtgaccctaatgaaagaatgtatatgatcctggaaagtgaactgggtgacctaggacctctgatatgaatgtgatctgagactaaagtttgtccttggaaacacctgcagctcattgtggattaagaacctcacccctggaggggtggagtttctacccctgactcatgcagacatctattacatggaggcagtagaaggacccctggagccagagggttttctaaatgagataactgggggcaaaggttgggataggcgcacgagctataagacaagctcctacgctcactgttccctgatcattccaaaggctgctggcccaaaagatgcagatgtggtctacatctcagccttcctgacctctgccccaaacacacgctgcaattttgtctcctccttttctgttcaaattgtgaggttctatcaggtttgtaatcactgtagcttcagttattggtgagtctaaggatccaaggctacagaaaaaaaagaaatataacaggaattaatgatcattccacgttttgtagcccactgcatctggatatataccagtatttttcttttttttttttttgagacagagtttggctcttgttgcccaggctggtgtgcaatggcgtgatctcggcacaccacaaccttcacctccccggttcaagcaattctcctgcctcagcctgaagtcgtgatctgcccgcctcggcctcccaaagtgctgggattacaggcgtcagccaccgcgcctggcctataccagtattttctagtttaaaggaggactacattaactcttattgttgtgtttctgaaaagtgaaatttaaaaagcagcctgaaaaataaaaatttataatttgcccttgaattggaaggaatggagattagggaaggaaaactactctagaggccatttaaaagtatgtatttattagaacatcgaaattcgtgttgtctccatcagtggtcaccttgagggattagacattctaatggaatgtcctggctccaccctccagcatgttctcacccaacaatgacagttgagtggagtgggaagggaagtcattctaaagagtccaaagtcagtagcgccacatctggtttataaagtaagagatccagtggacaatgctatttttgtatgccaacctagataggattataaagcaagactgatttcttctgtggtttatgaatgatcttaaggtaattacaaaagggaaattccaagaatgcataacacaatgacaacatggtgagaaaagtgcagtactacttccaaggtggctagtgtaaaggacacttgagtttttaaaactgtggttaaatgttttatgtggaatttgatgagtttgtatattaaataccactgcttgctgcttttactagaatcaagttaagggacacgttagaaatagaacagcttaatatcactggcttcagagcaaaatgagctcgggtgactgcagattatgatggtaaatatggctttaattacaaacatgaggaatgattcactgaagatgaaaagataggacggatgtgatatgaaaaaaacccaaacattttggcattgaatgatggctaaggtgttccaagtattccatcttttaagatgaattgcttaattaattgcctcgctaccccaggattctcattctttggaaataatttttattaaatttcaataaactgtgaatcccaatggtattttacttt

SEQ ID NO: 12032 - DNA, 4590 bp, Homo sapiens
atgcagagagccagagaagccgaaatgatgaaaagtcaggtactgtttcccttcctgctgtctttgttctgcggggccatctcccagcagatccgatacacgattccagaggagctagccaacggctcacgggtggggaaacttgccaaggatctggggctcagtgtccgggagttgccaactcgaaaactgcgggttagtgcagaggattatttcaacgttagtttggagagcggggatttgttagtgaacggtaggatagatcgagagaagatttgcggaaggaaacttgagtgtgcactagaattcgaaacggtcgctgaaaacccaatgaatgttttccacgtggttgttgtaatccaagatattaatgacaatgcaccacgtttcgttgcaaaaggcattgacttagaaatttgtgagtcagccttacccggggtaaaattctctctggattctgctcaagatgcagatgtggaaggcaattcactgaagttatacaccatcaaccccaatcaatacttctctctgtcaacgaaggaaagtcctgatggaagtaaatatccggtattactgctggaaaaacctctagacagggaacatcagagctctcatcgcttaatcctgactgccatggatggcggggacccgcctctaagcggcaccacccatatctggatccgagttacggatgccaatgataatgctcccgtgtttagccaggaggtatacagggttagcctccaagaaaacgtaccgtggggaacctccgtgctgcgggtgatggccacagaccaggatgagggcattaatgcagagatcacctatgccttcctcaattccccaataagtaccagcctcttcaatctcaatccaaatactggcgacatcacaaccaatggcacattggattttgaagagacaagtagatatgtgttgagtgtggaagctaaggatggaggagtacacacagctcactgtaatgttcaaatagaaattgttgacgagaatgacaatgccccagaggtgacattcatgtccttctctaaccagattccagaggattcagaccttggaactgtaatagccctcataaaagtgcgagacaaggattctgggcaaaatggcatggtgacatgctatactcaggaagaagttcctttcaaattagaatccacctcgaagaattattacaagctggtgattgctggagccctaaaccgggagcagacagcagactacaacgtcacaatcatagccaccgacaagggcaaaccagccctttcctccaggacaagcatcaccctgcacatctccgacatcaacgacaatgcacctgttttccatcaggcctcctatgtggtccacgtgtctgagaacaacccacctggcgcctccattgcacaagtaagcgcctccgacccggatttgggacccaacggcagagtctcctactctattctggccagtgacctggagccgcgggagctgttgtcctacgtgtccgtgagcccgcagagcggggtggtgttcgcgcagcgcgccttcgaccacgagcagctgcgcgccttcgagctcacactgcaggccagggaccagggctcccccgcgctcagcgccaacgtgagcctgcgcgtgttggtgggcgacctcaatgacaatgcgccacgggtgctgtaccccgcgctggggcctgatggctccgccctcttcgatatggtgccacgcgccgcagagcccggctacctggtgaccaaggtggtggcggtggacgcagactcaggacacaacgcttggctgtcctaccacgtgctgcaggccagcgagcccgggctcttcagcctggggttgcgcacgggtgaggtgcgcacagcgcgtgccttgggcgacagggacgcggcccgccagcgcctgctggtcgctgtgcgtgatggaggacagccgccactctccgccaccgccacgctgcacctaatcttcgcggatagcctgcaagaggtattgccagacctcagcgaccgccctgagccctctgacccccagacggaactgcagttttacctggttgtggccttggccttgatctcagtgctctttctcctcgcggtgattctagcgatcgccctgcgcctgcgacgttcctccagcctcgacactgagggctgctttcaaaccggtctctgctccaagtctgggcccggggttcctcccaaccacagcgaggggactttgccctattcctacaatctatgtattgcctctcattctgcaaagacagagtttaattctctcaacctgacaccggaaatggctccccctcaggatctgctgtgtgatgatccttctatggttgtatgtgccagtaatgaagatcacaaaatcgcttatgacccttctttgtcttcgcaccaagccccgcccaacacggactggcgtttctctcaggcccagagacccggcaccagcggctcccaaaatggcgatgacaccggcacctggcccaacaaccagtttgacacagagatgctgcaagccatgatcttggcgtccgccagtgaagctgctgatgggagctccaccctgggagggggtgccggcaccatgggattgagcgcccgctacggaccccagttcaccctgcagcacgtgcccgactaccgccagaatgtctacatcccaggcagcaatgccacactgaccaacgcagctggcaagcgggatggcaaggccccagcaggtggcaatggcaacaagaagaagtcgggcaagaaggagaagaagtaacatggaggccaggccaagagccacagggcggcctctccccaaccagcccagcttctccttacctgcacccaggcctcagagtttcagggctaacccccagaatactggtaggggccaaggccatgctccccttgggaaacagaaacaagtgcccagtcagcacctaccccttcccccccagggggttgaatatgcaaaagcagttccgctgggaacccccatccaatcaactgctgtacccatgggggtagtggggttactgtagacaccaagaaccatttgccacaccccgtttagttacagctgaactcctccatcttccaaatcaatcaggcccatccatcccatgcctccctcctccccaccccactccaacagttcctctttcccgagtaaggtggttggggtgttgaagtaccaagtaacctacaagcctcctagttctgaaaagttggaagggcatcatgacctcttggcctctcctttgattctcaatcttcccccaaagcatggtttggtgccagccccttcacctccttccagagcccaagatcaatgctcaagttttggaggacatgatcaccatccccatggtactgatgcttgctggatttagggagggcattttgctaccaagcctcttcccaacgccctggggaccagtcttctgttttgtttttcattgtttgacgtttccactgcatgccttgacttcccccacctcctcctcaaacaagagactccactgcatgttccaagacagtatggggtggtaagataaggaagggaagtgtgtggatgtggatggtgggggcatggacaaagcttgacacatcaagttatcaaggccttggaggaggctctgtatgtcctcaggggactgacaacatcctccagattccagccataaaccaataactaggctggacccttcccactacataatagggctcagcccaggcagccagctttgggctgagctaacaggaccaatggattaaactggcatttcagtccaaggaagctcgaagcaggtttaggaccaggtccccttgagaggtcagaggggcctctgtgggtgctgggtactccagaggtgccactggtggaagggtcagcggagccccagcaggaagggtgggccagccaggccattcttagtccctgggttggggaggcagggagctagggcagggaccaaatgaacagaaagtctcagcccaggatggggcttcttcaacagggcccctgccctcctgaagcctcagtccttcaccttgccaggtgccgtttctcttccgtgaaggccactgcccaggtccccagtgcgccccctagtggccatagcctggttaaagttccccagtgcctccttgtgcatagaccttcttctcccacccccttctgcccctgggtccccggccatccagcggggctgccagagaaccccagacctgcccttacagtagtgtagcgccccctccctctttcggctggtgtagaatagccagtagtgtagtgcggtgtgcttttacgtgatggcgggtgggcagcgggcggcgggctccgcgcagccgtctgtccttgatctgcccgcggcggcccgtgttgtgttttgtgctgtgtccacgcgctaaggcgaccccctcccccgtactgacttctcctataagcgcttctcttcgcatagtcacgtagctcccaccccaccctcttcctgtgtctcacgcaagttttatactctaatatttatatggctttttttcttcgacaaaaaaataataaaacgtttcttctgaaaagctg

SEQ ID NO: 12033 - DNA, 4872 bp, Homo sapiens
agaatgggctctaggcgccgctgctcaccaatcagggaatgggaagctgcgcgccattgagtccctccctcccccgcctctaccacacaaagcggaatgagatggatactcacagatcctgacactggagacttagaagtattttccttcgctttctgatatattttggatgtagtcggcctaggacttcatagatacataagccgattcacaaccaaccagctcgagaaaccgcggaatatcggcttagagcctgccatggcgaatcggctacagcgcggggaccgcagtcggctgctgctgctgctgtgcattttcctggggacgctgcgggggttccgggccaggcagatccgatattcggtgccagaagagaccgaaaagggctccttcgtgggcaatatctccaaggacctggggctggagccccgggagctggcgaagcgcggagtccgcatcgtctccagagggaagacacagcttttcgctgtgaatccgcgaagcggcagcttgatcacggcaggcaggatagaccgggaggagctctgtgagacggtgtcctcctgttttttaaatatggaacttctcgtggaagacaccttgaagatttacggagtggaggtggaaataatagatattaatgataacgcccccagcttccaggaggacgaagtggagataaaagtcagtgagcacgcaattcctggggcgcgatttgctcttcctaatgctagggatccagatgtgggcgtgaactccctccagagctaccagctcagccctaataattacttttccttgcaactgcggggcagaacggatggggccaagaatccagagctagtactggagggaagcctggaccgagagaaagaggctgctcacctgctcctcctcacagctttagatggaggcgatcccatccgaaagggcgcagttcccattcgtgtggtggtcctcgatgtaaatgatcacatcccaatgtttacacagtccgtatatcgcgtgagtgttccagaaaacatcagctccggaactcgggtgctgatggttaatgcaacggatccagacgagggaatcaacggggaagtaatgtattcatttcggaacatggaaagcaaggcttctgaaatattccaattggattcacaaactggagaagttcaagtacgggggtctctggattttgaaaaatatagattctatgagatggaaattcaaggccaagatggtggaggtctctttaccaccacgacgatgttgatcactgttgtggatgtgaatgataacgctccagaaataactatcacctcttctattaattcaattctggaaaactctcctccaggtacagtgattgctcttctaaatgtgcaagatcaagattctggagaaaatggtcaagtctcctgttttattcctaaccacctgccttttaaattagaaaagacttatggaaattattacaaattgataacaagcagagtgctggacagggagttggtccagagctacaatataacgttgacagccacagaccagggaagcccgcctttgtctgcagaaactcatgtctggctgaatgtggcagatgacaacgataaccctcccgtttttcctcactcctcttactctgcctacattcccgaaaacaaccccaggggtgcctccatcttctcagtgaccgccctcgacccggacagcaaacagaatgccctggtcacttactctctgacggatgacactgtccagggggtgcctctgtcctcctatgtctctattaactccaacactggtgttctctatgccctacaatccttcgactatgagcagtttcgagacttagaactgagagtgatagcacgtgacagcggggacccgcccctcagcagcaacgtgtcgctgagcctgttcgtgctggaccagaacgacaatgcgcccgagatcctgtaccctgccctccccacagacggctccactggcgtggagctggcgccccgctctgcggaacctggctacctggtgaccaaggtggttgcggtggacaaagattcaggccagaacgcctggctgtcctatcgcctgcttaaggccagcgagccgggactcttcgcggtgggggagcacacgggcgaggtgcgtacagcgcgggcactgctggacagagacgcgctcaagcagagcctcgtggtggccgtccaggaccacggccagccccctctctcggccaccgtcacgctcaccgtggctgtggccgacagcatccccgaagtcctggcggacctcggcagcctcgagtctctggctaactctgaaacctcagacctctcgctgtacttggtggtggcggtggccgcagtctcctgcatcttcctggtctttgtcatcgtgctgctggcactcaggctgtggcgctggcataagtcacgcctgctgcaggcttctgaaggcgggttggcaggtatgcccacgtcacattttgtaggcgtggacggggtacaggctttcctgcaaacctattcccacgaggtctctctcattgcggactcgcagaagagtcacctgattttcccccagcccaactatggggacacgctcatcagccaggagagctgtgagaaaagcgagccactcttgatagctgaagactcagctatcattttaggcaaatgtgacccgacaagtaatcagcaagccccgcccaacacggactggcgtttctctcaggcccagagacccggcaccagcggctcccaaaatggcgatgacaccggcacctggcccaacaaccagtttgacacagagatgctgcaagccatgatcttggcgtccgccagtgaagctgctgatgggagctccaccctgggagggggtgccggcaccatgggattgagcgcccgctacggaccccagttcaccctgcagcacgtgcccgactaccgccagaatgtctacatcccaggcagcaatgccacactgaccaacgcagctggcaagcgggatggcaaggccccagcaggtggcaatggcaacaagaagaagtcgggcaagaaggagaagaagtaacatggaggccaggccaagagccacagggcggcctctccccaaccagcccagcttctccttacctgcacccaggcctcagagtttcagggctaacccccagaatactggtaggggccaaggccatgctccccttgggaaacagaaacaagtgcccagtcagcacctaccccttcccccccagggggttgaatatgcaaaagcagttccgctgggaacccccatccaatcaactgctgtacccatgggggtagtggggttactgtagacaccaagaaccatttgccacaccccgtttagttacagctgaactcctccatcttccaaatcaatcaggcccatccatcccatgcctccctcctccccaccccactccaacagttcctctttcccgagtaaggtggttggggtgttgaagtaccaagtaacctacaagcctcctagttctgaaaagttggaagggcatcatgacctcttggcctctcctttgattctcaatcttcccccaaagcatggtttggtgccagccccttcacctccttccagagcccaagatcaatgctcaagttttggaggacatgatcaccatccccatggtactgatgcttgctggatttagggagggcattttgctaccaagcctcttcccaacgccctggggaccagtcttctgttttgtttttcattgtttgacgtttccactgcatgccttgacttcccccacctcctcctcaaacaagagactccactgcatgttccaagacagtatggggtggtaagataaggaagggaagtgtgtggatgtggatggtgggggcatggacaaagcttgacacatcaagttatcaaggccttggaggaggctctgtatgtcctcaggggactgacaacatcctccagattccagccataaaccaataactaggctggacccttcccactacataatagggctcagcccaggcagccagctttgggctgagctaacaggaccaatggattaaactggcatttcagtccaaggaagctcgaagcaggtttaggaccaggtccccttgagaggtcagaggggcctctgtgggtgctgggtactccagaggtgccactggtggaagggtcagcggagccccagcaggaagggtgggccagccaggccattcttagtccctgggttggggaggcagggagctagggcagggaccaaatgaacagaaagtctcagcccaggatggggcttcttcaacagggcccctgccctcctgaagcctcagtccttcaccttgccaggtgccgtttctcttccgtgaaggccactgcccaggtccccagtgcgccccctagtggccatagcctggttaaagttccccagtgcctccttgtgcatagaccttcttctcccacccccttctgcccctgggtccccggccatccagcggggctgccagagaaccccagacctgcccttacagtagtgtagcgccccctccctctttcggctggtgtagaatagccagtagtgtagtgcggtgtgcttttacgtgatggcgggtgggcagcgggcggcgggctccgcgcagccgtctgtccttgatctgcccgcggcggcccgtgttgtgttttgtgctgtgtccacgcgctaaggcgaccccctcccccgtactgacttctcctataagcgcttctcttcgcatagtcacgtagctcccaccccaccctcttcctgtgtctcacgcaagttttatactctaatatttatatggctttttttcttcgacaaaaaaataataaaacgtttcttctgaaaagctg

SEQ ID NO: 12034 - DNA, 4578 bp, Homo sapiens
atggggagcggcgccggggagctgggccgggctgagaggctgccagtgctctttctcttcctgctgtctttgttctgcccggcgctctgtgagcagatccgctacaggattcccgaggaaatgcccaagggctccgtagtggggaacctcgccacggacctggggttcagcgtccaggagttaccgactcgaaaactgcgcgtcagttcggagaagccttacttcaccgtgagcgcagagagcggggagttgcttgtgagcagcaggctagacagggaggagatatgcgggaagaagccagcttgtgctctggaatttgaggctgttgctgaaaatccactgaacttttatcacgtgaatgtggagatcgaggacattaatgaccacacgccaaaattcacgcaaaattcctttgagctgcaaataagtgagtctgcacagcctggcacacgatttatattaggatctgcccatgatgcggatattggtagcaacacactgcagaattaccaactcagtcccagtgatcatttctcactgataaataaagagaaatcagatggcagtaaataccctgagatggtattgaagacacctttggacagagaaaagcagaaatcctaccacttgactttgactgccttggactttggagctccacccctaagcagcactgcacagatacacgttctagtgactgatgccaatgataatgctccagtgttcagtcaagacgtatacagggtgagcctttcagaaaacgtgtacccggggaccacggtgctacaggtgactgccacggaccaggatgagggtgtcaatgccgagattactttctctttcagtgaagctagccagatcacccaatttgacctgaactctaacaccggggaaattactgttttaaatacattagattttgaagaagtcaaagaatattccatagttttggaagcaagggacggtggaggaatgattgcgcaatgcacagtggaggtagaagtcatagatgaaaatgacaacgccccagaagtgatattccagtctctacccaacctaattatggaggacgccgagctgggaacacatattgctttgctcaaagtccgtgacaaggattccagacacaatggagaagtgacttgtaaattggaaggtgatgttccatttaaaatattaacttcttcaagaaacacgtataaattagtgacagatgctgttctagaccgcgagcagaatccagagtacaatataaccgttacggcaacagatcggggcaagcctcccctctcctccagttccagcatcaccctgcacattggtgatgtaaatgacaacgctccggttttctcacagtcttcctatatagtccacgtggccgagaacaacccgcctggagcctctatttcacaagtcagggcttctgatccggacttggggcccaacggccaagtctcttactgcatcatggccagtgacctggagcagcgggagctgtcatcctacgtgtccataagcgcggagagcggggtggtgttcgcgcagcgcgccttcgaccacgagcagctgcgcgccttcgaactcacactgcaggcccgcgaccagggctcgccagcgctcagcgcgaacgtgagcctgcgcgtgttagtggacgaccgcaacgacaatgcgccacgggtgctgtaccccgcgctgggtcccgacggctctgcgctcttcgatatggtgccgcacgctgcagagcctggctacttggtgaccaaggtagtggcggtggacgcagactcaggacacaacgcctggctgtcctaccacgtgctgcaggctagcgagcccgggctcttcagcctggggctgcgcacgggcgaagtgcgcacagcgcgtgccttaggcgacagggacgccgtccgccagcgccttctggtcgccgtgcgtgacggtggacagccaccactctcggccactgccacgttgcacctggtcttcgccgacagcttgcaggaggtgctgccggatatcactgaccgccccgacccctctgacctccaggctgagctgcagttttacctagtggtggccttggccttgatctcagtgctcttcctcgtggccatgattctggccattgccttgcgcctgcgacgctcctccagccccgcctcctggagctgcttccagcctggtctctgtgttaaatccgaatccgtggttccccccaactacagcgaggggactttgccttattcctacaatctatgtgttgcacatacaggaaagacggagtttaatttcctaaaatgtagtgagcagttgagttcaggacaagacatactttgcggtgattcatctggggccttatttccactttgtaattccagtgaattgacttcccatcagcaagccccgcccaacacggactggcgtttctctcaggcccagagacccggcaccagcggctcccaaaatggcgatgacaccggcacctggcccaacaaccagtttgacacagagatgctgcaagccatgatcttggcgtccgccagtgaagctgctgatgggagctccaccctgggagggggtgccggcaccatgggattgagcgcccgctacggaccccagttcaccctgcagcacgtgcccgactaccgccagaatgtctacatcccaggcagcaatgccacactgaccaacgcagctggcaagcgggatggcaaggccccagcaggtggcaatggcaacaagaagaagtcgggcaagaaggagaagaagtaacatggaggccaggccaagagccacagggcggcctctccccaaccagcccagcttctccttacctgcacccaggcctcagagtttcagggctaacccccagaatactggtaggggccaaggccatgctccccttgggaaacagaaacaagtgcccagtcagcacctaccccttcccccccagggggttgaatatgcaaaagcagttccgctgggaacccccatccaatcaactgctgtacccatgggggtagtggggttactgtagacaccaagaaccatttgccacaccccgtttagttacagctgaactcctccatcttccaaatcaatcaggcccatccatcccatgcctccctcctccccaccccactccaacagttcctctttcccgagtaaggtggttggggtgttgaagtaccaagtaacctacaagcctcctagttctgaaaagttggaagggcatcatgacctcttggcctctcctttgattctcaatcttcccccaaagcatggtttggtgccagccccttcacctccttccagagcccaagatcaatgctcaagttttggaggacatgatcaccatccccatggtactgatgcttgctggatttagggagggcattttgctaccaagcctcttcccaacgccctggggaccagtcttctgttttgtttttcattgtttgacgtttccactgcatgccttgacttcccccacctcctcctcaaacaagagactccactgcatgttccaagacagtatggggtggtaagataaggaagggaagtgtgtggatgtggatggtgggggcatggacaaagcttgacacatcaagttatcaaggccttggaggaggctctgtatgtcctcaggggactgacaacatcctccagattccagccataaaccaataactaggctggacccttcccactacataatagggctcagcccaggcagccagctttgggctgagctaacaggaccaatggattaaactggcatttcagtccaaggaagctcgaagcaggtttaggaccaggtccccttgagaggtcagaggggcctctgtgggtgctgggtactccagaggtgccactggtggaagggtcagcggagccccagcaggaagggtgggccagccaggccattcttagtccctgggttggggaggcagggagctagggcagggaccaaatgaacagaaagtctcagcccaggatggggcttcttcaacagggcccctgccctcctgaagcctcagtccttcaccttgccaggtgccgtttctcttccgtgaaggccactgcccaggtccccagtgcgccccctagtggccatagcctggttaaagttccccagtgcctccttgtgcatagaccttcttctcccacccccttctgcccctgggtccccggccatccagcggggctgccagagaaccccagacctgcccttacagtagtgtagcgccccctccctctttcggctggtgtagaatagccagtagtgtagtgcggtgtgcttttacgtgatggcgggtgggcagcgggcggcgggctccgcgcagccgtctgtccttgatctgcccgcggcggcccgtgttgtgttttgtgctgtgtccacgcgctaaggcgaccccctcccccgtactgacttctcctataagcgcttctcttcgcatagtcacgtagctcccaccccaccctcttcctgtgtctcacgcaagttttatactctaatatttatatggctttttttcttcgacaaaaaaataataaaacgtttcttctgaaaagctg

SEQ ID NO: 12035 - DNA, 4605 bp, Homo sapiens
atggcggctcagccgaggggcggggactacagaggattcttcctgctctccatcctcctggggaccccctgggaagcctgggcaggacgtattctctactccgtgtcggaggagacggacaaagggtcctttgtgggagacatcgccaaggacctggggctggagccccgggagctggcggagcgcggagtccgcatcatctccagaggtaggacgcagcttttcgccctgaaccagcgcagcggcagcttggtcactgcgggcaggatagaccgggaagagatctgcgctcagagtgcgcggtgtctggtaaactttaacatcctgatggaagataaaatgaatctttaccctatagacgtggaaataatagatattaatgacaacgttccaagattcttgacggaagaaataaatgtaaaaataatggagaatacagctcctggggttcggtttccgttaagcgaggctggggatccagatgtgggcacgaactccctccagagttaccagctcagccccaatcgccacttctccctggctgtgcaaagtggagacgatgaaactaagtacccggaactggtgctggagcgggtgctggaccgggaggaagagcgggttcaccacctggtcctcacagcctctgatggcggcgacccgccccgatccagcaccgcccacatccaggtgacagtggtggatgtgaatgaccacacgcctgtcttctctctgcctcagtaccaagtaactgtccccgagaatgtgccagtgggtacaagactgctcacggtacatgctatcgacctggacgagggagtcaatggggaagtgacatattcttttcggaaaataactcctaaacttccaaagatgtttcatctgaactcgcttacaggagaaatatcaactttagaaggattagattatgaagaaactgccttctatgaaatggaggttcaggctcaagatggtcctggtagtctgacaaaggcaaaagtactgatcacagttttagatgtaaatgataatgctccagaagtgactatgacgtctttaagtagctcaatccctgaagacacacctcttgggacagtcattgctcttttctacctacaagacagagattctggaaagaatggtgaggtgacctgcaccattccagaaaacctaccttttaaattagaaaaatcaatagataattattatagattggtcacaaccaaaaacttggaccgggaaacactctctttgtataacatcacactgaaagccacagatggtggaactcctcccttgtccagggaaactcacatattcatgcaggtggcagacaccaacgataacccacccaccttcccccactcatcctactcagtctacatcgctgagaacaaccccagaggggcctccattttcttagtgactgcacaggaccacgacagtgaggataatgcccagatcacttattccttggccgaagacaccatccagggggctccagtgtcctcctatgtctccataaactctgacactggagtcctgtacgcgctgcaatcctttgattatgagcagttgagagaactacaactaagagtgactgcacatgacagcggggacccgcctctcagcagcaacatgtcactgagcctgttcgtgctggaccagaatgacaacccgcccgagatcctgtacccggccctccccacagatggttctactggcatggagctggcaccccgctccgcagagcccggctacctggtgaccaaggtggtggcggtggacaaagattcaggccagaacgcctggctgtcatacctcctgcttaaggccagcgagccaggactctttgcggttgggctgtacacgggcgaggtgcgcacggctcgggccctgctggacagagatgccctcaagcagagcctcgtggtggccgtccaggaccacggtcagcctcctctgtcagccaccgtcacactcaccgtggctgtggctgacagcatccccgaagtcttggccgacctgggcagccttgagccctccgacggtccttacaactatgacctcacgttgtacctggtggtggcggtggccacagtctcctgcgtcttcctagccttcgtcctcgtactgctggcgctcaggctgcggcgctggcacaagtcacgcctgctgcaggcttcagaaggtggcttggcgaacgtgcccacctcgcactttgtgggcatggacggggtgcaggctttcctgcagacctattcccatgaggtctccctcaccgcggactctcggaagagtcacctgatcttcccccagcccaactatgtagacatgctcatcagccaggagagctgtgagaaaaatgattctttgctaacatccgtagattttcaggaatgtaaagaaaacctgccaagtattcagcaagccccgcccaacacggactggcgtttctctcaggcccagagacccggcaccagcggctcccaaaatggcgatgacaccggcacctggcccaacaaccagtttgacacagagatgctgcaagccatgatcttggcgtccgccagtgaagctgctgatgggagctccaccctgggagggggtgccggcaccatgggattgagcgcccgctacggaccccagttcaccctgcagcacgtgcccgactaccgccagaatgtctacatcccaggcagcaatgccacactgaccaacgcagctggcaagcgggatggcaaggccccagcaggtggcaatggcaacaagaagaagtcgggcaagaaggagaagaagtaacatggaggccaggccaagagccacagggcggcctctccccaaccagcccagcttctccttacctgcacccaggcctcagagtttcagggctaacccccagaatactggtaggggccaaggccatgctccccttgggaaacagaaacaagtgcccagtcagcacctaccccttcccccccagggggttgaatatgcaaaagcagttccgctgggaacccccatccaatcaactgctgtacccatgggggtagtggggttactgtagacaccaagaaccatttgccacaccccgtttagttacagctgaactcctccatcttccaaatcaatcaggcccatccatcccatgcctccctcctccccaccccactccaacagttcctctttcccgagtaaggtggttggggtgttgaagtaccaagtaacctacaagcctcctagttctgaaaagttggaagggcatcatgacctcttggcctctcctttgattctcaatcttcccccaaagcatggtttggtgccagccccttcacctccttccagagcccaagatcaatgctcaagttttggaggacatgatcaccatccccatggtactgatgcttgctggatttagggagggcattttgctaccaagcctcttcccaacgccctggggaccagtcttctgttttgtttttcattgtttgacgtttccactgcatgccttgacttcccccacctcctcctcaaacaagagactccactgcatgttccaagacagtatggggtggtaagataaggaagggaagtgtgtggatgtggatggtgggggcatggacaaagcttgacacatcaagttatcaaggccttggaggaggctctgtatgtcctcaggggactgacaacatcctccagattccagccataaaccaataactaggctggacccttcccactacataatagggctcagcccaggcagccagctttgggctgagctaacaggaccaatggattaaactggcatttcagtccaaggaagctcgaagcaggtttaggaccaggtccccttgagaggtcagaggggcctctgtgggtgctgggtactccagaggtgccactggtggaagggtcagcggagccccagcaggaagggtgggccagccaggccattcttagtccctgggttggggaggcagggagctagggcagggaccaaatgaacagaaagtctcagcccaggatggggcttcttcaacagggcccctgccctcctgaagcctcagtccttcaccttgccaggtgccgtttctcttccgtgaaggccactgcccaggtccccagtgcgccccctagtggccatagcctggttaaagttccccagtgcctccttgtgcatagaccttcttctcccacccccttctgcccctgggtccccggccatccagcggggctgccagagaaccccagacctgcccttacagtagtgtagcgccccctccctctttcggctggtgtagaatagccagtagtgtagtgcggtgtgcttttacgtgatggcgggtgggcagcgggcggcgggctccgcgcagccgtctgtccttgatctgcccgcggcggcccgtgttgtgttttgtgctgtgtccacgcgctaaggcgaccccctcccccgtactgacttctcctataagcgcttctcttcgcatagtcacgtagctcccaccccaccctcttcctgtgtctcacgcaagttttatactctaatatttatatggctttttttcttcgacaaaaaaataataaaacgtttcttctgaaaagctg

SEQ ID NO: 12036 - DNA, 4602 bp, Homo sapiens
atgaagattcagaaaaagctgactggctgcagcaggctgatgcttctgtgtctttctctggagctgctgttggaagctggggctgggaatattcactactcagtgccggaagagacagacaaaggttccttcgtaggcaacatcgccaaggacctagggctgcaaccccaggagctggcagatggcggagtccgcatcgtctccagaggtaggatgccgcttttcgctctgaatcctagaagtggcagcttgatcaccgcgcgcaggatagaccgggaggagctctgcgctcagagcatgccgtgtctcgtgagttttaatatccttgttgaggataaaatgaagctttttcctgttgaagtagaaataattgatattaatgacaacactccccaattccagttagaggaactggagtttaaaatgaatgaaataacgactccaggtaccagagtctcattgccttttgggcaagaccttgatgtgggtatgaactcactccagagctaccaactcagctctaaccctcatttctccctggatgtgcaacagggagccgatgggcctcaacatccagagatggtgctgcagagtcccttagacagagaagaagaagctgtccaccacctcatcctcacagcttctgatgggggtgaaccagtccgttcagggaccctcagaatttacattcaggtggtggatgcaaatgacaatcctccagcatttactcaggcacaataccatataaatgtccccgaaaacgtgccgctgggtactcagctgctcatggtaaatgccactgaccctgatgagggagccaatggggaagtaacgtactcctttcacaatgtagaccacagagtggcccaaatatttcgtttagattcttacacaggagaaatatcaaataaagaaccactagatttcgaagaatacaaaatgtattcaatggaagttcaagcccaggatggtgcggggctcatggctaaagttaaggtactgatcaaagttttggatgtaaatgataatgccccagaagtgaccatcacctctgtcaccactgcagttccagaaaactttcctcctgggaccataattgctcttatcagtgtgcatgaccaggactcaggagacaatggctacaccacatgtttcattcctggaaatttaccctttaaattggaaaagttagttgataattattaccgtttagtgactgaaagaacactggacagagaacttatctctgggtacaacatcacaataacagcaatagaccaaggaactccagctctatctactgaaactcacatttcactactagtgacagatatcaatgacaactccccagtcttccatcaggactcctactctgcctacattcccgaaaacaaccccagaggagcctccatcttctctgtgagggcccacgacttggacagcaatgagaatgcacaaatcacttactccctaatagaggacactatccagggggcacccctatctgcctacctctccatcaactccgacactggggtcctgtatgcgctgcgatccttcgactatgagcagttccgggacatgcaactgaaagtgatggcgcgggacagtggggatccgcccctcagcagcaacgtgtctctcagcctattcctgctggaccagaacgacaacgcgcccgagatcctgtaccccgccctccccacagatggttctaccggcgtggagctggcgcccctctccgcagagcccggctacctggtgaccaaggtggtggcggtggacagagactcgggccagaacgcctggctgtcctaccgcctgctcaaggccagcgagccgggactcttctcggtgggtctgcacacgggcgaggtgcgcacggcgcgagccctgctggacagagacgcgctcaagcagagtctcgtggtggccgtccaggaccacggccagcccccgctctccgccactgtcacgctcaccgtggccgtggccgacaggatctccgacatcctggccgacctgggcagcctcgagccctccgccaaacccaacgattcggacctcactctgtacctggtggtggcggcggccgcggtctcctgcgtcttcctggccttcgtcatcgtgctgctggcgcacaggctgcggcgctggcacaagtcacgtctgctacaggcttcgggaggcggcttagcgagcatgcccggttcgcactttgtgggcgtggacggggttcgggctttcctgcagacctattcccacgaggtctccctcactgcggactcgcggaagagccacctgattttcccccagcccaactatgcggacacactcatcagccaggagagctgtgagaaaaagggttttctatcagcaccccagtctttacttgaagacaaaaaggaaccattttctcagcaagccccgcccaacacggactggcgtttctctcaggcccagagacccggcaccagcggctcccaaaatggcgatgacaccggcacctggcccaacaaccagtttgacacagagatgctgcaagccatgatcttggcgtccgccagtgaagctgctgatgggagctccaccctgggagggggtgccggcaccatgggattgagcgcccgctacggaccccagttcaccctgcagcacgtgcccgactaccgccagaatgtctacatcccaggcagcaatgccacactgaccaacgcagctggcaagcgggatggcaaggccccagcaggtggcaatggcaacaagaagaagtcgggcaagaaggagaagaagtaacatggaggccaggccaagagccacagggcggcctctccccaaccagcccagcttctccttacctgcacccaggcctcagagtttcagggctaacccccagaatactggtaggggccaaggccatgctccccttgggaaacagaaacaagtgcccagtcagcacctaccccttcccccccagggggttgaatatgcaaaagcagttccgctgggaacccccatccaatcaactgctgtacccatgggggtagtggggttactgtagacaccaagaaccatttgccacaccccgtttagttacagctgaactcctccatcttccaaatcaatcaggcccatccatcccatgcctccctcctccccaccccactccaacagttcctctttcccgagtaaggtggttggggtgttgaagtaccaagtaacctacaagcctcctagttctgaaaagttggaagggcatcatgacctcttggcctctcctttgattctcaatcttcccccaaagcatggtttggtgccagccccttcacctccttccagagcccaagatcaatgctcaagttttggaggacatgatcaccatccccatggtactgatgcttgctggatttagggagggcattttgctaccaagcctcttcccaacgccctggggaccagtcttctgttttgtttttcattgtttgacgtttccactgcatgccttgacttcccccacctcctcctcaaacaagagactccactgcatgttccaagacagtatggggtggtaagataaggaagggaagtgtgtggatgtggatggtgggggcatggacaaagcttgacacatcaagttatcaaggccttggaggaggctctgtatgtcctcaggggactgacaacatcctccagattccagccataaaccaataactaggctggacccttcccactacataatagggctcagcccaggcagccagctttgggctgagctaacaggaccaatggattaaactggcatttcagtccaaggaagctcgaagcaggtttaggaccaggtccccttgagaggtcagaggggcctctgtgggtgctgggtactccagaggtgccactggtggaagggtcagcggagccccagcaggaagggtgggccagccaggccattcttagtccctgggttggggaggcagggagctagggcagggaccaaatgaacagaaagtctcagcccaggatggggcttcttcaacagggcccctgccctcctgaagcctcagtccttcaccttgccaggtgccgtttctcttccgtgaaggccactgcccaggtccccagtgcgccccctagtggccatagcctggttaaagttccccagtgcctccttgtgcatagaccttcttctcccacccccttctgcccctgggtccccggccatccagcggggctgccagagaaccccagacctgcccttacagtagtgtagcgccccctccctctttcggctggtgtagaatagccagtagtgtagtgcggtgtgcttttacgtgatggcgggtgggcagcgggcggcgggctccgcgcagccgtctgtccttgatctgcccgcggcggcccgtgttgtgttttgtgctgtgtccacgcgctaaggcgaccccctcccccgtactgacttctcctataagcgcttctcttcgcatagtcacgtagctcccaccccaccctcttcctgtgtctcacgcaagttttatactctaatatttatatggctttttttcttcgacaaaaaaataataaaacgtttcttctgaaaagctg

SEQ ID NO: 12037 - DNA, 4605 bp, Homo sapiens
atgaccaattgcctgagtttccgaaatggcagaggactggccctgctgtgcgcgctcctggggacgctgtgcgaaacaggatccggtcagatccgctactcggtgtctgaggagctagataaaggttccttcgtgggcaacatcgctaacgacctggggctagagccccgggagctggcggagcgcggagtccgcatcgtctccagaggtaggacgcagcttttctctctgaatccgcaaagcggcagcttggtcaccgcggagaggatagaccgggaggagctctgcgctcagatcccgctgtgtctggtaaaaattaacattctggttgaggataaattgaaaatttttgaagtagaaatagaaattaaagatattaatgataatgctcctaatttcccaacagaggaattggaaataaaaattggtgaactaacggttcctggaacccgatttccaattaaaactgcttttgacccagatgtaggcattaactccctgcagaactacaagcttagccccaatgactacttctctctggctgtgaatagcgtctctgagggggccaagtatccagagctggtgctggagcgggccctggaccgtgagaaaaaagaaattcaccagcttgtcctggttgcctctgatggtggcgaccctgtccactctggcaacttgcacatccaagtgatagtcctggatgcaaatgacaacccaccaatgtttactcagcctgagtaccgtgtgagtgtttgggagaacgtgcctgtgggtacccggctgctcacggtgaatgccactgaccctgacgagggattcaatgctcaagtgtcttatattctagataaaatgcctgggaaaatcgctgagattttccatcttaactcagtgagtggagaagtatcaatattaaaaagtctagattatgaggatgccatgttctatgaaattaaaattgaagcacaggatggaccaggtcttctttcaagagccaagattctagtcacggttctggatgtgaatgacaatgctccagaaattacaatcacgtctctcacaagctcagtcccagaagagggcaccgttggaagagaaattgctcttatcgacgtgcatgaccgagattctgggcagaatgggcaggttgaagtttttgtcctgggaaatctgccatttaagttagaaaaatcaatagatcaatattaccgcttagtgacggccacatccctggaccgcgaacaaatatcagaatataacattagtctgagagcctcagatgggggaagcccgccactgtccacagaaactcacatcaccctgcatgtgattgacatcaatgacaacccacccaccttccctcatttatcctactccgcctacattccagaaaacaaccccagaggagcctccatcttctcagtgacagcccaggacccagatagcaacaacaacgcccgcatcacttatgcattgaccgaggacactctccagggggcgcccctgtcctccttcgtctctatcaactccaacactggcgtcctatacgcgctgagatccttcgactacgagcaatttagagacttaaagctactggtgacagccagcgacagcgggaaccctccactcagcagcaacgtgtcgctgaacctgttcgtgctggaccagaacgacaacgcgcccgagatcctgtaccccgccctccccacagacggttccactggcgtggagctggcgcctcgctccgcagagcccggctacctggtgaccaaggtggtggcggtggacagagactcgggccagaacgcctggctgtcctaccgcctgctcaaggccagcgagccgggactcttctcggtgggtctgcacacgggcgaggtgcgcacggcgcgagccctgctggacagagacgcgctcaagcagagcctcgtggtggccgtccaggaccacggccagccccctctctccgccactgtcacgctcaccgtggccgtggccgacaggatccccgacatcctggccgacctgggcagcctcgagccctccgccaaacccaacgattcggacctcactctgtacctggtggtggcggtggccgcggtctcctgcgtcttcctggccttcgtcatcgtgctgctggcgctcaggctgcggcgctggcacaagtcacgcctgctgcaggcttcgggaggcggcttggcgagtacgcccggctcgcactttgtgggcgcggacggggttcgggctttcctgcagacctattcccacgaggtctccctcactgcggactcgcggaagagccacctgattttcccccagcccaactatgcggacacgctcatcagccaggagagctgtgagaaaagcgagcctcttctgataactcaggatttacttgaaatgaaaggagattccaacctacttcagcaagccccgcccaacacggactggcgtttctctcaggcccagagacccggcaccagcggctcccaaaatggcgatgacaccggcacctggcccaacaaccagtttgacacagagatgctgcaagccatgatcttggcgtccgccagtgaagctgctgatgggagctccaccctgggagggggtgccggcaccatgggattgagcgcccgctacggaccccagttcaccctgcagcacgtgcccgactaccgccagaatgtctacatcccaggcagcaatgccacactgaccaacgcagctggcaagcgggatggcaaggccccagcaggtggcaatggcaacaagaagaagtcgggcaagaaggagaagaagtaacatggaggccaggccaagagccacagggcggcctctccccaaccagcccagcttctccttacctgcacccaggcctcagagtttcagggctaacccccagaatactggtaggggccaaggccatgctccccttgggaaacagaaacaagtgcccagtcagcacctaccccttcccccccagggggttgaatatgcaaaagcagttccgctgggaacccccatccaatcaactgctgtacccatgggggtagtggggttactgtagacaccaagaaccatttgccacaccccgtttagttacagctgaactcctccatcttccaaatcaatcaggcccatccatcccatgcctccctcctccccaccccactccaacagttcctctttcccgagtaaggtggttggggtgttgaagtaccaagtaacctacaagcctcctagttctgaaaagttggaagggcatcatgacctcttggcctctcctttgattctcaatcttcccccaaagcatggtttggtgccagccccttcacctccttccagagcccaagatcaatgctcaagttttggaggacatgatcaccatccccatggtactgatgcttgctggatttagggagggcattttgctaccaagcctcttcccaacgccctggggaccagtcttctgttttgtttttcattgtttgacgtttccactgcatgccttgacttcccccacctcctcctcaaacaagagactccactgcatgttccaagacagtatggggtggtaagataaggaagggaagtgtgtggatgtggatggtgggggcatggacaaagcttgacacatcaagttatcaaggccttggaggaggctctgtatgtcctcaggggactgacaacatcctccagattccagccataaaccaataactaggctggacccttcccactacataatagggctcagcccaggcagccagctttgggctgagctaacaggaccaatggattaaactggcatttcagtccaaggaagctcgaagcaggtttaggaccaggtccccttgagaggtcagaggggcctctgtgggtgctgggtactccagaggtgccactggtggaagggtcagcggagccccagcaggaagggtgggccagccaggccattcttagtccctgggttggggaggcagggagctagggcagggaccaaatgaacagaaagtctcagcccaggatggggcttcttcaacagggcccctgccctcctgaagcctcagtccttcaccttgccaggtgccgtttctcttccgtgaaggccactgcccaggtccccagtgcgccccctagtggccatagcctggttaaagttccccagtgcctccttgtgcatagaccttcttctcccacccccttctgcccctgggtccccggccatccagcggggctgccagagaaccccagacctgcccttacagtagtgtagcgccccctccctctttcggctggtgtagaatagccagtagtgtagtgcggtgtgcttttacgtgatggcgggtgggcagcgggcggcgggctccgcgcagccgtctgtccttgatctgcccgcggcggcccgtgttgtgttttgtgctgtgtccacgcgctaaggcgaccccctcccccgtactgacttctcctataagcgcttctcttcgcatagtcacgtagctcccaccccaccctcttcctgtgtctcacgcaagttttatactctaatatttatatggctttttttcttcgacaaaaaaataataaaacgtttcttctgaaaagctg

SEQ ID NO: 12038 - DNA, 4578 bp, Homo sapiens
atggggagcggcgccggggagctgggccgggctgagaggctgccagtgctctttctcttcctgctgtctttgttctgcccggcgctctgtgagcagatccgctacaggattcccgaggaaatgcccaagggctccgtagtggggaacctcgccacggacctggggttcagcgtccaggagttaccgactcgaaaactgcgcgtcagttcggagaagccttacttcaccgtgagcgcagagagcggggagttgcttgtgagcagcaggctagacagggaggagatatgcgggaagaagccagcttgtgctctggaatttgaggctgttgctgaaaatccactgaacttttatcacgtgaatgtggagatcgaggacattaatgaccacacgccaaaattcacgcaaaattcctttgagctgcaaataagtgagtctgcacagcctggcacaagatttatactagaagtagcagaagatgcagatattggcttaaactctctgcagaagtataaactctctcttaacccaagtttctcattaataattaaggagaaacaggatggtagtaaatacccggaactggcactggagaaaaccttagaccgggaacaacagagttaccatcgtttagtcctgactgccttggacggtggacatccacccctaagcggcaccactgagctccggatccaggtaaccgacgccaatgataatcccccggtattcaaccgagacgtgtacagagtcagccttcgggaaaacgtgccaccaggcaccactgtgttgcaagtgtcagccactgaccaagacgagggcatcaactcagaaattacttattccttctacagaaccgggcaaatctttagtctgaattcaaagagcggagaaattaccactcaaaagaaactggattttgaagagaccaaggaatattcaatggttgtagaagggagggatggtggtggactggttgcacaatgtacagttgaaattaatattcaagatgaaaatgacaatagcccagaagttacattccattctctacttgaaatgattctggaaaacgcggtgcctggaacactaattgctttgatcaaaatacatgaccaagattctggggaaaatggggaggttaattgtcaattacaaggcgaagtcccttttaagattatctcttcatccaaaaattcgtataagttggtaacagatggaaccctagaccgagagcaaaccccggagtacaatgtcaccatcacagccacagacaggggcaagccgcccctctcctccagcataagcgtcatcctacatatcagagacgtcaacgataacgctccggttttccaccaggcgtcctacttagtcagtgtacccgaaaacaaccctcctggggcctccatcgcgcaagtctgcgcctcggacctggacttggggttgaacggccaagtctcctactctatcatggccagcgacctagagcctctggcactggcctcttacgtgtccatgagcgcgcaaagtggggtggtgttcgcgcagcgcgcctttgactacgagcagctgcgcaccttcgaactcacactacaggcccgcgaccagggctcgcctgcgctcagcgcaaacgtgagcctgcgcgtgttggtgggcgaccgaaacgacaacgcaccgcgggtgctgtaccccgcgctgggtcccgacggctctgcgctcttcgatatggtgccgcgcgctgcagagcccggctacctggtgaccaaggtagtggccgtggacgcagactcaggacacaacgcctggctgtcctaccacgtgctgcaggctagcgagcccgggctcttcagcctggggctgcgcacaggagaggtgcgcacagcgcgtgccttgggcgacagggacgcggcccgccagcgcctgctggttgctgtgcgtgatggtggacagccgccactctccgccaccgccacgctgcacttggtctttgctgacagcttgcaggaggtgctgccggatatcactgaccgccctgtaccctctgacccccaggctgagctgcagttttacctagtggtggccttggccttgatctcagtgctcttcctcctggccgtgattctggccgttgccttgcgcctgcgacgctcctccagccctgccgcctggagctgcttccaacctggtctctgtgtcaagtctggacctgtggttccccccaactacagtcaggggactttgccttattcctacaacctatgtgttgcacatacaggaaagacggagtttaatttcctaaaatgtagtgagcaattgagttcaggacaagacatactttgtggtgattcatctggggccttatttccactttgtaattccagcgagtcgacttcccatcctgagttgcaagccccgcccaacacggactggcgtttctctcaggcccagagacccggcaccagcggctcccaaaatggcgatgacaccggcacctggcccaacaaccagtttgacacagagatgctgcaagccatgatcttggcgtccgccagtgaagctgctgatgggagctccaccctgggagggggtgccggcaccatgggattgagcgcccgctacggaccccagttcaccctgcagcacgtgcccgactaccgccagaatgtctacatcccaggcagcaatgccacactgaccaacgcagctggcaagcgggatggcaaggccccagcaggtggcaatggcaacaagaagaagtcgggcaagaaggagaagaagtaacatggaggccaggccaagagccacagggcggcctctccccaaccagcccagcttctccttacctgcacccaggcctcagagtttcagggctaacccccagaatactggtaggggccaaggccatgctccccttgggaaacagaaacaagtgcccagtcagcacctaccccttcccccccagggggttgaatatgcaaaagcagttccgctgggaacccccatccaatcaactgctgtacccatgggggtagtggggttactgtagacaccaagaaccatttgccacaccccgtttagttacagctgaactcctccatcttccaaatcaatcaggcccatccatcccatgcctccctcctccccaccccactccaacagttcctctttcccgagtaaggtggttggggtgttgaagtaccaagtaacctacaagcctcctagttctgaaaagttggaagggcatcatgacctcttggcctctcctttgattctcaatcttcccccaaagcatggtttggtgccagccccttcacctccttccagagcccaagatcaatgctcaagttttggaggacatgatcaccatccccatggtactgatgcttgctggatttagggagggcattttgctaccaagcctcttcccaacgccctggggaccagtcttctgttttgtttttcattgtttgacgtttccactgcatgccttgacttcccccacctcctcctcaaacaagagactccactgcatgttccaagacagtatggggtggtaagataaggaagggaagtgtgtggatgtggatggtgggggcatggacaaagcttgacacatcaagttatcaaggccttggaggaggctctgtatgtcctcaggggactgacaacatcctccagattccagccataaaccaataactaggctggacccttcccactacataatagggctcagcccaggcagccagctttgggctgagctaacaggaccaatggattaaactggcatttcagtccaaggaagctcgaagcaggtttaggaccaggtccccttgagaggtcagaggggcctctgtgggtgctgggtactccagaggtgccactggtggaagggtcagcggagccccagcaggaagggtgggccagccaggccattcttagtccctgggttggggaggcagggagctagggcagggaccaaatgaacagaaagtctcagcccaggatggggcttcttcaacagggcccctgccctcctgaagcctcagtccttcaccttgccaggtgccgtttctcttccgtgaaggccactgcccaggtccccagtgcgccccctagtggccatagcctggttaaagttccccagtgcctccttgtgcatagaccttcttctcccacccccttctgcccctgggtccccggccatccagcggggctgccagagaaccccagacctgcccttacagtagtgtagcgccccctccctctttcggctggtgtagaatagccagtagtgtagtgcggtgtgcttttacgtgatggcgggtgggcagcgggcggcgggctccgcgcagccgtctgtccttgatctgcccgcggcggcccgtgttgtgttttgtgctgtgtccacgcgctaaggcgaccccctcccccgtactgacttctcctataagcgcttctcttcgcatagtcacgtagctcccaccccaccctcttcctgtgtctcacgcaagttttatactctaatatttatatggctttttttcttcgacaaaaaaataataaaacgtttcttctgaaaagctg

SEQ ID NO: 12039 - DNA, 4617 bp, Homo sapiens
atggccgctcaaaggaatcgctcaaaggaatcaaaggattgcagcgggctggtcctgctctgccttttcttcgggattccatgggaggctggagcccggcagatctcctactcaattcctgaggaattagagaaaggctctttcgtgggcaacatctccaaggacttgggtctggcgccccgggagctggcggagcgcggagtccgcatagtctccagaggtaggacgcagcttttctctctgaacccgcgcagcggcagcttgatcaccgcgggcaggatagaccgggaggagctctgcgctcagagcgcgcggtgcgtggtgagttttaatatccttgtggaagacagggtgaaactttttgggatagaaatagaagtaactgatatcaatgacaatgctccaaaattccaagcagaaaatctagacgtaaaaattaatgaaaatgtcgctgcgggaatgcgttttcctctcccggaagctattgatccggatgtgggcgtgaactccctgcagagctatcagctcagccccaataagcacttctccctaagagttcagagccgtgccaatggcgtcaagtacccggagctggtactggagcactccctagatcgcgaggaagaggccattcaccacctggtcctcaccgcctccgacgggggtgaccctctccgatctggcactgtccttgtcagtgtgactgtcttcgatgcaaatgacaacgcgccggtcttcaccttgccagaataccgagtgagtgttcctgagaatttgcctgtgggcactcagctgctgacagtcacagccaccgacagggacgaaggtgccaatggagaagtgacatattcattccgaaaattacctgacacgcaattgttgaagttccaactaaacaaatatactggagaaataaaaatatcagaaaatctagattatgaagaaaccggtttctatgaaatagaaatacaagcagaagatggaggagcatatcttgcaactgcaaaagtgttgattacagtagaagatgtaaatgacaacagtccagagctgaccatcacgtctctatttagtccagtgactgaagattcacctctgggaacagtcgtagcccttttaaatgtgcatgatttagactctgagcagaatggacaggtaacctgttccattttggcgtatctaccatttaaattagaaaagtccattgacagttattacagattggtgatacacagagcccttgacagggaacaggtatcctcttacaatatcacagtgacagccacagatgggggaagtcctcctctatcaacggaagctcactttatgctacaagtggcagatatcaatgacaacccacctaccttctctcaagtctcctactttacctatatcccagagaacaacgccaggggtgcctccatcttctcagtgacagcgctggacccggacagcaaagagaatgcccagattatttactccctggctgaagacaccatccagggggtacctctgtcctcatacatatccatcaactcagacactggcgtcctgtatgcactcagatccttcgactatgagcagtttcatgagctacagatgcaggtgacagccagcgacagcggggatcctccactcagcagcaacgtgtcgttgagcctgtttgtgctggaccagaacgacaatgcgcccgagatcctgtaccccgccctccccacagacggttccacaggcgtggagctggcgccccgctccgcagagcccggctacctggtgaccaaggtggtggcggtggacagagactccggccagaacgcctggctgtcctaccgtctgctcaaggccagcgagccgggactcttcgcggtgggggagcacacgggcgaggtgcgcacggcgcgagccctgctggacagagacgcgctcaagcaaagcctcgtagtggccgtccaggaccacggccagccccctctctccgccactgtcacgctcaccgtggccgtggccgacagcatcccccaagtcctggcggacctcggcagcttcgagtctccagctaactctgaaacctcagacctcactctgtacctggtggtagcggtggccgcggtctcctgcgtcttcctggccttcgtcatcgtgctgctggcgcacaggctgcggcgctggcacaagtcacgcctgctgcaggcttcaggaggcggcttgacaggtgtgtccggctcgcactttgtgggcgtggacggggttcgggctttcctgcagacctattcccacgaggtctctctcaccgcggactcgcgaaagagtcacctgatcttcccccagcccaattatgcggacacgctcatcagccaggagagctgtgagaaaaacgatcctttgtctttgttagatgattcgaagtttcctatagaggataccccattggttccacaagccccgcccaacacggactggcgtttctctcaggcccagagacccggcaccagcggctcccaaaatggcgatgacaccggcacctggcccaacaaccagtttgacacagagatgctgcaagccatgatcttggcgtccgccagtgaagctgctgatgggagctccaccctgggagggggtgccggcaccatgggattgagcgcccgctacggaccccagttcaccctgcagcacgtgcccgactaccgccagaatgtctacatcccaggcagcaatgccacactgaccaacgcagctggcaagcgggatggcaaggccccagcaggtggcaatggcaacaagaagaagtcgggcaagaaggagaagaagtaacatggaggccaggccaagagccacagggcggcctctccccaaccagcccagcttctccttacctgcacccaggcctcagagtttcagggctaacccccagaatactggtaggggccaaggccatgctccccttgggaaacagaaacaagtgcccagtcagcacctaccccttcccccccagggggttgaatatgcaaaagcagttccgctgggaacccccatccaatcaactgctgtacccatgggggtagtggggttactgtagacaccaagaaccatttgccacaccccgtttagttacagctgaactcctccatcttccaaatcaatcaggcccatccatcccatgcctccctcctccccaccccactccaacagttcctctttcccgagtaaggtggttggggtgttgaagtaccaagtaacctacaagcctcctagttctgaaaagttggaagggcatcatgacctcttggcctctcctttgattctcaatcttcccccaaagcatggtttggtgccagccccttcacctccttccagagcccaagatcaatgctcaagttttggaggacatgatcaccatccccatggtactgatgcttgctggatttagggagggcattttgctaccaagcctcttcccaacgccctggggaccagtcttctgttttgtttttcattgtttgacgtttccactgcatgccttgacttcccccacctcctcctcaaacaagagactccactgcatgttccaagacagtatggggtggtaagataaggaagggaagtgtgtggatgtggatggtgggggcatggacaaagcttgacacatcaagttatcaaggccttggaggaggctctgtatgtcctcaggggactgacaacatcctccagattccagccataaaccaataactaggctggacccttcccactacataatagggctcagcccaggcagccagctttgggctgagctaacaggaccaatggattaaactggcatttcagtccaaggaagctcgaagcaggtttaggaccaggtccccttgagaggtcagaggggcctctgtgggtgctgggtactccagaggtgccactggtggaagggtcagcggagccccagcaggaagggtgggccagccaggccattcttagtccctgggttggggaggcagggagctagggcagggaccaaatgaacagaaagtctcagcccaggatggggcttcttcaacagggcccctgccctcctgaagcctcagtccttcaccttgccaggtgccgtttctcttccgtgaaggccactgcccaggtccccagtgcgccccctagtggccatagcctggttaaagttccccagtgcctccttgtgcatagaccttcttctcccacccccttctgcccctgggtccccggccatccagcggggctgccagagaaccccagacctgcccttacagtagtgtagcgccccctccctctttcggctggtgtagaatagccagtagtgtagtgcggtgtgcttttacgtgatggcgggtgggcagcgggcggcgggctccgcgcagccgtctgtccttgatctgcccgcggcggcccgtgttgtgttttgtgctgtgtccacgcgctaaggcgaccccctcccccgtactgacttctcctataagcgcttctcttcgcatagtcacgtagctcccaccccaccctcttcctgtgtctcacgcaagttttatactctaatatttatatggctttttttcttcgacaaaaaaataataaaacgtttcttctgaaaagctg

SEQ ID NO: 12040 - DNA, 4774 bp, Homo sapiens
acgcgcctgaagcacaaagcagatagctaggaatgaaccatccctgggagtatgtggaaacaacggaggagctctgacttcccaactgtcccattctatgggcgaaggaactgctcctgacttcagtggttaagggcagaattgaaaataattctggaggaagataagaatgattcctgcgcgactgcaccgggactacaaagggcttgtcctgctgggaatcctcctggggactctgtgggagaccggatgcacccagatacgctattcagttccggaagagctggagaaaggctctagggtgggcgacatctccagggacctggggctggagccccgggagctcgcggagcgcggagtccgcatcatccccagaggtaggacgcagcttttcgccctgaatccgcgcagcggcagcttggtcacggcgggcaggatagaccgggaggagctctgtatgggggccatcaagtgtcaattaaatctagacattctgatggaggataaagtgaaaatatatggagtagaagtagaagtaagggacattaacgacaatgcgccttactttcgtgaaagtgaattagaaataaaaattagtgaaaatgcagccactgagatgcggttccctctaccccacgcctgggatccggatatcgggaagaactctctgcagagctacgagctcagcccgaacactcacttctccctcatcgtgcaaaatggagccgacggtagtaagtaccccgaattggtgctgaaacgcgccctggaccgcgaagaaaaggctgctcaccacctggtccttacggcctccgacgggggcgacccggtgcgcacaggcaccgcgcgcatccgcgtgatggttctggatgcgaacgacaacgcaccagcgtttgctcagcccgagtaccgcgcgagcgttccggagaatctggccttgggcacgcagctgcttgtagtcaacgctaccgaccctgacgaaggagtcaatgcggaagtgaggtattccttccggtatgtggacgacaaggcggcccaagttttcaaactagattgtaattcagggacaatatcaacaataggggagttggaccacgaggagtcaggattctaccagatggaagtgcaagcaatggataatgcaggatattctgcgcgagccaaagtcctgatcactgttctggacgtgaacgacaatgccccagaagtggtcctcacctctctcgccagctcggttcccgaaaactctcccagagggacattaattgcccttttaaatgtaaatgaccaagattctgaggaaaacggacaggtgatctgtttcatccaaggaaatctgccctttaaattagaaaaatcttacggaaattactatagtttagtcacagacatagtcttggatagggaacaggttcctagctacaacatcacagtgaccgccactgaccggggaaccccgcccctatccacggaaactcatatctcgctgaacgtggcagacaccaacgacaacccgccggtcttccctcaggcctcctattccgcttatatcccagagaacaatcccagaggagtttccctcgtctctgtgaccgcccacgaccccgactgtgaagagaacgcccagatcacttattccctggctgagaacaccatccaaggggcaagcctatcgtcctacgtgtccatcaactccgacactggggtactgtatgcgctgagctccttcgactacgagcagttccgagacttgcaagtgaaagtgatggcgcgggacaacgggcacccgcccctcagcagcaacgtgtcgttgagcctgttcgtgctggaccagaacgacaatgcgcccgagatcctgtaccccgccctccccacggacggttccactggcgtggagctggctccccgctccgcagagcccggctacctggtgaccaaggtggtggcggtggacagagactccggccagaacgcctggctgtcctaccgtctgctcaaggccagcgagccgggactcttctcggtgggtctgcacacgggcgaggtgcgcacggcgcgagccctgctggacagagacgcgctcaagcagagcctcgtagtggccgtccaggaccacggccagccccctctctccgccactgtcacgctcaccgtggccgtggccgacagcatcccccaagtcctggcggacctcggcagcctcgagtctccagctaactctgaaacctcagacctcactctgtacctggtggtagcggtggccgcggtctcctgcgtcttcctggccttcgtcatcttgctgctggcgctcaggctgcggcgctggcacaagtcacgcctgctgcaggcttcaggaggcggcttgacaggagcgccggcgtcgcactttgtgggcgtggacggggtgcaggctttcctgcagacctattcccacgaggtttccctcaccacggactcgcggaagagtcacctgatcttcccccagcccaactatgcagacatgctcgtcagccaggagagctttgaaaaaagcgagccccttttgctgtcaggtgattcggtattttctaaagacagtcatgggttaattgagcaagccccgcccaacacggactggcgtttctctcaggcccagagacccggcaccagcggctcccaaaatggcgatgacaccggcacctggcccaacaaccagtttgacacagagatgctgcaagccatgatcttggcgtccgccagtgaagctgctgatgggagctccaccctgggagggggtgccggcaccatgggattgagcgcccgctacggaccccagttcaccctgcagcacgtgcccgactaccgccagaatgtctacatcccaggcagcaatgccacactgaccaacgcagctggcaagcgggatggcaaggccccagcaggtggcaatggcaacaagaagaagtcgggcaagaaggagaagaagtaacatggaggccaggccaagagccacagggcggcctctccccaaccagcccagcttctccttacctgcacccaggcctcagagtttcagggctaacccccagaatactggtaggggccaaggccatgctccccttgggaaacagaaacaagtgcccagtcagcacctaccccttcccccccagggggttgaatatgcaaaagcagttccgctgggaacccccatccaatcaactgctgtacccatgggggtagtggggttactgtagacaccaagaaccatttgccacaccccgtttagttacagctgaactcctccatcttccaaatcaatcaggcccatccatcccatgcctccctcctccccaccccactccaacagttcctctttcccgagtaaggtggttggggtgttgaagtaccaagtaacctacaagcctcctagttctgaaaagttggaagggcatcatgacctcttggcctctcctttgattctcaatcttcccccaaagcatggtttggtgccagccccttcacctccttccagagcccaagatcaatgctcaagttttggaggacatgatcaccatccccatggtactgatgcttgctggatttagggagggcattttgctaccaagcctcttcccaacgccctggggaccagtcttctgttttgtttttcattgtttgacgtttccactgcatgccttgacttcccccacctcctcctcaaacaagagactccactgcatgttccaagacagtatggggtggtaagataaggaagggaagtgtgtggatgtggatggtgggggcatggacaaagcttgacacatcaagttatcaaggccttggaggaggctctgtatgtcctcaggggactgacaacatcctccagattccagccataaaccaataactaggctggacccttcccactacataatagggctcagcccaggcagccagctttgggctgagctaacaggaccaatggattaaactggcatttcagtccaaggaagctcgaagcaggtttaggaccaggtccccttgagaggtcagaggggcctctgtgggtgctgggtactccagaggtgccactggtggaagggtcagcggagccccagcaggaagggtgggccagccaggccattcttagtccctgggttggggaggcagggagctagggcagggaccaaatgaacagaaagtctcagcccaggatggggcttcttcaacagggcccctgccctcctgaagcctcagtccttcaccttgccaggtgccgtttctcttccgtgaaggccactgcccaggtccccagtgcgccccctagtggccatagcctggttaaagttccccagtgcctccttgtgcatagaccttcttctcccacccccttctgcccctgggtccccggccatccagcggggctgccagagaaccccagacctgcccttacagtagtgtagcgccccctccctctttcggctggtgtagaatagccagtagtgtagtgcggtgtgcttttacgtgatggcgggtgggcagcgggcggcgggctccgcgcagccgtctgtccttgatctgcccgcggcggcccgtgttgtgttttgtgctgtgtccacgcgctaaggcgaccccctcccccgtactgacttctcctataagcgcttctcttcgcatagtcacgtagctcccaccccaccctcttcctgtgtctcacgcaagttttatactctaatatttatatggctttttttcttcgacaaaaaaataataaaacgtttcttctgaaaagctg

SEQ ID NO: 12041 - DNA, 4599 bp, Homo sapiens
atgggagggagctgcgcgcagaggcgccgggccggcccgcggcaggtgctatttcctttgctgctgcctttgttctaccccaccctgagtgagccgatccgctactcgattccggaggagctggccaagggctcggtggtggggaacctcgctaaggatctagggctcagtgtcctggatgtgtcggctcgcaagctgcgagtgagcgcggagaagctgcacttcagcgtagacgcggagagcggggacttacttgtgaagaaccgaatagaccgtgagcaaatatgcaaagagagaagaagatgtgagttgcaattggaagctgtggtggaaaatcctttaaatatttttcatgtcattgtggtgattgaggatgttaatgaccacgcccctcaatttgataaaaaggaaatacatttagaaattttcgaatctgcatccgctggtacacgactatcgcttgaccctgccacggatcctgatataaacataaactcaattaaagattataagataaactctaatccttatttttcattaatggttagagttaattccgatggtggcaaatacccagagttatctctggagaaactcctagaccgggaagaacagagatctcatagcttgatattgactgccttggacggaggggacccaccaagaagtgccaccgctcacatagaaatttctgtcaaggataccaatgataaccccccggttttcagcagagacgaatatagaattagtcttagtgaaaatctgccccctgggtcccctgtgttgcaagtgacagccactgaccaggatgagggggtcaatgctgagataaactactacttccgaagcactgcccagagcacaaaacatatgttctcattggatgagaaaacaggtatgattaagaataaccagtcatttgattttgaagatgtagaaaggtacaccatggaagtggaagcgaaggacggaggtggtctctctacccagtgtaaagtaatcatagaaatccttgatgaaaacgacaacagcccagaaataatcatcacttctctctctgatcagattttggagaattcacctccaggaatggttgttgccctcttcaaaacacgggatctggatttcggaggaaatggagaagtcaggtgtaatatagaaacagacattccattcaagatttattcttcttccaataactactacaaactggtgacagatggagccctggaccgagagcagacaccagaatacaatgtcaccatcgtagccactgacaggggcaagccgcctctttcttccagtagaagcatcaccttgtatgtcgctgacatcaacgacaacgccccagttttcgaccagacgtcctacgtggtccacgtggccgagaacaacccgccaggagcctccattgcgcaagtgagcgcctctgacccggatttggggctcaatggccacatctcctactctatagtggcgagtgacctagagcccctggcggtgtcgtcatacgtgtcagtgagcgcgcagagcggggtggtgttcgcgcagcgcgcctttgatcacgagcagctgcgcgccttcgcgctcacgctgcaggcccgcgaccacggctcgcccacgctcagcgccaacgtgagcctgcgcgtgttggtgggagaccgcaatgacaacgcaccgcgggtgctgtacccagctctgggtcctgacggctccgcgttcttcgatatggtacctcgctctgcagagcccggctacctagtgactaaggtggtagcggtggacgccgactcgggacacaacgcctggctgtcctaccacgtgctgcaggccagtgagcccggactcttcagcctggggctgcgcactggggaggtgcgcacggctcgagccttaggcgacagggacgcagcccgccagcgcctgctggtcgctgtgcgtgacggtggacagccgccactctctgccaccgccacgcttcatctggtcttcgcagacaacttgcaagagatactgccagacctcagcgaccgccctgtactctctgacccccaggctgaactgcagttttacctggtggtggccttggccttaatctcagtgctcttcctcctcgccgtgattctggccattgccttgcgcctgcgacgctctctcagccctgctacttgggactgcttccatcctggtctctgtgtcaagtctggacctgtagttccccccaactacagtgaggggactttgccttattcttataatctgtgcattgcacatacgggtacaaaagagtttaatttcctaaaatgcagtgtgcccctacattccaatgaagacatggtttgcagtgtttctcctggagccttaattccacctcatggtggggaggatttgacttcacatcctgagactctgacttcgcaagccccgcccaacacggactggcgtttctctcaggcccagagacccggcaccagcggctcccaaaatggcgatgacaccggcacctggcccaacaaccagtttgacacagagatgctgcaagccatgatcttggcgtccgccagtgaagctgctgatgggagctccaccctgggagggggtgccggcaccatgggattgagcgcccgctacggaccccagttcaccctgcagcacgtgcccgactaccgccagaatgtctacatcccaggcagcaatgccacactgaccaacgcagctggcaagcgggatggcaaggccccagcaggtggcaatggcaacaagaagaagtcgggcaagaaggagaagaagtaacatggaggccaggccaagagccacagggcggcctctccccaaccagcccagcttctccttacctgcacccaggcctcagagtttcagggctaacccccagaatactggtaggggccaaggccatgctccccttgggaaacagaaacaagtgcccagtcagcacctaccccttcccccccagggggttgaatatgcaaaagcagttccgctgggaacccccatccaatcaactgctgtacccatgggggtagtggggttactgtagacaccaagaaccatttgccacaccccgtttagttacagctgaactcctccatcttccaaatcaatcaggcccatccatcccatgcctccctcctccccaccccactccaacagttcctctttcccgagtaaggtggttggggtgttgaagtaccaagtaacctacaagcctcctagttctgaaaagttggaagggcatcatgacctcttggcctctcctttgattctcaatcttcccccaaagcatggtttggtgccagccccttcacctccttccagagcccaagatcaatgctcaagttttggaggacatgatcaccatccccatggtactgatgcttgctggatttagggagggcattttgctaccaagcctcttcccaacgccctggggaccagtcttctgttttgtttttcattgtttgacgtttccactgcatgccttgacttcccccacctcctcctcaaacaagagactccactgcatgttccaagacagtatggggtggtaagataaggaagggaagtgtgtggatgtggatggtgggggcatggacaaagcttgacacatcaagttatcaaggccttggaggaggctctgtatgtcctcaggggactgacaacatcctccagattccagccataaaccaataactaggctggacccttcccactacataatagggctcagcccaggcagccagctttgggctgagctaacaggaccaatggattaaactggcatttcagtccaaggaagctcgaagcaggtttaggaccaggtccccttgagaggtcagaggggcctctgtgggtgctgggtactccagaggtgccactggtggaagggtcagcggagccccagcaggaagggtgggccagccaggccattcttagtccctgggttggggaggcagggagctagggcagggaccaaatgaacagaaagtctcagcccaggatggggcttcttcaacagggcccctgccctcctgaagcctcagtccttcaccttgccaggtgccgtttctcttccgtgaaggccactgcccaggtccccagtgcgccccctagtggccatagcctggttaaagttccccagtgcctccttgtgcatagaccttcttctcccacccccttctgcccctgggtccccggccatccagcggggctgccagagaaccccagacctgcccttacagtagtgtagcgccccctccctctttcggctggtgtagaatagccagtagtgtagtgcggtgtgcttttacgtgatggcgggtgggcagcgggcggcgggctccgcgcagccgtctgtccttgatctgcccgcggcggcccgtgttgtgttttgtgctgtgtccacgcgctaaggcgaccccctcccccgtactgacttctcctataagcgcttctcttcgcatagtcacgtagctcccaccccaccctcttcctgtgtctcacgcaagttttatactctaatatttatatggctttttttcttcgacaaaaaaataataaaacgtttcttctgaaaagctg

SEQ ID NO: 12042 - DNA, 4726 bp, Homo sapiens
cagaaagccatgtcggactcggcgcccagcgcccaagcgctaacccgctgaaagtttctcagcgaaatctcagggacgatctggaccccgctgagaggaactgcttttgagtgagatggtcccagaggcctggaggagcggactggtaagcaccgggagggtagtgggagttttgcttctgcttggtgccttgaacaaggcttccacggtcattcactatgagatcccggaggaaagagagaagggtttcgctgtgggcaacgtggtcgcgaaccttggtttggatctcggtagcctctcagcccgcaggttccgggtggtgtctggagctagccgaagattctttgaggtgaaccgggagaccggagagatgtttgtgaacgaccgtctggatcgagaggagctgtgtgggacactgccctcttgcactgtaactctggagttggtagtggagaacccgctggagctgttcagcgtggaagtggtgatccaggacatcaacgacaacaatcctgctttccctacccaggaaatgaaattggagattagcgaggccgtggctccggggacgcgctttccgctcgagagcgcgcacgatcccgatgtgggaagcaactctttacaaacctatgagctgagccgaaatgaatactttgcgcttcgcgtgcagacgcgggaggacagcaccaagtacgcggagctggtgttggagcgcgccctggaccgagaacgggagcctagtctccagttagtgctgacggcgttggacggagggaccccagctctctccgccagcctgcctattcacatcaaggtgctggacgcgaatgacaatgcgcctgtcttcaaccagtccttgtaccgggcgcgcgtcctggaggatgcaccctccggcacgcgcgtggtacaagtccttgcaacggatctggatgaaggccccaacggtgaaattatttactccttcggcagccacaaccgcgccggcgtgcggcaactattcgccttagaccttgtaaccgggatgctgacaatcaagggtcggctggacttcgaggacaccaaactccatgagatttacatccaggccaaagacaagggcgccaatcccgaaggagcacattgcaaagtgttggtggaggttgtggatgtgaatgacaacgccccggagatcacagtcacctccgtgtacagcccagtacccgaggatgcccctctggggactgtcatcgctttgctcagtgtgactgacctggatgctggcgagaacgggctggtgacctgcgaagttccaccgggtctccctttcagccttacttcttccctcaagaattacttcactttgaaaaccagtgcagacctggatcgggagactgtgccagaatacaacctcagcatcaccgcccgagacgccggaaccccttccctctcagcccttacaatagtgcgtgttcaagtgtccgacatcaatgacaaccctccacaatcttctcaatcttcctacgacgtttacattgaagaaaacaacctccccggggctccaatactaaacctaagtgtctgggaccccgacgccccgcagaatgctcggctttctttctttctcttggagcaaggagctgaaaccgggctagtgggtcgctatttcacaataaatcgtgacaatggcatagtgtcatccttagtgcccctagactatgaggatcggcgggaatttgaattaacagctcatatcagcgatgggggcaccccggtcctagccaccaacatcagcgtgaacatatttgtcactgatcgcaatgacaatgccccccaggtcctatatcctcggccaggtgggagctcggtggagatgctgcctcgaggtacctcagctggccacctagtgtcacgggtggtaggctgggacgcggatgcagggcacaatgcctggctctcctacagtctcttgggatcccctaaccagagcctttttgccatagggctgcacactggtcaaatcagtactgcccgtccagtccaagacacagattcacccaggcagactctcacggtcttgatcaaagacaatggggagccttcgctctccaccactgctaccctcactgtgtcagtaaccgaggactctcctgaagcccgagccgagttcccctctggctctgccccccgggagcagaaaaaaaatctcaccttttatctacttctttctctaatcctggtttctgtggggtttgtggtcacagtgttcggagtaatcatattcaaagtttacaagtggaagcagtctagagacctataccgagccccggtgagctcactgtaccgaacaccagggccctccttgcacgcggacgccgtgcggggaggcctgatgtcgccgcacctttaccatcaggtgtatctcaccacggactcccgccgcagcgacccgctgctgaagaaacctggtgcagccagtccactggccagccgccagaacacgctgcggagctgtgatccggtgttctataggcaggtgttgggtgcagagagcgcccctcccggacagcaagccccgcccaacacggactggcgtttctctcaggcccagagacccggcaccagcggctcccaaaatggcgatgacaccggcacctggcccaacaaccagtttgacacagagatgctgcaagccatgatcttggcgtccgccagtgaagctgctgatgggagctccaccctgggagggggtgccggcaccatgggattgagcgcccgctacggaccccagttcaccctgcagcacgtgcccgactaccgccagaatgtctacatcccaggcagcaatgccacactgaccaacgcagctggcaagcgggatggcaaggccccagcaggtggcaatggcaacaagaagaagtcgggcaagaaggagaagaagtaacatggaggccaggccaagagccacagggcggcctctccccaaccagcccagcttctccttacctgcacccaggcctcagagtttcagggctaacccccagaatactggtaggggccaaggccatgctccccttgggaaacagaaacaagtgcccagtcagcacctaccccttcccccccagggggttgaatatgcaaaagcagttccgctgggaacccccatccaatcaactgctgtacccatgggggtagtggggttactgtagacaccaagaaccatttgccacaccccgtttagttacagctgaactcctccatcttccaaatcaatcaggcccatccatcccatgcctccctcctccccaccccactccaacagttcctctttcccgagtaaggtggttggggtgttgaagtaccaagtaacctacaagcctcctagttctgaaaagttggaagggcatcatgacctcttggcctctcctttgattctcaatcttcccccaaagcatggtttggtgccagccccttcacctccttccagagcccaagatcaatgctcaagttttggaggacatgatcaccatccccatggtactgatgcttgctggatttagggagggcattttgctaccaagcctcttcccaacgccctggggaccagtcttctgttttgtttttcattgtttgacgtttccactgcatgccttgacttcccccacctcctcctcaaacaagagactccactgcatgttccaagacagtatggggtggtaagataaggaagggaagtgtgtggatgtggatggtgggggcatggacaaagcttgacacatcaagttatcaaggccttggaggaggctctgtatgtcctcaggggactgacaacatcctccagattccagccataaaccaataactaggctggacccttcccactacataatagggctcagcccaggcagccagctttgggctgagctaacaggaccaatggattaaactggcatttcagtccaaggaagctcgaagcaggtttaggaccaggtccccttgagaggtcagaggggcctctgtgggtgctgggtactccagaggtgccactggtggaagggtcagcggagccccagcaggaagggtgggccagccaggccattcttagtccctgggttggggaggcagggagctagggcagggaccaaatgaacagaaagtctcagcccaggatggggcttcttcaacagggcccctgccctcctgaagcctcagtccttcaccttgccaggtgccgtttctcttccgtgaaggccactgcccaggtccccagtgcgccccctagtggccatagcctggttaaagttccccagtgcctccttgtgcatagaccttcttctcccacccccttctgcccctgggtccccggccatccagcggggctgccagagaaccccagacctgcccttacagtagtgtagcgccccctccctctttcggctggtgtagaatagccagtagtgtagtgcggtgtgcttttacgtgatggcgggtgggcagcgggcggcgggctccgcgcagccgtctgtccttgatctgcccgcggcggcccgtgttgtgttttgtgctgtgtccacgcgctaaggcgaccccctcccccgtactgacttctcctataagcgcttctcttcgcatagtcacgtagctcccaccccaccctcttcctgtgtctcacgcaagttttatactctaatatttatatggctttttttcttcgacaaaaaaataataaaacgtttcttctgaaaagctg

SEQ ID NO: 12043 - DNA, 4605 bp, Homo sapiens
atggcagctccaaccaaatgccagctccgcggaagattagtcctgctatgctcgctcctggggatgctatgggaggccagggccagtcagattcgctactcagtgcctgaagagacagaaaagggctatattgtgggcaacatctccaaggacctggctctggagccccgggagctggcggagcgccgagtccgcatcgtctctagaggtaggacgcagcttttctctctgaacccgcgcagcggcaccttggtcaccgcgggtaggatagaccgggaggagctctgtgctcagagcccgcggtgtctggtgaactttaaagtcctggttgaagacagagtgaaactgtacggaatagaaatagaagtaactgatattaacgacagcgccccaaagttccaggccgaaagtctggaagtaaaaattaacgaaatcgcggttcctggagcacgttatccacttccagaagctattgatccggatgttggcgtgaactccctccagagctaccagctcagccccaatcaccacttctccctgaacgtgcagactggagacaatggagccataaacccagagctggtgctggagcgcgccctggacagggaggaggcaactgcccaccacctggtcctcacggcctcggatggcggcgagccgcgtcgctccagcacagtgcgcatccatgtgacagtgttggatacaaatgataatgccccggtttttgctcaacggatttaccgagttaaagtccttgagaacgtgcccccaggcacctggctgcttactgcaacagccagcgacctggatgagggaatcaacggaaaagtggcatacaaattctggaaaattaatgaaaaacaatctctgctattccagcttaatgaaaatactggggaaatatcaacagcaaaaagtctagattatgaagaatgttcattttatgaaatggaaatacaagctgaagatggtgggggattgaaagggtggacaaaagtgctcatttcggtggaagatgtaaatgacaatagacctgaagtgaccattacatctctgtttagcccagtgagagaagacgcacctcagggaacagtaattcttcttttcaatgctcatgaccgagactccgggaagaatggtcaagttgtctgttctatccaggagaatctatcttttacattagaaaattcagaagaagattattacagattgttgacggcccaaattcttgaccgagaaaaagcctcagaatataatatcacggtgactgcaacagacagaggaactccgcccctgtccacagaaattcacatcaccctgcaagtgactgacatcaatgataatccacctgctttctctcaagcctcctactcagtctacctcccggaaaacaacgccagaggtacttccatcttctccgtgattgcctatgaccctgatagcaatgagaattctagagttatttactccttggcagaggataccatccaagggtctcctctctccacctatgtctctattaactcagacactggtgtgctgtatgctctgtgctcctttgactatgagcagtttagagatttgcaaatgcaggtgacggcaagtgacagtggaagcccaccacttagcagcaatgtgtcattgagactgtttgttttggaccagaatgacaatgccccagaaatcctgtaccctgccctccccactgatggttctactggtgtggagctggcaccccgctctgcagagcctggctacctggtgaccaaggtggtggcagtggacagagactcaggccagaatgcttggctctcctaccgcctattcaaggccagtgagccagggctcttctcggtggggctgcacacaggtgaagtgcgcacagctcgggccctgctagatagagatgcgctcaaacagagccttgtggtggctgtacaggaccatggccagccccctctctcggccactgtcacgctcacagtagccatagctgacagcatcccagacatcctggctgacctgggcagtcttcagatccctgcagacctggaggcctcagaccttaccctctacctcgttgtggctgtggcagtcgtctcctgtgtcttcctcaccttcgttatcacgctgctggccctcaggctgaggcactggcactcctcgcatctgctgcgggctaccagtgatgggttggctggtgtgcccacctcacactttgtgggtgtagatggggttcgagctttcctacagacctattctcaggagttctccctcaccgctgactcaaggaagagtcacctgatcttcccccagcccaactatgcagacacactcatcagccagcagagctgtgagaaaaatgagcctttgtgcgtctctgttgattccaagtttcctatagaagacacccctttggttccgcaagccccgcccaacacggactggcgtttctctcaggcccagagacccggcaccagcggctcccaaaatggcgatgacaccggcacctggcccaacaaccagtttgacacagagatgctgcaagccatgatcttggcgtccgccagtgaagctgctgatgggagctccaccctgggagggggtgccggcaccatgggattgagcgcccgctacggaccccagttcaccctgcagcacgtgcccgactaccgccagaatgtctacatcccaggcagcaatgccacactgaccaacgcagctggcaagcgggatggcaaggccccagcaggtggcaatggcaacaagaagaagtcgggcaagaaggagaagaagtaacatggaggccaggccaagagccacagggcggcctctccccaaccagcccagcttctccttacctgcacccaggcctcagagtttcagggctaacccccagaatactggtaggggccaaggccatgctccccttgggaaacagaaacaagtgcccagtcagcacctaccccttcccccccagggggttgaatatgcaaaagcagttccgctgggaacccccatccaatcaactgctgtacccatgggggtagtggggttactgtagacaccaagaaccatttgccacaccccgtttagttacagctgaactcctccatcttccaaatcaatcaggcccatccatcccatgcctccctcctccccaccccactccaacagttcctctttcccgagtaaggtggttggggtgttgaagtaccaagtaacctacaagcctcctagttctgaaaagttggaagggcatcatgacctcttggcctctcctttgattctcaatcttcccccaaagcatggtttggtgccagccccttcacctccttccagagcccaagatcaatgctcaagttttggaggacatgatcaccatccccatggtactgatgcttgctggatttagggagggcattttgctaccaagcctcttcccaacgccctggggaccagtcttctgttttgtttttcattgtttgacgtttccactgcatgccttgacttcccccacctcctcctcaaacaagagactccactgcatgttccaagacagtatggggtggtaagataaggaagggaagtgtgtggatgtggatggtgggggcatggacaaagcttgacacatcaagttatcaaggccttggaggaggctctgtatgtcctcaggggactgacaacatcctccagattccagccataaaccaataactaggctggacccttcccactacataatagggctcagcccaggcagccagctttgggctgagctaacaggaccaatggattaaactggcatttcagtccaaggaagctcgaagcaggtttaggaccaggtccccttgagaggtcagaggggcctctgtgggtgctgggtactccagaggtgccactggtggaagggtcagcggagccccagcaggaagggtgggccagccaggccattcttagtccctgggttggggaggcagggagctagggcagggaccaaatgaacagaaagtctcagcccaggatggggcttcttcaacagggcccctgccctcctgaagcctcagtccttcaccttgccaggtgccgtttctcttccgtgaaggccactgcccaggtccccagtgcgccccctagtggccatagcctggttaaagttccccagtgcctccttgtgcatagaccttcttctcccacccccttctgcccctgggtccccggccatccagcggggctgccagagaaccccagacctgcccttacagtagtgtagcgccccctccctctttcggctggtgtagaatagccagtagtgtagtgcggtgtgcttttacgtgatggcgggtgggcagcgggcggcgggctccgcgcagccgtctgtccttgatctgcccgcggcggcccgtgttgtgttttgtgctgtgtccacgcgctaaggcgaccccctcccccgtactgacttctcctataagcgcttctcttcgcatagtcacgtagctcccaccccaccctcttcctgtgtctcacgcaagttttatactctaatatttatatggctttttttcttcgacaaaaaaataataaaacgtttcttctgaaaagctg

SEQ ID NO: 12044 - DNA, 4317 bp, Homo sapiens
agaatgggctctaggcgccgctgctcaccaatcagggaatgggaagctgcgcgccattgagtccctccctcccccgcctctaccacacaaagcggaatgagatggatactcacagatcctgacactggagacttagaagtattttccttcgctttctgatatattttggatgtagtcggcctaggacttcatagatacataagccgattcacaaccaaccagctcgagaaaccgcggaatatcggcttagagcctgccatggcgaatcggctacagcgcggggaccgcagtcggctgctgctgctgctgtgcattttcctggggacgctgcgggggttccgggccaggcagatccgatattcggtgccagaagagaccgaaaagggctccttcgtgggcaatatctccaaggacctggggctggagccccgggagctggcgaagcgcggagtccgcatcgtctccagagggaagacacagcttttcgctgtgaatccgcgaagcggcagcttgatcacggcaggcaggatagaccgggaggagctctgtgagacggtgtcctcctgttttttaaatatggaacttctcgtggaagacaccttgaagatttacggagtggaggtggaaataatagatattaatgataacgcccccagcttccaggaggacgaagtggagataaaagtcagtgagcacgcaattcctggggcgcgatttgctcttcctaatgctagggatccagatgtgggcgtgaactccctccagagctaccagctcagccctaataattacttttccttgcaactgcggggcagaacggatggggccaagaatccagagctagtactggagggaagcctggaccgagagaaagaggctgctcacctgctcctcctcacagctttagatggaggcgatcccatccgaaagggcgcagttcccattcgtgtggtggtcctcgatgtaaatgatcacatcccaatgtttacacagtccgtatatcgcgtgagtgttccagaaaacatcagctccggaactcgggtgctgatggttaatgcaacggatccagacgagggaatcaacggggaagtaatgtattcatttcggaacatggaaagcaaggcttctgaaatattccaattggattcacaaactggagaagttcaagtacgggggtctctggattttgaaaaatatagattctatgagatggaaattcaaggccaagatggtggaggtctctttaccaccacgacgatgttgatcactgttgtggatgtgaatgataacgctccagaaataactatcacctcttctattaattcaattctggaaaactctcctccaggtacagtgattgctcttctaaatgtgcaagatcaagattctggagaaaatggtcaagtctcctgttttattcctaaccacctgccttttaaattagaaaagacttatggaaattattacaaattgataacaagcagagtgctggacagggagttggtccagagctacaatataacgttgacagccacagaccagggaagcccgcctttgtctgcagaaactcatgtctggctgaatgtggcagatgacaacgataaccctcccgtttttcctcactcctcttactctgcctacattcccgaaaacaaccccaggggtgcctccatcttctcagtgaccgccctcgacccggacagcaaacagaatgccctggtcacttactctctgacggatgacactgtccagggggtgcctctgtcctcctatgtctctattaactccaacactggtgttctctatgccctacaatccttcgactatgagcagtttcgagacttagaactgagagtgatagcacgtgacagcggggacccgcccctcagcagcaacgtgtcgctgagcctgttcgtgctggaccagaacgacaatgcgcccgagatcctgtaccctgccctccccacagacggctccactggcgtggagctggcgccccgctctgcggaacctggctacctggtgaccaaggtggttgcggtggacaaagattcaggccagaacgcctggctgtcctatcgcctgcttaaggccagcgagccgggactcttcgcggtgggggagcacacgggcgagcaagccccgcccaacacggactggcgtttctctcaggcccagagacccggcaccagcggctcccaaaatggcgatgacaccggcacctggcccaacaaccagtttgacacagagatgctgcaagccatgatcttggcgtccgccagtgaagctgctgatgggagctccaccctgggagggggtgccggcaccatgggattgagcgcccgctacggaccccagttcaccctgcagcacgtgcccgactaccgccagaatgtctacatcccaggcagcaatgccacactgaccaacgcagctggcaagcgggatggcaaggccccagcaggtggcaatggcaacaagaagaagtcgggcaagaaggagaagaagtaacatggaggccaggccaagagccacagggcggcctctccccaaccagcccagcttctccttacctgcacccaggcctcagagtttcagggctaacccccagaatactggtaggggccaaggccatgctccccttgggaaacagaaacaagtgcccagtcagcacctaccccttcccccccagggggttgaatatgcaaaagcagttccgctgggaacccccatccaatcaactgctgtacccatgggggtagtggggttactgtagacaccaagaaccatttgccacaccccgtttagttacagctgaactcctccatcttccaaatcaatcaggcccatccatcccatgcctccctcctccccaccccactccaacagttcctctttcccgagtaaggtggttggggtgttgaagtaccaagtaacctacaagcctcctagttctgaaaagttggaagggcatcatgacctcttggcctctcctttgattctcaatcttcccccaaagcatggtttggtgccagccccttcacctccttccagagcccaagatcaatgctcaagttttggaggacatgatcaccatccccatggtactgatgcttgctggatttagggagggcattttgctaccaagcctcttcccaacgccctggggaccagtcttctgttttgtttttcattgtttgacgtttccactgcatgccttgacttcccccacctcctcctcaaacaagagactccactgcatgttccaagacagtatggggtggtaagataaggaagggaagtgtgtggatgtggatggtgggggcatggacaaagcttgacacatcaagttatcaaggccttggaggaggctctgtatgtcctcaggggactgacaacatcctccagattccagccataaaccaataactaggctggacccttcccactacataatagggctcagcccaggcagccagctttgggctgagctaacaggaccaatggattaaactggcatttcagtccaaggaagctcgaagcaggtttaggaccaggtccccttgagaggtcagaggggcctctgtgggtgctgggtactccagaggtgccactggtggaagggtcagcggagccccagcaggaagggtgggccagccaggccattcttagtccctgggttggggaggcagggagctagggcagggaccaaatgaacagaaagtctcagcccaggatggggcttcttcaacagggcccctgccctcctgaagcctcagtccttcaccttgccaggtgccgtttctcttccgtgaaggccactgcccaggtccccagtgcgccccctagtggccatagcctggttaaagttccccagtgcctccttgtgcatagaccttcttctcccacccccttctgcccctgggtccccggccatccagcggggctgccagagaaccccagacctgcccttacagtagtgtagcgccccctccctctttcggctggtgtagaatagccagtagtgtagtgcggtgtgcttttacgtgatggcgggtgggcagcgggcggcgggctccgcgcagccgtctgtccttgatctgcccgcggcggcccgtgttgtgttttgtgctgtgtccacgcgctaaggcgaccccctcccccgtactgacttctcctataagcgcttctcttcgcatagtcacgtagctcccaccccaccctcttcctgtgtctcacgcaagttttatactctaatatttatatggctttttttcttcgacaaaaaaataataaaacgtttcttctgaaaagctg

SEQ ID NO: 12045 - DNA, 4602 bp, Homo sapiens
atgaaagcgagctcagggaggtgcgggctggtgcggtggctgcaggtactgttgcccttcctgttgtctttgttccccggggctctcccagtccagatccgctattcaattccagaggagctggccaaaaactcggtcgtaggaaacctcgccaaggatctggggctcagcgtccgggacttgccagcccggaagctgcgggttagcgcggagaaggaatatttcacagtaaacccagaaagcggagacttacttgtgagtgacagaatagaccgagaacagatatgcgggaagcagcctctgtgtgttctggatttcgatactgtcgctgaaaatccactaaatattttctacatagcagtaattgtgcaggatataaatgataataccccgctattcaaacagactaagattaatttaaaaattggcgaatccactaagccaggtacaacatttccacttgacccagccctggattcagatgttggtcctaactcactacaaagataccaccttaatgacaacgagtactttgatctcgctgagaaacagactccagatggtcgtaaatatcctgagttgattctaaaacactctctggacagagaagagcacagtttacatcaattggtcctcacagctgtggatggcggagacccacctcaaagtggcacgacccaaatccgaatcaaagtcacggatgccaacgataaccctccagtgttcagccaggacgtgtacagggtcaccctgagggaggacgtgccgccgggcttctttgtgcttcaagtgacagccaccgaccgggatgaaggcataaacgcagagatcacctactcctttcataatgtggacgaacaagtgaaacactttttcaacttaaatgaaaaaacaggagaaatcacgacaaaggatgatttggattttgagattgcaagtagttacactctgagtatcgaagcaaaagatcctggagatctagcagcccactgcagtatccaagttgaaattcttgatgacaacgattgtgcacctgaagttattgtgacttcagtatctactcccctaccggaggattcgccaccaggaacagtgatcgccttgataaaaacgagagacagagactctggagaaaatggagaagtttactgccaagtgttgggaaatgccaagtttattttgaaatcttcctcaaagaactattacaaactagtgacagacggcgctctggaccgggaggagatcccagaatacaatctcaccatcacagccaccgacgggggcaagccgcccctctcctccagcataattgtcaccctgcacatctccgacgtcaacgataatgccccagttttccaacagacttcctacatggttcacgtggcagagaacaatcctcctggcgcctctatcgctcaaatcagtgcctctgaccctgacttgggccccagtggccaagtttcctactccatcgtagcgagcgacctgaagccgcgggagattttatcctacgtgtccgtgagcgcgcagagcggggtggtgttcgcgcagcgcgccttcgatcatgagcagctgcgcgccttcgagctcacactgcaggcccgcgaccagggctcgcccgcgctcagcgccaacgtgagcctgcgcgtgttagtgggcgacctcaatgacaatgcgccacgggtgctgtaccccgcgctggggcctgatggctccgccctcttcgatatggtgccacgcgccgcagagcccggctacctggtgaccaaggtggtggcggtggacgcagactcaggacacaacgcttggctgtcctaccacgtgctgcaggccagcgagcccgggctcttcagcctggggttgcgcacgggtgaggtgcgcacagcgcgtgccttgggcgacagggacgcggcccgccagcgcctgctggtcgctgtgcgtgatggaggacagccgccactctccgctacggccacgctgcacctaatcttcgcggatagcctgcaagaggtattgccagacctcagcgaccgccgggagccctctgacccccaggcaaaactgcagttttacctggttgtggccttggccttgatctcagtgctcttcttcctcgcggtgattctggcaatctccctgcgcctgcgactctcttccaggtcagatgcttgggactgttttcagcctggtctcagctccaagcctggacctggggttctccccaattacagtgagggtacattgccctattcctacaacctgtgtgttgcctcacaatcagccaagacagagttcaattttctgaacataaccccggaattggttcccgcgcaagatctcgtctgtgacaatgcctcttgggaacaaaatacaaatcatggagccgctggggtcccttttgcctcagatactattttgaagcaagccccgcccaacacggactggcgtttctctcaggcccagagacccggcaccagcggctcccaaaatggcgatgacaccggcacctggcccaacaaccagtttgacacagagatgctgcaagccatgatcttggcgtccgccagtgaagctgctgatgggagctccaccctgggagggggtgccggcaccatgggattgagcgcccgctacggaccccagttcaccctgcagcacgtgcccgactaccgccagaatgtctacatcccaggcagcaatgccacactgaccaacgcagctggcaagcgggatggcaaggccccagcaggtggcaatggcaacaagaagaagtcgggcaagaaggagaagaagtaacatggaggccaggccaagagccacagggcggcctctccccaaccagcccagcttctccttacctgcacccaggcctcagagtttcagggctaacccccagaatactggtaggggccaaggccatgctccccttgggaaacagaaacaagtgcccagtcagcacctaccccttcccccccagggggttgaatatgcaaaagcagttccgctgggaacccccatccaatcaactgctgtacccatgggggtagtggggttactgtagacaccaagaaccatttgccacaccccgtttagttacagctgaactcctccatcttccaaatcaatcaggcccatccatcccatgcctccctcctccccaccccactccaacagttcctctttcccgagtaaggtggttggggtgttgaagtaccaagtaacctacaagcctcctagttctgaaaagttggaagggcatcatgacctcttggcctctcctttgattctcaatcttcccccaaagcatggtttggtgccagccccttcacctccttccagagcccaagatcaatgctcaagttttggaggacatgatcaccatccccatggtactgatgcttgctggatttagggagggcattttgctaccaagcctcttcccaacgccctggggaccagtcttctgttttgtttttcattgtttgacgtttccactgcatgccttgacttcccccacctcctcctcaaacaagagactccactgcatgttccaagacagtatggggtggtaagataaggaagggaagtgtgtggatgtggatggtgggggcatggacaaagcttgacacatcaagttatcaaggccttggaggaggctctgtatgtcctcaggggactgacaacatcctccagattccagccataaaccaataactaggctggacccttcccactacataatagggctcagcccaggcagccagctttgggctgagctaacaggaccaatggattaaactggcatttcagtccaaggaagctcgaagcaggtttaggaccaggtccccttgagaggtcagaggggcctctgtgggtgctgggtactccagaggtgccactggtggaagggtcagcggagccccagcaggaagggtgggccagccaggccattcttagtccctgggttggggaggcagggagctagggcagggaccaaatgaacagaaagtctcagcccaggatggggcttcttcaacagggcccctgccctcctgaagcctcagtccttcaccttgccaggtgccgtttctcttccgtgaaggccactgcccaggtccccagtgcgccccctagtggccatagcctggttaaagttccccagtgcctccttgtgcatagaccttcttctcccacccccttctgcccctgggtccccggccatccagcggggctgccagagaaccccagacctgcccttacagtagtgtagcgccccctccctctttcggctggtgtagaatagccagtagtgtagtgcggtgtgcttttacgtgatggcgggtgggcagcgggcggcgggctccgcgcagccgtctgtccttgatctgcccgcggcggcccgtgttgtgttttgtgctgtgtccacgcgctaaggcgaccccctcccccgtactgacttctcctataagcgcttctcttcgcatagtcacgtagctcccaccccaccctcttcctgtgtctcacgcaagttttatactctaatatttatatggctttttttcttcgacaaaaaaataataaaacgtttcttctgaaaagctg

SEQ ID NO: 12046 - DNA, 4790 bp, Homo sapiens
aagggggtggaggtttggccctaaagcttcaggacaccaaagaaattcagtcgaacagcccaccagttctctccatagggacctgggtcccgtgaatgctggttatctcacaccctgaggaataaagattggaatccgcactggatgctggaagttgactcggagaaaattgcgacaggagggaaatggcggctctgcaaaagttgccacactgcagaaagctggtcctgctgtgcttccttttggcgaccctgtgggaggccagggccgggcagattcgctattctgtgcgggaagagatcgacagaggctccttcgtaggcaacatcgccaaggacttgggtttggagcccctggcactggcagagcagggagtccgcatcgtctccagaggtaggtcccagctctttgctctgaacccgcgaagcggcagcttggtcactgcgaacaggatagaccgggaggagctctgcgctcagagcgcaccctgtctgttgaattttaacattctgctggaggataaattgactatttattcagtagaggtggaaataacagatattaacgataatgcccctcgctttggagtagaggaactggagctaaaaatcagtgaaaccactacgccaggattccggattcctcttaagaatgcgcatgatgcagacgtaggtgagaacgcccttcagaagtacgcactcaacccaaatgaccacttctccctggacgtgcgaaggggagctgatgggaacaagtacccagaactggtgctggagcgctctctggaccgcgaggaagaggctgttcaccacctcgttctcgtggcttctgatgggggtgacccagtgctatctggcacctcccgcatctgcgtgaaggtcctggatgcgaacgacaatgcgcctgtttttacacagcccgagtaccgcataagcattccggagaatacgctcgtgggcacccggatactcacggtgaccgccactgacgcagatgagggctactacgctcaagtggtatattttctagagaaaagccctggagaaacctcagaggtatttgagcttaagtcaacatctggagaactgacaatcataaaagatctagattatgaggatgctacattccatgaaattgatattgaagctcaggatggtccgggccttctaaccagagcgaaggttatcgtcacggttctggatgtgaatgacaatgccccagaattttacatgacatctgctactagctcagtttctgaagactctcttccaggaaccataattgggctttttaatgtacatgatagagactctgggcagaacgcattcaccacctgttcactccccgaggatcttccttttaagttagaaaagtcagtagacaattactaccgactggttacaaccagagcccttgacagggaacagttttccttttacaacatcactctaaccgctaaagatggagggaacccctccctgtccacggatgctcacattttgctccaggtggcagacatcaacgacaacgcacccgccttctcccgcacatcctactccacctacattcccgaaaacaaccccagaggagcctctgtcttctcagtgacggcccatgaccccgacagcaacgacaatgctcatgtaacttactctttcgcggaggacactgttcagggggcacccttatcctcttacatctctatcaactccgacactggagtactctatgcactgcgctcctttgattatgagcagttgcgagacttgcaagtgtgggtgatagcgcgggacagcgggaaccctccactcagtagcaatgtatcattaagcctgttcgtgctggaccagaacgacaacgcgcccgagatcctgtaccctgccttccccacagacggttccactggcgtggagctggcgccccgctccgcagagcccggctacctggtgaccaaggtggtggcggtggacagagactcgggccagaacgcctggctgtcttaccacctgctcaaggccagcgagccgggactcttctcggtgggtctgcacacgggcgaggtgcgcacggcgcgagccctgctggacagagacgcgctcaagcagagcctcgtggtggccatccaggaccacggccagccccctctctccgccactgtcacgctcaccgtggccgtggccgacaggatccccgacatcctggccgacctgggcagcctcgagccctccgccatacccaacgattcggacctcactctgtacctggtggtggcggtggccgcggtctcctgcgtcttcctggccttcgtcatcgtgttgctggcgcacaggctgcggcgctggcacaagtcacgcctgctgcaggcttcaggaggcagcttgacaggcatgcagagctcgcactttgtgggcgtggacggggttcgggctttcctgcagacctattcccacgaggtctccctcactgcggactcgcggaagagccacctgattttcccccagcccaactatgcggacacgctcatcagccaggagagctgtgagaaaaaggattttttatcagcgcctcaatctctactcgaagaagaaagagaagaaacgttttctcagcaagccccgcccaacacggactggcgtttctctcaggcccagagacccggcaccagcggctcccaaaatggcgatgacaccggcacctggcccaacaaccagtttgacacagagatgctgcaagccatgatcttggcgtccgccagtgaagctgctgatgggagctccaccctgggagggggtgccggcaccatgggattgagcgcccgctacggaccccagttcaccctgcagcacgtgcccgactaccgccagaatgtctacatcccaggcagcaatgccacactgaccaacgcagctggcaagcgggatggcaaggccccagcaggtggcaatggcaacaagaagaagtcgggcaagaaggagaagaagtaacatggaggccaggccaagagccacagggcggcctctccccaaccagcccagcttctccttacctgcacccaggcctcagagtttcagggctaacccccagaatactggtaggggccaaggccatgctccccttgggaaacagaaacaagtgcccagtcagcacctaccccttcccccccagggggttgaatatgcaaaagcagttccgctgggaacccccatccaatcaactgctgtacccatgggggtagtggggttactgtagacaccaagaaccatttgccacaccccgtttagttacagctgaactcctccatcttccaaatcaatcaggcccatccatcccatgcctccctcctccccaccccactccaacagttcctctttcccgagtaaggtggttggggtgttgaagtaccaagtaacctacaagcctcctagttctgaaaagttggaagggcatcatgacctcttggcctctcctttgattctcaatcttcccccaaagcatggtttggtgccagccccttcacctccttccagagcccaagatcaatgctcaagttttggaggacatgatcaccatccccatggtactgatgcttgctggatttagggagggcattttgctaccaagcctcttcccaacgccctggggaccagtcttctgttttgtttttcattgtttgacgtttccactgcatgccttgacttcccccacctcctcctcaaacaagagactccactgcatgttccaagacagtatggggtggtaagataaggaagggaagtgtgtggatgtggatggtgggggcatggacaaagcttgacacatcaagttatcaaggccttggaggaggctctgtatgtcctcaggggactgacaacatcctccagattccagccataaaccaataactaggctggacccttcccactacataatagggctcagcccaggcagccagctttgggctgagctaacaggaccaatggattaaactggcatttcagtccaaggaagctcgaagcaggtttaggaccaggtccccttgagaggtcagaggggcctctgtgggtgctgggtactccagaggtgccactggtggaagggtcagcggagccccagcaggaagggtgggccagccaggccattcttagtccctgggttggggaggcagggagctagggcagggaccaaatgaacagaaagtctcagcccaggatggggcttcttcaacagggcccctgccctcctgaagcctcagtccttcaccttgccaggtgccgtttctcttccgtgaaggccactgcccaggtccccagtgcgccccctagtggccatagcctggttaaagttccccagtgcctccttgtgcatagaccttcttctcccacccccttctgcccctgggtccccggccatccagcggggctgccagagaaccccagacctgcccttacagtagtgtagcgccccctccctctttcggctggtgtagaatagccagtagtgtagtgcggtgtgcttttacgtgatggcgggtgggcagcgggcggcgggctccgcgcagccgtctgtccttgatctgcccgcggcggcccgtgttgtgttttgtgctgtgtccacgcgctaaggcgaccccctcccccgtactgacttctcctataagcgcttctcttcgcatagtcacgtagctcccaccccaccctcttcctgtgtctcacgcaagttttatactctaatatttatatggctttttttcttcgacaaaaaaataataaaacgtttcttctgaaaagctg

SEQ ID NO: 12047 - DNA, 4605 bp, Homo sapiens
atggcgcctccgcagaggcatccgcagcgcagcgagcaggtcctgctcctcacgctcctggggacgctgtggggggccgcggcagcgcagatccgctactctattcccgaggagctggagaaaggctccttcgtaggcaacatcgtcaaggatctgggactggagccccaggagttggcggagcacggagtccgcatcgtctccagaggtaggatgcagcttttctctctgaatccgcgaaacggcagcttggtcaccgcgggtaggatagaccgcgaggagctctgtgctcagagcccgcggtgtctggtgagttttaacatccttgtcgaggataaactgaatctttatcccgtggaagtggaaatagtggacattaatgacaatacaccccgattcttaaaggaagaattggaagtgaaaattctcgaaaacgcagctccatcctctcgttttccactaatggaggtctatgaccctgatgtgggaatgaactcccttcagggatttaagctcagtggtaatagtcacttctcagtggacgtgcaaagcgaagcccatgggcccaagtacccggagctggtgctggagggcacactggaccgggaaggagaagccgtttaccgcctggtccttactgccatggatggcggcgaccctgtccgctcaagcgtcgcccaaattctggtaacagttctagatgtgaatgacaacactccaatgtttactcagcctgtctaccgtgtaagtgttcctgaaaacctgccagtaggcacaccagtgttggcagtgactgccaccgaccaggatgaaggagtccacggggaagtaacttattcctttgtgaagattacagaaaagatctcacaaattttctgtttgaatgttttgactggagaaatttcaacttctgcaaatctagactatgaggactcgagtttttatgagctgggtgttgaagcccgggatgggccaggtcttcgagacagagcgaaagtcttaataactatcttggatgtcaatgataatgtaccagaagtggttgttacatctggaagcagaacaattgctgaaagtgcacctccaggaacagtaatcgccctttttcaagtgttcgatcgagactctggcctgaatggcctggtaacctgttccatcccgagaagtctcccatttgaattggaaaaatcagttggcaattattatcgattagtgacaaatgcagctctagaccgggaagaggtattcttgtacaacatcactgtgacagccacggacaaaggaacaccacctctgtctacagaaacaatcatctctctaaatgtggcagacaccaacgacaacccgcccaccttcccccattcatcctactcagtctatgtccttgaaaacaaccccaggggtgcctccatcttctctgtgaatgcactggaccctgacgtggaccagaacgcccaagtctcctactcactggcagaagacaccctccagggggcgcccctgtcctcctacgtgtccatcaactccgacactgggattctgtacgccctgcgctccttcgactatgagcagttgagagacctacagctgtgggtgacagccagcgacagcggggacccgcctcttagcagcaacgtgtcactgagcctgtttgtgctggaccagaatgacaatgcgcccgagatcctgtaccccgccctccccacagacggttccactggcgtggagctggcgccccgctccgcagagcccggctacctggtgaccaaggtggtggcggtggacagagactcgggccagaacgcctggctgtcctaccgcctgctcaaggccagcgagccaggacttttctcagtgggcctgcacacgggcgaggtgcgcacggcgcgcgccctgctggacagagacgcgctcaagcagagcctagtggtggccgtccaggaccacggccagccccctctctccgccactgtcacgctcaccgtggccgtggccgacaggatccccgacatcctggccgacctgggcagcctcgagccctccgccaaacccaacgattcggacctcactctgtacctggtggtggcggtggccgcggtctcctgcgtcttcctggccttcgtcatcgtgctgctggcgctcagactgcagcgctggcacaagtcacgcctgctgcaggcttcgggaggtggcttagcgagcatgcccggctcgcactttgtgggcgtggaaggggttcgggctttcctgcagacctattcccacgaggtctcactcactgcagactcgcgtaagagtcatctgattttcccccagcccaactatgccgacacgcttatcaaccaggagagctatgagaaaagcgagcctcttctgataactcaggatttacttgaaacgaaaggagaacccaggcaacttcagcaagccccgcccaacacggactggcgtttctctcaggcccagagacccggcaccagcggctcccaaaatggcgatgacaccggcacctggcccaacaaccagtttgacacagagatgctgcaagccatgatcttggcgtccgccagtgaagctgctgatgggagctccaccctgggagggggtgccggcaccatgggattgagcgcccgctacggaccccagttcaccctgcagcacgtgcccgactaccgccagaatgtctacatcccaggcagcaatgccacactgaccaacgcagctggcaagcgggatggcaaggccccagcaggtggcaatggcaacaagaagaagtcgggcaagaaggagaagaagtaacatggaggccaggccaagagccacagggcggcctctccccaaccagcccagcttctccttacctgcacccaggcctcagagtttcagggctaacccccagaatactggtaggggccaaggccatgctccccttgggaaacagaaacaagtgcccagtcagcacctaccccttcccccccagggggttgaatatgcaaaagcagttccgctgggaacccccatccaatcaactgctgtacccatgggggtagtggggttactgtagacaccaagaaccatttgccacaccccgtttagttacagctgaactcctccatcttccaaatcaatcaggcccatccatcccatgcctccctcctccccaccccactccaacagttcctctttcccgagtaaggtggttggggtgttgaagtaccaagtaacctacaagcctcctagttctgaaaagttggaagggcatcatgacctcttggcctctcctttgattctcaatcttcccccaaagcatggtttggtgccagccccttcacctccttccagagcccaagatcaatgctcaagttttggaggacatgatcaccatccccatggtactgatgcttgctggatttagggagggcattttgctaccaagcctcttcccaacgccctggggaccagtcttctgttttgtttttcattgtttgacgtttccactgcatgccttgacttcccccacctcctcctcaaacaagagactccactgcatgttccaagacagtatggggtggtaagataaggaagggaagtgtgtggatgtggatggtgggggcatggacaaagcttgacacatcaagttatcaaggccttggaggaggctctgtatgtcctcaggggactgacaacatcctccagattccagccataaaccaataactaggctggacccttcccactacataatagggctcagcccaggcagccagctttgggctgagctaacaggaccaatggattaaactggcatttcagtccaaggaagctcgaagcaggtttaggaccaggtccccttgagaggtcagaggggcctctgtgggtgctgggtactccagaggtgccactggtggaagggtcagcggagccccagcaggaagggtgggccagccaggccattcttagtccctgggttggggaggcagggagctagggcagggaccaaatgaacagaaagtctcagcccaggatggggcttcttcaacagggcccctgccctcctgaagcctcagtccttcaccttgccaggtgccgtttctcttccgtgaaggccactgcccaggtccccagtgcgccccctagtggccatagcctggttaaagttccccagtgcctccttgtgcatagaccttcttctcccacccccttctgcccctgggtccccggccatccagcggggctgccagagaaccccagacctgcccttacagtagtgtagcgccccctccctctttcggctggtgtagaatagccagtagtgtagtgcggtgtgcttttacgtgatggcgggtgggcagcgggcggcgggctccgcgcagccgtctgtccttgatctgcccgcggcggcccgtgttgtgttttgtgctgtgtccacgcgctaaggcgaccccctcccccgtactgacttctcctataagcgcttctcttcgcatagtcacgtagctcccaccccaccctcttcctgtgtctcacgcaagttttatactctaatatttatatggctttttttcttcgacaaaaaaataataaaacgtttcttctgaaaagctg

SEQ ID NO: 12048 - DNA, 4623 bp, Homo sapiens
atgctccgcaaggtgagaagctggacagaaatctggcggtgggctacccttttgttcctcttttaccacctgggttacgtttgtgggcagatccgctacccggtcccagaggagtcacaggaagggacttttgtagggaatgtcgctcaagatttcctgctggatacggacagtctgtcagctcgcaggctgcaggtcgctggagaggtgaaccaaagacacttccgtgtggatttggacagcggagccctgctcatcaagaacccaatcgaccgagaggcactgtgtgggctcagtgccagctgcatcgtgcccctggagtttgtcaccgaaggtcctttggaaatgtaccgagcagaggtagagatcgtagatgtgaatgatcacgccccccgttttccgcggcagcagctggacttggaaattggggaggcagctcctccaggacagcgtttcccgttggaaaaggctcaggatgcagatgtggggagcaattcgattagcagctataggctgagctccaatgaacactttgcactggatgtgaagaagcgcagcgacggcagcctggtcccagagctgctcctggagaagcctttggatcgagagaagcaatcggactaccgcctggtgctgactgctgtcgatggagggaacccgccgagatctggcaccgcagagctccgggtatccgtgctggacgtaaacgacaacgccccagccttccagcaatccagctacaggattagtgtgttggagagcgcaccagcgggcatggtgctcatccagctcaatgcctcagacccggacctgggtcccagtggtaacgtcaccttttatttcagtggtcatacccctgatcgtgtaagaaacctctttagcctgcaccccactactggaaagcttactcttttggggcccctagactttgagagtgagaattactatgaatttgatgtgcgggctcgcgatgggggttctccagccatggagcaacattgcagccttcgagtggatctgctggacgtaaatgacaatgccccttacatcacagtgacctcagagcttggaaccctccccgagagtgcagaacctggcactgtggtggcacttatcagtgtgcaggatccagactcagggtcaaacggagatgtgagcctccgcattcctgaccacttgccatttgccctcaagtctgccttcaggaaccagttctccctggtgactgctggacccttggatcgagaggccaaatctagctatgacatcatggtcactgcttctgatgctgggaaccctcctctcagtacccacagaactattttcctcaatatttcagatgtgaatgataatccaccctctttctttcagaggtcacatgaggtgtttgttcctgagaacaatcgcccaggggacctgctttgctcccttgcagcctctgacccagactctggcttgaatgcgcttatctcctactcactcctggagcccaggaatcgagatgtatcagcttcctctttcatctctctgaacccccagacaggagctgttcatgctactcgatcctttgactatgagcaaacccagacactgcagtttgaggtgcaggcccgggatcggggcaacccaccccttagcagcactgtaacagttcgtctatttgtgctggacctcaatgacaatgctccagctgtgctccgtcctcgggcccggcctggttccttatgtccccaagcactgcctccatcagttggtgctggccacctaatcacaaaggtgactgctgtggacttggattcaggttacaatgcttgggtttcctatcagctcctggaggccccagatcccagcctgtttgcagtctctcgatatgctggggaggtgcggacggctgttcctatcccagctgacctcccaccacagaagctggtcattgtggtaaaggatagtggtagtccaccactctctacctctgttactctcttagtgtccttagaggaagacactcatccagttgtcccagatcttcgagaatcttcagctccaagggaaggagaatctcgtctaaccctctacttggctgtgtccctagtggcaatttgctttgtctcctttggctcattcgtggcactactctctaagtgtcttcgtggggcagcctgtggagtcacatgctttcctgctggcacctgtgcctgtctcaccagatctcgaaggagggaggggcttcccccttccaatgggatcctccgaatccagctagggtcagatgaccctatcaagtttgttgatgtgggaggccactctcatggctgtacacccttggcttctgcacccactcggagtgatagcttcatgatggtgaagtcacccagtgcacctatggcaggggagcctgttcgcccaagctgcccaccctctgatcttctctatgggctagagcaagccccgcccaacacggactggcgtttctctcaggcccagagacccggcaccagcggctcccaaaatggcgatgacaccggcacctggcccaacaaccagtttgacacagagatgctgcaagccatgatcttggcgtccgccagtgaagctgctgatgggagctccaccctgggagggggtgccggcaccatgggattgagcgcccgctacggaccccagttcaccctgcagcacgtgcccgactaccgccagaatgtctacatcccaggcagcaatgccacactgaccaacgcagctggcaagcgggatggcaaggccccagcaggtggcaatggcaacaagaagaagtcgggcaagaaggagaagaagtaacatggaggccaggccaagagccacagggcggcctctccccaaccagcccagcttctccttacctgcacccaggcctcagagtttcagggctaacccccagaatactggtaggggccaaggccatgctccccttgggaaacagaaacaagtgcccagtcagcacctaccccttcccccccagggggttgaatatgcaaaagcagttccgctgggaacccccatccaatcaactgctgtacccatgggggtagtggggttactgtagacaccaagaaccatttgccacaccccgtttagttacagctgaactcctccatcttccaaatcaatcaggcccatccatcccatgcctccctcctccccaccccactccaacagttcctctttcccgagtaaggtggttggggtgttgaagtaccaagtaacctacaagcctcctagttctgaaaagttggaagggcatcatgacctcttggcctctcctttgattctcaatcttcccccaaagcatggtttggtgccagccccttcacctccttccagagcccaagatcaatgctcaagttttggaggacatgatcaccatccccatggtactgatgcttgctggatttagggagggcattttgctaccaagcctcttcccaacgccctggggaccagtcttctgttttgtttttcattgtttgacgtttccactgcatgccttgacttcccccacctcctcctcaaacaagagactccactgcatgttccaagacagtatggggtggtaagataaggaagggaagtgtgtggatgtggatggtgggggcatggacaaagcttgacacatcaagttatcaaggccttggaggaggctctgtatgtcctcaggggactgacaacatcctccagattccagccataaaccaataactaggctggacccttcccactacataatagggctcagcccaggcagccagctttgggctgagctaacaggaccaatggattaaactggcatttcagtccaaggaagctcgaagcaggtttaggaccaggtccccttgagaggtcagaggggcctctgtgggtgctgggtactccagaggtgccactggtggaagggtcagcggagccccagcaggaagggtgggccagccaggccattcttagtccctgggttggggaggcagggagctagggcagggaccaaatgaacagaaagtctcagcccaggatggggcttcttcaacagggcccctgccctcctgaagcctcagtccttcaccttgccaggtgccgtttctcttccgtgaaggccactgcccaggtccccagtgcgccccctagtggccatagcctggttaaagttccccagtgcctccttgtgcatagaccttcttctcccacccccttctgcccctgggtccccggccatccagcggggctgccagagaaccccagacctgcccttacagtagtgtagcgccccctccctctttcggctggtgtagaatagccagtagtgtagtgcggtgtgcttttacgtgatggcgggtgggcagcgggcggcgggctccgcgcagccgtctgtccttgatctgcccgcggcggcccgtgttgtgttttgtgctgtgtccacgcgctaaggcgaccccctcccccgtactgacttctcctataagcgcttctcttcgcatagtcacgtagctcccaccccaccctcttcctgtgtctcacgcaagttttatactctaatatttatatggctttttttcttcgacaaaaaaataataaaacgtttcttctgaaaagctg

SEQ ID NO: 12049 - DNA, 4602 bp, Homo sapiens
atggcggcgcctcctgctcgcccagaccacacccggctgctccagatctgccttctcctgggggttctggtggaaatcagggccgaacagattctctactcggtgtttgaggagcaggaagaaggctcagtggtgggcaacatcgccaaggacctggggttggcgccccgggagctggcggagcgcggagtccgcatcgtctccagaggtaggacgcagcttttcgccctgaacccgcgcagcggcaccttggtcaccgcgggtaggatagacagggaggagctctgcgacagatctccaaactgtgtgacaaacctggagattcttctagaagatacagtgaagattttgcgggtagaggtggaaataatcgatgttaatgataacccacccagttttgggacagaacagagggaaataaaagttgctgaaaatgaaaatcctggggcaagatttcctcttcctgaagcttttgatccggatgtaggtgtaaactccctgcagggttaccagctcaactcaaacggttacttttccctggacgtgcaaagtggggccgatgggattaagtacccagagctggtgctggaacgcgctctagatcgcgaggaagaggcggttcaccacctcgttctcacggccttcgatggaggtgacccggttcgctctggcactgccaggattctcataatacttgtggataccaacgataatgctcccgtgttcactcagcccgagtaccacgtaagtgttcgtgagaacgttcctgtaggcactcggctactcaccgtaaaagccactgatccagatgaaggagccaatggagacgtgacgtattctttccggaaagtaagagacaaaatatcacagctatttcagttgaattctctgagtggggatataacaatattggggggtctagattatgaggactctggattctatgacatagatgtagaagcccatgatgggcctggtctccgagctagaagcaaggtactggtgacagttctggatgaaaatgacaacgcaccagaagtcacagttacatctctcaccagctcagtccaggaatcttcttccccgggtacagtaattgcacttttcaacgtgcatgacagtgactcaggaggaaatggcctagtcacatgttctattccagataatctgccattcacacttgaaaagacctatggaaattattatcggttgttgacacacagaacactggacagggaagaagtctcagaatataacatcactgtaactgccactgaccagggaactcctccactgtctacagaaactcatatttcactgcaagtgatggacatcaatgacaacccacccactttccctcatgcttcctactctgcttacattcctgaaaacaaccccagaggagcctccatcttatctatgactgctcaagaccctgacagtggtgacaatgcccgaatcacttactccctggccgaagacaccttccagggtgcacctctgtcctcctatgtctccatcaactccaatacagggatcctatatgctctttgctccttcgactatgagcagtttagagacctgcagctgctgatgacagccagtgacagtggagaccctccactcagcagcaatgtgtcactgagcctctttgtgctggaccagaacgacaatgtccctgagatcctgtaccccaccttccctactgatggctccactggtgtggagctggcaccccgctccgcagattccggctacctggtgaccaaagtggtggcagtggacagagactcaggtcagaatgcctggctgtcctacagcctactcaagtccagcgagccgggactatttgcagtggggctgcacacaggcgaggtgcgcaccgcacgggccctgctggacagagacgcgctcaagcagaggcttgtagtggtcgtccaggaccatggccagccccctctctcggccaccgtcacactcactgtggctgtggccgacagcatcccagatgtcctggctgacttgggcagcctcaagccttcagcagacccagacgactcgggcctcacactctatctcgtggtggcagtggccgctgtctcctgcgtcttcctggcttttgtcacggtgctgctagcactcaagctgagacgctggcacaagtcacgcctgcttcacgctgaaggcagcaggttggcaggtgtgcctgcctcgcactttgtgggcgtggacggggttcgggctttcctgcagacctattcccacgaggtctccctcaccgcggactcgcggaagagtcacctgatcttctcccaacccagctatgcagacacgctcatcagccgggagagttgtgagaaaagcgagcctcttctgataactcaggatttacttgaaacaaaaggagaccctaatcttcagcaagccccgcccaacacggactggcgtttctctcaggcccagagacccggcaccagcggctcccaaaatggcgatgacaccggcacctggcccaacaaccagtttgacacagagatgctgcaagccatgatcttggcgtccgccagtgaagctgctgatgggagctccaccctgggagggggtgccggcaccatgggattgagcgcccgctacggaccccagttcaccctgcagcacgtgcccgactaccgccagaatgtctacatcccaggcagcaatgccacactgaccaacgcagctggcaagcgggatggcaaggccccagcaggtggcaatggcaacaagaagaagtcgggcaagaaggagaagaagtaacatggaggccaggccaagagccacagggcggcctctccccaaccagcccagcttctccttacctgcacccaggcctcagagtttcagggctaacccccagaatactggtaggggccaaggccatgctccccttgggaaacagaaacaagtgcccagtcagcacctaccccttcccccccagggggttgaatatgcaaaagcagttccgctgggaacccccatccaatcaactgctgtacccatgggggtagtggggttactgtagacaccaagaaccatttgccacaccccgtttagttacagctgaactcctccatcttccaaatcaatcaggcccatccatcccatgcctccctcctccccaccccactccaacagttcctctttcccgagtaaggtggttggggtgttgaagtaccaagtaacctacaagcctcctagttctgaaaagttggaagggcatcatgacctcttggcctctcctttgattctcaatcttcccccaaagcatggtttggtgccagccccttcacctccttccagagcccaagatcaatgctcaagttttggaggacatgatcaccatccccatggtactgatgcttgctggatttagggagggcattttgctaccaagcctcttcccaacgccctggggaccagtcttctgttttgtttttcattgtttgacgtttccactgcatgccttgacttcccccacctcctcctcaaacaagagactccactgcatgttccaagacagtatggggtggtaagataaggaagggaagtgtgtggatgtggatggtgggggcatggacaaagcttgacacatcaagttatcaaggccttggaggaggctctgtatgtcctcaggggactgacaacatcctccagattccagccataaaccaataactaggctggacccttcccactacataatagggctcagcccaggcagccagctttgggctgagctaacaggaccaatggattaaactggcatttcagtccaaggaagctcgaagcaggtttaggaccaggtccccttgagaggtcagaggggcctctgtgggtgctgggtactccagaggtgccactggtggaagggtcagcggagccccagcaggaagggtgggccagccaggccattcttagtccctgggttggggaggcagggagctagggcagggaccaaatgaacagaaagtctcagcccaggatggggcttcttcaacagggcccctgccctcctgaagcctcagtccttcaccttgccaggtgccgtttctcttccgtgaaggccactgcccaggtccccagtgcgccccctagtggccatagcctggttaaagttccccagtgcctccttgtgcatagaccttcttctcccacccccttctgcccctgggtccccggccatccagcggggctgccagagaaccccagacctgcccttacagtagtgtagcgccccctccctctttcggctggtgtagaatagccagtagtgtagtgcggtgtgcttttacgtgatggcgggtgggcagcgggcggcgggctccgcgcagccgtctgtccttgatctgcccgcggcggcccgtgttgtgttttgtgctgtgtccacgcgctaaggcgaccccctcccccgtactgacttctcctataagcgcttctcttcgcatagtcacgtagctcccaccccaccctcttcctgtgtctcacgcaagttttatactctaatatttatatggctttttttcttcgacaaaaaaataataaaacgtttcttctgaaaagctg

SEQ ID NO: 12050 - DNA, 2326 bp, Homo sapiens
cagaaagccatgtcggactcggcgcccagcgcccaagcgctaacccgctgaaagtttctcagcgaaatctcagggacgatctggaccccgctgagaggaactgcttttgagtgagatggtcccagaggcctggaggagcggactgcaagccccgcccaacacggactggcgtttctctcaggcccagagacccggcaccagcggctcccaaaatggcgatgacaccggcacctggcccaacaaccagtttgacacagagatgctgcaagccatgatcttggcgtccgccagtgaagctgctgatgggagctccaccctgggagggggtgccggcaccatgggattgagcgcccgctacggaccccagttcaccctgcagcacgtgcccgactaccgccagaatgtctacatcccaggcagcaatgccacactgaccaacgcagctggcaagcgggatggcaaggccccagcaggtggcaatggcaacaagaagaagtcgggcaagaaggagaagaagtaacatggaggccaggccaagagccacagggcggcctctccccaaccagcccagcttctccttacctgcacccaggcctcagagtttcagggctaacccccagaatactggtaggggccaaggccatgctccccttgggaaacagaaacaagtgcccagtcagcacctaccccttcccccccagggggttgaatatgcaaaagcagttccgctgggaacccccatccaatcaactgctgtacccatgggggtagtggggttactgtagacaccaagaaccatttgccacaccccgtttagttacagctgaactcctccatcttccaaatcaatcaggcccatccatcccatgcctccctcctccccaccccactccaacagttcctctttcccgagtaaggtggttggggtgttgaagtaccaagtaacctacaagcctcctagttctgaaaagttggaagggcatcatgacctcttggcctctcctttgattctcaatcttcccccaaagcatggtttggtgccagccccttcacctccttccagagcccaagatcaatgctcaagttttggaggacatgatcaccatccccatggtactgatgcttgctggatttagggagggcattttgctaccaagcctcttcccaacgccctggggaccagtcttctgttttgtttttcattgtttgacgtttccactgcatgccttgacttcccccacctcctcctcaaacaagagactccactgcatgttccaagacagtatggggtggtaagataaggaagggaagtgtgtggatgtggatggtgggggcatggacaaagcttgacacatcaagttatcaaggccttggaggaggctctgtatgtcctcaggggactgacaacatcctccagattccagccataaaccaataactaggctggacccttcccactacataatagggctcagcccaggcagccagctttgggctgagctaacaggaccaatggattaaactggcatttcagtccaaggaagctcgaagcaggtttaggaccaggtccccttgagaggtcagaggggcctctgtgggtgctgggtactccagaggtgccactggtggaagggtcagcggagccccagcaggaagggtgggccagccaggccattcttagtccctgggttggggaggcagggagctagggcagggaccaaatgaacagaaagtctcagcccaggatggggcttcttcaacagggcccctgccctcctgaagcctcagtccttcaccttgccaggtgccgtttctcttccgtgaaggccactgcccaggtccccagtgcgccccctagtggccatagcctggttaaagttccccagtgcctccttgtgcatagaccttcttctcccacccccttctgcccctgggtccccggccatccagcggggctgccagagaaccccagacctgcccttacagtagtgtagcgccccctccctctttcggctggtgtagaatagccagtagtgtagtgcggtgtgcttttacgtgatggcgggtgggcagcgggcggcgggctccgcgcagccgtctgtccttgatctgcccgcggcggcccgtgttgtgttttgtgctgtgtccacgcgctaaggcgaccccctcccccgtactgacttctcctataagcgcttctcttcgcatagtcacgtagctcccaccccaccctcttcctgtgtctcacgcaagttttatactctaatatttatatggctttttttcttcgacaaaaaaataataaaacgtttcttctgaaaagctg

SEQ ID NO: 12051 - DNA, 4741 bp, Homo sapiens
gctgcgcagaccttgcccagcacaccagattgccagctccgagacccgggactcctcctgtcctgggccgaatgctcttttagcgcggtagagtgcactttctccaactggaaaagcggggacccagcgagaacccgagcgaacgatgggagggagctgcgcgcagaggcgccgggccggcccgcggcaggtactatttcctttgctgctgcctttgttctaccccacgctgtgtgagccgatccgctactcgattccggaggagctggccaagggctcggtggtggggaacctcgctaaggatctagggcttagtgtcctggatgtgtcggctcgcgagctgcgagtgagcgcggagaagctgcacttcagcgtagacgcgcagagcggggacttacttgtgaaggaccgaatagaccgtgagcaaatatgcaaagagagaagaagatgtgagttgcaattggaagctgtggtggaaaatcctttaaatatttttcatgtcattgtggtgattgaggatgttaatgaccacgcccctcaattccggaaagatgaaataaacttagaaatcagtgaatccgtcagcctggggatgggaacaattcttgagtctgcagaagatcctgatattagtatgaattcgctgagcaaataccaactaagtcctaacgagtatttctcattggtggagaaagacaatcctgatggtggcaaatatccagaattagtattgcagaagactctggaccgagaaacgcagagcgctcaccacttggtactgaccgccttagatggtggggaccctccccgaagcggtactgctcagataagaatcctggtaatagatgccaatgacaaccccccagtgttcagccaggacgtgtacagggttagccttcgggaagacgtgcctccaggcacctccatcctgagagtgaaggccactgaccaggacgagggcatcaactcagagatcacttattccttctttggtgtggctgacaaagctcagcacgtgttctctctggattacactacaggaaacattctaactcagcagcctttggattttgaagaagtagaaagatatacgataaacatagaagcaaaagaccgaggatctctctcaacacggtgtaaagtaattgtagaagttgtagacgaaaacgacaacagcccagaaataatcatcacgtcactctctgatcagattatggaggattcccctccaggagtggttgttgccctcttcaaaacacgggaccaagactcaggggaaaatggggaagtcaggtgtagcttaagtagaggtgttccatttaagattcattcttcttctaataattactacaagctagtaacagatgaggccctggatcgggagcagaccccagagtacaacgtcaccatcgcagccacagacaggggcaagcctccgttatcctccagcaaaaccataaccctgcacattactgacgtcaatgacaacgcgccggttttcggacagtcagcctacctggtccacgtgccagaaaacaaccagccgggtgcctccatagcgcaagtcagtgcctctgacccagacttcgggctcaacggccgtgtctcctactctctcattgccagcgacctggagtcacgaacgctgtcgtcctacgtgtccgtgagcgcgcagagcggggtggtgttcgcgcagcgcgccttcgaccacgagcagctgcgcaccttcgagctcacgctgcaggcccgcgaccagggctcgcccgcgctcagcgccaatgtgagcctgcgcgtgttggtgggcgaccgtaacgacaacgcaccgcgggtgctgtaccctgcgctgggtcccgacggctccgcgctcttcgacacagtgccgcgggccgcgcagccaggctacctggtgaccaaggtggtggccgtggacgcggactcggggcacaatgcctggctgtcctaccacgtggtgcaggccagtgagcccgggctcttcagcctggggctgcgaacaggcgaggtgcgcatggtgcgtgctttgggtgacaaggactcggtccgccagcgcctgctagtcgctgtaagagatggaggacagccacccctttcagccactgccacgctgcacctggtgttcgcagatagcttgcaagaggtactgccggatttcagcgaccatcccacaccctctgactcccaggctgagatgcagttttacctggtggtggccttggccttgatttctgtgctctttctcctcgcggtgattctagctattgctctacgcctgcgacagtctttcagccctactgcaggagactgctttgagtcagttctctgctccaagtccggacctgtgggtccccccaactacagtgagggaacgttgccctatgcctataatttttgtgtgcctggggatcaaatgaatccagaatttaattttttcacatctgttgatcattgtccagccacacaagataacctcaacaaagatagcatgctactggctagcattttaactcccagcgttgaagcagataagaagattcttaaacagcaagccccgcccaacacggactggcgtttctctcaggcccagagacccggcaccagcggctcccaaaatggcgatgacaccggcacctggcccaacaaccagtttgacacagagatgctgcaagccatgatcttggcgtccgccagtgaagctgctgatgggagctccaccctgggagggggtgccggcaccatgggattgagcgcccgctacggaccccagttcaccctgcagcacgtgcccgactaccgccagaatgtctacatcccaggcagcaatgccacactgaccaacgcagctggcaagcgggatggcaaggccccagcaggtggcaatggcaacaagaagaagtcgggcaagaaggagaagaagtaacatggaggccaggccaagagccacagggcggcctctccccaaccagcccagcttctccttacctgcacccaggcctcagagtttcagggctaacccccagaatactggtaggggccaaggccatgctccccttgggaaacagaaacaagtgcccagtcagcacctaccccttcccccccagggggttgaatatgcaaaagcagttccgctgggaacccccatccaatcaactgctgtacccatgggggtagtggggttactgtagacaccaagaaccatttgccacaccccgtttagttacagctgaactcctccatcttccaaatcaatcaggcccatccatcccatgcctccctcctccccaccccactccaacagttcctctttcccgagtaaggtggttggggtgttgaagtaccaagtaacctacaagcctcctagttctgaaaagttggaagggcatcatgacctcttggcctctcctttgattctcaatcttcccccaaagcatggtttggtgccagccccttcacctccttccagagcccaagatcaatgctcaagttttggaggacatgatcaccatccccatggtactgatgcttgctggatttagggagggcattttgctaccaagcctcttcccaacgccctggggaccagtcttctgttttgtttttcattgtttgacgtttccactgcatgccttgacttcccccacctcctcctcaaacaagagactccactgcatgttccaagacagtatggggtggtaagataaggaagggaagtgtgtggatgtggatggtgggggcatggacaaagcttgacacatcaagttatcaaggccttggaggaggctctgtatgtcctcaggggactgacaacatcctccagattccagccataaaccaataactaggctggacccttcccactacataatagggctcagcccaggcagccagctttgggctgagctaacaggaccaatggattaaactggcatttcagtccaaggaagctcgaagcaggtttaggaccaggtccccttgagaggtcagaggggcctctgtgggtgctgggtactccagaggtgccactggtggaagggtcagcggagccccagcaggaagggtgggccagccaggccattcttagtccctgggttggggaggcagggagctagggcagggaccaaatgaacagaaagtctcagcccaggatggggcttcttcaacagggcccctgccctcctgaagcctcagtccttcaccttgccaggtgccgtttctcttccgtgaaggccactgcccaggtccccagtgcgccccctagtggccatagcctggttaaagttccccagtgcctccttgtgcatagaccttcttctcccacccccttctgcccctgggtccccggccatccagcggggctgccagagaaccccagacctgcccttacagtagtgtagcgccccctccctctttcggctggtgtagaatagccagtagtgtagtgcggtgtgcttttacgtgatggcgggtgggcagcgggcggcgggctccgcgcagccgtctgtccttgatctgcccgcggcggcccgtgttgtgttttgtgctgtgtccacgcgctaaggcgaccccctcccccgtactgacttctcctataagcgcttctcttcgcatagtcacgtagctcccaccccaccctcttcctgtgtctcacgcaagttttatactctaatatttatatggctttttttcttcgacaaaaaaataataaaacgtttcttctgaaaagctg

SEQ ID NO: 12052 - DNA, 4602 bp, Homo sapiens
atggcgagtccacctaggggctggggctgcggagagctgctgctgcccttcatgctcctggggacgctgtgcgagccaggatccgggcagatccgctactcgatgccggaggagctggacaaaggctccttcgtcggcaacatagccaaggaccttgggctggagccccaggagctggcggagcgcggagtccgcatcgtctccagaggtaggacgcagctttttgccctgaacccgcgaagcggcagcttggtcaccgcgggcaggatagaccgggaggagctctgcgctcagagcccactgtgtgtggtgaactttaacatcttggttgagaacaaaatgaaaatttatggagtagaagtagaaataatcgatattaatgataacttcccgcgtttccgggatgaagagttaaaagtaaaagttaatgaaaatgcggctgcagggacacggttagtgcttcccttcgcgcgggatgcggatgtgggtgtgaactctctccggagttaccagctcagctccaatctgcacttctctctggatgtggtaagcggaactgatggacaaaagtatccggagctggtgttggaacagcccctagaccgcgagaaagagactgttcacgacctcctcctcacagctttagatggcggagacccggtactctccggcaccacgcacatccgtgttacggtcctcgacgcaaacgacaatgcgcccctgttcaccccatccgagtacagcgtgagtgttccagagaacatacctgtgggcactcggctgctcatgctaaccgccacggatccagatgagggaataaacgggaaattgacctactcttttcgcaatgaagaagaaaaaatttcggagactttccaacttgattccaacctgggggaaatctcaactctacaatcactggactatgaagaatccagattctacctcatggaagtggtagctcaggatggaggcgctcttgttgccagcgctaaggtggtggtcacagtacaggacgtgaatgacaatgcccccgaagtgatcctcacctctctgaccagttcgatctctgaagactgtcttcccggaactgtaatcgcgctgtttagcgtacatgatggtgattctggagaaaatggtgagattgcatgctctattcctaggaatttgccttttaaattggagaagtcagttgataattactatcacctattaacaactagggacctggacagagaagagacttcagattataatatcactttaaccgtcatggaccatggaaccccgcccctctctacagaaagccacatccccttgaaagtagcagacgttaatgacaacccacccaatttccctcaagcctcctactccacctctgtcacagaaaacaatcccagaggtgtctctatcttctctgtgacagcccatgaccccgacagcggcgacaacgctcgagtcacctactccctggctgaagacacatttcagggggcgcccttgtcctcctatgtatccattaactctgacaccggtgtcctgtatgctctgagatccttcgactatgagcagttgagagacctacagttgtgggtgacagccagcgacagtgggaaccctccacttagcagcaacgtgtcgctgagcctgtttgtgctggaccagaacgacaatacgcctgagatcctgtaccccgccctccccacagacggttccacgggcgtggagctggcgcctcgctccgcagaacctggctacctggtgaccaaggtggtagcggtggacaaagattcaggccagaacgcctggctgtcctaccgcctgcttaaggccagcgagccaggactctttgcggttgggctgcacacgggcgaggtgcgcacagcgcgagccctgctggacagagacgcgctcaagcagagcctcgtggtggccgtcgaagaccatggccagccccctctgtcagccaccttcacggtcaccgttgccgtggccgacaggatccctgacatcctggctgacctaggcagtatcaagacccccattgaccctgaggatctggacctcacactctatcttgtggtggcagtggctgcagtctcctgcgtcttcctggccttcgtcatcgtgctgctggtgctcagactgaggcgctggcacaagtcacgcctgcttcaggctgaaggcagcaggttggcgggtgtgcccgcctcgcactttgtgggcgtggatggggttcgggctttcctgcagacctattcccacgaggtctccctcaccgcggactcgaggaagagtcacctgatctttccccagcccaactacgcagacacgctccttagtgaagagagctgtgagaaaagcgagcctcttctgatgtctgataaggtagatgcaaacaaagaagaacggcgagttcagcaagccccgcccaacacggactggcgtttctctcaggcccagagacccggcaccagcggctcccaaaatggcgatgacaccggcacctggcccaacaaccagtttgacacagagatgctgcaagccatgatcttggcgtccgccagtgaagctgctgatgggagctccaccctgggagggggtgccggcaccatgggattgagcgcccgctacggaccccagttcaccctgcagcacgtgcccgactaccgccagaatgtctacatcccaggcagcaatgccacactgaccaacgcagctggcaagcgggatggcaaggccccagcaggtggcaatggcaacaagaagaagtcgggcaagaaggagaagaagtaacatggaggccaggccaagagccacagggcggcctctccccaaccagcccagcttctccttacctgcacccaggcctcagagtttcagggctaacccccagaatactggtaggggccaaggccatgctccccttgggaaacagaaacaagtgcccagtcagcacctaccccttcccccccagggggttgaatatgcaaaagcagttccgctgggaacccccatccaatcaactgctgtacccatgggggtagtggggttactgtagacaccaagaaccatttgccacaccccgtttagttacagctgaactcctccatcttccaaatcaatcaggcccatccatcccatgcctccctcctccccaccccactccaacagttcctctttcccgagtaaggtggttggggtgttgaagtaccaagtaacctacaagcctcctagttctgaaaagttggaagggcatcatgacctcttggcctctcctttgattctcaatcttcccccaaagcatggtttggtgccagccccttcacctccttccagagcccaagatcaatgctcaagttttggaggacatgatcaccatccccatggtactgatgcttgctggatttagggagggcattttgctaccaagcctcttcccaacgccctggggaccagtcttctgttttgtttttcattgtttgacgtttccactgcatgccttgacttcccccacctcctcctcaaacaagagactccactgcatgttccaagacagtatggggtggtaagataaggaagggaagtgtgtggatgtggatggtgggggcatggacaaagcttgacacatcaagttatcaaggccttggaggaggctctgtatgtcctcaggggactgacaacatcctccagattccagccataaaccaataactaggctggacccttcccactacataatagggctcagcccaggcagccagctttgggctgagctaacaggaccaatggattaaactggcatttcagtccaaggaagctcgaagcaggtttaggaccaggtccccttgagaggtcagaggggcctctgtgggtgctgggtactccagaggtgccactggtggaagggtcagcggagccccagcaggaagggtgggccagccaggccattcttagtccctgggttggggaggcagggagctagggcagggaccaaatgaacagaaagtctcagcccaggatggggcttcttcaacagggcccctgccctcctgaagcctcagtccttcaccttgccaggtgccgtttctcttccgtgaaggccactgcccaggtccccagtgcgccccctagtggccatagcctggttaaagttccccagtgcctccttgtgcatagaccttcttctcccacccccttctgcccctgggtccccggccatccagcggggctgccagagaaccccagacctgcccttacagtagtgtagcgccccctccctctttcggctggtgtagaatagccagtagtgtagtgcggtgtgcttttacgtgatggcgggtgggcagcgggcggcgggctccgcgcagccgtctgtccttgatctgcccgcggcggcccgtgttgtgttttgtgctgtgtccacgcgctaaggcgaccccctcccccgtactgacttctcctataagcgcttctcttcgcatagtcacgtagctcccaccccaccctcttcctgtgtctcacgcaagttttatactctaatatttatatggctttttttcttcgacaaaaaaataataaaacgtttcttctgaaaagctg

SEQ ID NO: 12053 - DNA, 4596 bp, Homo sapiens
atgggaaatagctccggatggaggggcccagcagggcagaggcgaatgctatttctcttcctgctctctttgttagaccaggttctctccgaaccgatccgctacgctattcccgaggagctggacaggggctcgctggtagggaacctcgccaaggacctggggtttggcgtgggggatttacctactaggaacctgcgggttattgcagagaagaaattctttaccgtgagccccgaaaatgggaacttacttgtgagcgaccgtatagaccgagaggagatttgtggcaagaagtcgacgtgtgttctggaatttgaaatggttgctgaaaagcctttaaacttttttcatgtaactgtgctgatccaggatattaacgacaacccaccgacctttagccaaaatatcactgagctggaaatcagcgaactggctctcactggagccacatttgccctggaatctgcgcaagatcctgatgtaggtgtcaattcgctgcagcagtactacctcagccctgatccgcacttctctttgattcagaaggagaacctggatggcagtaggtacccagagctagtactgaaagcacccctggacagggaagagcagccacatcaccacctggtcctcacagctgtggatgggggcgagccctccagaagctgtaccacccagatcagggtaattgtcgcagatgcaaatgataaccccccagtatttactcaggacatgtacagggtcaatgttgcagagaacctgcccgctggctcctccgtattaaaagtgatggccattgacatggatgagggcatcaatgccgaaatcatctatgccttcatcaatattggcaaggaagtgagacaactgttcaagctggacagtaaaacgggggaactcaccactattggagaactggactttgaagagagagatagctacacaattggggtggaagcaaaggatggtggacatcacactgcatattgtaaagtacagatagatatttcagatgaaaatgacaatgccccggagataaccctggcttctgaatcccaacatatacaagaagatgctgagctggggactgccgttgccctgatcaaaacacatgatctagattctggatttaatggagaaatcctatgccaactaaaaggaaacttcccctttaaaatcgttcaagataccaaaaacacatacaggttggtgacagatggagccctggaccgggagcagatcccagaatacaatgtgacgatcacagctaccgacaaaggcaatccaccgctctcctccagcaagaccatcactctgcacatccttgatgtcaacgacaacgttcccgttttccaccaggcctcctacaccgtgcatgtagctgagaacaatccgcctggagcctccattgcgcatgtcagagcctcggatcccgacttgggacctaatggccttgtctcctactacatcgtggccagtgacctggagccgcgggagctgtcgtcctacgtgtccgtgagcgcgcggagcggggtggtgttcgcgcagcgagccttcgaccacgagcagctgcgtgccttcgagctcactctgcaggcccgcgaccagggctcgcctacgctcagcgccaacgtgagcctgcgcgtgttggtggacgaccgcaacgacaatgcaccgctggtgctgtacccagctctggggcccgaaggctctgcgctcttcgatatggtgccgcgctctgcagagcctggctacctggtgaccaaggtggtggcggtggacgcagactcgggatacaacgcctggctgtcctaccacattgtgcaggccagcgagcccgggctgttcagcctgggcctgcgcacgggtgaggtgcgcacggcgcgtaccttgggcgacagggaggccgcccgccagcgcctgctggtcactgtgcgtgatggaggacagcagcctctttcagccaccgtcatgctgcacctaatcttcgcagatagcttgcaagagatacaacctgaccttagcgaccgccccactccctctgaccctcaggcggagctacagtttcacctagtagtggcgttggccttgatctcagtgctcttcctcctcgcggtgattctggcaatctccctgcgcctgcgatgctcctccagacccgccactgagggctactttcagcctggtgtctgcttcaagactgtacctggagttctccccacctacagcgaaaggactttgccttattcctacaatccgtgtgctgcctcacattcctcaaacaccgagtttaaatttctcaatataaaggctgaaaatgctgcaccacaagatcttctatgtgatgaagcctcttggtttgaaagtaatgacaatccagaaatgccttctaattcaggcaatttgcaaaagcaagccccgcccaacacggactggcgtttctctcaggcccagagacccggcaccagcggctcccaaaatggcgatgacaccggcacctggcccaacaaccagtttgacacagagatgctgcaagccatgatcttggcgtccgccagtgaagctgctgatgggagctccaccctgggagggggtgccggcaccatgggattgagcgcccgctacggaccccagttcaccctgcagcacgtgcccgactaccgccagaatgtctacatcccaggcagcaatgccacactgaccaacgcagctggcaagcgggatggcaaggccccagcaggtggcaatggcaacaagaagaagtcgggcaagaaggagaagaagtaacatggaggccaggccaagagccacagggcggcctctccccaaccagcccagcttctccttacctgcacccaggcctcagagtttcagggctaacccccagaatactggtaggggccaaggccatgctccccttgggaaacagaaacaagtgcccagtcagcacctaccccttcccccccagggggttgaatatgcaaaagcagttccgctgggaacccccatccaatcaactgctgtacccatgggggtagtggggttactgtagacaccaagaaccatttgccacaccccgtttagttacagctgaactcctccatcttccaaatcaatcaggcccatccatcccatgcctccctcctccccaccccactccaacagttcctctttcccgagtaaggtggttggggtgttgaagtaccaagtaacctacaagcctcctagttctgaaaagttggaagggcatcatgacctcttggcctctcctttgattctcaatcttcccccaaagcatggtttggtgccagccccttcacctccttccagagcccaagatcaatgctcaagttttggaggacatgatcaccatccccatggtactgatgcttgctggatttagggagggcattttgctaccaagcctcttcccaacgccctggggaccagtcttctgttttgtttttcattgtttgacgtttccactgcatgccttgacttcccccacctcctcctcaaacaagagactccactgcatgttccaagacagtatggggtggtaagataaggaagggaagtgtgtggatgtggatggtgggggcatggacaaagcttgacacatcaagttatcaaggccttggaggaggctctgtatgtcctcaggggactgacaacatcctccagattccagccataaaccaataactaggctggacccttcccactacataatagggctcagcccaggcagccagctttgggctgagctaacaggaccaatggattaaactggcatttcagtccaaggaagctcgaagcaggtttaggaccaggtccccttgagaggtcagaggggcctctgtgggtgctgggtactccagaggtgccactggtggaagggtcagcggagccccagcaggaagggtgggccagccaggccattcttagtccctgggttggggaggcagggagctagggcagggaccaaatgaacagaaagtctcagcccaggatggggcttcttcaacagggcccctgccctcctgaagcctcagtccttcaccttgccaggtgccgtttctcttccgtgaaggccactgcccaggtccccagtgcgccccctagtggccatagcctggttaaagttccccagtgcctccttgtgcatagaccttcttctcccacccccttctgcccctgggtccccggccatccagcggggctgccagagaaccccagacctgcccttacagtagtgtagcgccccctccctctttcggctggtgtagaatagccagtagtgtagtgcggtgtgcttttacgtgatggcgggtgggcagcgggcggcgggctccgcgcagccgtctgtccttgatctgcccgcggcggcccgtgttgtgttttgtgctgtgtccacgcgctaaggcgaccccctcccccgtactgacttctcctataagcgcttctcttcgcatagtcacgtagctcccaccccaccctcttcctgtgtctcacgcaagttttatactctaatatttatatggctttttttcttcgacaaaaaaataataaaacgtttcttctgaaaagctg

SEQ ID NO: 12054 - DNA, 5503 bp, Homo sapiens
ttcatctgtacctttcaagtattcaaatagaaaaatataaacaatgtaaataaaatagcaaaacaatgtaatatctcataaaactgcaatggtaaaagcatttatcctattgaaattccacaatttttatttgaaaatattatcgacatgtaattcaagtggcatttagaagaataatttaaaagcaacaactctatagaaagcttgtaaaatgattaagtagtttaaaccaaataaaacaatttctgagtcagtcatctccagtaggtctattttagtctcaagataaattcatttctggtgacaactgaagttcttagttatttgttagtatatattggagacatttacaataaagcttagagcacaatgggaaatgaaagtatcatgttttttttaagaccaaatgtattgcagaaatgtgagtaatttaatccgatgctacaatctgatcattctgatctaatctgatcatttaataacactaaataaaaccttcatctcacattctttggctgtttcttttaaaatatgggtttacggataaatcaaataaattcaaaacaaagtaataagcaaatgatttttttttctcagtaatctagtagagtattacatttagaagtaatctgtatctcagtgcagtaactatttaggactgtaagcgccgctgttcacctactggaagacaaatgcaaccgaaaacactcagatctcacacctcacgaagacccgcagatgccacaaactaactgctggactgcagcgaaacccgacccctgtttggaggcactccaggtttccggaggattgtcatctccatagctgcggcaagaaactaaataagacccatttatgcacagtgaagattctgagaggattctgcagcaaaacaacaatggccgctccacagagtcgccccagacgcggcgagctgatcctgctgtgcgcgctgctgggaacgctgtgggaaatcgggaggggacagattcgctactctgtgccagaagagacggacaaaggctccttcgtgggtaatatctccaaggacctggggctggacccccggaagctggcgaagcacggagtccgtatcgtctccagaggtaggacgcagctctttgctctgaacccgcgcagcggcagcttgatcaccgcgggcaggatagatcgggaggagctctgcgctcagagcccgcggtgtctgataaatattaacaccctggttgaggataaaggaaaactctttggggtagaaatagaaataattgatattaacgataataacccaaaattccaggtcgaagatctagaagtaaaaattaacgaaatcgcggttcctggagcacgttatccactcccagaagctgttgacccggatgtgggcgtgaactccctccagagctaccagctcagccccaatcaccacttctccctggacgtgcagactggagacaatggagccataaacccagagctggtgctggagcgcgccctggacagggaggaagaggctgctcaccacctggtcctcacggcctcggatggcggcaagccgcctcgctctagcacagtgcgcatccacgtgacagtgttggatacaaatgacaatgccccggtttttcctcacccgatttaccgagtgaaagtccttgagaacatgcccccaggcacgcggctgcttactgtaacagccagcgacccggatgagggaatcaacggaaaagtggcatacaaattccggaaaattaatgaaaaacaaactccgttattccagcttaatgaaaatactggggaaatatcaatagcaaaaagtctagattatgaagaatgttcattttatgaaatggaaatacaagccgaagatgtgggggcacttctggggaggaccaaattgctcatttcggtggaagatgtaaatgacaatagaccagaagtgatcattacgtctttgtttagcccagtgttagaaaattctcttcccgggacagtaattgccttcttgagtgtgcatgaccaagactctggaaagaatggtcaagttgtctgttacacacgtgataatttaccttttaaattagaaaagtcaataggtaattattatagattagtgacaaggaaatatttggaccgagaaaatgtctctatctacaatatcacagtgatggcctcagatctaggaacaccacctctgtccactgaaactcaaatcgctctgcacgtggcagacattaacgacaaccctcctactttccctcatgcctcctactcagcgtatatcctagagaacaacctgagaggagcctccatcttttccttgactgcacacgaccccgacagccaggagaatgcccaggtcacttactctgtgaccgaggacacgctgcagggggcgcccctgtcctcgtatatctccatcaactctgacaccggtgtcctgtatgcgctgcaatctttcgactatgagcagatccgagacctgcagctactggtaacagccagcgacagcggggacccgcccctcagcagcaacatgtcactgagcctgttcgtgctggaccagaatgacaacgcgcccgagatcctgtaccccgccctccccacagacggttccactggcgtggagctggcgccccgctccgcagagcgtggctacctggtgaccaaggtggtggcggtggacagagactcgggccagaacgcctggctgtcctaccgcctgctcaaggccagcgagccgggactcttctcggtgggtctgcacacgggcgaggtgcgcacggcgcgagccctgctggacagagatgcgctcaagcagagcctcgtggtggccgtccaggaccatggccagccccctctctccgccactgtcacgctcaccgtagccgtggctgacagcatccccgaagtcctgaccgagttgggcagtctgaagccttcggtcgacccgaacgattcgagccttacactctatctcgtggtggcagtggctgccatctcctgtgtcttcctcgcctttgtcgctgtgcttctggggctcaggctgaggcgctggcacaagtcacgcctgctccaggattccggtggcagattggtaggcgtgcctgcctcacattttgtgggtgttgaggaggtacaggctttcctgcagacctattcccaggaagtctccctcaccgccgactcgcggaagagtcacctgatctttccccagcccaactacgcagacatgctcatcagtcaggagggctgtgagaaaaatgattctttgttaacatccgtagattttcatgaatataagaatgaagctgatcatggtcagcaagccccgcccaacacggactggcgtttctctcaggcccagagacccggcaccagcggctcccaaaatggcgatgacaccggcacctggcccaacaaccagtttgacacagagatgctgcaagccatgatcttggcgtccgccagtgaagctgctgatgggagctccaccctgggagggggtgccggcaccatgggattgagcgcccgctacggaccccagttcaccctgcagcacgtgcccgactaccgccagaatgtctacatcccaggcagcaatgccacactgaccaacgcagctggcaagcgggatggcaaggccccagcaggtggcaatggcaacaagaagaagtcgggcaagaaggagaagaagtaacatggaggccaggccaagagccacagggcggcctctccccaaccagcccagcttctccttacctgcacccaggcctcagagtttcagggctaacccccagaatactggtaggggccaaggccatgctccccttgggaaacagaaacaagtgcccagtcagcacctaccccttcccccccagggggttgaatatgcaaaagcagttccgctgggaacccccatccaatcaactgctgtacccatgggggtagtggggttactgtagacaccaagaaccatttgccacaccccgtttagttacagctgaactcctccatcttccaaatcaatcaggcccatccatcccatgcctccctcctccccaccccactccaacagttcctctttcccgagtaaggtggttggggtgttgaagtaccaagtaacctacaagcctcctagttctgaaaagttggaagggcatcatgacctcttggcctctcctttgattctcaatcttcccccaaagcatggtttggtgccagccccttcacctccttccagagcccaagatcaatgctcaagttttggaggacatgatcaccatccccatggtactgatgcttgctggatttagggagggcattttgctaccaagcctcttcccaacgccctggggaccagtcttctgttttgtttttcattgtttgacgtttccactgcatgccttgacttcccccacctcctcctcaaacaagagactccactgcatgttccaagacagtatggggtggtaagataaggaagggaagtgtgtggatgtggatggtgggggcatggacaaagcttgacacatcaagttatcaaggccttggaggaggctctgtatgtcctcaggggactgacaacatcctccagattccagccataaaccaataactaggctggacccttcccactacataatagggctcagcccaggcagccagctttgggctgagctaacaggaccaatggattaaactggcatttcagtccaaggaagctcgaagcaggtttaggaccaggtccccttgagaggtcagaggggcctctgtgggtgctgggtactccagaggtgccactggtggaagggtcagcggagccccagcaggaagggtgggccagccaggccattcttagtccctgggttggggaggcagggagctagggcagggaccaaatgaacagaaagtctcagcccaggatggggcttcttcaacagggcccctgccctcctgaagcctcagtccttcaccttgccaggtgccgtttctcttccgtgaaggccactgcccaggtccccagtgcgccccctagtggccatagcctggttaaagttccccagtgcctccttgtgcatagaccttcttctcccacccccttctgcccctgggtccccggccatccagcggggctgccagagaaccccagacctgcccttacagtagtgtagcgccccctccctctttcggctggtgtagaatagccagtagtgtagtgcggtgtgcttttacgtgatggcgggtgggcagcgggcggcgggctccgcgcagccgtctgtccttgatctgcccgcggcggcccgtgttgtgttttgtgctgtgtccacgcgctaaggcgaccccctcccccgtactgacttctcctataagcgcttctcttcgcatagtcacgtagctcccaccccaccctcttcctgtgtctcacgcaagttttatactctaatatttatatggctttttttcttcgacaaaaaaataataaaacgtttcttctgaaaagctg

SEQ ID NO: 12055 - DNA, 4641 bp, Homo sapiens
atggggcccaagacactcccacagctcgctgggaaatggcaagtgctgtgcatgttgtccttgtgctgctggggctgggtgtctgggcagcttcgttactcagtggtggaggagtctgagccggggacgctggtggggaatgttgctcaggatctgggcttaaagatgacagatctgttgagccggcggctgcaattgggctctgaggagaatgggcgctatttttccctgagcttgatgagtggtgccctggcagtgaatcaaaagattgaccgagaaagcctatgtggagccagcaccagctgcctgctgccagtgcaggtggtgactgaacaccccctggagctaatccgtgtagaggtagagatcctggatctcaatgacaactctcctagctttgccacccctgagcgagagatgcgcatctcagaatcagcagcatctggggcacgattcccactggacagtgcccaggatccggatgtgggcaccaatactgtgagcttttacactctaagccccaacagccacttctctctgaatgtgaagaccctaaaagatgggaagccattcccagagctggtgctagagcagcagctggatcgtgaagcccaggcaagacatcagctggtgcttactgctgtggatggggggaccccagcccgctcagggaccacccttatctctgtcatcgtgctggacatcaatgataatgctccaaccttccaatcctcagttctacgtgtgggaatcccagagaatgcacccattggtactctgctgctccgcctcaatgccactgatccagacgagggcaccaacggccaactagactattcttttggagaccacacatctgaggcagtgcggaacctctttggcctagaccctagcagtggggcaatccatgtgttgggtcccatagactttgaggagtcacgtttctatgaaattcatgcaagagcccgtgaccagggacagcctgccatggagggccactgtgtgattcaagtggatgtgggggatgtcaatgacaatgccccagaggtgctattggcctctttggccaaccctgtcctagagagcacaccagtgggcacagtagtggggttgtttaatgtgcgagaccgggactcaggtagaaatggtgaagtgagccttgatatctctccggacctgccatttcagattaagccttctgagaaccactactcgctgctaaccagccagcctttggaccgggaggccacatcccactatatcatcgagctgctggccagcgatgctggttcaccttccctacacaaacatctcaccatcaggctcaacatttcagatgtcaatgacaatgcaccccgcttcaaccagcagctttacactgcttacatcctagaaaaccggcctccgggctcccttctttgcactgtggctgcctcagatccagacactggggataatgcccgcctcacctactccattgtaggaaatcaggttcagggagccccagcctcctcctttgtgtatgtcaacccagaggatggacggatctttgcccagcgtacctttgactatgaattgctgcagatgctgcagattgtggtgggggttcgagactccggctctcccccattgcatgccaacacatctctgcatgtgtttgtcctagacgagaatgataatgccccagctgtgctgcacccacggccagactgggaacactcagccccccagcgtctccctcgctctgctcctcctggctccttggtcaccaaggtgacagccgtggatgctgatgcaggccacaatgcgtggctctcctactcactgttgccacagtccacagccccaggactgttcctcgtgtctacacacactggtgaggtgcgcacagcccgggccttactggaggatgactctgacacccagcaggtggtggtcctggtgagggacaatggtgacccttcactctcctccacagccacagtgctgctggttctggaggatgaggaccctgaggaaatgcccaaatccagtgacttcctcatacaccctcctgagcgttcagaccttaccctttacctcattgtggctctagcgaccgtcagtctcttatccctagtcaccttcacctttctgtcagcgaagtgccttcagggaaacgcagacggggacgggggtggagggcagtgctgcaggcgccaggactcaccctccccggacttctataagcagtccagccccaacctgcaggtgagctcggacggcacgctcaagtacatggaggtgacgctgcggcccacagactcgcagagccactgctacaggacgtgcttttcaccggcctcggacggcagtgacttcacttttctaagacccctcagcgttcagcagcccacagctctggcgctggagcctgacgccatccggtcccgctctaatacgctgcgggagcggagccagcaagccccgcccaacacggactggcgtttctctcaggcccagagacccggcaccagcggctcccaaaatggcgatgacaccggcacctggcccaacaaccagtttgacacagagatgctgcaagccatgatcttggcgtccgccagtgaagctgctgatgggagctccaccctgggagggggtgccggcaccatgggattgagcgcccgctacggaccccagttcaccctgcagcacgtgcccgactaccgccagaatgtctacatcccaggcagcaatgccacactgaccaacgcagctggcaagcgggatggcaaggccccagcaggtggcaatggcaacaagaagaagtcgggcaagaaggagaagaagtaacatggaggccaggccaagagccacagggcggcctctccccaaccagcccagcttctccttacctgcacccaggcctcagagtttcagggctaacccccagaatactggtaggggccaaggccatgctccccttgggaaacagaaacaagtgcccagtcagcacctaccccttcccccccagggggttgaatatgcaaaagcagttccgctgggaacccccatccaatcaactgctgtacccatgggggtagtggggttactgtagacaccaagaaccatttgccacaccccgtttagttacagctgaactcctccatcttccaaatcaatcaggcccatccatcccatgcctccctcctccccaccccactccaacagttcctctttcccgagtaaggtggttggggtgttgaagtaccaagtaacctacaagcctcctagttctgaaaagttggaagggcatcatgacctcttggcctctcctttgattctcaatcttcccccaaagcatggtttggtgccagccccttcacctccttccagagcccaagatcaatgctcaagttttggaggacatgatcaccatccccatggtactgatgcttgctggatttagggagggcattttgctaccaagcctcttcccaacgccctggggaccagtcttctgttttgtttttcattgtttgacgtttccactgcatgccttgacttcccccacctcctcctcaaacaagagactccactgcatgttccaagacagtatggggtggtaagataaggaagggaagtgtgtggatgtggatggtgggggcatggacaaagcttgacacatcaagttatcaaggccttggaggaggctctgtatgtcctcaggggactgacaacatcctccagattccagccataaaccaataactaggctggacccttcccactacataatagggctcagcccaggcagccagctttgggctgagctaacaggaccaatggattaaactggcatttcagtccaaggaagctcgaagcaggtttaggaccaggtccccttgagaggtcagaggggcctctgtgggtgctgggtactccagaggtgccactggtggaagggtcagcggagccccagcaggaagggtgggccagccaggccattcttagtccctgggttggggaggcagggagctagggcagggaccaaatgaacagaaagtctcagcccaggatggggcttcttcaacagggcccctgccctcctgaagcctcagtccttcaccttgccaggtgccgtttctcttccgtgaaggccactgcccaggtccccagtgcgccccctagtggccatagcctggttaaagttccccagtgcctccttgtgcatagaccttcttctcccacccccttctgcccctgggtccccggccatccagcggggctgccagagaaccccagacctgcccttacagtagtgtagcgccccctccctctttcggctggtgtagaatagccagtagtgtagtgcggtgtgcttttacgtgatggcgggtgggcagcgggcggcgggctccgcgcagccgtctgtccttgatctgcccgcggcggcccgtgttgtgttttgtgctgtgtccacgcgctaaggcgaccccctcccccgtactgacttctcctataagcgcttctcttcgcatagtcacgtagctcccaccccaccctcttcctgtgtctcacgcaagttttatactctaatatttatatggctttttttcttcgacaaaaaaataataaaacgtttcttctgaaaagctg

SEQ ID NO: 12056 - DNA, 3884 bp, Homo sapiens
ccgagtgacaaggaggtgggagagggtagcagcatgggctacgcggttggctgccctcagtccccctgctgctgaagctgccctgcccatgcccacccaggccgtggggccaggggcctgccagggctaggagtgggcctgccgttcatgggtctctagggatttccgagatgcctgggaagagaggcttgggctggtggtgggcccggctgcccctttgcctgctcctcagcctttacggcccctggatgccttcctccctgggaaagcccaaaggccaccctcacatgaattccatccgcatagatggggacatcacactgggaggcctgttcccggtgcatggccggggctcagagggcaagccctgtggagaacttaagaaggaaaagggcatccaccggctggaggccatgctgttcgccctggatcgcatcaacaacgacccggacctgctgcctaacatcacgctgggcgcccgcattctggacacctgctccagggacacccatgccctcgagcagtcgctgacctttgtgcaggcgctcatcgagaaggatggcacagaggtccgctgtggcagtggcggcccacccatcatcaccaagcctgaacgtgtggtgggtgtcatcggtgcttcagggagctcggtctccatcatggtggccaacatccttcgcctcttcaagataccccagatcagctacgcctccacagcgccagacctgagtgacaacagccgctacgacttcttctcccgcgtggtgccctcggacacgtaccaggcccaggccatggtggacatcgtccgtgccctcaagtggaactatgtgtccacagtggcctcggagggcagctatggtgagagcggtgtggaggccttcatccagaagtcccgtgaggacgggggcgtgtgcatcgcccagtcggtgaagataccacgggagcccaaggcaggcgagttcgacaagatcatccgccgcctcctggagacttcgaacgccagggcagtcatcatctttgccaacgaggatgacatcaggcgtgtgctggaggcagcacgaagggccaaccagacaggccatttcttctggatgggctctgacagctggggctccaagattgcacctgtgctgcacctggaggaggtggctgagggtgctgtcacgatcctccccaagaggatgtccgtacgaggcttcgaccgctacttctccagccgcacgctggacaacaaccggcgcaacatctggtttgccgagttctgggaggacaacttccactgcaagctgagccgccacgccctcaagaagggcagccacgtcaagaagtgcaccaaccgtgagcgaattgggcaggattcagcttatgagcaggaggggaaggtgcagtttgtgatcgatgccgtgtacgccatgggccacgcgctgcacgccatgcaccgtgacctgtgtcccggccgcgtggggctctgcccgcgcatggaccctgtagatggcacccagctgcttaagtacatccgaaacgtcaacttctcaggcatcgcagggaaccctgtgaccttcaatgagaatggagatgcgcctgggcgctatgacatctaccaataccagctgcgcaacgattctgccgagtacaaggtcattggctcctggactgaccacctgcaccttagaatagagcggatgcactggccggggagcgggcagcagctgccccgctccatctgcagcctgccctgccaaccgggtgagcggaagaagacagtgaagggcatgccttgctgctggcactgcgagccttgcacagggtaccagtaccaggtggaccgctacacctgtaagacgtgtccctatgacatgcggcccacagagaaccgcacgggctgccggcccatccccatcatcaagcttgagtggggctcgccctgggccgtgctgcccctcttcctggccgtggtgggcatcgctgccacgttgttcgtggtgatcacctttgtgcgctacaacgacacgcccatcgtcaaggcctcgggccgtgaactgagctacgtgctgctggcaggcatcttcctgtgctatgccaccaccttcctcatgatcgctgagcccgaccttggcacctgctcgctgcgccgaatcttcctgggactagggatgagcatcagctatgcagccctgctcaccaagaccaaccgcatctaccgcatcttcgagcagggcaagcgctcggtcagtgccccacgcttcatcagccccgcctcacagctggccatcaccttcagcctcatctcgctgcagctgctgggcatctgtgtgtggtttgtggtggacccctcccactcggtggtggacttccaggaccagcggacactcgacccccgcttcgccaggggtgtgctcaagtgtgacatctcggacctgtcgctcatctgcctgctgggctacagcatgctgctcatggtcacgtgcaccgtgtatgccatcaagacacgcggcgtgcccgagaccttcaatgaggccaagcccattggcttcaccatgtacaccacttgcatcgtctggctggccttcatccccatcttctttggcacctcgcagtcggccgacaagctgtacatccagacgacgacgctgacggtctcggtgagtctgagcgcctcggtgtccctgggaatgctctacatgcccaaagtctacatcatcctcttccacccggagcagaacgtgcccaagcgcaagcgcagcctcaaagccgtcgttacggcggccaccatgtccaacaagttcacgcagaagggcaacttccggcccaacggagaggccaagtctgagctctgcgagaaccttgaggccccagcgctggccaccaaacagacttacgtcacttacaccaaccatgcaatctagcgagtccatggagctgagcagcaggaggaggagccgtgaccctgtggaaggtgcgtcgggccagggccacacccaagggcccagctgtcttgcctgcccgtgggcacccacggacgtggcttggtgctgaggatagcagagcccccagccatcactgctggcagcctgggcaaaccgggtgagcaacaggaggacgaggggccggggcggtgccaggctaccacaagaacctgcgtcttggaccattgcccctcccggccccaaaccacaggggctcaggtcgtgtgggccccagtgctagatctctccctcccttcgtctctgtctgtgctgttggcgacccctctgtctgtctccagccctgtctttctgttctcttatctctttgtttcaccttttccctctctggcgtccccggctgcttgtactcttggccttttctgtgtctcctttctggctcttgcctccgcctctctctctcatcctctttgtcctcagctcctcctgctttcttgggtcccaccagtgtcacttttctgccgttttctttcctgttctcctctgcttcattctcgtccagccattgctcccctctccctgccacccttccccagttcaccaaaccttacatgttgcaaaagagaaaaaaggaaaaaaaatcaaaacacaaaaaagccaaaacgaaaacaaatctcgagtgtgttgccaagtgctgcgtcctcctggtggcctctgtgtgtgtccctgtggcccgcagcctgcccgcctgccccgcccatctgccgtgtgtcttgcccgcctgccccgcccgtctgccgtctgtcttgcccgcctgcccgcctgcccctcctgccgaccacacggagttcagtgcctgggtgtttggtgatggttattgacgacaatgtgtagcgcatgattgtttttataccaagaacatttctaataaaaataaacacatggttttgcaaaaaa

SEQ ID NO: 12057 - DNA, 3181 bp, Homo sapiens
ggcggccgctcgggcaggatggcggcggccgcggtgggcgcgggccacggcgcggggggcccgggcgcagcgagcagcagtggtggggcgcgcgagggcgcgcgggtggcggcgctgtgcctgctgtggtacgcgctgagcgcgggcggcaacgtggtcaacaaggtgatcctgagcgccttcccgttcccggtgaccgtgtcgctgtgccacatcctggctctgtgcgctgggctcccgccgctgctgcgcgcctggcgcgtgccccccgcgccgcccgtctcgggccccggacccagtccgcatccgtcgtccggcccgctgctgccgccgcgcttctacccgcgctacgtgctaccgctcgccttcggcaagtacttcgcgtccgtgtcagcgcacgtcagcatctggaaggtgcccgtgtcctatgcacacaccgtcaaggccaccatgcccatctgggtggtcctcctgtcccggatcattatgaaggagaagcagagcaccaaggtatacttgtcactcatccccatcatcagcggtgtcctgctggccaccgtcaccgagttgtcttttgacatgtggggactcgtcagcgccctcgccgccacgctgtgcttctcgcttcagaacattttctccaaaaaggtcttgcgagattcacggatccaccatctccggctgctcaacatcctgggctgccacgccgtcttctttatgatccccacctgggttctggtggacctctcggctttcctggtcagcagcgacttgacctacgtctaccagtggccctggacgctcctgctcctggctgtcagcggcttctgtaactttgcccagaatgttatcgccttcagcatcctcaacctcgttagccccctgagctactcggtcgccaatgccaccaaaagaatcatggtcatcacggtgtccctgatcatgctgcgcaacccagtcaccagcaccaacgtcctgggcatgatgaccgccatcctgggggtcttcctctataacaagaccaagtacgatgcaaaccagcaagccaggaagcacctcctccccgtcaccacagcagacctgagcagcaaggagcgtcaccggagcccactggagaagccccacaacggcctcctcttcccccagcacggggactatcagtacggccgcaacaacatcttaacagaccacttccaatacagccggcagagctacccaaactcgtacagtttgaaccgctatgatgtgtagagtccaaaggacaggaccagactgttggtgactccttccccggcccccacagcagtatcagaaacttctgacaatcagtgaatgtacaacccagccgaggggacggtgcataactctccatcagaagccctggggttcctggccccccgtgagccgcaggaggatgcgttgcctgcagtgcagacggccgtgagctctgggcaaacctaaacagagaccagtgtctcatgctctttcttcctggagtctgtcatctgagggccgtgtccctgcggagatcttggccacgttgtacctttccatgtggaattattccccaagcagtgtagctcagagcacttgtgtctgcattccagataacattcaggacctgtgtgaaaagctggggtcactgtggctgtagaccatgaactggcagtgggggtgtccagggcggtgcttgagaacgtcagactggctagtttaattccctggcgcagatacgcataggaccaacagggtcaccaagcagacagggagcccgcgagaatcattcaaaacatccccagccacagagatggatccagtttcctggtcatccccttagcagttcacaagttcctggcaaatgttccaaagcaaaaagcgattgcaattagcatccagttcctgcagcctggtgctctgccctgcacgtcagggttggcatccacccagatccagatggaagggaaacttctctcttctcctttgcctcctcttccctcaccagagcagggcgcttctcttggggtggtgagaaggatcttcgagaaatcgtgttcagtatttcaagctctatttctgtggcacatgtcttttgagaggcatcttcacctcttctgtgatgacttggtatgttgtttggtagagagatcttgattttcggaggatcttgcatttttctagggaatattttgtagttgtgtgtgtgtgtttttgccttggtccccattatgggatgcattaggactggcctatgcatcgaaaatctttttgtttgtaaacgttttaaaaacaaagttccccggccaggcacggtggctcacacctgtggtcccggcactttgggaggccaagatgggcggatcacgaggtcaggagttcgagaccagcctggccaacatagtgaaaccccatctctactaaaaatacagaaattagccgggcatggtgtcgcgtgcctgtagtcccagctcctcaggctgctgaggcaggcgaattgcttgaacctgggaggcagaagttgtggtgagccgagattgtgcactccagcctgggtaacagagcgagactccatctcaaaaaaaaaaacaaaacaaaaccaagttcccactggtgatgcctgtctgacacgttttggtatttagtaggaaatgaagtgtttcgaagcttcgagagaagcttcaaaattgtcacaattgctgaaaacagaatgaatcgtgaacattatctcaatattttgtataatagacaagaccacagtgttttggttccctgacctgtttttgtgtttatgttaggatctgaatcatgttctgggtaaggggacgaggagcgaacactgcactaagatttggtttgccaaatcagattctttggtcaagagtcagtttggggccaggcgtggtggctcatgcctgtaatctcagcactttgggaggctgaggtgggtggatcactggagtttgagaccaccctggccaacatggtgaaaccccatctctactaaaacaaaaattagccaggcatggtggcacctgcctgtaatcccagctacttgggaggctgaggcaggagaatcacttgagcccaggaggtggaggtttcagcgagctgagatcacaccactgcactccagccttggtgacagagtgagactctgtctcaaaaaaaaaaaaaaaaaaaaaaa

SEQ ID NO: 12058 - DNA, 6628 bp, Homo sapiens
tcaccatccccaaccccaccggcagcgacgccggctactacgagtgcgaggctgtcctgcgcagcagcagcgtcccctctgttgtccggggcgcctacctctcagtgctggaaccgcctcagtttgtcaaggagccagaaagacacatcactgcggagatggagaaggtggtggacatcccctgtcaggccaaaggtgtgccgccgccctccatcacctggtacaaggacgcagccgtggtggaggtggagaagttgacccgcttccggcagcgcaacgacgggggcctgcagatcagcggcctggtgcccgatgataccggcatgttccagtgcttcgcccgcaatgcagccggcgaggtgcaaacttccacctacctggctgtcaccagcatcgcccctaacatcaccagaggccccctggacagcacggtgatcgatggcatgtcagtggtgctagcatgtgagacctcgggggcgccccgaccagctatcacttggcagaaaggggagcgcatcttggccagtggctctgtgcagctgcctcgcttcacacccctggagtcgggcagcctcctcatcagccccacacacatctccgatgcggggacctacacctgcctggccaccaactctcggggggtcgatgaggcctcagcagacctagtcgtttgggctcggacccgcatcaccaagcccccccaggatcagagtgtcatcaagggcacccaggcctccatggtgtgcggagtgacccacgacccccgagtaaccatcaggtacatctgggagaaggacggggccaccctgggcacggagagccatcctcgtatccgcctggacagaaacggctccctgcacatctcacagacgtggtcgggagacatcggcacgtacacctgccgggtgatctcagcaggaggcaacgactctcgcagtgcccacctgcgagtcaggcaactgccccacgcgcccgagcacccagtggccactctcagcaccgtggaaaggcgagccatcaacctgacgtggaccaagccctttgatggcaacagccccctgatccgctacattctggagatgtcggagaacaatgccccctggactgtactcctggccagtgtggaccccaaagctacctcagtgacagtcaagggcctggttcctgcacgctcctaccagttccgtctttgtgccgtcaacgacgtggggaaaggacagttcagcaaagacaccgagagggtctccctccccgaggagccccccacggcccctccacagaacgtcatcgccagcggtcgaaccaaccagtccatcatgatccagtggcagccgcctcctgagagccaccagaatggaattctcaagggttacatcatcaggtactgcctggccgggctgcccgtggggtaccagtttaagaacatcacggatgctgatgtgaacaacctgctgctggaggatctcatcatttggaccaactacgagatcgaggtggctgcttacaacagcgctgggctgggggtctacagcagtaaagtcaccgagtggacgctgcagggagttcccacagtccctccgggcaatgtgcacgcggaagccaccaattccacgaccatccgcttcacctggaacgcccccagcccccagttcatcaacggcatcaaccagggctacaagctgatcgcctgggagccggaacaggaagaggaggttaccatggtgaccgcccggcctaactttcaagacagcatccacgtgggcttcgtgtctggcctgaagaagttcaccgagtacttcacctcagtgctgtgtttcaccacccccggggacgggccacgcagcaccccgcagctggtgcgcacccatgaggatgtgcctgggcccgtgggacacctgagcttcagtgagatcctggacacatcgctgaaggtcagctggcaagagccgggagagaaaaatggcatcctcacagggtaccggatctcctgggaggagtacaatcgaaccaacacccgtgtgacccactacctgcccaacgtgaccctggagtaccgtgtcacgggcctcaccgcgctcaccacctacaccatcgaggtggccgccatgacctcaaagggccagggccaagtgtccgcctccaccatctcctctggggtgcccccagaactcccagggccccccaccaacctgggcatttccaacatcggcccccgctctgtgaccttgcagttcaggccaggctacgatgggaaaacctccatctcccgctggctggtggaagcccaggtaggcgtggttggggagggagaggagtggttgctgatccaccagctctccaatgagcccgatgcccgctccatggaggtgcccgacctcaaccccttcacctgctacagcttccgcatgcgccaggtgaacatcgtgggcaccagcccccccagtcagccttctagaaagatccagaccctgcaggcaccccctgacatggccccagccaatgtgtctctgcgcacagccagtgagaccagcctgtggctgcgctggatgcctctcccggagatggaatacaatgggaaccctgagtccgtgggctataagatcaagtacagccggtcagacgggcatggcaagacgctgagccacgtggtgcaggaccgtgtggagcgggactacaccatcgaggacctggaggagtggacagagtaccgcgtccaggtccaggccttcaacgccatcgggagcgggccctggagccagacggtggtgggcaggacccgggagtcagttccctcttccggccccaccaatgtgtctgcactggccaccacctccagcagcatgctggtgcgctggagcgaggtccccgaggctgatcgcaacgggctcgtgctgggctataaggtgatgtataaggagaaggactcggacacccagccccgattctggctggtggaaggcaactcgtctcgcagtgcccagctcaccggcttgggcaaatacgtgctctatgaagtccaggtgctggccttcacacgcatcggggacggcagccccagccaccctcccatcctggagcggacgctggatgatgtcccaggaccacccatgggcatcctgttcccagaggtgcggaccacgtctgtgcggctgatctggcagccccctgccgcccccaatggcatcattcttgcttaccagatcacacaccggctcaacaccaccacggccaacaccgccactgtggaggtgctggcacccagcgcccggcagtacacagccacgggcctcaagccagagtctgtctacctgttccgcatcacggcccagacccgcaagggctggggagaagctgccgaggccttggtggtgaccaccgagaagagagaccgtccgcagccccccagcaggccgatggtgcagcaggaggatgtgagagcacgcagcgtgctgctgtcctgggagccagggagcgacgggctctcccctgtgcgctactacaccatccagacccgcgagctgcccagcggcaggtgggcactgcactcggcctccgtgagccacaatgcctccagcttcattgtggacaggctgaagcccttcacgtcctacaagttccgagtgaaggcgaccaatgacattggcgacagcgagttcagcgaggagtcggagtcactgaccaccctgcaggctgcccccgatgaagcacccaccatcctctccgtgacgccccacaccaccacctccgtgctaatccgatggcagccgccagcagaggacaagatcaatggcatcctcctgggcttccggatccgataccgggagctgctctatgaaggactgaggggcttcacgcttcgaggcatcaacaacccaggggccacatgggctgagcttacctccatgtactccatgcggaacctgagccggcccagcctcacgcagtacgagctggacaacctgaacaagcacaggcggtacgagatacggatgagcgtgtacaacgctgtgggtgaggggccctccagccccccgcaggaggtctttgttggggaggcagtgcccacagcagcacctcgtaacgtggtcgtccacggcgccacggccacacagctggacgtgacttgggagccacctccgctggacagccagaatggagacatccaggggtacaagatttatttctgggaagcccagcgggggaacctcacagagcgagtgaagacgcttttcctggctgagaacagcgtgaagctcaagaacttgactggctacacggcctacatggtcagcgtggccgccttcaacgccgctggggatgggcctcggagcacccccacccaaggccagacccagcaagcagcccccagcgctcccagctcggtcaagttcagtgagctgaccacaacctcagtgaatgtgtcctgggaagccccgcagttccccaatggcatcctggagggctacaggctggtgtacgagccctgcagccccgtggatggagtcagcaagatcgtgaccgtggacgtgaaggggaacagccccctgtggctgaaggtgaaggacctggcggagggggtgacctacaggttccgcatcagagccaagaccttcacctacgggccggagatcgaagccaacgtcaccacgggccccggagaaggtgccccaggaccgcctggcgtgcccatcatcgtgcggtacagctctgccatcgccattcactggtccagcggagacccgggcaaagggcccatcacccgctacgtcatcgaggccagaccttcagacgagggactatgggacatcctcatcaaagacatccccaaggaggtgagctcctacacgttcagcatggacatcctgaagccgggcgtgagctatgacttccgggtcatcgcggtcaacgactatggtttcggcacccccagcagcccctcccagtctgtgccagcccagaaagccaaccccttctatgaggagtggtggttcttggtggtcattgccctggtcggcctcatcttcatcctgcttctggtcttcgtgctcatcatccggggccagagcaagaagtacgccaagaagacagactcggggaacagtgccaagtctggagccctaggccacagcgagatgatgagcttggatgaaagcagcttccctgccctggaactcaacaacaggcggctctccgtcaagaactctttctgccgaaagaacggcctgtacaccaggtctccccccaggcccagcccaggcagcctgcactactcggatgaggatgtcaccaaatacaacgacctcatccctgcagagagcagcagcctgacggagaagccctcagaaatctccgactctcagggaagtgacagcgagtacgaggtcgactcaaaccaccagaaggcccactcctttgtcaaccactacatcagtgaccccacatactacaactcgtggcggcgacagcagaagggcatctcgagggcacaggcctacagctacacggagagcgactcgggtgagccagaccacaccaccgtcaccaacagcaccagcacccagcagggcagcctctttcggcccaaggccagtcggactccaacgccccagaacccccctaaccccccaagtcagcagagcaccctctaccgtccccccagcagcctggccccaggctcccgggctcccatagcaggattttcatcatttgtttgacatcagaagaggaaaaagcagaaagagaaatggcaccaaactcctccttcacccctcctctcactgcctgccagaaaacaaaaacaccaagaaaccaagtcaacttttcacctcctgagtttatttttccagagattccagggccagcaaagccggcgttcagaaggagggagaaaaccgtgagaggatgtgtgtggccagcagctcttcagctttgagatggtggggttcactgctcccttgggaattacacggagctggggaagtggctgtgtcactgctatggacacggagtggggcgggcatctggagagagagagggagcggaggctaaggactggaggccgccaggcaggcgtggccgagggaagaaaaagcttctggatgtccagccagctgcccccttccagcccctccaggacccctggacccactgccgctgctctctgcaaaaagaatgggcatcccggaggccacgcctatcttctctctctgctcctccttccctccatgcaccatcactgtggctggcaggcatcggacagcctcatccagaccccctgccctgtcttggcaacctctactgcccatctcccctgctcaacttctccaccaagcatttggtttatttagaaaaaggaagaaaaacaaaaaacaaaaaactaaagggtgagaatttgcttagcgccttccttgttcctgcatattttttaaaatattgaatccaaggaagagagcccaagggtaggggagaaaccccccacaactgacccctgcctccctgtgctggaattgactttcctgagcatggacaaggaaaggtgaagtctggggagcagaggtgtaaataaggcgactggccttggcactgtgggatgattaggtttaacgcattgtgggcaagataagaatga

SEQ ID NO: 12059 - DNA, 8169 bp, Homo sapiens
acagccgggctggagcgcgcacccggcactgaggcttcgctgctctcggagcgctcagaccgcggccgccgcagccggcgaaagaggcaaagtcccgcacgccggaggacatgcgcctcggctagcggccccgggccccaccaccgtgcggctttctccagattattcctctctcgctgtctctgactgtctctctctgtctctgtctctgtctctctctctctcacacacacacacacacacacaaacacacatacgcacgcacgatctcacttcgatctatacactggaggattaaaacaaacaaacaaaaaaaacatttccttcgctccccctccctctccactctgagaagcagaggagccgcacggcgaggggccgcagaccgtctggaaatgcgaatcctaaagcgtttcctcgcttgcattcagctcctctgtgtttgccgcctggattgggctaatggatactacagacaacagagaaaacttgttgaagagattggctggtcctatacaggagcactgaatcaaaaaaattggggaaagaaatatccaacatgtaatagcccaaaacaatctcctatcaatattgatgaagatcttacacaagtaaatgtgaatcttaagaaacttaaatttcagggttgggataaaacatcattggaaaacacattcattcataacactgggaaaacagtggaaattaatctcactaatgactaccgtgtcagcggaggagtttcagaaatggtgtttaaagcaagcaagataacttttcactggggaaaatgcaatatgtcatctgatggatcagagcatagtttagaaggacaaaaatttccacttgagatgcaaatctactgctttgatgcggaccgattttcaagttttgaggaagcagtcaaaggaaaagggaagttaagagctttatccattttgtttgaggttgggacagaagaaaatttggatttcaaagcgattattgatggagtcgaaagtgttagtcgttttgggaagcaggctgctttagatccattcatactgttgaaccttctgccaaactcaactgacaagtattacatttacaatggctcattgacatctcctccctgcacagacacagttgactggattgtttttaaagatacagttagcatctctgaaagccagttggctgttttttgtgaagttcttacaatgcaacaatctggttatgtcatgctgatggactacttacaaaacaattttcgagagcaacagtacaagttctctagacaggtgttttcctcatacactggaaaggaagagattcatgaagcagtttgtagttcagaaccagaaaatgttcaggctgacccagagaattataccagccttcttgttacatgggaaagacctcgagtcgtttatgataccatgattgagaagtttgcagttttgtaccagcagttggatggagaggaccaaaccaagcatgaatttttgacagatggctatcaagacttgggtgctattctcaataatttgctacccaatatgagttatgttcttcagatagtagccatatgcactaatggcttatatggaaaatacagcgaccaactgattgtcgacatgcctactgataatcctgaacttgatcttttccctgaattaattggaactgaagaaataatcaaggaggaggaagagggaaaagacattgaagaaggcgctattgtgaatcctggtagagacagtgctacaaaccaaatcaggaaaaaggaaccccagatttctaccacaacacactacaatcgcatagggacgaaatacaatgaagccaagactaaccgatccccaacaagaggaagtgaattctctggaaagggtgatgttcccaatacatctttaaattccacttcccaaccagtcactaaattagccacagaaaaagatatttccttgacttctcagactgtgactgaactgccacctcacactgtggaaggtacttcagcctctttaaatgatggctctaaaactgttcttagatctccacatatgaacttgtcggggactgcagaatccttaaatacagtttctataacagaatatgaggaggagagtttattgaccagtttcaagcttgatactggagctgaagattcttcaggctccagtcccgcaacttctgctatcccattcatctctgagaacatatcccaagggtatatattttcctccgaaaacccagagacaataacatatgatgtccttataccagaatctgctagaaatgcttccgaagattcaacttcatcaggttcagaagaatcactaaaggatccttctatggagggaaatgtgtggtttcctagctctacagacataacagcacagcccgatgttggatcaggcagagagagctttctccagactaattacactgagatacgtgttgatgaatctgagaagacaaccaagtccttttctgcaggcccagtgatgtcacagggtccctcagttacagatctggaaatgccacattattctacctttgcctacttcccaactgaggtaacacctcatgcttttaccccatcctccagacaacaggatttggtctccacggtcaacgtggtatactcgcagacaacccaaccggtatacaatggtgagacacctcttcaaccttcctacagtagtgaagtctttcctctagtcacccctttgttgcttgacaatcagatcctcaacactacccctgctgcttcaagtagtgattcggccttgcatgctacgcctgtatttcccagtgtcgatgtgtcatttgaatccatcctgtcttcctatgatggtgcacctttgcttccattttcctctgcttccttcagtagtgaattgtttcgccatctgcatacagtttctcaaatccttccacaagttacttcagctaccgagagtgataaggtgcccttgcatgcttctctgccagtggctgggggtgatttgctattagagcccagccttgctcagtattctgatgtgctgtccactactcatgctgcttcagagacgctggaatttggtagtgaatctggtgttctttataaaacgcttatgttttctcaagttgaaccacccagcagtgatgccatgatgcatgcacgttcttcagggcctgaaccttcttatgccttgtctgataatgagggctcccaacacatcttcactgtttcttacagttctgcaatacctgtgcatgattctgtgggtgtaacttatcagggttccttatttagcggccctagccatataccaatacctaagtcttcgttaataaccccaactgcatcattactgcagcctactcatgccctctctggtgatggggaatggtctggagcctcttctgatagtgaatttcttttacctgacacagatgggctgacagcccttaacatttcttcacctgtttctgtagctgaatttacatatacaacatctgtgtttggtgatgataataaggcgctttctaaaagtgaaataatatatggaaatgagactgaactgcaaattccttctttcaatgagatggtttacccttctgaaagcacagtcatgcccaacatgtatgataatgtaaataagttgaatgcgtctttacaagaaacctctgtttccatttctagcaccaagggcatgtttccagggtcccttgctcataccaccactaaggtttttgatcatgagattagtcaagttccagaaaataacttttcagttcaacctacacatactgtctctcaagcatctggtgacacttcgcttaaacctgtgcttagtgcaaactcagagccagcatcctctgaccctgcttctagtgaaatgttatctccttcaactcagctcttattttatgagacctcagcttcttttagtactgaagtattgctacaaccttcctttcaggcttctgatgttgacaccttgcttaaaactgttcttccagctgtgcccagtgatccaatattggttgaaacccccaaagttgataaaattagttctacaatgttgcatctcattgtatcaaattctgcttcaagtgaaaacatgctgcactctacatctgtaccagtttttgatgtgtcgcctacttctcatatgcactctgcttcacttcaaggtttgaccatttcctatgcaagtgagaaatatgaaccagttttgttaaaaagtgaaagttcccaccaagtggtaccttctttgtacagtaatgatgagttgttccaaacggccaatttggagattaaccaggcccatcccccaaaaggaaggcatgtatttgctacacctgttttatcaattgatgaaccattaaatacactaataaataagcttatacattccgatgaaattttaacctccaccaaaagttctgttactggtaaggtatttgctggtattccaacagttgcttctgatacatttgtatctactgatcattctgttcctataggaaatgggcatgttgccattacagctgtttctccccacagagatggttctgtaacctcaacaaagttgctgtttccttctaaggcaacttctgagctgagtcatagtgccaaatctgatgccggtttagtgggtggtggtgaagatggtgacactgatgatgatggtgatgatgatgatgatgacagaggtagtgatggcttatccattcataagtgtatgtcatgctcatcctatagagaatcacaggaaaaggtaatgaatgattcagacacccacgaaaacagtcttatggatcagaataatccaatctcatactcactatctgagaattctgaagaagataatagagtcacaagtgtatcctcagacagtcaaactggtatggacagaagtcctggtaaatcaccatcagcaaatgggctatcccaaaagcacaatgatggaaaagaggaaaatgacattcagactggtagtgctctgcttcctctcagccctgaatctaaagcatgggcagttctgacaagtgatgaagaaagtggatcagggcaaggtacctcagatagccttaatgagaatgagacttccacagatttcagttttgcagacactaatgaaaaagatgctgatgggatcctggcagcaggtgactcagaaataactcctggattcccacagtccccaacatcatctgttactagcgagaactcagaagtgttccacgtttcagaggcagaggccagtaatagtagccatgagtctcgtattggtctagctgaggggttggaatccgagaagaaggcagttataccccttgtgatcgtgtcagccctgacttttatctgtctagtggttcttgtgggtattctcatctactggaggaaatgcttccagactgcacacttttacttagaggacagtacatcccctagagttatatccacacctccaacacctatctttccaatttcagatgatgtcggagcaattccaataaagcactttccaaagcatgttgcagatttacatgcaagtagtgggtttactgaagaatttgagacactgaaagagttttaccaggaagtgcagagctgtactgttgacttaggtattacagcagacagctccaaccacccagacaacaagcacaagaatcgatacataaatatcgttgcctatgatcatagcagggttaagctagcacagcttgctgaaaaggatggcaaactgactgattatatcaatgccaattatgttgatggctacaacagaccaaaagcttatattgctgcccaaggcccactgaaatccacagctgaagatttctggagaatgatatgggaacataatgtggaagttattgtcatgataacaaacctcgtggagaaaggaaggagaaaatgtgatcagtactggcctgccgatgggagtgaggagtacgggaactttctggtcactcagaagagtgtgcaagtgcttgcctattatactgtgaggaattttactctaagaaacacaaaaataaaaaagggctcccagaaaggaagacccagtggacgtgtggtcacacagtatcactacacgcagtggcctgacatgggagtaccagagtactccctgccagtgctgacctttgtgagaaaggcagcctatgccaagcgccatgcagtggggcctgttgtcgtccactgcagtgctggagttggaagaacaggcacatatattgtgctagacagtatgttgcagcagattcaacacgaaggaactgtcaacatatttggcttcttaaaacacatccgttcacaaagaaattatttggtacaaactgaggagcaatatgtcttcattcatgatacactggttgaggccatacttagtaaagaaactgaggtgctggacagtcatattcatgcctatgttaatgcactcctcattcctggaccagcaggcaaaacaaagctagagaaacaattccagctcctgagccagtcaaatatacagcagagtgactattctgcagccctaaagcaatgcaacagggaaaagaatcgaacttcttctatcatccctgtggaaagatcaagggttggcatttcatccctgagtggagaaggcacagactacatcaatgcctcctatatcatgggctattaccagagcaatgaattcatcattacccagcaccctctccttcataccatcaaggatttctggaggatgatatgggaccataatgcccaactggtggttatgattcctgatggccaaaacatggcagaagatgaatttgtttactggccaaataaagatgagcctataaattgtgagagctttaaggtcactcttatggctgaagaacacaaatgtctatctaatgaggaaaaacttataattcaggactttatcttagaagctacacaggatgattatgtacttgaagtgaggcactttcagtgtcctaaatggccaaatccagatagccccattagtaaaacttttgaacttataagtgttataaaagaagaagctgccaatagggatgggcctatgattgttcatgatgagcatggaggagtgacggcaggaactttctgtgctctgacaacccttatgcaccaactagaaaaagaaaattccgtggatgtttaccaggtagccaagatgatcaatctgatgaggccaggagtctttgctgacattgagcagtatcagtttctctacaaagtgatcctcagccttgtgagcacaaggcaggaagagaatccatccacctctctggacagtaatggtgcagcattgcctgatggaaatatagctgagagcttagagtctttagtttaacacagaaaggggtgggggaactcacatctgagcattgttttcctcttcctaaaattaggcaggaaaatcagtctagttctgttatctgttgatttcccatcacctgacagtaactttcatgacataggattctgccgccaaatttatatcattaacaatgtgtgcctttttgcaagacttgtaatttacttattatgtttgaactaaaatgattgaattttacagtatttctaagaatggaattgtggtatttttttctgtattgattttaacagaaaatttcaatttatagaggttaggaattccaaactacagaaaatgtttgtttttagtgtcaaatttttagctgtatttgtagcaattatcaggtttgctagaaatataacttttaatacagtagcctgtaaataaaacactcttccatatgatattcaacattttacaactgcagtattcacctaaagtagaaataatctgttacttattgtaaatactgccctagtgtctccatggaccaaatttatatttataattgtagatttttatattttactactgagtcaagttttctagttctgtgtaattgtttagtttaatgacgtagttcattagctggtcttactctaccagttttctgacattgtattgtgttacctaagtcattaactttgtttcagcatgtaattttaacttttgtggaaaatagaaataccttcattttgaaagaagtttttatgagaataacaccttaccaaacattgttcaaatggtttttatccaaggaattgcaaaaataaatataaatattgccattaaaaaaaaaaaa

SEQ ID NO: 12060 - DNA, 2587 bp, Homo sapiens
ggcacacacgaggaggagggttgagctgctgccgccgccgcctctgtcgtcgtcgcgagtgtggagtcgggactggagctgctgccgcggcgacgccggggatctttgtcgctagctcccggcccttctgccccgccgccttccctcagtcagcgttgcccactcctctccggccgggcgcccctgcctccatttctcgctctctgtccaccacacacacggcccccccgatcatggatccgggcagtggcggcggcggcggcggcggcggcggcggcgggagcagcagcggcagcagcagcagcgactcggcgcctgactgctgggaccaggcggacatggaagcccccgggccgggcccttgcggcggcggcggcttccctggcggcggcggccgaggcccagcgggagaacctcagcgcggccttcagccggcaactcaacgtcaacgccaagcccttcgtgcccaacgtccacgccgccgagttcgtgccgtccttcctgcggggcccggcagcgccgccacccccagctggcggcgccgccaataaccacggagccggcagcggcgcgggaggccgtgcggcacctgtggaatcctctcaagaggaacagtcattgtgtgaaggttcaaattcagctgttagcatggaactttcagaacctattgtagaaaatggagagacagaaatgtctccagaagaatcatgggagcacaaagaagaaataagtgaagcagagccagggggtggttccttgggagatggaaggccgccagaggaaagtgcccatgaaatgatggaggaggaagaggaaatcccaaaacctaagtctgtggttgcaccgccaggtgctcctaagaaagagcatgtaaatgtagtattcattgggcacgtagatgctggcaagtcaaccattggaggacaaataatgtatttgactggaatggttgacaaaaggacgcttgaaaagtatgaaagagaagctaaagagaaaaacagagaaacttggtacttgtcttgggccttagacacaaatcaggaagaacgagacaagggtaaaacagtagaagtgggtcgtgcctattttgaaaccgaaaagaagcatttcacaattctagatgcccctggccacaagagttttgtcccaaatatgattggtggtgcctctcaagctgatttggctgtgctggtaatctcagccaggaaaggagagtttgaaactggatttgaaaaaggaggacagacaagagaacatgcaatgttggcaaagacagcaggtgtaaaacacctaattgtgctaattaataagatggatgatccaacagtaaattggagcaatgagagatatgaagaatgtaaggagaaactagtgccatttttgaaaaaagttggcttcaatcccaaaaaggacattcactttatgccctgctcaggacttactggagcaaatctcaaagagcagtcggatttctgtccttggtacattggattaccgtttattccatatctggataatttgccgaacttcaatagatcagttgatggaccaatcaggctgccaattgtggataagtacaaggatatgggcactgtggtcctgggaaagctggaatcaggatctatttgtaaaggccagcagcttgtgatgatgccaaacaagcacaacgtggaagttcttggaatactttccgatgatgtagagactgataccgtagccccaggtgaaaacctcaaaatcagactgaaaggaattgaagaagaggagattcttccagggtttatactttgtgatcctaataatctttgtcattctggacgcacatttgatgcccagatagtgattatagagcacaaatccatcatctgcccaggctataatgcggtgctgcatattcatacctgtattgaggaggtggaaataacagccttaatctgcttggtagacaaaaaatcaggagaaaaaagtaagacccgaccccgttttgtgaaacaagatcaagtatgcattgctcgcttaaggacagcaggaaccatctgccttgagacctttaaagacttccctcagatgggtcgtttcaccttaagagatgagggtaagaccattgcaattggaaaagttctgaaactggttccagagaaagactaagcattttcttgatgaccctgcacaatactgtgaggaaaattgactgcagaagcctacttcacaccgccttctcttattttctgcccattgataaacctctccccatattttgcaaagaggaaattcacagcaaaagtccacattatgtcagctttctcatattgagagctctgctatgccactgttgaatttttcccaagattcctgtccctagccctcacttcaaactctgcttccttggacagatttggcaatagctttgtaagtgatgtggacataattgcctacaataatgaaaacctacaggaatttttttatttttcattttccccttaggcatatttagtatttttcccccaggccagatcattcgtgagtgtgcgagtgtgtgtgcacatgttacaaaggcaactaccatgttaataaaatattcaatttg

SEQ ID NO: 12061 - DNA, 2347 bp, Homo sapiens
atggggggaaagcagcgggacgaggatgacgaggcctacgggaagccagtcaaatacgacccctcctttcgaggccccatcaagaacagaagctgcacagatgtcatctgctgcgtcctcttcctgctcttcattctaggttacatcgtggtggggattgtggcctggttgtatggagacccccggcaagtcctctaccccaggaactctactggggcctactgtggcatgggggagaacaaagataagccgtatctcctgtacttcaacatcttcagctgcatcctgtccagcaacatcatctcagttgctgagaacggcctacagtgccccacaccccaggtgtgtgtgtcctcctgcccggaggacccatggactgtgggaaaaaacgagttctcacagactgttggggaagtcttctatacaaaaaacaggaacttttgtctgccaggggtaccctggaatatgacggtgatcacaagcctgcaacaggaactctgccccagtttcctcctcccctctgctccagctctgggacgctgctttccatggaccaacattactccaccggcgctcccagggatcaccaatgacaccaccatacagcaggggatcagcggtcttattgacagcctcaatgcccgagacatcagtgttaagatctttgaagattttgcccagtcctggtattggattcttgttgccctgggggtggctctggtcttgagcctactgtttatcttgcttctgcgcctggtggctgggcccctggtgctggtgctgatcctgggagtgctgggcgtgctggcatatggcatctactactgctgggaggagtaccgagtgctgcgggacaagggcgcctccatctcccagctgggtttcaccaccaacctcagtgcctaccagagcgtgcaggagacctggctggccgccctgatcgtgttggcggtgcttgaagccatcctgctgctggtgctcatcttcctgcggcagcggattcgtattgccatcgccctcctgaaggaggccagcaaggctgtgggacagatgatgtctaccatgttctacccactggtcacctttgtcctcctcctcatctgcattgcctactgggccatgactgctctgtatcctctgcccacgcagccagccactcttggatatgtgctctgggcatccaacatcagctcccccggctgtgagaaagtgccaataaatacatcatgcaaccccacggcccaccttgtgaactcctcgtgcccagggctgatgtgcgtcttccagggctactcatccaaaggcctaatccaacgttctgtcttcaatctgcaaatctatggggtcctggggctcttctggacccttaactgggtactggccctgggccaatgcgtcctcgctggagcctttgcctccttctactgggccttccacaagccccaggacatccctaccttccccttaatctctgccttcatccgcacactccgttaccacactgggtcattggcatttggagccctcatcctgacccttgtgcagatagcccgggtcatcttggagtatattgaccacaagctcagaggagtgcagaaccctgtagcccgctgcatcatgtgctgtttcaagtgctgcctctggtgtctggaaaaatttatcaagttcctaaaccgcaatgcatacatcatgatcgccatctacgggaagaatttctgtgtctcagccaaaaatgcgttcatgctactcatgcgaaacattgtcagggtggtcgtcctggacaaagtcacagacctgctgctgttctttgggaagctgctggtggtcggaggcgtgggggtcctgtccttcttttttttctccggtcgcatcccggggctgggtaaagactttaagagcccccacctcaactattactggctgcccatcatgacctccatcctgggggcctatgtcatcgccagcggcttcttcagcgttttcggcatgtgtgtggacacgctcttcctctgcttcctggaagacctggagcggaacaacggctccctggaccggccctactacatgtccaagagccttctaaagattctgggcaagaagaacgaggcgcccccggacaacaagaagaggaagaagtgacagctccggccctgatccaggactgcaccccacccccaccgtccagccatccaacctcacttcgccttacaggtctccattttgtggtaaaaaaaggttttaggccaggcgccgtggctcacgcctgtaatccaacactttgagaggctgaggcgggcggatcacctgagtcaggagttcgagaccagcctggccaacatggtgaaac

SEQ ID NO: 12062 - DNA, 2579 bp, Homo sapiens
actccggagactgagccatggggggaaagcagcgggacgaggatgacgaggcctacgggaagccagtcaaatacgacccctcctttcgaggccccatcaagaacagaagctgcacagatgtcatctgctgcgtcctcttcctgctcttcattctaggttacatcgtggtggggattgtggcctggttgtatggagacccccggcaagtcctctaccccaggaactctactggggcctactgtggcatgggggagaacaaagataagccgtatctcctgtacttcaacatcttcagctgcatcctgtccagcaacatcatctcagttgctgagaacggcctacagtgccccacaccccaggtgtgtgtgtcctcctgcccggaggacccatggactgtgggaaaaaacgagttctcacagactgttggggaagtcttctatacaaaaagcagcaacttttgtctgccaggggtaccctggaatatgacggtgatcacaagcctgcaacaggaactctgccccagtttcctcctcccctctgctccagctctgggacgctgctttccatggaccaacattactccaccggcgctcccagggatcaccaatgacaccaccatacagcaggggatcagcggtcttattgacagcctcaatgcccgagacatcagtgttaagatctttgaagattttgcccagtcctggtattggattcttgttgccctgggggtggctctggtcttgagcctactgtttatcttgcttctgcgcctggtggctgggcccctggtgctggtgctgatcctgggagtgctgggcgtgctggcatacggcatctactactgctgggaggagtaccgagtgctgcgggacaagggcgcctccatctcccagctgggtttcaccaccaacctcagtgcctaccagagcgtgcaggagacctggctggccgccctgatcgtgttggcggtgcttgaagccatcctgctgctggtgctcatcttcctgcggcagcggattcgtattgccatcgccctcctgaaggaggccagcaaggctgtgggacagatgatgtctaccatgttctacccactggtcacctttgtcctcctcctcatctgcattgcctactgggccatgactgctctgtacctggctacatcggggcaaccccagtatgtgctctgggcatccaacatcagctcccccggctgtgagaaagtgccaataaatacatcatgcaaccccacggcccaccttgtgaactcctcgtgcccagggctgatgtgcgtcttccagggctactcatccaaaggcctaatccaacgttctgtcttcaatctgcaaatctatggggtcctggggctcttctggacccttaactgggtactggccctgggccaatgcgtcctcgctggagcctttgcctccttctactgggccttccacaagccccaggacatccctaccttccccttaatctctgccttcatccgcacactccgttaccacactgggtcattggcatttggagccctcatcctgacccttgtgcagatagcccgggtcatcttggagtatattgaccacaagctcagaggagtgcagaaccctgtagcccgctgcatcatgtgctgtttcaagtgctgcctctggtgtctggaaaaatttatcaagttcctaaaccgcaatgcatacatcatgatcgccatctacgggaagaatttctgtgtctcagccaaaaatgcgttcatgctactcatgcgaaacattgtcagggtggtcgtcctggacaaagtcacagacctgctgctgttctttgggaagctgctggtggtcggaggcgtgggggtcctgtccttcttttttttctccggtcgcatcccggggctgggtaaagactttaagagcccccacctcaactattactggctgcccatcatgacctccatcctgggggcctatgtcatcgccagcggcttcttcagcgttttcggcatgtgtgtggacacgctcttcctctgcttcctggaagacctggagcggaacaacggctccctggaccggccctactacatgtccaagagccttctaaagattctgggcaagaagaacgaggcgcccccggacaacaagaagaggaagaagtgacagctccggccctgatccaggactgcaccccacccccaccgtccagccatccaacctcacttcgccttacaggtctccattttgtggtaaaaaagggttttaggccaggcgccgtggctcacgcctgtaatccaacactttgagaggctgaggcgggcggatcacctgagtcaggagttcgagaccagcctggccaacatggtgaaacctccgtctctattaaaaatacaaaaattagccgagagtggtggcatgcacctgtcatcccagctactcgggaggctgaggcaggagaatcgcttgaacccgggaggcagaggttgcagtgagccgagatcgcgccactgcactccaacctgggtgacagactctgtctccaaaacaaaacaaacaaacaaaaagattttattaaagatattttgttaactc

SEQ ID NO: 12063 - DNA, 2574 bp, Homo sapiens
ctgtgggtaactttacagttctcagatcggcttctcgcaacaggcagtcagttctcactgggccccttggactcccatttcaaaaatggagaagacagatcacagccactgaccagggaccgtgggaggtgccacgtgatggtgaggcatcatgctagggagctgagctctgaccttcctgctgggtgattctccacctctgggctgctagatctacttcctggatgccgtgaagatcctcatgtatgaaaatgaagtcccaggcaaccatgatttgctgcttagtgttctttctgtccacagaatgttcccactatagatccaagattcacctaaaagctggagataaacttcaaagccctgaagggaaacccaagactggaaggatccaagagaaatgcgaaggaccttgtatttcttcttccaactgcagccagccctgtgctaaggactttcatggagaaataggatttacatgtaatcaaaaaaagtggcaaaaatcagctgaaacatgtacaagcctttctgtggaaaaactctttaaggactcaactggtgcatctcgcctttctgtagcagcaccatctatacctctgcatattctagactttcgagctccagagaccattgagagtgtagctcaaggaatccgtaagaactgcccctttgattatgcctgcatcactgacatggtgaaatcatcagaaacaacatctggaaatattgcatttatagtggagttattaaaaaatatttctacagacttgtctgataatgttactcgagagaaaatgaagagctatagtgaagtggccaaccacatcctcgacacagcagccatttcaaactgggctttcattcccaacaaaaatgccagctcggatttgttgcagtcagtgaatttgtttgccagacaactccacatccacaataattctgagaacattgtgaatgaactcttcattcagacaaaagggtttcacatcaaccataatacctcagagaaaagcctcaatttctccatgagcatgaacaataccacagaagatatcttaggaatggtacagattcccaggcaagagctaaggaagctgtggccaaatgcatcccaagccattagcatagctttcccaaccttgggggctatcctgagagaagcccacttgcaaaatgtgagtcttcccagacaggtaaatggtctggtgctatcagtggttttaccagaaaggttgcaagaaatcatactcaccttcgaaaagatcaataaaacccgcaatgccagagcccagtgtgttggctggcactccaagaaaaggagatgggatgagaaagcgtgccaaatgatgttggatatcaggaacgaagtgaaatgccgctgtaactacaccagtgtggtgatgtctttttccattctcatgtcctccaaatcgatgaccgacaaagttctggactacatcacctgcattgggctcagcgtctcaatcctaagcttggttctttgcctgatcattgaagccacagtgtggtcccgggtggttgtgacggagatatcatacatgcgtcacgtgtgcatcgtgaatatagcagtgtcccttctgactgccaatgtgtggtttatcataggctctcactttaacattaaggcccaggactacaacatgtgtgttgcagtgacatttttcagccactttttctacctctctctgtttttctggatgctcttcaaagcattgctcatcatttatggaatattggtcattttccgtaggatgatgaagtcccgaatgatggtcattggctttgccattggctatgggtgcccattgatcattgctgtcactacagttgctatcacagagccagagaacggctacatgagacctgaggcctgttggcttaactgggacaataccaaagcccttttagcatttgccatcccggcgttcgtcattgtggctgtaaatctgattgtggttttggttgttgctgtcaacactcagaggccctctattggcagttccaagtctcaggatgtggtcataattatgaggatcagcaaaaatgttgccatcctcactccactgctgggactgacctggggttttggaatagccactctcatagaaggcacttccttgacgttccatataatttttgccttgctcaatgctttccagggttttttcatcctgctgtttggaaccattatggatcacaagataagagatgctttgaggatgaggatgtcttcactgaaggggaaatcgagggcagctgagaatgcatcactaggcccaaccaatggatctaaattaatgaatcgtcaaggatgaaatgctgccccatttctcatggatgtcctgagaccaagaggggagatccaggagaaagaggccatggaaagcaggctggagtgaggaggaatggtcatgcttccttggaagactttctcttcttgtcaggagtgactcccaagctcttggtcggccgaagaaaaactgaggataacatttgctgactgggctttaaggagcatgatttatggaccccttaacctacccgtgccctgcaaga

SEQ ID NO: 12064 - DNA, 2483 bp, Homo sapiens
ccccctcggccccgcgcgtcgcctgtcctccgagccagtcgctgacagccgcggcgccgcgagcttctcctctcctcacgaccgaggcagagcagtcattatggcgaaccttggctgctggatgctggttctctttgtggccacatggagtgacctgggcctctgcaagaagcgcccgaagcctggaggatggaacactgggggcagccgatacccggggcagggcagccctggaggcaaccgctacccacctcagggcggtggtggctgggggcagcctcatggtggtggctgggggcagcctcatggtggtggctgggggcagccccatggtggtggctggggacagcctcatggtggtggctggggtcaaggaggtggcacccacagtcagtggaacaagccgagtaagccaaaaaccaacatgaagcacatggctggtgctgcagcagctggggcagtggtggggggccttggcggctacatgctgggaagtgccatgagcaggcccatcatacatttcggcagtgactatgaggaccgttactatcgtgaaaacatgcaccgttaccccaaccaagtgtactacaggcccatggatgagtacagcaaccagaacaactttgtgcacgactgcgtcaatatcacaatcaagcagcacacggtcaccacaaccaccaagggggagaacttcaccgagaccgacgttaagatgatggagcgcgtggttgagcagatgtgtatcacccagtacgagagggaatctcaggcctattaccagagaggatcgagcatggtcctcttctcctctccacctgtgatcctcctgatctctttcctcatcttcctgatagtgggatgaggaaggtcttcctgttttcaccatctttctaatctttttccagcttgagggaggcggtatccacctgcagcccttttagtggtggtgtctcactctttcttctctctttgtcccggataggctaatcaatacccttggcactgatgggcactggaaaacatagagtagacctgagatgctggtcaagccccctttgattgagttcatcatgagccgttgctaatgccaggccagtaaaagtataacagcaaataaccattggttaatctggacttatttttggacttagtgcaacaggttgaggctaaaacaaatctcagaacagtctgaaatacctttgcctggatacctctggctccttcagcagctagagctcagtatactaatgccctatcttagtagagatttcatagctatttagagatattttccattttaagaaaacccgacaacatttctgccaggtttgttaggaggccacatgatacttattcaaaaaaatcctagagattcttagctcttgggatgcaggctcagcccgctggagcatgagctctgtgtgtaccgagaactggggtgatgttttacttttcacagtatgggctacacagcagctgttcaacaagagtaaatattgtcacaacactgaacctctggctagaggacatattcacagtgaacataactgtaacatatatgaaaggcttctgggacttgaaatcaaatgtttgggaatggtgcccttggaggcaacctcccattttagatgtttaaaggaccctatatgtggcattcctttctttaaactataggtaattaaggcagctgaaaagtaaattgccttctagacactgaaggcaaatctcctttgtccatttacctggaaaccagaatgattttgacatacaggagagctgcagttgtgaaagcaccatcatcatagaggatgatgtaattaaaaaatggtcagtgtgcaaagaaaagaactgcttgcatttctttatttctgtctcataattgtcaaaaaccagaattaggtcaagttcatagtttctgtaattggcttttgaatcaaagaatagggagacaatctaaaaaatatcttaggttggagatgacagaaatatgattgatttgaagtggaaaaagaaattctgttaatgttaattaaagtaaaattattccctgaattgtttgatattgtcacctagcagatatgtattacttttctgcaatgttattattggcttgcactttgtgagtattctatgtaaaaatatatatgtatataaaatatatattgcataggacagacttaggagttttgtttagagcagttaacatctgaagtgtctaatgcattaacttttgtaaggtactgaatacttaatatgtgggaaacccttttgcgtggtccttaggcttacaatgtgcactgaatcgtttcatgtaagaatccaaagtggacaccattaacaggtctttgaaatatgcatgtactttatattttctatatttgtaactttgcatgttcttgttttgttatataaaaaaattgtaaatgtttaatatctgactgaaattaaacgagcgaagatgagcaccaaaaaaaaaaaaaaaa

SEQ ID NO: 12065 - DNA, 2479 bp, Homo sapiens
ccccctcggccccgcgcgtcgcctgtcctccgagccagtcgctgacagccgcggcgccgcgagcttctcctctcctcacgaccgagagcagtcattatggcgaaccttggctgctggatgctggttctctttgtggccacatggagtgacctgggcctctgcaagaagcgcccgaagcctggaggatggaacactgggggcagccgatacccggggcagggcagccctggaggcaaccgctacccacctcagggcggtggtggctgggggcagcctcatggtggtggctgggggcagcctcatggtggtggctgggggcagccccatggtggtggctggggacagcctcatggtggtggctggggtcaaggaggtggcacccacagtcagtggaacaagccgagtaagccaaaaaccaacatgaagcacatggctggtgctgcagcagctggggcagtggtggggggccttggcggctacatgctgggaagtgccatgagcaggcccatcatacatttcggcagtgactatgaggaccgttactatcgtgaaaacatgcaccgttaccccaaccaagtgtactacaggcccatggatgagtacagcaaccagaacaactttgtgcacgactgcgtcaatatcacaatcaagcagcacacggtcaccacaaccaccaagggggagaacttcaccgagaccgacgttaagatgatggagcgcgtggttgagcagatgtgtatcacccagtacgagagggaatctcaggcctattaccagagaggatcgagcatggtcctcttctcctctccacctgtgatcctcctgatctctttcctcatcttcctgatagtgggatgaggaaggtcttcctgttttcaccatctttctaatctttttccagcttgagggaggcggtatccacctgcagcccttttagtggtggtgtctcactctttcttctctctttgtcccggataggctaatcaatacccttggcactgatgggcactggaaaacatagagtagacctgagatgctggtcaagccccctttgattgagttcatcatgagccgttgctaatgccaggccagtaaaagtataacagcaaataaccattggttaatctggacttatttttggacttagtgcaacaggttgaggctaaaacaaatctcagaacagtctgaaatacctttgcctggatacctctggctccttcagcagctagagctcagtatactaatgccctatcttagtagagatttcatagctatttagagatattttccattttaagaaaacccgacaacatttctgccaggtttgttaggaggccacatgatacttattcaaaaaaatcctagagattcttagctcttgggatgcaggctcagcccgctggagcatgagctctgtgtgtaccgagaactggggtgatgttttacttttcacagtatgggctacacagcagctgttcaacaagagtaaatattgtcacaacactgaacctctggctagaggacatattcacagtgaacataactgtaacatatatgaaaggcttctgggacttgaaatcaaatgtttgggaatggtgcccttggaggcaacctcccattttagatgtttaaaggaccctatatgtggcattcctttctttaaactataggtaattaaggcagctgaaaagtaaattgccttctagacactgaaggcaaatctcctttgtccatttacctggaaaccagaatgattttgacatacaggagagctgcagttgtgaaagcaccatcatcatagaggatgatgtaattaaaaaatggtcagtgtgcaaagaaaagaactgcttgcatttctttatttctgtctcataattgtcaaaaaccagaattaggtcaagttcatagtttctgtaattggcttttgaatcaaagaatagggagacaatctaaaaaatatcttaggttggagatgacagaaatatgattgatttgaagtggaaaaagaaattctgttaatgttaattaaagtaaaattattccctgaattgtttgatattgtcacctagcagatatgtattacttttctgcaatgttattattggcttgcactttgtgagtattctatgtaaaaatatatatgtatataaaatatatattgcataggacagacttaggagttttgtttagagcagttaacatctgaagtgtctaatgcattaacttttgtaaggtactgaatacttaatatgtgggaaacccttttgcgtggtccttaggcttacaatgtgcactgaatcgtttcatgtaagaatccaaagtggacaccattaacaggtctttgaaatatgcatgtactttatattttctatatttgtaactttgcatgttcttgttttgttatataaaaaaattgtaaatgtttaatatctgactgaaattaaacgagcgaagatgagcaccaaaaaaaaaaaaaaaa

SEQ ID NO: 12066 - DNA, 1872 bp, Homo sapiens
ggacgcgtgggtccggacgcgtgggtcgacggacgcgtgggtcgacccacgcgtccgcggagccgggcggagctggcttgcggctcccggggccggctctccggccggagacatggcccgggggcccggcccgctaggcaggcctcgccccgatacggtcgccatgcccaagagaggaaagcgactcaagttccgggcccacgacgcctgctccggccgagtgaccgtggcggattacgccaactcggatccggcggtcgtgaggtctggacgagtcaagaaagccgtagccaacgctgttcagcaggaagtaaaatctctttgtggcttggaagcctctcaggttcctacagaggaagctctttctggggctggtgagccctgtgacatcatcgacagcagtgatgagatggatgcccaggaggaaagcatccatgagagaactgtctccagaaaaaagaaaagcaagagacacaaagaagaactggacggggctggaggagaagagtatcccatggatatttggctattgctggcctcctatatccgtcctgaggacattgtgaatttttccctgatttgtaagaatgcctggactgtcacttgcactgctgccttttggaccaggttgtaccgaaggcactacacgctggatgcttccctgcctttgcgtctgcgaccagagtcaatggagaagctgcgctgtctccgggcttgtgtgatccgatctctgtaccatatgtatgagccatttgctgctcgaatctccaagaatccagccattccagaaagcacccccagcacattaaagaattccaaatgcttacttttctggtgcagaaagattgttgggaacagacaggaaccaatgtgggaattcaacttcaagttcaaaaaacagtcccctaggttaaagagcaagtgtacaggaggattgcagcctcccgttcagtacgaagatgttcataccaatccagaccaggactgctgcctactgcaggtcaccaccctcaatttcatctttattccgattgtcatgggaatgatatttactctgtttactatcaatgtgagcacggacatgcggcatcatcgagtgagactggtgttccaagattcccctgtccatggtggtcggaaactgcgcagtgaacagggtgtgcaagtcatcctggacccagtgcacagcgttcggctctttgactggtggcatcctcagtacccattctccctgagagcgtagttactgcttcccatcccttgggggcagcctcgagtgtagtccattagtaatcagattccagtttggacagggtggctggattgtatatctcgttagtaatgtacatgctcttcaggttctagggctcctgttaggggagggagaaatgttgaatcaagagggaaaacaactactatgatttataaacatattttaatgtaaaaatttgcatttaaaaggagtggccctgttttctgtgttaaaaccccatttggtgctattgagtttgttctttattcttttatcccagtgaaaattgttgatcttgctgtagggaaaaattaaactctttgaatctccaaacaaggaagtttcagcattcccttatggatcagaggaaccttagaggcctgaaattgttgcttccagtttagctgcccctcaaattcaagtgaatattttcccttctccctttacccttctccagaaataaagcaggtgacagggttttcagaatcttaaaaaaaaaaaaaaaaaaaaaaaaaaaaaaaaaaaaaaaaaaaaaaaaaaaaaaaaaaaaaaaaaaaaaaaaaaaaaaaaaaaaaaaaaaaaaaaaaaaaaaaaaaaaaaaaaaaaaaaaaaaaaaaaaa

SEQ ID NO: 12067 - DNA, 2825 bp, Homo sapiens
ggttgccaggcaacggaggcacggcccggcccgcgttaaggaggagggcgcagaccgaaggacactgaaagagctgtaacaaccccactttcgattggttgaagagctctcagccttctcatgagccaatgagaagaggcacgcggatggcgtcagacgctatgcgactcctcccacccacgctctggcaatgcgattggagaccgcggaggcctacgtcggacccggaggccctgaatgccccatgcgcaccccacagctcgcgctcctgcaagtgttctttctggtgttccccgatggcgtccggcctcagccctcttcctccccatcaggggcagtgcccacgtctttggagctgcagcgagggacggatggcggaaccctccagtccccttcagaggcgactgcaactcgcccggccgtgcctggactccctacagtggtccctactctcgtgactccctcggcccctgggaataggactgtggacctcttcccaggtgagggaaaacgttgtgggggtggaaacttacttctgagatctaaaattctgtgagcaaagttgagctgccacaaagcaggagtggggctgtcggaagaaggagggtgagcacctgggagagtttggggatcttcatcccactcactctgtgtcgtactttcatagtcttaccgatctgtgtctgtgacttgactcctggagcctgcgatataaattgctgctgcgacagggactgctatcttctccatccgaggacagttttctccttctgccttccaggcagcgtaaggtcttcaagctgggtttgtgtagacaactctgttatcttcaggagtaattccccgtttccttcaagagttttcatggattctaatggaatcaggcagttttgtgtccatgtgaacaactcaaacttaaactatttccagaagcttcaaaaggtcaatgcaaccaacttccaggccctggctgcagagtttggaggcgaatcattcacttcaacattccaaactcaatcaccaccatctttttacagggctggggaccccattcttacttacttccccaagtggtctgtaataagcttgctgagacaacctgcaggagttggagctgggggactctgtgctgaaagcaatcctgcaggtttcctagagagtaaaagtacaacttgcactcgttttttcaagaacctggctagtagctgtaccttggattcagccctcaatgctgcctcttactataacttcacagtcttaaaggttccaagaagcatgactgatccacagaatatggaggtcacctatgagatagagaccaatgggacttttggaatccagaaagtttctgtcagtttgggacaaaccaacctgactgttgagccaggcgcttccttacagcaacacttcatccttcgcttcagggcttttcaacagagcacagctgcttctctcaccagtcctagaagtgggaatcctggctatatagttgggaagccactcttggctctgactgatgatataagttactcaatgaccctcttacagagccagggtaatggaagttgctctgttaaaagacatgaagtgcagtttggagtgaatgcaatatctggatgcaagctcaggttgaagaaggcagactgcagccacttgcagcaggagatttatcagactcttcatggaaggcccagaccagagtatgttgccatctttggtaatgctgacccagcccagaaaggagggtggaccaggatcctcaacaggcactgcagcatttcagctataaactgtacttcctgctgtctcataccagtttccctggagatccaggtattgtgggcatatgtaggtctcctgtccaacccgcaagctcatgtatcaggagttcgattcctataccagtgccagtctatacaggattctcagcaagttacagaagtatctttgacaactcttgtgaactttgtggacattacccagaagccacagcctccaaggggccaacccaaaatggactggaaatggccattcgacttctttcccttcaaagtggcattcagcagaggagtattctctcaaaaatgctcagtctctcccatccttatcctgtgcctcttactacttggagttctcaacctagagactatgtgaagaaaagaaaataatcagatttcagttttccctatgagaaactctgaggcagccacttatcttggctaaatagaacctcacctgctcatgaccagagagcatttaggataatagaggacctaactgaaggaatccttgtatatgaaaggagttattttagaaaagcaataaaaatattttattcatcatagctctctgctttgggctctgcaggccaccagatacacatgaggcccctacttctcaagctgggaaggccaagagccttccttcagcctttctggttatgttacacctagctgaatgtttacaaggtctggatccatcagccctcaggcacagttgggccaagcagaaagagagaaacacttctgctgtcaccttgaatgaactcaggaatagcttccctctggactgtagaggagctaactgtttggaacagaaaactgctggctgttgattttgtctggttcctttgccaacatctgggcacaccctttgcccagacacgagtggggaaagcagttctttctcctcagtttccaaagtaaatggggaatcccagctttcttttctactagcaaatgaccctaccatttatttctgcctttttcttccgttcattgtgaggaaaaataaaactggttgagaaaaaaaaaaaaaaaaaaaaa

SEQ ID NO: 12068 - DNA, 7364 bp, Homo sapiens
gcggcggcggctgcggcggtggggccgggcgaggtccgctgcggtcccggcggctccgtggctgctccgctctgagcgcctggcgcgccccgcgccctccctgccggggccgctgggccggggatgcacgcggggcccgggagccatggtccgcttcggggacgagctgggcggccgctatggaggccccggcggcggagagcgggcccggggcggcggggccggcggggcggggggcccgggtcccggggggctgcagcccggccagcgggtcctctacaagcaatcgatcgcgcagcgcgcgcggaccatggcgctgtacaaccccatcccggtcaagcagaactgcttcaccgtcaaccgctcgctcttcgtcttcagcgaggacaacgtcgtccgcaaatacgcgaagcgcatcaccgagtggcctccattcgagtatatgatcctggccaccatcatcgccaactgcatcgtgctggccctggagcagcacctccctgatggggacaaaacgcccatgtccgagcggctggacgacacggagccctatttcatcgggatcttttgcttcgaggcagggatcaaaatcatcgctctgggctttgtcttccacaagggctcttacctgcggaacggctggaacgtcatggacttcgtggtcgtcctcacagggatccttgccacggctggaactgacttcgacctgcgaacactgagggctgtgcgtgtgctgaggcccctgaagctggtgtctgggattccaagtttgcaggtggtgctcaagtccatcatgaaggccatggttccactcctgcagattgggctgcttctcttctttgccatcctcatgtttgccatcattggcctggagttctacatgggcaagttccacaaggcctgtttccccaacagcacagatgcggagcccgtgggtgacttcccctgtggcaaggaggccccagcccggctgtgcgagggcgacactgagtgccgggagtactggccaggacccaactttggcatcaccaactttgacaatatcctgtttgccatcttgacggtgttccagtgcatcaccatggagggctggactgacatcctctataatacaaacgatgcggccggcaacacctggaactggctctacttcatccctctcatcatcatcggctccttcttcatgctcaacctggtgctgggcgtgctctcgggggagtttgccaaggagcgagagagggtggagaaccgccgcgccttcctgaagctgcgccggcagcagcagatcgagcgagagctcaacgggtacctggagtggatcttcaaggcggaggaagtcatgctggccgaggaggacaggaatgcagaggagaagtcccctttggacgtgctgaagagagcggccaccaagaagagcagaaatgacctgatccacgcagaggagggagaggaccggtttgcagatctctgtgctgttggatcccccttcgcccgcgccagcctcaagagcgggaagacagagagctcgtcatacttccggaggaaggagaagatgttccggttttttatccggcgcatggtgaaggctcagagcttctactgggtggtgctgtgcgtggtggccctgaacacactgtgtgtggccatggtgcattacaaccagccgcggcggcttaccacgaccctgtattttgcagagtttgttttcctgggtctcttcctcacagagatgtccctgaagatgtatggcctggggcccagaagctacttccggtcctccttcaactgcttcgactttggggtcatcgtggggagcgtctttgaagtggtctgggcggccatcaagccgggaagctcctttgggatcagtgtgctgcgggccctccgcctgctgaggatcttcaaagtcacgaagtactggagctccctgcggaacctggtggtgtccctgctgaactccatgaagtccatcatcagcctgctcttcttgctcttcctgttcattgtggtcttcgccctgctggggatgcagctgtttgggggacagttcaacttccaggatgagactcccacaaccaacttcgacaccttccctgccgccatcctcactgtcttccagatcctgacgggagaggactggaatgcagtgatgtatcacgggatcgaatcgcaaggcggcgtcagcaaaggcatgttctcgtccttttacttcattgtcctgacactgttcggaaactacactctgctgaatgtctttctggccatcgctgtggacaacctggccaacgcccaagagctgaccaaggatgaagaggagatggaagaagcagccaatcagaagcttgctctgcaaaaggccaaagaagtggctgaagtcagccccatgtctgccgcgaacatctccatcgccgccaggcagcagaactcggccaaggcgcgctcggtgtgggagcagcgggccagccagctacggctgcagaacctgcgggccagctgcgaggcgctgtacagcgagatggaccccgaggagcggctgcgcttcgccactacgcgccacctgcggcccgacatgaagacgcacctggaccggccgctggtggtggagctgggccgcgacggcgcgcgggggcccgtgggaggcaaagcccgacctgaggctgcggaggcccccgagggcgtcgaccctccgcgcaggcaccaccggcaccgcgacaaggacaagacccccgcggcgggggaccaggaccgagcagaggccccgaaggcggagagcggggagcccggtgcccgggaggagcggccgcggccgcaccgcagccacagcaaggaggccgcggggcccccggaggcgcggagcgagcgcggccgaggcccaggccccgagggcggccggcggcaccaccggcgcggctccccggaggaggcggccgagcgggagccccgacgccaccgcgcgcaccggcaccaggatccgagcaaggagtgcgccggcgccaagggcgagcggcgcgcgcggcaccgcggcggcccccgagcggggccccgggaggcggagagcggggaggagccggcgcggcggcaccgggcccggcacaaggcgcagcctgctcacgaggctgtggagaaggagaccacggagaaggaggccacggagaaggaggctgagatagtggaagccgacaaggaaaaggagctccggaaccaccagccccgggagccacactgtgacctggagaccagtgggactgtgactgtgggtcccatgcacacactgcccagcacctgtctccagaaggtggaggaacagccagaggatgcagacaatcagcggaacgtcactcgcatgggcagtcagcccccagacccgaacactattgtacatatcccagtgatgctgacgggccctcttggggaagccacggtcgttcccagtggtaacgtggacctggaaagccaagcagaggggaagaaggaggtggaagcggatgacgtgatgaggagcggcccccggcctatcgtcccatacagctccatgttctgtttaagccccaccaacctgctccgccgcttctgccactacatcgtgaccatgaggtacttcgaggtggtcattctcgtggtcatcgccttgagcagcatcgccctggctgctgaggacccagtgcgcacagactcgcccaggaacaacgctctgaaatacctggattacattttcactggtgtctttacctttgagatggtgataaagatgatcgacttgggactgctgcttcaccctggagcctatttccgggacttgtggaacattctggacttcattgtggtcagtggcgccctggtggcgtttgctttctcaggatccaaagggaaagacatcaataccatcaagtctctgagagtccttcgtgtcctgcggcccctcaagaccatcaaacggctgcccaagctcaaggctgtgtttgactgtgtggtgaactccctgaagaatgtcctcaacatcttgattgtctacatgctcttcatgttcatatttgccgtcattgcggtgcagctcttcaaagggaagtttttctactgcacagatgaatccaaggagctggagagggactgcaggggtcagtatttggattatgagaaggaggaagtggaagctcagcccaggcagtggaagaaatacgactttcactacgacaatgtgctctgggctctgctgacgctgttcacagtgtccacgggagaaggctggcccatggtgctgaaacactccgtggatgccacctatgaggagcagggtccaagccctgggtaccgcatggagctgtccatcttctacgtggtctactttgtggtctttcccttcttcttcgtcaacatctttgtggctttgatcatcatcaccttccaggagcagggggacaaggtgatgtctgaatgcagcctggagaagaacgagagggcttgcattgacttcgccatcagcgccaaacccctgacacggtacatgccccaaaaccggcagtcgttccagtataagacgtggacatttgtggtctccccgccctttgaatacttcatcatggccatgatagccctcaacactgtggtgctgatgatgaagttctatgatgcaccctatgagtacgagctgatgctgaaatgcctgaacatcgtgttcacatccatgttctccatggaatgcgtgctgaagatcatcgcctttggggtgctgaactatttcagagatgcctggaatgtctttgactttgtcactgtgttgggaagtattactgatattttagtaacagagattgcggaaacgaacaatttcatcaacctcagcttcctccgcctctttcgagctgcgcggctgatcaagctgctccgccagggctacaccatccgcatcctgctgtggacctttgtccagtccttcaaggccctgccctacgtgtgtctgctcattgccatgctgttcttcatctacgccatcatcggcatgcaggtgtttgggaatattgccctggatgatgacaccagcatcaaccgccacaacaacttccggacgtttttgcaagccctgatgctgctgttcaggagcgccacgggggaggcctggcacgagatcatgctgtcctgcctgagcaaccaggcctgtgatgagcaggccaatgccaccgagtgtggaagtgactttgcctacttctacttcgtctccttcatcttcctgtgctcctttctgatgttgaacctctttgtggctgtgatcatggacaattttgagtacctcacgcgggactcttccatcctaggtcctcaccacttggatgagttcatccgggtctgggctgaatacgacccggctgcgtgtgggcgcatcagttacaatgacatgtttgagatgctgaaacacatgtccccgcctctggggctggggaagaaatgccctgctcgagttgcttacaagcgcctggttcgcatgaacatgcccatctccaacgaggacatgactgttcacttcacgtccacgctgatggccctcatccggacggcactggagatcaagctggccccagctgggacaaagcagcatcagtgtgacgcggagttgaggaaggagatttccgttgtgtgggccaatctgccccagaagactttggacttgctggtaccaccccataagcctgatgagatgacagtggggaaggtttatgcagctctgatgatatttgacttctacaagcagaacaaaaccaccagagaccagatgcagcaggctcctggaggcctctcccagatgggtcctgtgtccctgttccaccctctgaaggccaccctggagcagacacagccggctgtgctccgaggagcccgggttttccttcgacagaagagttccacctccctcagcaatggcggggccatacaaaaccaagagagtggcatcaaagagtctgtctcctggggcactcaaaggacccaggatgcaccccatgaggccaggccacccctggagcgtggccactccacagagatccctgtggggcggtcaggagcactggctgtggacgttcagatgcagagcataacccggaggggccctgatggggagccccagcctgggctggagagccagggtcgagcggcctccatgccccgccttgcggccgagactcagcccgtcacagatgccagccccatgaagcgctccatctccacgctggcccagcggccccgtgggactcatctttgcagcaccaccccggaccgcccaccccctagccaggcgtcgtcgcaccaccaccaccaccgctgccaccgccgcagggacaggaagcagaggtccctggagaaggggcccagcctgtctgccgatatggatggcgcaccaagcagtgctgtggggccggggctgcccccgggagaggggcctacaggctgccggcgggaacgagagcgccggcaggagcggggccggtcccaggagcggaggcagccctcatcctcctcctcggagaagcagcgcttctactcctgcgaccgctttgggggccgtgagcccccgaagcccaagccctccctcagcagccacccaacgtcgccaacagctggccaggagccgggaccccacccacagggcagtggttccgtgaatgggagccccttgctgtcaacatctggtgctagcacccccggccgcggtgggcggaggcagctcccccagacgcccctgactccccgccccagcatcacctacaagacggccaactcctcacccatccacttcgccggggctcagaccagcctccctgccttctccccaggccggctcagccgtgggctttccgaacacaacgccctgctgcagagagaccccctcagccagcccctggcccctggctctcgaattggctctgacccttacctggggcagcgtctggacagtgaggcctctgtccacgccctgcctgaggacacgctcactttcgaggaggctgtggccaccaactcgggccgctcctccaggacttcctacgtgtcctccctgacctcccagtctcaccctctccgccgcgtgcccaacggttaccactgcaccctgggactcagctcgggtggccgagcacggcacagctaccaccaccctgaccaagaccactggtgctagctgcaccgtgaccgctcagacgcctgcatgcagcaggcgtgtgttccagtggatgagttttatcatccacacggggcagtcggccctcgggggaggccttgcccaccttggtgaggctcctgtggcccctccctccccctcctcccctcttttactctagacgacgaataaagccctgttgcttgagtgtacgtaccgc

SEQ ID NO: 12069 - DNA, 9112 bp, Homo sapiens
gaagagttgattgagaagtgcctcttggttaaggattaaccacagggaaaaatccagcagaaacagaagaactgtgggtttcttaccccagccctcaaggaagctatgccgtgaaaggggtactgatacactgacatacagcaagttggacggggcatcagttcttcatttgtggagtggagaaaagaagaggaaatctctcatttggggcatttgaaggatggcttccctgtttcatcagcttcagatcctggtctggaaaaattggctaggtgtaaaaaggcagccgctttggacacttgtcttgatcttatggccagtcattattttcataattttggctattactcggaccaaatttcctccaactgcaaaaccaacttgttacctcgcacctcgaaaccttcctagtactggattctttccattcctgcagaccctactctgtgacacagactctaaatgcaaagacacaccctatggcccacaagatctgcttcgtaggaaaggaattgatgatgcactatttaaagacagtgagattctgagaaagtcatccaacctggataaggacagcagtttatcattccagagcacccaagttccagaaagaaggcatgcatcactagccacagtatttcccagtccaagttctgatttggaaatccccggaacatatactttcaatggcagtcaagtgctcgcacgaattcttggcttggaaaagctgttaaagcaaaattcaacttcagaagatatacgaagagaactatgtgacagctattcaggatacattgtggatgatgccttctcttggacctttctaggaagaaatgtttttaacaaattttgcctttctaacatgacccttttagagtcttctctccaagaactaaacaaacagttctcccagctatccagtgaccccaacaatcagaagatagtgtttcaggaaatagtcagaatgctgtctttcttctcacaagtgcaagagcagaaagctgtgtggcagcttctgtctagttttccaaatgtgtttcagaatgacacatcactaagcaatctatttgatgttcttcgaaaggcaaacagtgtgctgctggttgtgcagaaggtttatccacgttttgcaactaacgaaggtttcagaaccctccagaagtctgttaaacatctgctgtacactctggactccccagctcaaggtgactccgataatataacgcatgtgtggaatgaggatgatggacagaccttatctccaagcagtctggctgcacagctcctaattctggaaaactttgaagatgccctcttaaatatatcagcaaatagtccttatattccttacttggcatgtgtgagaaatgtgactgacagtttggccagaggttcaccagaaaatctaagactcctgcagtccacaatacgatttaaaaaatcttttcttcgcaatggttcctatgaagattactttcctccagttcctgaagtcctaaaatcaaaactgtctcaacttcgaaacttgaccgaacttctttgtgaatctgaaactttcagtttgatagagaagtcatgccagctctctgatatgagctttgggagcctgtgtgaagaaagtgagtttgatctgcaactcctcgaagcggcagagctgggcaccgaaatagcagccagcttactgtaccatgacaatgtcatatctaaaaaagtgagagatttgctgactggagatccaagcaaaattaatttaaatatggatcagtttctagaacaggcactgcaaatgaattacttggaaaatatcactcagttaataccgatcatagaagccatgctgcatgtcaataacagtgcagatgcttctgaaaagccaggtcagttactagaaatgtttaaaaatgttgaagagctgaaagaagatttaaggagaacaacaggaatgtccaacaggactattgacaagttgctggccattcccatccctgataatagagctgagattatttctcaggtgttctggctgcattcctgtgatactaatatcaccactcccaaactagaagatgcaatgaaagaattctgcaacctgtctctttcagagagatcccggcagtcttacctcatcggactcacccttctgcactacttaaacatttacaacttcacatacaaggtgtttttcccgaggaaagatcaaaagccagtagaaaagatgatggagctcttcataagactaaaagagattctcaatcagatggcttctggcacacatccgctgctagacaaaatgagatccctgaagcaaatgcatctgcccagaagtgttccattaacacaggcaatgtacagaagcaaccgaatgaacacaccacaaggatcatttagcaccatctcccaagcattatgttctcaaggaattaccactgaatatttaactgccatgctgccctcttcccagaggccaaaaggcaaccacaccaaggattttttgacttataaattaactaaagagcaaattgcttcaaaatatggaattcccataaattccacaccattttgcttctccctttataaagacatcattaacatgcccgctggacctgtgatttgggctttcttgaaacctatgttgttgggaagaattttgtatgcaccatataacccagtcacaaaggcaataatggaaaagtccaatgtaactctgagacagctggcggaattaagagaaaaatctcaagagtggatggataagtcgccacttttcatgaattccttccatctgttaaaccaggcaattccaatgctccagaatactctaaggaacccttttgtgcaagtttttgtaaagttctccgtgggactcgatgctgttgaactattgaaacagatagatgaactcgatattctaagactgaaattagagaacaacattgacatcatcgatcagcttaacacactatcttccctgacagtaaatatttcctcttgtgtattatatgaccgtattcaggcagcaaaaaccatagatgaaatggagagagaggctaaaaggctctacaaaagcaacgaactctttggaagtgttatttttaagcttccttctaacagaagctggcacagaggctatgactctggaaatgtctttcttcctcctgtcataaaatataccatccggatgagtctcaagaccgcacagaccacaagaagcctaagaaccaagatttgggctccagggccacacaattctccatcacacaaccagatctatggcagggcttttatttatttacaggatagtattgaaagagcaatcattgaattgcaaactggaaggaactcccaggaaatagcagtccaggttcaagcaattccttatccctgcttcatgaaagacaacttcctaaccagtgtctcttattctcttccaattgtgcttatggttgcctgggttgtatttatagctgcctttgtaaaaaagcttgtctatgagaaagacctccggcttcatgagtacatgaagatgatgggtgtgaactcctgcagccatttctttgcctggcttatagagagtgttggatttttactggttaccatcgtgatcctcatcattatactcaagtttggcaatattcttcctaaaacaaatgggttcattttgttcctgtatttttcggactacagcttctcggttattgccatgagctatcttatcagtgtcttcttcaacaacaccaacattgcagctctgatcggaagcctcatctacatcattgccttctttccatttattgttctggttacagtggagaatgagttgagctatgtattgaaagtgttcatgagcctgctgtccccaacagcattcagctatgcaagccaatacattgcacgatacgaagaacagggcattggtcttcagtgggaaaatatgtacacctccccggttcaggatgacaccacctcatttggctggctgtgctgtctaatcctagctgactctttcatttatttccttattgcttggtatgtcaggaatgtcttcccagggacatacggtatggcagctccctggtattttccaattcttccttcctattggaaggagcgatttgggtgtgcagaggtgaagcctgagaagagcaatggcctcatgtttactaacatcatgatgcagaacaccaacccatctgccagtcctgaatacatgttttcctctaacatcgagcctgaacctaaagatctcacagtcggggttgccctgcatggggtcacaaagatctatggctcaaaagttgctgttgataacctcaatctgaacttttatgaagggcatattacttcattgctggggcccaatggagctgggaaaactactaccatttccatgttaactgggctgtttggggcctcagcaggcaccatttttgtatatggaaaagatatcaaaacagacctacacacggtacggaagaacatgggagtctgtatgcagcacgacgtcttgttcagttacctcactactaaggagcaccttctcctatatggttccatcaaagttcctcactggactaaaaagcagctccacgaggaagtaaaaaggactttaaaagatactggactatatagccatcgtcataagagagttggaacactgtcaggaggcatgaagaggaagttatctatatccatagctctcattggtggatcaagggtagtaattttggatgaaccatctactggagttgacccatgttctcgccgaagtatatgggatgttatatccaagaacaaaactgccagaacaatcattctgtcaacgcaccacttggacgaggctgaagtgctgagtgaccgcatcgccttcctggagcagggtgggcttaggtgctgtgggtccccattttacctcaaggaagcctttggcgatgggtatcacctcacgcttaccaagaagaagagtccaaatttaaatgcaaatgcagtatgtgacaccatggccgtgacagcaatgatccaatcacatctccccgaagcctacctcaaggaggatattgggggagagcttgtttatgtacttcctccattcagcaccaaagtctcaggggcctacctgtcactcctacgggcactcgacaatggcatgggtgacctcaacatcgggtgctacggcatttcagataccaccgtggaggaggtctttctgaacttgaccaaagagtcacaaaaaaatagtgctatgagtcttgagcacttaacacaaaagaaaattgggaattccaatgccaatggcatctcaactcctgacgatttatctgtgagcagcagcaatttcacagacagagatgacaaaatcctgacaagaggagagaggctggatggctttggactgttgctgaagaagatcatggctatactcatcaagaggttccaccacacccgcaggaactggaaaggtctcattgctcaggttatcctccccatcgtctttgttaccactgccatgggccttggcacactgagaaattccagcaacagttatccagagattcagatctccccctctctttatggtacctccgaacagacagccttctatgctaattatcacccgagcacggaagcacttgtctcagcaatgtgggacttccctggaattgacaacatgtgtctgaacaccagtgatctacagtgtttaaacaaagacagtctggaaaaatggaacaccagtggagaacccatcactaattttggtgtttgctcctgctcagaaaatgtccaggaatgtcctaaatttaactattccccaccgcacagaagaacttactcatcccaggtaatttataacctcactgggcaacgagtggaaaattatcttatatcaactgcaaatgagtttgtccaaaaaagatatggaggttggagttttgggctgcctttgacaaaagaccttcgttttgatataacaggagtccctgccaatagaacacttgccaaggtatggtatgatccagaaggctatcactcccttccagcttacctcaacagcctgaataatttccttctgcgagttaacatgtcaaaatacgatgctgcccgacatggcatcatcatgtatagccatccttatccaggagtgcaagaccaagaacaagccacaatcagcagtttaatcgatattttagtggcactgtctatcttgatgggctactctgtcaccaccgccagctttgtcacctatgttgtaagggaacatcaaaccaaagccaaacagttgcagcacatttcaggcattggcgtgacatgctactgggtaacaaacttcatttatgacatggttttctacttggtgcctgtagcgttttcaattggtatcattgcgattttcaaattacctgcattctacagtgaaaacaacctaggcgctgtatctctcctacttctcctgtttgggtatgcaacattttcctggatgtacttgctggctgggctcttccatgaaacaggaatggccttcatcacttacgtctgtgtcaacttgttttttggcattaattccattgtttccctgtcagtggtatactttctttccaaggaaaagcctaatgatccgactttagaacttatttctgaaaccctcaagcgcattttcctgattttcccacaattctgttttggctacggtttgattgaactttctcaacaacagtcggtcctagacttcttaaaagcatatggagtggaatacccaaatgaaacctttgagatgaataaactaggtgcaatgtttgtggctttggtttctcagggcaccatgtttttttccttgcgactcttaatcaacgaatccctgataaagaaactcaggcttttcttcagaaaatttaattcttcacatgtaagggagacaatagatgaggatgaagatgtgcgggctgagagattaagagttgagagtggtgcagctgaatttgacttggtccaactttattgtctcacaaagacctaccaacttatccacaaaaagattatagctgtaaacaacatcagcattgggatacctgctggagagtgttttgggcttcttggagtgaatggagcaggaaagaccactatattcaagatgctgacaggagacatcattccttcaagtggaaacattctgatcagaaataagaccggatctctgggtcacgttgattctcacagctcattagttggctactgtcctcaggaagatgccttagatgacctggtaactgtggaagaacatttgtatttctatgccagggtacatggaattccagaaaaggatattaaagaaactgttcataaactccttaggagacttcacctgatgcccttcaaggacagagctacctctatgtgcagttatggcacaaaaagaaaattatccactgcactggccttgatagggaaaccttccattctactgctggatgagccgagctctggcatggatccgaagtcgaaacggcacctctggaagatcatttcagaagaagtacagaacaaatgttccgtcatcctcacatctcacagcatggaagaatgtgaagctctctgtaccaggttggccattatggtgaatggaaagtttcaatgtattggatctttgcagcacataaagagcaggtttggacgaggatttactgtcaaagttcacttgaagaataacaaagtgaccatggagaccctcacaaagttcatgcagctgcactttccaaaaacatacttaaaagatcagcacctcagcatgctagagtatcatgtaccagtcacagcaggaggagtcgcaaacatttttgatctgctggaaaccaacaagactgctttaaatattacaaatttcttagtgagtcagaccactctggaagaggttttcatcaactttgccaaagaccagaagtcctatgaaactgctgataccagcagccaaggttccactataagtgttgactcacaagatgaccagatggagtcttaacacttccagcaaactcaatctcagcgtgtgaccaatggcttcattttgaagaaaagccacagaagatacacttccgcaagatatcttcattttaaagtaaagtaatatactgtatggaaagttacaactgtgttagactaacaagtaattataaaaggaaatttttccttctaaggtcagtgagtgttgttgctactgaaatgaattcctgtatactcaacactgtgagcatgctaatgtatatgctggtgattcttatgcaaaggtgaagccacctcaagatgaatatcttaatttattactttcaataaaaagacagtttaaaaggcatggattttggtagttgaaatataagagtggagaagaaaagtcagatggtttgtggcaggtgccaccgggcaagcagacaacataatttatttccagaaaacaacagaatgaacatcatcatgaatacatgaatcggctgtgatgtgtgaactgctaagggccaaatgaacgtttgcagagcagtgggcacaatgtttacaatgtatgtgtatgtcactttcggtacctgtgaatgcatggggacgtgctgaacccgaaaaaaagtgcctttccataaggactgcaatagagagggcaatttaccctggtggtacacggaacctagattcactcctgccatgccttgccaatagtaagctgcagggtggaacaagaaatcacttgctctggggggaagggaggggggaatgggtgtgtcagctgggtagatacaaaccctgaaaagagaatccatgtgctactggcaggcaacattttttaaagctctttcagaaaccctcatatttggggtttcttttcaggaaacattcctgtggagggaaaacgaatatgaagataattttcagctaattatctgggtgacccagaatcgtgtatatggctataggatagacttcttaataatggcaagtgacgtggccctggggaaaggtgctttatgtaccgtgtgtgcgtgtatgtgtgtgtatctatacaagtttgtcagctttggcatgactgtttgtctcgaaaaccaataaactcaaagtttagaaaaactcaaaaaaaaaaaaa

SEQ ID NO: 12070 - DNA, 8097 bp, Homo sapiens
atttcctataaatatcacaaatatttccaacaaaagagcatagatgtcttttatacaattcttttgagaatgattctgcagatttctgcattttctcctcattaatttgacctgggatggttttcactgaggaaaaaaatctttaagcaaacatgttaaatgtttacctatataaaaattattacttcaggtgactccgataatataacgcatgtgtggaatgaggatgatggacagaccttatctccaagcagtctggctgcacagctcctaattctggaaaactttgaagatgccctcttaaatatatcagcaaatagtccttatattccttacttggcatgtgtgagaaatgtgactgacagtttggccagaggttcaccagaaaatctaagactcctgcagtccacaatacgatttaaaaaatcttttcttcgcaatggttcctatgaagattactttcctccagttcctgaagtcctaaaatcaaaactgtctcaacttcgaaacttgaccgaacttctttgtgaatctgaaactttcagtttgatagagaagtcatgccagctctctgatatgagctttgggagcctgtgtgaagaaagtgagtttgatctgcaactcctcgaagcggcagagctgggcaccgaaatagcagccagcttactgtaccatgacaatgtcatatctaaaaaagtgagagatttgctgactggagatccaagcaaaattaatttaaatatggatcagtttctagaacaggcactgcaaatgaattacttggaaaatatcactcagttaataccgatcatagaagccatgctgcatgtcaataacagtgcagatgcttctgaaaagccaggtcagttactagaaatgtttaaaaatgttgaagagctgaaagaagatttaaggagaacaacaggaatgtccaacaggactattgacaagttgctggccattcccatccctgataatagagctgagattatttctcaggtgttctggctgcattcctgtgatactaatatcaccactcccaaactagaagatgcaatgaaagaattctgcaacctgtctctttcagagagatcccggcagtcttacctcatcggactcacccttctgcactacttaaacatttacaacttcacatacaaggtgtttttcccgaggaaagatcaaaagccagtagaaaagatgatggagctcttcataagactaaaagagattctcaatcagatggcttctggcacacatccgctgctagacaaaatgagatccctgaagcaaatgcatctgcccagaagtgttccattaacacaggcaatgtacagaagcaaccgaatgaacacaccacaaggatcatttagcaccatctcccaagcattatgttctcaaggaattaccactgaatatttaactgccatgctgccctcttcccagaggccaaaaggcaaccacaccaaggattttttgacttataaattaactaaagagcaaattgcttcaaaatatggaattcccataaattccacaccattttgcttctccctttataaagacatcattaacatgcccgctggacctgtgatttgggctttcttgaaacctatgttgttgggaagaattttgtatgcaccatataacccagtcacaaaggcaataatggaaaagtccaatgtaactctgagacagctggcggaattaagagaaaaatctcaagagtggatggataagtcgccacttttcatgaattccttccatctgttaaaccaggcaattccaatgctccagaatactctaaggaacccttttgtgcaagtttttgtaaagttctccgtgggactcgatgctgttgaactattgaaacagatagatgaactcgatattctaagactgaaattagagaacaacattgacatcatcgatcagcttaacacactatcttccctgacagtaaatatttcctcttgtgtattatatgaccgtattcaggcagcaaaaaccatagatgaaatggagagagaggctaaaaggctctacaaaagcaacgaactctttggaagtgttatttttaagcttccttctaacagaagctggcacagaggctatgactctggaaatgtctttcttcctcctgtcataaaatataccatccggatgagtctcaagaccgcacagaccacaagaagcctaagaaccaagatttgggctccagggccacacaattctccatcacacaaccagatctatggcagggcttttatttatttacaggatagtattgaaagagcaatcattgaattgcaaactggaaggaactcccaggaaatagcagtccaggttcaagcaattccttatccctgcttcatgaaagacaacttcctaaccagtgtctcttattctcttccaattgtgcttatggttgcctgggttgtatttatagctgcctttgtaaaaaagcttgtctatgagaaagacctccggcttcatgagtacatgaagatgatgggtgtgaactcctgcagccatttctttgcctggcttatagagagtgttggatttttactggttaccatcgtgatcctcatcattatactcaagtttggcaatattcttcctaaaacaaatgggttcattttgttcctgtatttttcggactacagcttctcggttattgccatgagctatcttatcagtgtcttcttcaacaacaccaacattgcagctctgatcggaagcctcatctacatcattgccttctttccatttattgttctggttacagtggagaatgagttgagctatgtattgaaagtgttcatgagcctgctgtccccaacagcattcagctatgcaagccaatacattgcacgatacgaagaacagggcattggtcttcagtgggaaaatatgtacacctccccggttcaggatgacaccacctcatttggctggctgtgctgtctaatcctagctgactctttcatttatttccttattgcttggtatgtcaggaatgtcttcccagggacatacggtatggcagctccctggtattttccaattcttccttcctattggaaggagcgatttgggtgtgcagaggtgaagcctgagaagagcaatggcctcatgtttactaacatcatgatgcagaacaccaacccatctgccagtcctgaatacatgttttcctctaacatcgagcctgaacctaaagatctcacagtcggggttgccctgcatggggtcacaaagatctatggctcaaaagttgctgttgataacctcaatctgaacttttatgaagggcatattacttcattgctggggcccaatggagctgggaaaactactaccatttccatgttaactgggctgtttggggcctcagcaggcaccatttttgtatatggaaaagatatcaaaacagacctacacacggtacggaagaacatgggagtctgtatgcagcacgacgtcttgttcagttacctcactactaaggagcaccttctcctatatggttccatcaaagttcctcactggactaaaaagcagctccacgaggaagtaaaaaggactttaaaagatactggactatatagccatcgtcataagagagttggaacactgtcaggaggcatgaagaggaagttatctatatccatagctctcattggtggatcaagggtagtaattttggatgaaccatctactggagttgacccatgttctcgccgaagtatatgggatgttatatccaagaacaaaactgccagaacaatcattctgtcaacgcaccacttggacgaggctgaagtgctgagtgaccgcatcgccttcctggagcagggtgggcttaggtgctgtgggtccccattttacctcaaggaagcctttggcgatgggtatcacctcacgcttaccaagaagaagagtccaaatttaaatgcaaatgcagtatgtgacaccatggccgtgacagcaatgatccaatcacatctccccgaagcctacctcaaggaggatattgggggagagcttgtttatgtacttcctccattcagcaccaaagtctcaggggcctacctgtcactcctacgggcactcgacaatggcatgggtgacctcaacatcgggtgctacggcatttcagataccaccgtggaggaggtctttctgaacttgaccaaagagtcacaaaaaaatagtgctatgagtcttgagcacttaacacaaaagaaaattgggaattccaatgccaatggcatctcaactcctgacgatttatctgtgagcagcagcaatttcacagacagagatgacaaaatcctgacaagaggagagaggctggatggctttggactgttgctgaagaagatcatggctatactcatcaagaggttccaccacacccgcaggaactggaaaggtctcattgctcaggttatcctccccatcgtctttgttaccactgccatgggccttggcacactgagaaattccagcaacagttatccagagattcagatctccccctctctttatggtacctccgaacagacagccttctatgctaattatcacccgagcacggaagcacttgtctcagcaatgtgggacttccctggaattgacaacatgtgtctgaacaccagtgatctacagtgtttaaacaaagacagtctggaaaaatggaacaccagtggagaacccatcactaattttggtgtttgctcctgctcagaaaatgtccaggaatgtcctaaatttaactattccccaccgcacagaagaacttactcatcccaggtaatttataacctcactgggcaacgagtggaaaattatcttatatcaactgcaaatgagtttgtccaaaaaagatatggaggttggagttttgggctgcctttgacaaaagaccttcgttttgatataacaggagtccctgccaatagaacacttgccaaggtatggtatgatccagaaggctatcactcccttccagcttacctcaacagcctgaataatttccttctgcgagttaacatgtcaaaatacgatgctgcccgacatggcatcatcatgtatagccatccttatccaggagtgcaagaccaagaacaagccacaatcagcagtttaatcgatattttagtggcactgtctatcttgatgggctactctgtcaccaccgccagctttgtcacctatgttgtaagggaacatcaaaccaaagccaaacagttgcagcacatttcaggcattggcgtgacatgctactgggtaacaaacttcatttatgacatggttttctacttggtgcctgtagcgttttcaattggtatcattgcgattttcaaattacctgcattctacagtgaaaacaacctaggcgctgtatctctcctacttctcctgtttgggtatgcaacattttcctggatgtacttgctggctgggctcttccatgaaacaggaatggccttcatcacttacgtctgtgtcaacttgttttttggcattaattccattgtttccctgtcagtggtatactttctttccaaggaaaagcctaatgatccgactttagaacttatttctgaaaccctcaagcgcattttcctgattttcccacaattctgttttggctacggtttgattgaactttctcaacaacagtcggtcctagacttcttaaaagcatatggagtggaatacccaaatgaaacctttgagatgaataaactaggtgcaatgtttgtggctttggtttctcagggcaccatgtttttttccttgcgactcttaatcaacgaatccctgataaagaaactcaggcttttcttcagaaaatttaattcttcacatgtaagggagacaatagatgaggatgaagatgtgcgggctgagagattaagagttgagagtggtgcagctgaatttgacttggtccaactttattgtctcacaaagacctaccaacttatccacaaaaagattatagctgtaaacaacatcagcattgggatacctgctggagagtgttttgggcttcttggagtgaatggagcaggaaagaccactatattcaagatgctgacaggagacatcattccttcaagtggaaacattctgatcagaaataagaccggatctctgggtcacgttgattctcacagctcattagttggctactgtcctcaggaagatgccttagatgacctggtaactgtggaagaacatttgtatttctatgccagggtacatggaattccagaaaaggatattaaagaaactgttcataaactccttaggagacttcacctgatgcccttcaaggacagagctacctctatgtgcagttatggcacaaaaagaaaattatccactgcactggccttgatagggaaaccttccattctactgctggatgagccgagctctggcatggatccgaagtcgaaacggcacctctggaagatcatttcagaagaagtacagaacaaatgttccgtcatcctcacatctcacagcatggaagaatgtgaagctctctgtaccaggttggccattatggtgaatggaaagtttcaatgtattggatctttgcagcacataaagagcaggtttggacgaggatttactgtcaaagttcacttgaagaataacaaagtgaccatggagaccctcacaaagttcatgcagctgcactttccaaaaacatacttaaaagatcagcacctcagcatgctagagtatcatgtaccagtcacagcaggaggagtcgcaaacatttttgatctgctggaaaccaacaagactgctttaaatattacaaatttcttagtgagtcagaccactctggaagaggttttcatcaactttgccaaagaccagaagtcctatgaaactgctgataccagcagccaaggttccactataagtgttgactcacaagatgaccagatggagtcttaacacttccagcaaactcaatctcagcgtgtgaccaatggcttcattttgaagaaaagccacagaagatacacttccgcaagatatcttcattttaaagtaaagtaatatactgtatggaaagttacaactgtgttagactaacaagtaattataaaaggaaatttttccttctaaggtcagtgagtgttgttgctactgaaatgaattcctgtatactcaacactgtgagcatgctaatgtatatgctggtgattcttatgcaaaggtgaagccacctcaagatgaatatcttaatttattactttcaataaaaagacagtttaaaaggcatggattttggtagttgaaatataagagtggagaagaaaagtcagatggtttgtggcaggtgccaccgggcaagcagacaacataatttatttccagaaaacaacagaatgaacatcatcatgaatacatgaatcggctgtgatgtgtgaactgctaagggccaaatgaacgtttgcagagcagtgggcacaatgtttacaatgtatgtgtatgtcactttcggtacctgtgaatgcatggggacgtgctgaacccgaaaaaaagtgcctttccataaggactgcaatagagagggcaatttaccctggtggtacacggaacctagattcactcctgccatgccttgccaatagtaagctgcagggtggaacaagaaatcacttgctctggggggaagggaggggggaatgggtgtgtcagctgggtagatacaaaccctgaaaagagaatccatgtgctactggcaggcaacattttttaaagctctttcagaaaccctcatatttggggtttcttttcaggaaacattcctgtggagggaaaacgaatatgaagataattttcagctaattatctgggtgacccagaatcgtgtatatggctataggatagacttcttaataatggcaagtgacgtggccctggggaaaggtgctttatgtaccgtgtgtgcgtgtatgtgtgtgtatctatacaagtttgtcagctttggcatgactgtttgtctcgaaaaccaataaactcaaagtttagaaaaactcaaaaaaaaaaaaa

SEQ ID NO: 12071 - DNA, 6619 bp, Homo sapiens
gaattcccttacaaacgcctccagcttgtagaggcggtcgtggaggacccagaggaggagacgaaggggaaggaggcggtggtggaggaggcaaaggccttggacgaccattgttggcgaggggcaccactccgggagaggcggcgctgggcgtcttgggggtgcgcgccgggagcctgcagcgggaccagcgtgggaacgcggctggcaggctgtggacctcgtcctcaccaccatggtcgggctccttttgttttttttcccagcgatctttttggaggtgtcccttctccccagaagccccggcaggaaagtgttgctggcaggagcgtcgtctcagcgctcggtggccagaatggacggagatgtcatcattggagccctcttctcagtccatcaccagcctccggccgagaaagtgcccgagaggaagtgtggggagatcagggagcagtatggcatccagagggtggaggccatgttccacacgttggataagatcaacgcggacccggtcctcctgcccaacatcaccctgggcagtgagatccgggactcctgctggcactcttccgtggctctggaacagagcattgagttcattagggactctctgatttccattcgagatgagaaggatgggatcaaccggtgtctgcctgacggccagtccctccccccaggcaggactaagaagcccattgcgggagtgatcggtcccggctccagctctgtagccattcaagtgcagaacctgctccagctcttcgacatcccccagatcgcttattcagccacaagcatcgacctgagtgacaaaactttgtacaaatacttcctgagggttgtcccttctgacactttgcaggcaagggccatgcttgacatagtcaaacgttacaattggacctatgtctctgcagtccacacggaagggaattatggggagagcggaatggacgctttcaaagagctggctgcccaggaaggcctctgtatcgcccattctgacaaaatctacagcaacgctggggagaagagctttgaccgactcttgcgcaaactccgagagaggcttcccaaggctagagtggtggtctgcttctgtgaaggcatgacagtgcgaggactcctgagcgccatgcggcgccttggcgtcgtgggcgagttctcactcattggaagtgatggatgggcagacagagatgaagtcattgaaggttatgaggtggaagccaacgggggaatcacgataaagctgcagtctccagaggtcaggtcatttgatgattatttcctgaaactgaggctggacactaacacgaggaatccctggttccctgagttctggcaacatcggttccagtgccgccttccaggacaccttctggaaaatcccaactttaaacgaatctgcacaggcaatgaaagcttagaagaaaactatgtccaggacagtaagatggggtttgtcatcaatgccatctatgccatggcacatgggctgcagaacatgcaccatgccctctgccctggccacgtgggcctctgcgatgccatgaagcccatcgacggcagcaagctgctggacttcctcatcaagtcctcattcattggagtatctggagaggaggtgtggtttgatgagaaaggagacgctcctggaaggtatgatatcatgaatctgcagtacactgaagctaatcgctatgactatgtgcacgttggaacctggcatgaaggagtgctgaacattgatgattacaaaatccagatgaacaagagtggagtggtgcggtctgtgtgcagtgagccttgcttaaagggccagattaaggttatacggaaaggagaagtgagctgctgctggatttgcacggcctgcaaagagaatgaatatgtgcaagatgagttcacctgcaaagcttgtgacttgggatggtggcccaatgcagatctaacaggctgtgagcccattcctgtgcgctatcttgagtggagcaacatcgaatccattatagccatcgccttttcatgcctgggaatccttgttaccttgtttgtcaccctaatctttgtactgtaccgggacacaccagtggtcaaatcctccagtcgggagctctgctacatcatcctagctggcatcttccttggttatgtgtgcccattcactctcattgccaaacctactaccacctcctgctacctccagcgcctcttggttggcctctcctctgcgatgtgctactctgctttagtgactaaaaccaatcgtattgcacgcatcctggctggcagcaagaagaagatctgcacccggaagcccaggttcatgagtgcctgggctcaggtgatcattgcctcaattctgattagtgtgcaactaaccctggtggtaaccctgatcatcatggaaccccctatgcccattctgtcctacccaagtatcaaggaagtctaccttatctgcaataccagcaacctgggtgtggtggcccctttgggctacaatggactcctcatcatgagctgtacctactatgccttcaagacccgcaacgtgcccgccaacttcaacgaggccaaatatatcgcgttcaccatgtacaccacctgtatcatctggctagcttttgtgcccatttactttgggagcaactacaagatcatcacaacttgctttgcagtgagtctcagtgtaacagtggctctggggtgcatgttcactcccaagatgtacatcattattgccaagcctgagaggaatgtccgcagtgccttcaccacctctgatgttgtccgcatgcatgttggcgatggcaagctgccctgccgctccaacactttcctcaacatcttccgaagaaagaaggcaggggcagggaatgccaattctaatggcaagtctgtgtcatggtctgaaccaggtggaggacaggtgcccaagggacagcatatgtggcaccgcctctctgtgcacgtgaagaccaatgagacggcctgcaaccaaacagccgtcatcaaacccctcactaaaagttaccaaggctctggcaagagcctgaccttttcagataccagcaccaagaccctttacaacgtagaggaggaggaggatgcccagccgattcgctttagcccgcctggtagcccttccatggtggtgcacaggcgcgtgccaagcgcggcgaccactccgcctctgccgccccacctgaccgcagaggagacccccctcttcctggccgaaccagccctccccaagggcttgccccctcctctccagcagcagcagcaaccccctccacagcagaaatcgctgatggaccagctccagggagtggtcagcaacttcagtaccgcgatcccggattttcacgcggtgctggcaggccccgggggtcccgggaacgggctgcggtccctgtacccgcccccgccaccgccgcagcacctgcagatgctgccgctgcagctgagcacctttggggaggagctggtctccccgcccgcggacgacgacgacgacagcgagaggtttaagctcctccaggagtacgtgtatgagcacgagcgggaagggaacacggaagaagacgaactggaagaggaggaggaggacctgcaggcggccagcaaactgaccccggatgattcgcctgcgctgacgcctccgtcgcctttccgcgactcggtggcctcgggcagctcggtgcccagctccccagtgtccgagtcggtgctctgcacccctcccaacgtatcctacgcctctgtcattctgcgggactacaagcaaagctcttccaccctgtaagggggaagggtccacatagaaaagcaagacaagccagagatctcccacacctccagagatgtgcaaacagctgggaggaaaagcctgggagtggggggcctcgtcgggaggacaggagaccgctgctgctgctgccgctactgctgctgctgccttaagtaggaagagagggaaggacaccaagcaaaaaatgttcaggccaggattcggattcttgaattactcgaagccttctctgggaagaaagggaattctgacaaagcacaattccatatggtatgtaacttttatcacaaatcaaatagtgacatcacaaacataatgtcctcttttgcacaattgtgcatagatatatatatgcccacacacactgggccatgcttggcaaggaacagaccacgtggcatccagtcggatcatgagttcacctgatgcattcggagtgagctggtggagccagacagagcaggtgcggggaagggaagggccaggccagacccatcccaaacggatgatgggatgatgggacagcagttccttgctcagaagcccttctccccgctgggctgacagactcctcatcttcaggagactcaggaatggagcggtacaggggtctctcttcatccaccgcaacccatccagtgccagctttgagattgcacttgaagaaaggtgcatggaccccctgctgctctgcagattccctttatttaggaaaacaggaataagagcaaaattatcaccaaaaagtgcttcatcaggcgtgctacaggaggaaggagctagaaatagaacaatccatcagcatgagactttgaaaaaaaaaacacatgatcagcttctcatgttccatattcacttattggcgatttggggaaaaggccggaacaagagattgttacgagagtggcagaaacccttttgtagattgacttgtgtttgtgccaagcgggctttccattgaccttcagttaaagaacaaaccatgtgacaaaattgttaccttccacttactgtagcaaataatacctacaagttgaacttctaagatgcgtatatgtacaatttggtgccattatttctcctacgtattagagaaacaaatccatctttgaatctaatggtgtactcatagcaactattactggtttaaatgacaaataattctatcctattgtcactgaagtccttgtaactagcgagtgaatgtgttcctgtgtccttgtatatgtgcgatcgtaaaatttgtgcaatgtaatgtcaaattgacctgtcaatgtcaacctagtagtcaatctaactgcaattagaaattgtcttttgaatatactatatatattttttatgttccaataatgttttatacatcattgtcatcaatatctacagaagctctttgacggtttgaatactatggctcaaggttttcatatgcagctcggatggacatttttcttctaagatggaacttatttttcagatattttctgatgtggagatatgttattaatgaagtggtttgaaaatttgttatattaaaagtgcacaaaaactgagagtgaaaataaaaggtacattttataagcttgcacacattattaacacataagattgaacaaagcatttagattattccaggttatatcatttttttaaagattttccacagctacttgagtgtctaacatacagtaacatctaactcagctaataatttgtaaaatctttatcaatcacattgtggcctcttttaatttttatgttcatggacttttattcctgtgtcttggctgtcataactttttatttctgctatttgctgttgtgtaatatccatggacatgtaatccacttactccatctttacaatccctttttaccaccaataaaaggattttttcttgctgttttgatttcttctattatttgtggaatgaattataccccccttaaatatctttgtttatgccttatgttcagtcatattttaatatgcttccttcatattgaagctgctgatttctcagccaaaaatcatcttagaatctttaaatatccattgcatcatttgttcagaatttaacatccattccaatgttggaggcttgtattacttatatttcatcatattctattgccaagtttagtcagttccacaccaagaatgaactgcatttcctttaaaaattattttaaaacacctttattgaaaagatctcatgactgagatgtggactttggttccatgttttcattgtaagaaagcagagagcggaaaatcaatggctccagtgattaatagatgggtttttagtaattgacaaattcatgagggaaagcatatgatctctttattagtgaatcatgcttattttttactcttaacgccactaatatacatccctaatatcacagggcttgtgcattcagatttttaaaaaattaggatagataaggaaacaacttatattcaagtgtaagatgatatcaggttggtctaagacttttggtgaacacgttcattcaactgtgatcactttattactctgaatgcctactattatcctgattatggggtctcctgaataaatagagtattagtctttatgtcatcattgttcaaaattggagatgtacacatacataccctataccaagagggccgaaactcttcaccttgatgtatgttctgatacaagttgttcagcttcttgtaaatgtgttttccttcggcttgttactgccttttgtcaaataatcttgacaatgctgtataataaatattttctatttatt

SEQ ID NO: 12072 - DNA, 2088 bp, Homo sapiens
catgaaggaccgaacccaggagctccgcacggccaaggacagcgatgatgatgatgatgtcgctgtcaccgtggaccgagaccgcttcatggatgagttctttgagcaggtggaggagattcgaggcttcattgacaagatcgcagagaacgtggaggaggtgaagcggaagcacagtgccatcctggcatcccccaaccccgatgagaagacgaaggaggagctggaagaactcatgtccgacataaagaagacagcaaacaaagttcgttccaagttaaagagcatcgagcagtccatcgagcaagaggaaggcctgaaccgctcctccgctgacctgaggatccggaagacacagcactccacgctgtccagaaagtttgtggaggtcatgtcggagtacaacgccacgcagtccgactaccgcgagcgctgcaaaggccgcatccagaggcagctggagatcaccggcaggaccacgaccagtgaggagctggaggacatgctggagagtgggaaccccgccatctttgcctctgggatcatcatggactccagcatctcgaagcaggctctgagcgagattgagacgcggcacagtgagatcatcaagctggagaacagcatccgtgagctacacgacatgttcatggacatggccatgctcgtggagagccagggagagatgattgacaggatcgagtacaatgtggaacacgcggtagactatgtggagagggccgtgtctgacaccaagaaggccgtcaagtaccagagcaaggcgcgccggaagaaaatcatgatcatcatctgctgtgtgatcctgggcatcgtcatcgcctccactgttgggggcatcttcgcctagaagccacccaaactgccactccactccaggtgggccactccaaggaggccctggctgctgccacctggctgggctgccctcccaacccccgcctctggctcagagcaccctccctcccggcccccatgctcccttctctgccatgggccctccgtccccgccccgtgtcgtgtgcatgatctctgtgagtgtgcgtctgtacgggaagaggcagagggaggcagccagcggggcgtgatgcagtgtgcacagcgaggagcagacccaggcagggccgccagggtgacacaggccacgcttccttgccttcagtaactcggtgggcccaggttctgctcttccctggggaccctaacctcgcctccagctgacctgccctgtcctctccagctgtccccacaagcagagccctgaggggtggggaccagctggccacatggtgctgcttttcaggttaggggagaggtgaccctgagggacagcccagctctgagtctcagtcgctgatcactgccagggaggctcaggctgccatggctccaggctccctcccctgcctaggggcaaagtccatcgggtcctgggcctcagcttcccttcccacattcctccggccccaggagcaaccccttgggctaggtctgaccccaggtgtccctctggaaggggctggctggtgccctatttccagccaccccagcagctagggaggcaaagcaggctgcagtcagtccctcaagccagcgttgcatgtttgggatggtggctcctgttgtcttgcgctctgggaagtcagatgtcatttcaggcctgcagtctcatcctgcccttgccatcctcccatcgatgtgccacgtgggtgtcacgtgtcccagatgcagtattcggcagccagccggggagggctacctcctcctcctcaccaccttggggcttctcatgggaaatgtgcccccgccccaggaccctctcccttgtggacaggcagggagatgcatgcgagtgcatgcagcaggggatggggccgtgtccgtgtgccccaccctccctcggctttactcctgcccagtgactgtgaccactgtccgtgttgccttcttgaacagcgattccccccaaccccttcaccaaaggtcttggtacaaccagctgcccattttgtgaaatttttatgtagaataaacatttgtatctgtaaaaaaaaaaaaaaaaaagcgttc

SEQ ID NO: 12073 - DNA, 3729 bp, Homo sapiens
ggcccaagccgccattgttccgccgagggaggacagcggggcctggcgctggcgccgagacgccgcttagcggccgccactggagacactccctcccgcctcccgggtctcctggcggcggcggagtgaggctgacagcggggaacctgggagacccctccgccctccccgcggtggcagcggccgatccccggctccggcgcgagggacggccgcgatgcgctcggcctgaggttacccggcccggcccttcctcgcttccctcgactattccactgcgtctccgcgccccggcgtcatcctgcgagtccctctgacgggagggaagatggctgcacggagctggcaggacgagctggcccagcaggccgaggagggctcggcccggctgcgggaaatgctctcggtcggcctaggctttctgcgcaccgagctgggcctcgacctggggctggagccgaaacggtaccccggctgggtgatcctggtgggcactggcgcgctcgggctgctgctgctgtttctgctgggctacggctgggccgcggcttgcgccggctcccgcaaaaagcggaggagcccgccccgcaagcgggaggaggcggcggccgtgccggccgcggcccccgacgacctggccttgctgaagaatctccggagcgaggaacagaagaagaagaaccggaagaaactgtccgagaagcccaaaccaaatgggcggactgttgaagtggctgagggtgaagctgttcgaacacctcaaagtgtaacagcaaagcagccaccagagattgacaagaaaaatgaaaagtcaaagaaaaataagaagaaatcaaagtcagatgctaaagcagtgcaaaacagttcacgccatgatggaaaggaagttgatgaaggagcctgggaaactaaaattagtcacagagagaaacgacagcagcgtaaacgtgataaggtgctgactgattctggttcattggattcaactatccctgggatagaaaataccatcacagttaccaccgagcaacttacaaccgcatcatttcctgttggttccaagaagaataaaggtgattctcatctaaatgttcaagttagcaactttaaatctggaaaaggagattctacacttcaggtttcttcaggattgaatgaaaacctcactgtcaatggaggaggctggaatgaaaagtctgtaaaactctcctcacagatcagtgcaggtgaggagaagtggaactccgtttcacctgcttctgcaggaaagaggaaagctgagccatctgcctggagtcaagacactggagatgctaatacaaatggaaaagactggggaaggagttggagtgaccgttcaatattttctggcattgggtctactgctgagccagtttctcagtctaccacttctgattatcagtgggatgttagccgtaatcaaccctatatcgatgatgaatggtctgggttaaatggtctgtcttctgctgatcccaactctgattggaatgcaccagcagaagagtggggcaattgggtagacgaagaaagagcttcacttctaaagtcccaggaaccaattcctgatgatcaaaaggtctcagatgatgataaagaaaagggagagggagctcttccaactgggaaatccaaaaagaaaaaaaagaaaaagaagaagcaaggtgaagataactctactgcacaggacacagaagaattagaaaaagagattagagaagaccttccagtgaatacctctaaaacccgtccaaaacaggaaaaagctttttccttgaagaccataagcactagtgatccagccgaagtactcgtcaaaaatagccagcctatcaagactcttccacctgctacttctaccgagccatctgtaatcttatcaaaaagtgattctgacaagagctcttcccaagtgccgccaatactacaagagacagataaatccaagtcaaataccaagcaaaatagtgtgcctccttcacagaccaagtctgaaactagctgggaatctcccaaacaaataaaaaagaagaaaaaagccagacgagaaacgtgaaattttttttcctgaattggacatgtgtttgcaaacacttgtcttgaagattatgctgtttatgcaataatttgtgaacatgtacagagttttatataaatttaaaccaatttttaaaacaaaactgcggacaccaccataaaaatggaatcaaaagaaagttaatttatgaaattaagaggtcagcagaatatactcagtgatggaagacacttgggaaagtctttttaatagaacaagaacgatcttaatttaagaatattatcctggtttaacaacagtgccctgtttacaacagattgtgccctatctcatctgcagccgaggaataaaggattctgattagaaagagggttgcctacagattagtaagcaattccttggatcttatgcacagaacttgtaccatttgaatctgttttatgcttaaatcaaagtgctttgatcaaatgcataacctgccatatctttacatatttgttggtagcaatttgtattaaagaaatcacaagtgcaaataaaaagtcatttatcatttgtttaactaaactgtcatggtttagtttacaatttttaaaaagttcttaaaatactgaaaatgcagttgacacttgtgtatggcttatgaagttatttttgatagtcttacattacttgaattgttcaaagtacagtatattttaaattaagaaaagtgaactatatgtatttgttttatacatttaaggcttagactcataaataatgctattgtttatgatttgaaaactttcaggcaaaatccaatttacatttttcccttccctagcaattacttttttccagcttcaactcttcttagttactaatactttgttgactttaaaaatgaaatcattcacaaacttttggtatatgatggagaatgaaaaactagagtcagacagctttaattgacattgtcaacacctccagttatcaggaatacatttttttactgccttaacctgtagtgcgtagaatatgcatcaatttcttgaaggagattcatgtttttataagaattttcatgtaattattgcaattgtggtcaaataaggaacgtttcctgcttgaaattatattgatttaaatgatgtgtgagatgtttcaccattttcaggcactgtgtaattctattgtaataaactggcaggtatctttgtaactataaatagtgcatgctcagccatgtacactgtaaatagcctttaccaaacgtgtttgacaaggaccataattaacatcacttagtgaattgtgataaagaaaaaaaagccatgatttattcgatgtgattggcttgtttttatgtggcgccaagaacgaacctgtttaacagctgtaaccaatggtactgatctatccatccaatgttgtcattatatttgactgtggttcaacagtattgcgttgtcagactaggaaagctaaacgaacaaaatggttttagttttgctgaagactggccttattaatggacagctttcctaacaagagattattaacttttatcaggtgttaacatctgtttcaggaacatggcagtatgtttacatgtcagaagttttgtttaattctatggtatttctaaattgacttgtttaaataaattcagcaaaaaaaaaaaaaaa

SEQ ID NO: 12074 - DNA, 6456 bp, Homo sapiens
acggcggccgcgcgctccaggccggtcgctccacgccccggctcccgggactgtggactccacgaccctgtcctcggccctgtccgcgccgaagcagcccgggactgcgcagcgccccgcgtgccgatcttttcctaattcagcagcgatttaaccaagagcctggaatattttaaggagtaataagagacatttacaaactattctctctgaagcctgctacctggaggcatcatctagataatcagaaccttggcttccacatcctcctcccttgtcttaactacaaacatttctttctgctgacttcaactcctcagacatgggaaagtctctttctcatttgcctttgcattcaagcaaagaagatgcttatgatggagtcacatctgaaaacatgaggaatggactggttaatagtgaagtccataatgaagatggaagaaatggagatgtctctcagtttccatatgtggaatttacaggaagagatagtgtcacctgccctacttgtcagggaacaggaagaattcctagggggcaagaaaaccaactggtggcattgattccatatagtgatcagagattaaggccaagaagaacaaagctgtatgtgatggcttctgtgtttgtctgtctactcctttctggattggctgtgtttttccttttccctcgctctatcgacgtgaaatacattggtgtaaaatcagcctatgtcagttatgatgttcagaagcgtacaatttatttaaatatcacaaacacactaaatataacaaacaataactattactctgtcgaagttgaaaacatcactgcccaagttcaattttcaaaaacagttattggaaaggcacgcttaaacaacataaccattattggtccacttgatatgaaacaaattgattacacagtacctaccgttatagcagaggaaatgagttatatgtatgatttctgtactctgatatccatcaaagtgcataacatagtactcatgatgcaagttactgtgacaacaacatactttggccactctgaacagatatcccaggagaggtatcagtatgtcgactgtggaagaaacacaacttatcagttggggcagtctgaatatttaaatgtacttcagccacaacagtaaaaactggaagagatggatttaaagaagaaatatctattgatatttcctatactctcaatgaagaggtatttcctaataggagaccttaaattgaacaaacctaaagtttacacttctaagagtacagttaaaagtatgtggacctgcagttcttgtaactctccactctgtgttaatgatatatttgtactaggatcttttacttgaatctaaatttactggttgatttccttctccagcctatcccctacagggaaaagctgatacttcccctatagtacaataaataattatttaaaagtcatagctccagtcactactgaaaacataattttggtgataaacataatttgagaaacttaatttctgaatgtttttatagaaaattactgaaagtctattactcatggaagacttttaaagaataaccttttttcctgttttataaattcccattgttatatggtagtatttcagctacacaatattttagcttttagctagacatttatagcttttcatttgttgaaatggtaatcatctgcatgtttttgtcacttatttcaggttagtgattgcctaacacttataagccaaaataatccttgcaaaattccatacctaaaattttgaaagcccctaatgttttcacacatctttctgtattagttatagttttgtgaaatctttgtgtgatcttcaaacattatcatttaatgtacaatactgtaaataaactgtgcatggcttttatacagctttagtaaatgtcaaataaagtggtacagactcattacaacaagtttctcataaaaatacaataaataggaaaatgaaattcagaaacccatagactgggaataggttccagttacagcttggatctggcataaaataaatttgaaataaaatattttgatgctccatttttttatgttgcttttcatactaaagaatggtgtagacatgttttgcaactgttaggtacccagttatcaattttatcaatgttttagaggaggaaattatttttttggtagaaattgttcaagaaatccttaattgaatgtcattaaatgatggtggccaaaataaaacctatttagaaatttaatcactttgcacatcacttggaatatgatgcctctagtagttacttttttatagttttctacttttggttttatttaaaattgttttcaaatatagattattgacttattcaactttgctgttttatattttcagtatcatttttcatttttttttttttttttttttgtcttttcacttaccaagttctagggacatttaaaatatgtactaagtgtaggagtggttatgataccaaaaaatgtagctgggttgagattaatttcgttctgttttctcatgacagaaatcaggtttccctttccccacccctaagtgcctaacttaggtctgaaacagcctgtttattagtctgactctctcaaccataaaacataagctttatttaattctgcctttaaacacactcaggtttccccttaattttcatattattttctgcaagttttcttgagtatcttcaattcgttgaatgtggtttttggtttttttttgttttaacactagtcttcccttaattcattgctaactcaagccatccttactattaaacccaaatcagtcctttaagttcattatggcctttctagtatttaaaaaaaaaaaaatcattttcatttttcttctgctacgtttcctgactactactgcatacttctctgatacaggttctgtttgtattttttatatcattctcattttctcatttgacatgatctatgtctatatatgatataggtccccttttgtctcaaaatttttaattatgtgacttcaaaaatcacctgtatctgtagtagggcttccaaatctgcttctccatatgtgaccagtcacctgtctgctttcacatttagctagtgaactacacatttactaaaatgtgtaaattttacacatttagtgactgtgtaaaataaaaaaaaagttattttatcatatcctttctattatgttcccatcctgtcctcatgtcccatttactttattatcacaattcatttcttcaaaattatcttttagatacgctcatacaaaaatcaatccttgttttcttgcttgtgtcttttaaccttggaaaattacatcgtgtaaattaaacagatttttctgatgatctgtgcttcttatatactattagagtgcatgatagtatctcctgaaaaggatggaaagtagaagcatttgcttttagtcacttaattttgaatcttttttcttcatcttttgaattaattttttttattatatctacttttagtggagtttgagtcagaaaaaaacaagaatttgaaacaagtaaaaagatagaagagaaataaagatggtatgtgactactttcagagagagttaagtaactgtcagaataagcctggaacaaaacaggctgtaaattaataaaactacaaacacacattcaggtgaagcagaagtatagccataaaacatctagaaagagtgaatgaggcttttagcttttcttaggtcaatgtccagtgtgcttttttccatgggaataggataggtattaatacgcttttctaaactgctctcagaccttatccagaggacatggtaaagatatgttacagaaatttttctgatacttcctggaataactttaagttacaccctagtagactggtcattctaataaaatccagtactataacaaacctctgtatgttgatagcacattggccctttttagagttctttcctatgtttttcttacgtgatttcccacagttccatgagtccaacaaaggagagtgataggctccttatcttttagaagaggaaggaaaggcatgaagaagttgagggactggctgaagatcacgtacttactaagtagtacaactggagcaagatcaagtatctctgtctcccatatctgtgttctatcatttaaaatatatattggaaatccctgctgactcagattggtatgattaaaaatgagaggaaagttcaaatagttagtagtgacaaactaatactgctggactaagattttggtagcattgttttctaaaatattttaaatggagaatgaacacttataaaatgctttggaacataatctttagcttaattttctgttaaaatttagtaccccttcatcattccaataaagataagactgatccattgtctaaggaaattatttataaataatagagattaatttatttgagatttgaaataagaatagtatgaaaatattagataccacataaattgtttgaaattactgaataaccatcttaagtatggaacatttaaatggctatattttatttgtgtacagtttttctgtgccttgttaggccagtgaagcaattattttctctaagaaaatgacaataaaatataacacacttcagattgtctgatttacagtttggaaaggacaccgcaatgttcaaataggtaggagaccatcaaaaacacaattaaagtaacatattaggagacttgaaacttcagcctaataaatccttcatggttcttagccttattattgtgatataattctagatattttcttggagggcatgtgcccaactctcccgcaccccattttgtttgtcttttaaagttcttagaataaacagttctttatataataattatattttatttaagaaaatagtttgttaggtactttttaaaagatgtaaatttttaaatttacaaatacatatgggtctttgataagcaataggaattgaattacaagttactagggttataagcaaaaggttgcttaccataatgtcattaggtcacgatttttagctcacatctggaagcagcaactacttggctcaagtacatataagagtaattagttttattctctcttttttataaaatcgggtttcagatgagatgtttatcttagactattttagggaaaaattttacatgtttgagatggtggagtaaaaagactgttaaacatttcttttaaaaaattatttttacattacaacaatatatttatgatgtgttcagatcaaaaatttaacttctgtgtcccagatctactttcaaagtgagattttcacttgtcagcttaaatttctgactagaactaacatttgtgtatttttgtgcttagtcggaatacaaatttcacagtggatttttgaagtttgtccttaaattggataaaatcaagtgattaaagttactaaagagataaaaatggtaatttccatttttaaaagtaatttggttgtgtttatagttatttgtacaagtatttatcacagactctaaattgaaaaatgtagtatgatctatatttgaccctaaaaatgttggattaatttaacaaatatggcagatttttcataactaagtcttaagtcttctaaaaggaagctgttacccttctgtttttaattacattaattgaaatgtgttttaagagatacaatttcagcatattttatatattaaaaaacaaaaaaggattagtattgagccagtggccaaaaggtaatattactaccatgtagactgttatagttcaaattgtcccacttcacccagaattttagaaactagaagtctgggaggtactatatcagctgtagttgggtaattccaagtgctgatagtactattcatcttttttattattgtgtcagatgaaacaaatgccaagttgcaaaatatgcagatttttattatataatggttttaggcataaattattaacaagccatgccttatgtgtttcatcttatatttttctttagaactaaactataacagattttggaaaatgatttgatgtgcttgctcacttgattgacttggtcagatatttgaatgatggtattacctagattctaatccttgattctagttatataataaataatatagaatatgaaaatatgtttgggcatttactgtttatattatgtagtagcctccatcatgacacacttactacatttatgaattgagcagttctgtaattgtaattattattgctgttcatgtaacaaaacatgcttatgataatagcaaacaaatagaaatgcccccaaaatgctatttttttaattcagttataactgttactcttgtagttgtgtatgacgcaataaaatttgtaaaaaaatttcagcatgaaaaataaaatttgtatcacctaaaaaaaaaaaaaaaa

SEQ ID NO: 12075 - DNA, 1936 bp, Homo sapiens
agcgatcgcgctgggccgcgctcccgggagcccagggcctgcagcggccggggcgccccgaggtctgctcattgtgtttttcaggaaaaaggaagggaaagggtgttacaaggaaaggctatcggtaacaactgacctgccacaaagttagaagaaaggattgattcaagaaagactataatatggatttagagctcgacgagtattataacaagacacttgccacagagaataatactgctgccactcggaattctgatttcccagtctgggatgactataaaagcagtgtagatgacttacagtattttctgattgggctctatacatttgtaagtcttcttggctttatggggaatctacttattttaatggctctcatgaaaaagcgtaatcagaagactacggtaaacttcctcataggcaatctggccttttctgatatcttggttgtgctgttttgctcacctttcacactgacgtctgtcttgctggatcagtggatgtttggcaaagtcatgtgccatattatgccttttcttcaatgtgtgtcagttttggtttcaactttaattttaatatcaattgccattgtcaggtatcatatgataaaacatcccatatctaataatttaacagcaaaccatggctactttctgatagctactgtctggacactaggttttgccatctgttctccccttccagtgtttcacagtcttgtggaacttcaagaaacatttggttcagcattgctgagcagcaggtatttatgtgttgagtcatggccatctgattcatacagaattgcctttactatctctttattgctagttcagtatattctgcccttagtttgtcttactgtaagtcatacaagtgtctgcagaagtataagctgtggattgtccaacaaagaaaacagacttgaagaaaatgagatgatcaacttaactcttcatccatccaaaaagagtgggcctcaggtgaaactctctggcagccataaatggagttattcattcatcaaaaaacacagaagaagatatagcaagaagacagcatgtgtgttacctgctccagaaagaccttctcaagagaaccactccagaatacttccagaaaactttggctctgtaagaagtcagctctcttcatccagtaagttcataccaggggtccccacttgctttgagataaaacctgaagaaaattcagatgttcatgaattgagagtaaaacgttctgttacaagaataaaaaagagatctcgaagtgttttctacagactgaccatactgatattagtatttgctgttagttggatgccactacaccttttccatgtggtaactgattttaatgacaatcttatttcaaataggcatttcaagttggtgtattgcatttgtcatttgttgggcatgatgtcctgttgtcttaatccaattctatatgggtttcttaataatgggattaaagctgatttagtgtcccttatacactgtcttcatatgtaataattctcactgtttaccaaggaaagaacaaatgctggggtcatataaaatatatttatgataactatttacatataataaatagaaattttgttaacatggaatttaatttatgtgaaagagttctggattcaaatgtcagttcataatatatggaagataattttatgtgttatagtaggattaatttatttagttgtgcagtcagtgtcaatccaatctgtaatttcactttagaaggttgtattaccttccacttccatgttgtcttataaacaaatgaattgtattttttgttgaaagtaaaagttatatctaaccaaaaaaaaaaaaaaaaaaaaaaaaaaaaaaaaaaaaaaaaaaaaaaaaaaaaaaaaaaaaaaaaaaaaaaaaaaaaaaaaaaaaaaaaaaaaaaa

SEQ ID NO: 12076 - DNA, 4675 bp, Homo sapiens
gctgtaacactcaccgtgaaggtctgcagcttcactcccgagccagcgagaccacgaacccaccagaaggaagaaactctgaacacatctgaacatcagaagggacagactccagacgcgccaccactctgctaacaccagatagtggaaagaaaccatgtgctgaaatgtttgacgacactgatggtttgactctgctaactggaatggcttattgtgcaagaaagtacacctggtcgggtcctggggctcatctctagcaccagcaaagatttctgaagacgtctttctagaaatgactggaaagtttcaagaggcataagatacagcatttcttctgaggccctgaagaagtatcaagtgggctttgacattgcggtggtgagagcgacccctcctcacctggagaactgggaaatgtggattctcagggaccgcgctgttcacgagctccaggctgtgctgctggccctggtcctggggcgctgagccgcatctgcaatagcacacttgcccggccacctgctgccgtgagcctttgctgctgaagcccctggggtcgcctctacctgatgaggatgtgcacccccattagggggctgctcatggcccttgcagtgatgtttgggacagcgatggcatttgcacccataccccggatcacctgggagcacagagaggtgcacctggtgcagtttcatgagccagacatctacaactactcagccttgctgctgagcgaggacaaggacaccttgtacataggtgcccgggaggcggtcttcgctgtgaacgcactcaacatctccgagaagcagcatgaggtgtattggaaggtctcagaagacaaaaaagcaaaatgtgcagaaaaggggaaatcaaaacagacagagtgcctcaactacatccgggtgctgcagccactcagcgccacttccctttacgtgtgtgggaccaacgcattccagccggcctgtgaccacctgaacttaacatcctttaagtttctggggaaaaatgaagatggcaaaggaagatgtccctttgacccagcacacagctacacatccgtcatggttgatggagaactttattcggggacgtcgtataattttttgggaagtgaacccatcatctcccgaaattcttcccacagtcctctgaggacagaatatgcaatcccttggctgaacgagcctagtttcgtgtttgctgacgtgatccgaaaaagcccagacagccccgacggcgaggatgacagggtctacttcttcttcacggaggtgtctgtggagtatgagtttgtgttcagggtgctgatcccacggatagcaagagtgtgcaagggggaccagggcggcctgaggaccttgcagaagaaatggacctccttcctgaaagcccgactcatctgctcccggccagacagcggcttggtcttcaatgtgctgcgggatgtcttcgtgctcaggtccccgggcctgaaggtgcctgtgttctatgcactcttcaccccacagctgaacaacgtggggctgtcggcagtgtgcgcctacaacctgtccacagccgaggaggtcttctcccacgggaagtacatgcagagcaccacagtggagcagtcccacaccaagtgggtgcgctataatggcccggtacccaagccgcggcctggagcgtgcatcgacagcgaggcacgggccgccaactacaccagctccttgaatttgccagacaagacgctgcagttcgttaaagaccaccctttgatggatgactcggtaaccccaatagacaacaggcccaggttaatcaagaaagatgtgaactacacccagatcgtggtggaccggacccaggccctggatgggactgtctatgatgtcatgtttgtcagcacagaccggggagctctgcacaaagccatcagcctcgagcacgctgttcacatcatcgaggagacccagctcttccaggactttgagccagtccagaccctgctgctgtcttcaaagaagggcaacaggtttgtctatgctggctctaactcgggcgtggtccaggccccgctggccttctgtgggaagcacggcacctgcgaggactgtgtgctggcgcgggacccctactgcgcctggagcccgcccacagcgacctgcgtggctctgcaccagaccgagagccccagcaggggtttgattcaggagatgagcggcgatgcttctgtgtgcccggataaaagtaaaggaagttaccggcagcattttttcaagcacggtggcacagcggaactgaaatgctcccaaaaatccaacctggcccgggtcttttggaagttccagaatgacgtgttgaaggccgagagccccaagtacggtcttatgggcagaaaaaacttgctcatcttcaacttgtcagaaggagacagtggggtgtaccagtgcctgtcagaggagagggttaagaacaaaacggtcttccaagtggtcgccaagcacgtcctggaagtgaaggtggttccaaagcccgtagtggcccccaccttgtcagttgttcagacagaaggtagtaggattgccaccaaagtgttggtggcatccacccaagggtcttctcccccaaccccagccgtgcaggccacctcctccggggccatcacccttcctcccaagcctgcgcccaccggcacatcctgcgaaccaaagatcgtcatcaacacggtcccccagctccactcggagaaaaccatgtatcttaagtccagcgacaaccgcctcctcatgtccctcttcctcttcttctttgttctcttcctctgcctctttttctacaactgctataagggatacctgcccagacagtgcttgaaattccgctcggccctactaattgggaagaagaagcccaagtcagatttctgtgaccgtgagcagagcctgaaggagacgttagtagagccagggagcttctcccagcagaatggggagcaccccaagccagccctggacaccggctatgagaccgagcaagacaccatcaccagcaaagtccccacggatagggaggactcacagaggatcgacgacctttctgccagggacaagccctttgacgtcaagtgtgagctgaagttcgctgactcagacgcagatggagactgaggccggctgtgcatccccgctggtgcctcggctgcgacgtgtccaggcgtggagagttttgtgtttctcctgttcagtatccgagtctcgtgcagtgctgcgtaggttagcccgcatcgtgcagacaacctcagtcctcttgtctattttctcttgggttgagcctgtgacttggtttctctttgtccttttggaaaaatgacaatccttgcatcccagtcttgtgttccgaagtcagtcggagtacttgaagaaggcccacgggcggcacggagttcctgagccctttctgtagtgggggaaaggtggctggacctctgttggctgagaagagcatcccttcagcttcccctccccgtagcagccactaaaagattatttaattccagattggaaatgacattttagtttatcagattggtaacttatcgcctgttgtccagattggcacgaaccttttcttccacttaattatttttttaggattttgctttgattgtgtttatgtcatgggtcatttttttttagttacagaagcagatgtgttaatatttagaagaagatgtatatcttccagattttgttatatatttggcataaaatacggcttacgttgcttaagattctcagggataaacttccttttgctaaatgcattctttctgcttttagaaatgtagacataaacactccccggagcccactcaccttttttctttttctttttttttttttaactttattccttgagggaagcattgtttttggagagattttctttctgtacttcgttttacttttctttttttttaacttttactctctcgaagaagaggaccttcccacatccacgaggtgggttttgagcaagggaaggtagcctggatgagctgagtggagccaggctggcccagagctgagatgggagtgcggtacaatctggagcccacagctgtcggtcagaacctcctgtgagacagatggaaccttcacaagggcgcctttggttctctgaacatctcctttctcttcttgcttcaattgcatacccactgcctgcccagactttctatccagcctcactgagctgcccactactggaagggaactgggcctcggtggccggggccgcgagctgtgaccacagcaccctcaagcatacggcgctgttcctgccactgtcctgaagatgtgaatgggtggtacgatttcaacactggttaatttcacactccatctccccgctttgtaaatacccatcgggaagagactttttttccatggtgaagagcaataaactctggatgtttgtgcgcgtgtgtggacagtcttatcttccagcatgataggatttgaccattttggtgtaaacatttgtgttttataagatttaccttgtttttatttttctactttgaattgtatacatttggaaagtacccaaataaatgagaagcttctatccttaaaaaaaaaaaaaaaaaaaaaaaaaaaaaaaaaaaaaaaaaaaaaaa

SEQ ID NO: 12077 - DNA, 1956 bp, Homo sapiens
aaaggcagagtcatcccaggctctcacagtggaattaataataagctcacttgccacctcagtttcaagtcatctaaacctgtgtcattttttaccaatcttcttttctgtgatgacagaaaaaactggttttcacttccagttactgcaacagcagaaaactgcattcttactatttacccatatatggcaattcatctggataagcaaaacattattttaaagaatgataaggatgaatatcttaagaagactagagatggtgttttgcctccctaccaggatgctaaaccaccctctcctgcttcaattaaaaagacatacaccactagcaaattcaatgatgctgaacctgcaaagggaaacttatttattggagtggaagtactgcctgaaaatttgcacttggatgaaagtgaaacatcagaggaagatcatgggtctctggaaaaggaaaaatatgaacaattcctttctcttgaggaaggaacaaaggcacactacttttttgagaaggttgtaaatgcagcacagacctggttcagtctctttggctggcctgaaggaccccattctttttctattccagagactataagaagggatgtatataaaatgcaattctactcatcaacctcgccaccccaaaagttttccagacagaatgacttttccaaatataataagaccatttatgatgtgctgctccatttgagtggaaaaatgccacctggaattaattcaagtcaatctttacctgtagataaccatgaaaaaagggtaattcaactccatttgcaacattcctcacttctggactttctcaatgctcaaggaggatgtatttcacatgtcctgccagaatttttgcttgaaccagaagattataagaggtggattgaaattatgtcttccactaatacgatgcctgtgagttcctgtacacctaagaaaaaatgttctattgttatagaaatgtctaaatttgaagcctggagcaaacgggcatggacagatgtatttctacagatatacaaggttttggttctatcccgtgtagtgccatactgcagcaataatatgccccccatatgtgtgcaaaatacaccaaaagtcaatccttgttttgcatccagcaacatatattctgattctgaaagaattttgcttagttggatgaacataaattatgagaatactcgacatgtgatatggaaaaactgtcacaaagatgttatcccttctgagagatggatagtaaattttgacaaagacctttcagatggtcttgtttttgcaacacagttgggagcctattgcccattcttgattgagtctcattttataaatatgtacacacgaccaaaaagtcctgaagagtatctgcacaattgcctgattattgtaaatactctttatgaaattgactttgacgtggaaatacaggtgtgtctgagggtgtttccaaaggagatggatgcaggagtcagtggcctgagaaaggaagatatgccctcagtgtgggttgttaccatccgattggctgtggcagtggccagaacaaagagacagaagaagggggatattcagtttgcttgtttttttgtttgtttgttcttttttatttttgtcgtgatctctttctccctttggagcaggatgcatttttttctccttctgcccttggacatctgattccaggtttttcagcctttggactctaggacttgcaccagcagcctcctttgggctttcagccttcggcctcagaatggggcctgcactgtagcttccctggtttgggggatttgggacttggcctgagccatgcttctggcttccctgggagcccctattggcttctgtcattctgcagtttgtagccagcctactgtgggacttcgcctttgtgattgttcagccaattcttcctaataaattcccgtttatatatat

SEQ ID NO: 12078 - DNA, 4086 bp, Homo sapiens
aatggagccgctgtcagcagaaccttctgccgccgccgccgccgccgccgtccctcctcttttttttcccggcagatctttgttgtgtgggagggcagcagggatggacttgagcttgcggatcccctgctagagcagccgcgctcggagaaggcgccgcagccgcgaggaggagccgccgccgccgcgcccgaggccccgccgcccgcggcctctgtcggcccgcgccccgctcgccccgtcgccccgtcgcccctcgcctccccgcagagtcccctcgcggcagcagatgtgtgtggggtcagcccacggcggggactatggtgaaattcccggcgctcacgcactactggcccctgatccggttcttggtgcccctgggcatcaccaacatagccatcgacttcggggagcaggccttgaaccggggcattgctgctgtcaaggaggatgcagtcgagatgctggccagctacgggctggcgtactccctcatgaagttcttcacgggtcccatgagtgacttcaaaaatgtgggcctggtgtttgtgaacagcaagagagacaggaccaaagccgtcctgtgtatggtggtggcaggggccatcgctgccgtctttcacacactgatagcttatagtgatttaggatactacattatcaataaactgcaccatgtggacgagtcggtggggagcaagacgagaagggccttcctgtacctcgccgcctttcctttcatggacgcaatggcatggacccatgctggcattctcttaaaacacaaatacagtttcctggtgggatgtgcctcaatctcagatgtcatagctcaggttgtttttgtagccattttgcttcacagtcacctggaatgccgggagcccctgctcatcccgatcctctccttgtacatgggcgcacttgtgcgctgcaccaccctgtgcctgggctactacaagaacattcacgacatcatccctgacagaagtggcccggagctggggggagatgcaacaataagaaagatgctgagcttctggtggcctttggctctaattctggccacacagagaatcagtcggcctattgtcaacctctttgtttcccgggaccttggtggcagttctgcagccacagaggcagtggcgattttgacagccacataccctgtgggtcacatgccatacggctggttgacggaaatccgtgctgtgtatcctgctttcgacaagaataaccccagcaacaaactggtgagcacgagcaacacagtcacggcagcccacatcaagaagttcaccttcgtctgcatggctctgtcactcacgctctgtttcgtgatgttttggacacccaacgtgtctgagaaaatcttgatagacatcatcggagtggactttgcctttgcagaactctgtgttgttcctttgcggatcttctccttcttcccagttccagtcacagtgagggcgcatctcaccgggtggctgatgacactgaagaaaaccttcgtccttgcccccagctctgtgctgcggatcatcgtcctcatcgccagcctcgtggtcctaccctacctgggggtgcacggtgcgaccctgggcgtgggctccctcctggcgggctttgtgggagaatccaccatggtcgccatcgctgcgtgctatgtctaccggaagcagaaaaagaagatggagaatgagtcggccacggagggggaagactctgccatgacagacatgcctccgacagaggaggtgacagacatcgtggaaatgagagaggagaatgaataaggcacgggacgccatgggcactgcagggacagtcagtcaggatgacacttcggcatcatctcttccctctcccatcgtattttgttcccttttttttgttttgttttggtaatgaaagaggccttgatttaaaggtttcgtgtcaattctctagcatactgggtatgctcacactgacggggggacctagtgaatggtctttactgttgctatgtaaaaacaaacgaaacaactgacttcatacccctgcctcacgaaaacccaaaagacacagctgcctcacggttgacgttgtgtcctcctcccctggacaatctcctcttggaaccaaaggactgcagctgtgccatcgcgcctcggtcaccctgcacagcaggccacagactctcctgtcccccttcatcgctcttaagaatcaacaggttaaaactcggcttcctttgatttgcttcccagtcacatggccgtacaaagagatggagccccggtggcctcttaaatttcccttccgccacggagttcgaaaccatctactccacacatgcaggaggcgggtggcacgctgcagcccggagtccccgttcacactgaggaacggagacctgtgaccacagcaggctgacagatggacagaatctcccgtagaaaggtttggtttgaaatgccccgggggcagcaaactgacatggttgaatgatagcatttcactctgcgttctcctagatctgagcaagctgtcagttctcacccccaccgtgtatatacatgagctaacttttttaaattgtcacaaaagcgcatctccagattccagaccctgccgcatgacttttcctgaaggcttgcttttccctcgcctttcctgaaggtcgcattagagcgagtcacatggagcatcctaactttgcattttagtttttacagtgaactgaagctttaagtctcatccagcattctaatgccaggttgctgtagggtaacttttgaagtagatatattacctggttctgctatccttagtcataactctgcggtacaggtaattgagaatgtactacggtacttccctcccacaccatacgataaagcaagacattttataacgataccagagtcactatgtggtcctccctgaaataacgcattcgaaatccatgcagtgcagtatatttttctaagttttggaaagcaggttttttcctttaaaaaaattatagacacggttcactaaattgatttagtcagaattcctagactgaaagaacctaaacaaaaaaatattttaaagatataaatatatgctgtatatgttatgtaatttattttaggctataatacatttcctattttcgcattttcaataaaatgtctctaatacaatacggtgattgcttgtgtgctcaacatacctgcagttgaaacgtattgtatcaatgaacattgtaccttattggcagcagttttataaagtccgtcatttgcatttgaatgtaaggctcagtaaatgacagaactatttttcattatgggtaactggggaataaatgggtcactggagtaggaatagaagtgcaagctggaaaggcaaaaatgagaaagaaaaaggcaggccctttgtgtctaccgttttcagtgctgtgtgatcatattgttcctcacagcaaaaaagaatgcaagggcataatgttagctgtgaacatgccagggttgcattcacattcctgggtacccagtgctgatggggtgtgcccacgtggggacatgtccttggcgtgcttcctcagagtggcttttcctccattaatacatatatgagtactgaaaaattaagttgcatagctgctttgcagtggtttcagaggcagatctgagaagattaaaaaaaaatctcaatgtatcagctttttttaaaggacattactagaaaattaaacagtattttttaacatgtgtgactttcatgcttctggggttggagcttaaagatccaaactgagaaagcaggccgggcatggtggctcatgcctgtaatcccaacactttgggaggccaaggagggtggatcacttaaggtcaggagtttgagaccagcctggccaacatggcaaaaccctgtctctactaaaaacataaaaattagctgggggtggtagcacatacctgtaatcccagctactcaggaggctgaggcaggagaatttgcttgatcctgggaggcagaggttgtagtgagccgagatcgcgccatcgcactccagcctgggtgacaagagcaaaactccatctc

SEQ ID NO: 12079 - DNA, 5540 bp, Homo sapiens
tcccagccggctgaggcgggcagggccgggcggggccgcgccacggagcccacagcccggcgctccctgccgcgccgccgccgcaccgcgccccacaggagaagacgaaccgggcccggcggccgaagcggcccgcgaggcgcgggaggcatgaagttgggcgcgcacgggcctcgaagcggcggggagccgggagccgcccgcatctagagcccgcgaggtgcgtgcgccatggagctagggggccccggagcgccgcggctgctgccgccgctgctgctgcttctggggaccggcctcctgcgcgccagcagccatgtggagacccgggcccacgccgaggagcggctcctgaagaaactcttctccggttacaacaagtggtcccgacccgtggccaacatctcggacgtggtcctcgtccgcttcggcctgtccatcgctcagctcattgacgtggatgagaagaaccagatgatgaccacgaacgtatgggtgaagcaggagtggcacgactacaagctgcgctgggacccagctgactatgagaatgtcacctccatccgcatcccctccgagctcatctggcggccggacatcgtcctctacaacaatgctgacggggacttcgcggtcacccacctgaccaaggcccacctgttccatgacgggcgggtgcagtggactcccccggccatttacaagagctcctgcagcatcgacgtcaccttcttccccttcgaccagcagaactgcaccatgaaattcggctcctggacctacgacaaggccaagatcgacctggtgaacatgcacagccgcgtggaccagctggacttctgggagagtggcgagtgggtcatcgtggatgccgtgggcacctacaacaccaggaagtacgagtgctgtgccgagatctacccggacatcacctatgccttcgtcatccggcggctgccgctcttctacaccatcaacctcatcatcccctgcctgctcatctcctgcctcaccgtgctggtcttctacctgccctccgagtgtggcgagaagatcacgctgtgcatctccgtgctgctgtcgctcaccgtcttcctgctgctcatcaccgagatcatcccgtccacctcactggtcatcccactcatcggcgagtacctgctgttcaccatgatcttcgtcaccctgtccatcgtcatcacggtcttcgtgctcaacgtgcaccaccgctcgccacgcacgcacaccatgcccacctgggtacgcagggtcttcctggacatcgtgccacgcctgctcctcatgaagcggccgtccgtggtcaaggacaattgccggcggctcatcgagtccatgcataagatggccagtgccccgcgcttctggcccgagccagaaggggagccccctgccacgagcggcacccagagcctgcacccgccctcaccgtccttctgtgtccccctggatgtgccggctgagcctgggccttcctgcaagtcaccctccgaccagctccctcctcagcagcccctggaagctgagaaagccagcccccacccctcgcctggaccctgccgcccgccccacggcacccaggcaccagggctggccaaagccaggtccctcagcgtccagcacatgtccagccctggcgaagcggtggaaggcggcgtccggtgccggtctcggagcatccagtactgtgttccccgagacgatgccgcccccgaggcagatggccaggctgccggcgccctggcctctcgcaacacccactcggctgagctcccacccccagaccagccctctccgtgcaaatgcacatgcaagaaggagccctcttcggtgtccccgagcgccacggtcaagacccgcagcaccaaagcgccgcccccgcacctgcccctgtcgccggccctgacccgggcggtggagggcgtccagtacattgcagaccacctgaaggccgaagacacagacttctcggtgaaggaggactggaagtacgtggccatggtcatcgaccgcatcttcctctggatgttcatcatcgtctgcctgctggggacggtgggcctcttcctgccgccctggctggctggcatgatctaggaagggaccgggagcctgcgtggcctggggctgccgtgcacggggccagcatccatgcggccggcctggggccgggctggcttctccctggactctgtggggccacacgtttgccaaattttccttcctgttctgtgtctgctgtaagacggccttggacggggacacggcctctggggagaccgagtgtggagctgcttccagttggactgtggcctcaggaggcagtggcttggagcagaggtgggggtcggcgccttctacctgcaggactcgggctaagtccagttcaagagtctcctgagctcccctgcagatggaactcactcctcccagtctctcagcagatctggtgatggtcccgaccgccccaaggggcccttgaagggagttcacgccccttcagccccaagcgccccgtcttctggaggcccggccgcctctcccacccaccgtgtcctgcgcctgtgtgggcttcaacttctcccccagggtccttgagcctctcgggccccatgagggtgagccagcagggctccaatctgcttcgctaggagagggtccaggcagggattgtgtttggttgtgttttgggtaagttagtgagaactcaagtcttgtgcctaaggagccttggagaacagagttttgtggagctggttccgcgtggggagaatcgggaggcccacgcgggaccagctctcccctgcgcaggccctccgcgggggacaggaacacccagccccagcgagtctggagaccaggactctgccttccaggcgtagggccagggctctggcaggtggccagggctccacgggggcctagtggcttcagcccctggggtacttctgtgttgtgattccccggagctgggaaggtcccgaatggagtccagacctgggccctggttcccccaggaccctgagggtttccaccttggcgcgcagcccgggagatccgccctgggctctgggttcgggaagaaggacttcctgctacagtagctgtggggagctggtgggggcatccttgaggacctccacctgggagatgctgggaccctcggggcaggaagtccctgagaagcctcatgggagtcagggagccctggggtttccacacaggcccatgccctccgtcctggcagggcaggcagagctcagcacagcctcacccctgcaggcggtatccagaggtgagggaggcctgaaatgtttccaggcatgaccctggagcccggcagtgcaccccctaaagatggcgcacccggcagccccccagtgtccccaggggcacacttccccttgggatgggcacaggctgccccacccctccatgattccaagggcccagaggggcggggccaggatggcgtgtcccctgcctgtgagtgacatcggttcaggaggagacagtcaggaagcctcctgctgagtggtccacattctgctgcccccagaccccatccagccaggggtggggatggggttgggctctgcgtcccactgagtctcattcctctgtccccgagccgagctctcctgggccagggtctcgtcaggaggtgcctgagagcagaatgaataattgaggttaggaacccggcatgccgagtgccccagaaatgccgctgtgtccccgcgggcagtgacgtgagtggggaggagactcaggcccacattgcccacacctgcctctgaactgctgctggtcacccccacccccgggtgcctgtgaccggggtcctgaggctggggcttttgtgccaggagtgggtgggacacagagacccccgtgccaaatcctgggcatccccagccccctggcccctcccacatcccccgtgtattcaggaccccatctgctgagctctgacctgcccccgctctgccatcagcccctgctgctcctcggccagagctcccaggacgcagggagaccctgggagagtgaggtcatcccggggccatggaagctggcaggagacactggtctcagaggagggatagagacgcagatttcagatgtaagaagcccgatccacattgcataagtggacccagctgccagatgtgtgggcagctgcagggagtggcccggggtgctgggcccagctgtggttgttcttttctgggtcaggagtgactgcggagtggctgggacgctcctgccgggggaccctcctgccgggggtggccgcttgcctgggggaagacccctttccctttctttttttttttgaggctcaaaaaaaaaatccaaataaagcaccatattcccaccacgccaaattaaccttgacaacaatgttggcgtatttgcgtccagtgctgtttttattaattaaggtaaaatttacatatggtgagatgcatgctcttcagtggagacccagcccctagaaggtccctccagcccttcctgtcggcgtccctccccatctgtggctctgacttaagcaccgtggattgacctctccggctcacgaccttcgaggagtcagaatcctgcagttggagcctttgatgtctggcttcttcatcctatgacttagagcttcatccgtgctgttgtgtgtgtccgtagctccttgctgtctgttccttcgtttttaattgtgagcagtgttcttctgtctgaataaactaagacgcagtttgtccatcacctgttagtggactttgcttgcagctgtcggtgattaggaatggaggtgccggtgtgtgcatggcactctatccgttatgcatgtttattttctgcatctgttaatgttttaacatctttcagacccaggactgctcctcctagggccagttagttcccgggggtggacagcttgcctagaacccaccttgccagggctgtgacccccgaccccctatcaaagtctcacactaagccaacgtttccccgccctgtgccaggcaccaggcagcgggagacactgctgcagctcgaagcctgccggggcgccggcccctctgcggctgcttgcgccatcctgccccctccttcccaggggaggccccagtgaaggccctggccagggcttcccagccccttctgcctccggaccggcctgggtgcttcccgtgtggcccggcctggggcgacgtggccctcctctcaggaagcgtggtaatctctcaatggctggcctccggagttgtcactcaggctcccttgtaagttaaggccgggcccaggacactctagggcacgcagctgctgtgggactgctgggttaggtgtcccctggagcagaggcggcttcggatttctaaagtggctgagtcctttcaccttgcaccagaaatgctggatcaggcgcagcacacacagcacctggggatgcaagcccggccagccccatggaccaagccccgccgaccgtgtggcccgccgagcccaggtgcggc

SEQ ID NO: 12080 - DNA, 4882 bp, Homo sapiens
agaggaggaaattgttcctcgtctgataagacaacagtggagaaaggacgcatgctgtttcttagggacacggctgacttccagatatgaccatgtatttgtggcttaaactcttggcatttggctttgcctttctggacacagaagtatttgtgacagggcaaagcccaacaccttcccccactggattgactacagcaaagatgcccagtgttccactttcaagtgaccccttacctactcacaccactgcattctcacccgcaagcacctttgaaagagaaaatgacttctcagagaccacaacttctcttagtccagacaatacttccacccaagtatccccggactctttggataatgctagtgcttttaataccacaggtgtttcatcagtacagacgcctcaccttcccacgcacgcagactcgcagacgccctctgctggaactgacacgcagacattcagcggctccgccgccaatgcaaaactcaaccctaccccaggcagcaatgctatctcagatgcctaccttaatgcctctgaaacaaccactctgagcccttctggaagcgctgtcatttcaaccacaacaatagctactactccatctaagccaacatgtgatgaaaaatatgcaaacatcactgtggattacttatataacaaggaaactaaattatttacagcaaagctaaatgttaatgagaatgtggaatgtggaaacaatacttgcacaaacaatgaggtgcataaccttacagaatgtaaaaatgcgtctgtttccatatctcataattcatgtactgctcctgataagacattaatattagatgtgccaccaggggttgaaaagtttcagttacatgattgtacacaagttgaaaaagcagatactactatttgtttaaaatggaaaaatattgaaacctttacttgtgatacacagaatattacctacagatttcagtgtggtaatatgatatttgataataaagaaattaaattagaaaaccttgaacccgaacatgagtataagtgtgactcagaaatactctataataaccacaagtttactaacgcaagtaaaattattaaaacagattttgggagtccaggagagcctcagattattttttgtagaagtgaagctgcacatcaaggagtaattacctggaatccccctcaaagatcatttcataattttaccctctgttatataaaagagacagaaaaagattgcctcaatctggataaaaacctgatcaaatatgatttgcaaaatttaaaaccttatacgaaatatgttttatcattacatgcctacatcattgcaaaagtgcaacgtaatggaagtgctgcaatgtgtcatttcacaactaaaagtgctcctccaagccaggtctggaacatgactgtctccatgacatcagataatagtatgcatgtcaagtgtaggcctcccagggaccgtaatggcccccatgaacgttaccatttggaagttgaagctggaaatactctggttagaaatgagtcgcataagaattgcgatttccgtgtaaaagatcttcaatattcaacagactacacttttaaggcctattttcacaatggagactatcctggagaaccctttattttacatcattcaacatcttataattctaaggcactgatagcatttctggcatttctgattattgtgacatcaatagccctgcttgttgttctctacaaaatctatgatctacataagaaaagatcctgcaatttagatgaacagcaggagcttgttgaaagggatgatgaaaaacaactgatgaatgtggagccaatccatgcagatattttgttggaaacttataagaggaagattgctgatgaaggaagactttttctggctgaatttcagagcatcccgcgggtgttcagcaagtttcctataaaggaagctcgaaagccctttaaccagaataaaaaccgttatgttgacattcttccttatgattataaccgtgttgaactctctgagataaacggagatgcagggtcaaactacataaatgccagctatattgatggtttcaaagaacccaggaaatacattgctgcacaaggtcccagggatgaaactgttgatgatttctggaggatgatttgggaacagaaagccacagttattgtcatggtcactcgatgtgaagaaggaaacaggaacaagtgtgcagaatactggccgtcaatggaagagggcactcgggcttttggagatgttgttgtaaagatcaaccagcacaaaagatgtccagattacatcattcagaaattgaacattgtaaataaaaaagaaaaagcaactggaagagaggtgactcacattcagttcaccagctggccagaccacggggtgcctgaggatcctcacttgctcctcaaactgagaaggagagtgaatgccttcagcaatttcttcagtggtcccattgtggtgcactgcagtgctggtgttgggcgcacaggaacctatatcggaattgatgccatgctagaaggcctggaagccgagaacaaagtggatgtttatggttatgttgtcaagctaaggcgacagagatgcctgatggttcaagtagaggcccagtacatcttgatccatcaggctttggtggaatacaatcagtttggagaaacagaagtgaatttgtctgaattacatccatatctacataacatgaagaaaagggatccacccagtgagccgtctccactagaggctgaattccagagacttccttcatataggagctggaggacacagcacattggaaatcaagaagaaaataaaagtaaaaacaggaattctaatgtcatcccatatgactataacagagtgccacttaaacatgagctggaaatgagtaaagagagtgagcatgattcagatgaatcctctgatgatgacagtgattcagaggaaccaagcaaatacatcaatgcatcttttataatgagctactggaaacctgaagtgatgattgctgctcagggaccactgaaggagaccattggtgacttttggcagatgatcttccaaagaaaagtcaaagttattgttatgctgacagaactgaaacatggagaccaggaaatctgtgctcagtactggggagaaggaaagcaaacatatggagatattgaagttgacctgaaagacacagacaaatcttcaacttatacccttcgtgtctttgaactgagacattccaagaggaaagactctcgaactgtgtaccagtaccaatatacaaactggagtgtggagcagcttcctgcagaacccaaggaattaatctctatgattcaggtcgtcaaacaaaaacttccccagaagaattcctctgaagggaacaagcatcacaagagtacacctctactcattcactgcagggatggatctcagcaaacgggaatattttgtgctttgttaaatctcttagaaagtgcggaaacagaagaggtagtggatatttttcaagtggtaaaagctctacgcaaagctaggccaggcatggtttccacattcgagcaatatcaattcctatatgacgtcattgccagcacctaccctgctcagaatggacaagtaaagaaaaacaaccatcaagaagataaaattgaatttgataatgaagtggacaaagtaaagcaggatgctaattgtgttaatccacttggtgccccagaaaagctccctgaagcaaaggaacaggctgaaggttctgaacccacgagtggcactgaggggccagaacattctgtcaatggtcctgcaagtccagctttaaatcaaggttcataggaaaagacataaatgaggaaactccaaacctcctgttagctgttatttctatttttgtagaagtaggaagtgaaaataggtatacagtggattaattaaatgcagcgaaccaatatttgtagaagggttatattttactactgtggaaaaatatttaagatagttttgccagaacagtttgtacagacgtatgcttattttaaaattttatctcttattcagtaaaaaacaacttctttgtaatcgttatgtgtgtatatgtatgtgtgtatgggtgtgtgtttgtgtgagagacagagaaagagagagaattctttcaagtgaatctaaaagcttttgcttttcctttgtttttatgaagaaaaaatacattttatattagaagtgttaacttagcttgaaggatctgtttttaaaaatcataaactgtgtgcagactcaataaaatcatgtacatttctgaaatgacctcaagatgtcctccttgttctactcatatatatctatcttatatacttactattttacttctagagatagtacataaaggtggtatgtgtgtgtatgctactacaaaaaagttgttaactaaattaacattgggaaatcttatattccatatattagcatttagtccaatgtctttttaagcttatttaattaaaaaatttccagtgagcttatcatgctgtctttacatggggttttcaattttgcatgctcgattattccctgtacaatatttaaaatttattgcttgatacttttgacaacaaattaggttttgtacaattgaacttaaataaatgtcattaaaataaataaatgcaatatgtattaatattcattgtataaaaatagaagaatacaaacatatttgttaaatatttacatatgaaatttaatatagctatttttatggaatttttcattgatatgaaaaatatgatattgcatatgcatagttcccatgttaaatcccattcataactttcattaaagcatttactttgaatttc

SEQ ID NO: 12081 - DNA, 8464 bp, Homo sapiens
ggaaggggcccggatgtactgaggatgcgttacagtttcactcgaggaggcagtagtggaaaggagcagtttttggggtttgatgccataatgggaatcaggtaatcgtcggcggggaagaagaaacgctgcagaccacggcttcctcgaatcttgcgcgaaagccgccggcctcggaggagggattaatccagacccgccggggggtgttttcacatttcttcctcttcgtggctgctcctcctattaaaaccatttttggtccatggtcaatgagaatacgaggatgtacattccagaggaaaaccaccaaggttccaactatgggagcccacgccccgcccatgccaacatgaatgccaatgcggcagcggggctggcccctgagcacatccccaccccgggggctgccctgtcgtggcaggcggccatcgacgcagcccggcaggctaagctgatgggcagcgctggcaatgcgaccatctccacagtcagctccacgcagcggaagcggcagcaatatgggaaacccaagaagcagggcagcaccacggccacacgcccgccccgagccctgctctgcctgaccctgaagaaccccatccggagggcctgcatcagcattgtcgaatggaaatcatttgaaataattattttactgactatttttgccaattgtgtggccttagcgatctatattccctttccagaagatgattccaacgccaccaattccaacctggaacgagtggaatatctctttctcataatttttacggtggaagcgtttttaaaagtaatcgcctatggactcctctttcaccccaatgcctacctccgcaacggctggaacctactagattttataattgtggttgtggggctttttagtgcaattttagaacaagcaaccaaagcagatggggcaaacgctctcggagggaaaggggccggatttgatgtgaaggcgctgagggccttccgcgtgctgcgccccctgcggctggtgtccggagtcccaagtctccaggtggtcctgaattccatcatcaaggccatggtccccctgctgcacatcgccctgcttgtgctgtttgtcatcatcatctacgccatcatcggcttggagctcttcatggggaagatgcacaagacctgctacaaccaggagggcatagcagatgttccagcagaagatgacccttccccttgtgcgctggaaacgggccacgggcggcagtgccagaacggcacggtgtgcaagcccggctgggatggtcccaagcacggcatcaccaactttgacaactttgccttcgccatgctcacggtgttccagtgcatcaccatggagggctggacggacgtgctgtactgggtcaatgatgccgtaggaagggactggccctggatctattttgttacactaatcatcatagggtcattttttgtacttaacttggttctcggtgtgcttagcggagagttttccaaagagagggagaaggccaaggcccggggagatttccagaagctgcgggagaagcagcagctagaagaggatctcaaaggctacctggattggatcactcaggccgaagacatcgatcctgagaatgaggacgaaggcatggatgaggagaagccccgaaacatgagcatgcccaccagtgagaccgagtccgtcaacaccgaaaacgtggctggaggtgacatcgagggagaaaactgcggggccaggctggcccaccggatctccaagtcaaagttcagccgctactggcgccggtggaatcggttctgcagaaggaagtgccgcgccgcagtcaagtctaatgtcttctactggctggtgattttcctggtgttcctcaacacgctcaccattgcctctgagcactacaaccagcccaactggctcacagaagtccaagacacggcaaacaaggccctgctggccctgttcacggcagagatgctcctgaagatgtacagcctgggcctgcaggcctacttcgtgtccctcttcaaccgctttgactgcttcgtcgtgtgtggcggcatcctggagaccatcctggtggagaccaagatcatgtccccactgggcatctccgtgctcagatgcgtccggctgctgaggattttcaagatcacgaggtactggaactccttgagcaacctggtggcatccttgctgaactctgtgcgctccatcgcctccctgctccttctcctcttcctcttcatcatcatcttctccctcctggggatgcagctctttggaggaaagttcaactttgatgagatgcagacccggaggagcacattcgataacttcccccagtccctcctcactgtgtttcagatcctgaccggggaggactggaattcggtgatgtatgatgggatcatggcttatggcggcccctcttttccagggatgttagtctgtatttacttcatcatcctcttcatctgtggaaactatatcctactgaatgtgttcttggccattgctgtggacaacctggctgatgctgagagcctcacatctgcccaaaaggaggaggaagaggagaaggagagaaagaagctggccaggactgccagcccagagaagaaacaagagttggtggagaagccggcagtgggggaatccaaggaggagaagattgagctgaaatccatcacggctgacggagagtctccacccgccaccaagatcaacatggatgacctccagcccaatgaaaatgaggataagagcccctaccccaacccagaaactacaggagaagaggatgaggaggagccagagatgcctgtcggccctcgcccacgaccactctctgagcttcaccttaaggaaaaggcagtgcccatgccagaagccagcgcgtttttcatcttcagctctaacaacaggtttcgcctccagtgccaccgcattgtcaatgacacgatcttcaccaacctgatcctcttcttcattctgctcagcagcatttccctggctgctgaggacccggtccagcacacctccttcaggaaccatattctgttttattttgatattgtttttaccaccattttcaccattgaaattgctctgaagatgactgcttatggggctttcttgcacaagggttctttctgccggaactacttcaacatcctggacctgctggtggtcagcgtgtccctcatctcctttggcatccagtccagtgcaatcaatgtcgtgaagatcttgcgagtcctgcgagtactcaggcccctgagggccatcaacagggccaaggggctaaagcatgtggttcagtgtgtgtttgtcgccatccggaccatcgggaacatcgtgattgtcaccaccctgctgcagttcatgtttgcctgcatcggggtccagctcttcaagggaaagctgtacacctgttcagacagttccaagcagacagaggcggaatgcaagggcaactacatcacgtacaaagacggggaggttgaccaccccatcatccaaccccgcagctgggagaacagcaagtttgactttgacaatgttctggcagccatgatggccctcttcaccgtctccaccttcgaagggtggccagagctgctgtaccgctccatcgactcccacacggaagacaagggccccatctacaactaccgtgtggagatctccatcttcttcatcatctacatcatcatcatcgccttcttcatgatgaacatcttcgtgggcttcgtcatcgtcacctttcaggagcagggggagcaggagtacaagaactgtgagctggacaagaaccagcgacagtgcgtggaatacgccctcaaggcccggcccctgcggaggtacatccccaagaaccagcaccagtacaaagtgtggtacgtggtcaactccacctacttcgagtacctgatgttcgtcctcatcctgctcaacaccatctgcctggccatgcagcactacggccagagctgcctgttcaaaatcgccatgaacatcctcaacatgctcttcactggcctcttcaccgtggagatgatcctgaagctcattgccttcaaacccaagcactatttctgtgatgcatggaatacatttgacgccttgattgttgtgggtagcattgttgatatagcaatcaccgaggtaaacccagctgaacatacccaatgctctccctctatgaacgcagaggaaaactcccgcatctccatcaccttcttccgcctgttccgggtcatgcgtctggtgaagctgctgagccgtggggagggcatccggacgctgctgtggaccttcatcaagtccttccaggccctgccctatgtggccctcctgatcgtgatgctgttcttcatctacgcggtgatcgggatgcaggtgtttgggaaaattgccctgaatgataccacagagatcaaccggaacaacaactttcagaccttcccccaggccgtgctgctcctcttcaggtgtgccaccggggaggcctggcaggacatcatgctggcctgcatgccaggcaagaagtgtgccccagagtccgagcccagcaacagcacggagggtgaaacaccctgtggtagcagctttgctgtcttctacttcatcagcttctacatgctctgtgccttcctgatcatcaacctctttgtagctgtcatcatggacaactttgactacctgacaagggactggtccatccttggtccccaccacctggatgagtttaaaagaatctgggcagagtatgaccctgaagccaagggtcgtatcaaacacctggatgtggtgaccctcctccggcggattcagccgccactaggttttgggaagctgtgccctcaccgcgtggcttgcaaacgcctggtctccatgaacatgcctctgaacagcgacgggacagtcatgttcaatgccaccctgtttgccctggtcaggacggccctgaggatcaaaacagaagggaacctagaacaagccaatgaggagctgcgggcgatcatcaagaagatctggaagcggaccagcatgaagctgctggaccaggtggtgccccctgcaggtgatgatgaggtcaccgttggcaagttctacgccacgttcctgatccaggagtacttccggaagttcaagaagcgcaaagagcagggccttgtgggcaagccctcccagaggaacgcgctgtctctgcaggctggcttgcgcacactgcatgacatcgggcctgagatccgacgggccatctctggagatctcaccgctgaggaggagctggacaaggccatgaaggaggctgtgtccgctgcttctgaagatgacatcttcaggagggccggtggcctgttcggcaaccacgtcagctactaccaaagcgacggccggagcgccttcccccagaccttcaccactcagcgcccgctgcacatcaacaaggcgggcagcagccagggcgacactgagtcgccatcccacgagaagctggtggactccaccttcaccccgagcagctactcgtccaccggctccaacgccaacatcaacaacgccaacaacaccgccctgggtcgcctccctcgccccgccggctaccccagcacggtcagcactgtggagggccacgggccccccttgtcccctgccatccgggtgcaggaggtggcgtggaagctcagctccaacaggtgccactcccgggagagccaggcagccatggcgggtcaggaggagacgtctcaggatgagacctatgaagtgaagatgaaccatgacacggaggcctgcagtgagcccagcctgctctccacagagatgctctcctaccaggatgacgaaaatcggcaactgacgctcccagaggaggacaagagggacatccggcaatctccgaagaggggtttcctccgctctgcctcactaggtcgaagggcctccttccacctggaatgtctgaagcgacagaaggaccgagggggagacatctctcagaagacagtcctgcccttgcatctggttcatcatcaggcattggcagtggcaggcctgagccccctcctccagagaagccattcccctgcctcattccctaggccttttgccaccccaccagccacacctggcagccgaggctggcccccacagcccgtccccaccctgcggcttgagggggtcgagtccagtgagaaactcaacagcagcttcccatccatccactgcggctcctgggctgagaccacccccggtggcgggggcagcagcgccgcccggagagtccggcccgtctccctcatggtgcccagccaggctggggccccagggaggcagttccacggcagtgccagcagcctggtggaagcggtcttgatttcagaaggactggggcagtttgctcaagatcccaagttcatcgaggtcaccacccaggagctggccgacgcctgcgacatgaccatagaggagatggagagcgcggccgacaacatcctcagcgggggcgccccacagagccccaatggcgccctcttaccctttgtgaactgcagggacgcggggcaggaccgagccgggggcgaagaggacgcgggctgtgtgcgcgcgcggggtcgaccgagtgaggaggagctccaggacagcagggtctacgtcagcagcctgtagtgggcgctgccagatgcgggcttttttttatttgtttcaatgttcctaatgggttcgtttcagaagtgcctcactgttctcgtgacctggagttaaccggaacagcgtcttcattcatttctgttgggaccagacgcggagcctgggtgcgcgagccgccctccgggaggaaggcgcccggctgcgtctgcagaggcggggagaggaggcggcgagggtcccggggcgcgaggaaggcgcctgccctctcccagctcgcaggccccgggcccggccgcgcctctgcggggagagcaccccggcttcccgcgcgccctcaccaaaaggaccctacagcaaacgggtgtctttcgactctgcttgtagaaaccatttgcacatattctgtacgagcctcgctgtctccctagagccagggccctgcggatttggagaagggagcggggcaggacttccaggaggaccccaacccggcccggagagggaggaggaggcctccaggggcgcggagctctggggatgggcgtcgggccggcagtggtgcggctcactccgtccctgcccacctgcgacgggatcccccgaccggcacgggccacgccgagctcccggccagccgccggcccgcaggcagcgcgagggaggagctgcgccgccgggaaggggccgccggctccgcccaaccaggtggtgctgagcttccgctgagcgctcttttgttttgtggtttgacacttttcttgacagcatgttgcagtttcttttcggttttggttttttttaaatgttttattttgctttcccagcgggaggggaggaagaagagtgtttacaaagtcctgtagccccctcacctttctgttttcacttttgccaatgtacatcgggtttggttttcttgtattatttaaacggttgtggtttcctttttccacggaggttcaatagaagccgctgcaggagagttttaccaaccattgtgtatgcccaataatttgttatcatttccttaggtagtaacctatttttgttctggtttggttcggttatctaatggaaaggtaactggcaatgcacttgatgtggtcttgcacatgtgggtgatagagttgggttcctttttatgctgggtgtacaggtgggtttgggagagaggagcatgcgcgagagagtctccgagtgtgtgcgacgcgtgtgtgtgtggtgggttgtctgtgtgcatatgtcctgcccgtgtatatgcacccacaccatgtgcccgtgcacaccagtgactacgcagtcccccctttctggtttagctgtgggaagatctgaatctggggccgtttgaaagcaaaaacaaaccactgtctctgcttctgaaacgggaatcagtaactctttgcattttctgtcccacaagatatgcaaaaacaatgcaataatattcatttaaaaatacaattgtgagttgtgttggcattaaaactgtattttaaaaaaagacagaaatttaagggaaaaacacaagaaggcattttgcttcaatatattccgtgtaatgttttattgcattgataatgtttctgttgaagaaaccgttatacttgaattcaggtcagtttcagtatttttcaaatatttttttaaaactgaattgcaattgtgccaagcgaatataatgaattgaattaagttggttttcggattcacttcttgtatattttgctgcatgtaaagtaaatcattttgtatttggagtgtgacaagctttaaaaaaaaaaaaaaaaaaaaaaaaaa

SEQ ID NO: 12082 - DNA, 5874 bp, Homo sapiens
atggaattccccattggatccctcgaaactaacaacttccgtcgctttactccggagtcactggtggagatagagaagcaaattgctgccaagcagggaacaaagaaagccagagagaagcatagggagcagaaggaccaagaagagaagcctcggccccagctggacttgaaagcctgcaaccagctgcccaagttctatggtgagctcccagcagaactgatcggggagcccctggaggatctagatccgttctacagcacacaccggacatttatggtgctgaacaaagggaggaccatttcccggtttagtgccactcgggccctgtggctattcagtcctttcaacctgatcagaagaacggccatcaaagtgtctgtccactcgtggttcagtttatttattacggtcactattttggttaattgtgtgtgcatgacccgaactgaccttccagagaaaattgaatatgtcttcactgtcatttacacctttgaagccttgataaagatactggcaagaggattttgtctaaatgagttcacgtacctgagagatccttggaactggctggattttagcgtcattaccctggcatatgttggcacagcaatagatctccgtgggatctcaggcctgcggacattcagagttcttagagcattaaaaacagtttctgtgatcccaggcctgaaggtcattgtgggggccctgattcactcagtgaagaaactggctgatgtgaccatcctcaccatcttctgcctaagtgtttttgccttggtggggctgcaactcttcaagggcaacctcaaaaataaatgtgtcaagaatgacatggctgtcaatgagacaaccaactactcatctcacagaaaaccagatatctacataaataagcgaggcacttctgaccccttactgtgtggcaatggatctgactcaggccactgccctgatggttatatctgccttaaaacttctgacaacccggattttaactacaccagctttgattcctttgcttgggctttcctctcactgttccgcctcatgacacaggattcctgggaacgcctctaccagcagaccctgaggacttctgggaaaatctatatgatcttttttgtgctcgtaatcttcctgggatctttctacctggtcaacttgatcttggctgtagtcaccatggcgtatgaggagcagaaccaggcaaccactgatgaaattgaagcaaaggagaagaagttccaggaggccctcgagatgctccggaaggagcaggaggtgctagcagcactagggattgacacaacctctctccactcccacaatggatcacctttaacctccaaaaatgccagtgagagaaggcatagaataaagccaagagtgtcagagggctccacagaagacaacaaatcaccccgctctgatccttacaaccagcgcaggatgtcttttctaggcctcgcctctggaaaacgccgggctagtcatggcagtgtgttccatttccggtcccctggccgagatatctcactccctgagggagtcacagatgatggagtctttcctggagaccacgaaagccatcggggctctctgctgctgggtgggggtgctggccagcaaggccccctccctagaagccctcttcctcaacccagcaaccctgactccaggcatggagaagatgaacaccaaccgccgcccactagtgagcttgcccctggagctgtcgatgtctcggcattcgatgcaggacaaaagaagactttcttgtcagcagaatacttagatgaacctttccgggcccaaagggcaatgagtgttgtcagtatcataacctccgtccttgaggaactcgaggagtctgaacagaagtgcccaccctgcttgaccagcttgtctcagaagtatctgatctgggattgctgccccatgtgggtgaagctcaagacaattctctttgggcttgtgacggatccctttgcagagctcaccatcaccttgtgcatcgtggtgaacaccatcttcatggccatggagcaccatggcatgagccctaccttcgaagccatgctccagataggcaacatcgtctttaccatattttttactgctgaaatggtcttcaaaatcattgccttcgacccatactattatttccagaagaagtggaatatctttgactgcatcatcgtcactgtgagtctgctagagctgggcgtggccaagaagggaagcctgtctgtgctgcggagcttccgcttgctgcgcgtattcaagctggccaaatcctggcccaccttaaacacactcatcaagatcatcggaaactcagtgggggcactggggaacctcaccatcatcctggccatcattgtctttgtctttgctctggttggcaagcagctcctaggggaaaactaccgtaacaaccgaaaaaatatctccgcgccccatgaagactggccccgctggcacatgcacgacttcttccactctttcctcattgtcttccgtatcctctgtggagagtggattgagaacatgtgggcctgcatggaagttggccaaaaatccatatgcctcatccttttcttgacggtgatggtgctagggaacctggtggtgcttaacctgttcatcgccctgctattgaactctttcagtgctgacaacctcacagccccggaggacgatggggaggtgaacaacctgcaggtggccctggcacggatccaggtctttggccatcgtaccaaacaggctctttgcagcttcttcagcaggtcctgcccattcccccagcccaaggcagagcctgagctggtggtgaaactcccactctccagctccaaggctgagaaccacattgctgccaacactgccagggggagctctggagggctccaagctcccagaggccccagggatgagcacagtgacttcatcgctaatccgactgtgtgggtctctgtgcccattgctgagggtgaatctgatcttgatgacttggaggatgatggtggggaagatgctcagagcttccagcaggaagtgatccccaaaggacagcaggagcagctgcagcaagtcgagaggtgtggggaccacctgacacccaggagcccaggcactggaacatcttctgaggacctggctccatccctgggtgagacgtggaaagatgagtctgttcctcaggcccctgctgagggagtggacgacacaagctcctctgagggcagcacggtggactgcctagatcctgaggaaatcctgaggaagatccctgagctggcagatgacctggaagaaccagatgactgcttcacagaaggatgcattcgccactgtccctgctgcaaactggataccaccaagagtccatgggatgtgggctggcaggtgcgcaagacttgctaccgtatcgtggagcacagctggtttgagagcttcatcatcttcatgatcctgctcagcagtggatctctggcctttgaagactattacctggaccagaagcccacggtgaaagctttgctggagtacactgacagggtcttcacctttatctttgtgttcgagatgctgcttaagtgggtggcctatggcttcaaaaagtacttcaccaatgcctggtgctggctggacttcctcattgtgaatatctcactgataagtctcacagcgaagattctggaatattctgaagtggctcccatcaaagcccttcgaacccttcgcgctctgcggccactgcgggctctttctcgatttgaaggcatgcgggtggtggtggatgccctggtgggcgccatcccatccatcatgaatgtcctcctcgtctgcctcatcttctggctcatcttcagcatcatgggtgtgaacctcttcgcagggaagttttggaggtgcatcaactataccgatggagagttttcccttgtacctttgtcgattgtgaataacaagtctgactgcaagattcaaaactccactggcagcttcttctgggtcaatgtgaaagtcaactttgataatgttgcaatgggttaccttgcacttctgcaggtggcaacctttaaaggctggatggacattatgtatgcagctgttgattcccgggaggtcaacatgcaacccaagtgggaggacaacgtgtacatgtatttgtactttgtcatcttcatcatttttggaggcttcttcacactgaatctctttgttggggtcataattgacaacttcaatcaacagaaaaaaaagttagggggccaggacatcttcatgacagaggagcagaagaaatactacaatgccatgaagaagttgggctccaagaagccccagaagcccatcccacggcccctgaacaagttccagggttttgtctttgacatcgtgaccagacaagcttttgacatcaccatcatggtcctcatctgcctcaacatgatcaccatgatggtggagactgatgaccaaagtgaagaaaagacgaaaattctgggcaaaatcaaccagttctttgtggccgtcttcacaggcgaatgtgtcatgaagatgttcgctttgaggcagtactacttcacaaatggctggaatgtgtttgacttcattgtggtggttctctccattgcgagcctgattttttctgcaattcttaagtcacttcaaagttacttctccccaacgctcttcagagtcatccgcctggcccgaattggccgcatcctcagactgatccgagcggccaaggggatccgcacactgctctttgccctcatgatgtccctgcctgccctcttcaacatcgggctgttgctattccttgtcatgttcatctactccatcttcggtatgtccagctttccccatgtgaggtgggaggctggcatcgacgacatgttcaacttccagaccttcgccaacagcatgctgtgcctcttccagattaccacgtcggccggctgggatggcctcctcagccccatcctcaacacagggcccccctactgtgaccccaatctgcccaacagcaatggcaccagaggggactgtgggagcccagccgtaggcatcatcttcttcaccacctacatcatcatctccttcctcatcgtggtcaacatgtacattgcagtgattctggagaacttcaatgtggccacggaggagagcactgagcctctgagtgaggacgactttgacatgttctatgagacctgggagaagtttgacccagaggccactcagtttattaccttttctgctctctcggactttgcagacactctctctggtcccctgagaatcccaaaacccaatcgaaatatactgatccagatggacctgcctttggtccctggagataagatccactgcttggacatcctttttgctttcaccaagaatgtcctaggagaatccggggagttggattctctgaaggcaaatatggaggagaagtttatggcaactaatctttcaaaatcatcctatgaaccaatagcaaccactctccgatggaagcaagaagacatttcagccactgtcattcaaaaggcctatcggagctatgtgctgcaccgctccatggcactctctaacaccccatgtgtgcccagagctgaggaggaggctgcatcactcccagatgaaggttttgttgcattcacagcaaatgaaaattgtgtactcccagacaaatctgaaactgcttctgccacatcattcccaccgtcctatgagagtgtcactagaggccttagtgatagagtcaacatgaggacatctagctcaatacaaaatgaagatgaagccaccagtatggagctgattgcccctgggccctagtga

SEQ ID NO: 12083 - DNA, 5785 bp, Homo sapiens
atctctatccttcttctggtccttcctagaaaatcaggtggagatgatagtggcttgcatgatggtggtagagctggaggtgcagggcaaaggtcagattctgaatatattttgaaagtaaaggcaacaagatttcctgacagattgattatggtgtgtcaaagaaagagaggaatgcaggatgattccagtgtttttgttgacaactataagtctggagctgccaactggatgcagaagttcactggagggcccagcctggggaaaggatcaggagcaggttaggcatgttaagcttgagatgtctgttaaacatccagataggaatgtcaaagatgcacttgtgtttaagagtcaggaatgcaagagggaattttaggctagaaacaaaaagttagaaattattcgatacagatggtatttaaagctgtgtgactgactgacatgacagaagtggcgagaatagactgagaagtccaaggaatgagccttggaccactccagtgttaggtaagtagttgaaaaaaagagagagagagaaggcatcaaaggagactgaggaagagtgatcaggaaagcataggaaaatccgagaaacatatggtgtcctggaatctatatgaaaaagatatattcagaaagacagagtgataaatctgtcaaattattgaatttgtcaggtaaaataagaacagagaattgatctttggacttagcaaagcagagattatcagtgacttttataaaaatagtttcggtagtgtggaaagatcaaacttctgtttagagtgggtttcagagagaacaacaggaattgaagaagtaataaactttgccaaccagtttagctccaaaggaaaagagggaaatatgatggtagctggcaggggaagtgtggtcaagagaggttttttgtttgtttttcaagatggaagaaataacagtatgtatgtaagctcacaggagggatccagcaggcatggggaaattgatgatataggacagaaagggaagaatggctccttgtgaaagtgaaaggggatgggatctacaggatgaacatgcaaacaaagactggctgcaaagagaggcatgaatagttcatttacagaaacagcaaaggcagagtgttggtacagatgctggtaagtggaaaaatatcatggtaggaggttatggagttccattctaaacacttcaacttcatcagtgaaataagcacggtaatttagcagaatgtgaagatgtaaaagaacagaatttgagaaaacagacgatatgaaataattattagaaaagcagagactgaagaaactgtcatctccttatgtgctaatgagtttaataatgtcctccagtcaccacaagccttctttcaaactacacaattccaactgcttccgtctcagagtatcttgaaataatgatctgaccgcctgttagaccagtgaagggaaggaatttgggttgatttaagaagagaatcctcatggtcatggtagactgatatggagagaaaacattttgaggaaaaatactcaactaaattcatttctactccagcatgcagtttcaagtcaagttccaccttagctccaggtggcaggcagagcaggatgcagaggcacagcacaagtaagggatccaatgactgagtcaagaattacataacctggccagacagctggtacatgggaaagtgctaagagggcaccaacagcgttcctcctccccaaggagcataatgtgatggttcctgccggccctggctgactctcgccgtccttggagataattgggttcagtgccacctggaccagaactggggatgcggaagcaacctgccagacacgcgcgaggttcgaggctgagatggatcttgaggcggcaaagaacggaacagcctggcgccccacgagcgcggagggcgactttgaactgggcatcagcagcaaacaaaaaaggaaaaaaacgaagacagtgaaaatgattggagtattaacattgtttcgatactccgattggcaggataaattgtttatgtcgctgggtaccatcatggccatagctcacggatcaggtctccccctcatgatgatagtatttggagagatgactgacaaatttgttgatactgcaggaaacttctcctttccagtgaacttttccttgtcgctgctaaatccaggcaaaattctggaagaagaaatgactagatatgcatattactactcaggattgggtgctggagttcttgttgctgcctatatacaagtttcattttggactttggcagctggtcgacagatcaggaaaattaggcagaagttttttcatgctattctacgacaggaaataggatggtttgacatcaatgacaccactgaactcaatacgcggctaacagatgacatctccaaaatcagtgaaggaattggtgacaaggttggaatgttctttcaagcagtagccacgttttttgcaggattcatagtgggattcatcagaggatggaagctcacccttgtgataatggccatcagccctattctaggactctctgcagccgtttgggcaaagatactctcggcatttagtgacaaagaactagctgcttatgcaaaagcaggcgccgtggcagaagaggctctgggggccatcaggactgtgatagctttcgggggccagaacaaagagctggaaaggtatcagaaacatttagaaaatgccaaagagattggaattaaaaaagctatttcagcaaacatttccatgggtattgccttcctgttaatatatgcatcatatgcactggccttctggtatggatccactctagtcatatcaaaagaatatactattggaaatgcaatgacagtttttttttcaatcctaattggagctttcagtgttggccaggctgccccatgtattgatgcttttgccaatgcaagaggagcagcatatgtgatctttgatattattgataataatcctaaaattgacagtttttcagagagaggacacaaaccagacagcatcaaagggaatttggagttcaatgatgttcacttttcttacccttctcgagctaacgtcaagatcttgaagggcctcaacctgaaggtgcagagtgggcagacggtggccctggttggaagtagtggctgtgggaagagcacaacggtccagctgatacagaggctctatgaccctgatgagggcacaattaacattgatgggcaggatattaggaactttaatgtaaactatctgagggaaatcattggtgtggtgagtcaggagccggtgctgttttccaccacaattgctgaaaatatttgttatggccgtggaaatgtaaccatggatgagataaagaaagctgtcaaagaggccaacgcctatgagtttatcatgaaattaccacagaaatttgacaccctggttggagagagaggggcccagctgagtggtgggcagaagcagaggatcgccattgcacgtgccctggttcgcaaccccaagatccttctgctggatgaggccacgtcagcattggacacagaaagtgaagctgaggtacaggcagctctggataaggccagagaaggccggaccaccattgtgatagcacaccgactgtctacggtccgaaatgcagatgtcatcgctgggtttgaggatggagtaattgtggagcaaggaagccacagcgaactgatgaagaaggaaggggtgtacttcaaacttgtcaacatgcagacatcaggaagccagatccagtcagaagaatttgaactaaatgatgaaaaggctgccactagaatggccccaaatggctggaaatctcgcctatttaggcattctactcagaaaaaccttaaaaattcacaaatgtgtcagaagagccttgatgtggaaaccgatggacttgaagcaaatgtgccaccagtgtcctttctgaaggtcctgaaactgaataaaacagaatggccctactttgtcgtgggaacagtatgtgccattgccaatggggggcttcagccggcattttcagtcatattctcagagatcatagcgatttttggaccaggcgatgatgcagtgaagcagcagaagtgcaacatattctctttgattttcttatttctgggaattatttctttttttactttcttccttcagggtttcacgtttgggaaagctggcgagatcctcaccagaagactgcggtcaatggcttttaaagcaatgctaagacaggacatgagctggtttgatgaccataaaaacagtactggtgcactttctacaagacttgccacagatgctgcccaagtccaaggagccacaggaaccaggttggctttaattgcacagaatatagctaaccttggaactggtattatcatatcatttatctacggttggcagttaaccctattgctattagcagttgttccaattattgctgtgtcaggaattgttgaaatgaaattgttggctggaaatgccaaaagagataaaaaagaactggaagctgctggaaagattgcaacagaggcaatagaaaatattaggacagttgtgtctttgacccaggaaagaaaatttgaatcaatgtatgttgaaaaattgtatggaccttacaggaattctgtgcagaaggcacacatctatggaattacttttagtatctcacaagcatttatgtatttttcctatgccggttgttttcgatttggtgcatatctcattgtgaatggacatatgcgcttcagagatgttattctggtgttttctgcaattgtatttggtgcagtggctctaggacatgccagttcatttgctccagactatgctaaagctaagctgtctgcagcccacttattcatgctgtttgaaagacaacctctgattgacagctacagtgaagaggggctgaagcctgataaatttgaaggaaatataacatttaatgaagtcgtgttcaactatcccacccgagcaaacgtgccagtgcttcaggggctgagcctggaggtgaagaaaggccagacactagccctggtgggcagcagtggctgtgggaagagcacggtggtccagctcctggagcggttctacgaccccttggcggggacagtgtttgtggactttggttttcagcttctcgatggtcaagaagcaaagaaactcaatgtccagtggctcagagctcaactcggaatcgtgtctcaggagcctatcctatttgactgcagcattgccgagaatattgcctatggagacaacagccgggttgtatcacaggatgaaattgtgagtgcagccaaagctgccaacatacatcctttcatcgagacgttaccccacaaatatgaaacaagagtgggagataaggggactcagctctcaggaggtcaaaaacagaggattgctattgcccgagccctcatcagacaacctcaaatcctcctgttggatgaagctacatcagctctggatactgaaagtgaaaaggttgtccaagaagccctggacaaagccagagaaggccgcacctgcattgtgattgctcaccgcctgtccaccatccagaatgcagacttaatagtggtgtttcagaatgggagagtcaaggagcatggcacgcatcagcagctgctggcacagaaaggcatctatttttcaatggtcagtgtccaggctgggacacagaacttatgaacttttgctacagtatattttaaaaataaattcaaattattctacccatttt

SEQ ID NO: 12084 - DNA, 5623 bp, Homo sapiens
atctctatccttcttctggtccttcctagaaaatcaggtggagatgatagtggcttgcatgatggtggtagagctggaggtgcagggcaaaggtcagattctgaatatattttgaaagtaaaggcaacaagatttcctgacagattgattatggtgtgtcaaagaaagagaggaatgcaggatgattccagtgtttttgttgacaactataagtctggagctgccaactggatgcagaagttcactggagggcccagcctggggaaaggatcaggagcaggttaggcatgttaagcttgagatgtctgttaaacatccagataggaatgtcaaagatgcacttgtgtttaagagtcaggaatgcaagagggaattttaggctagaaacaaaaagttagaaattattcgatacagatggtatttaaagctgtgtgactgactgacatgacagaagtggcgagaatagactgagaagtccaaggaatgagccttggaccactccagtgttaggtaagtagttgaaaaaaagagagagagagaaggcatcaaaggagactgaggaagagtgatcaggaaagcataggaaaatccgagaaacatatggtgtcctggaatctatatgaaaaagatatattcagaaagacagagtgataaatctgtcaaattattgaatttgtcaggtaaaataagaacagagaattgatctttggacttagcaaagcagagattatcagtgacttttataaaaatagtttcggtagtgtggaaagatcaaacttctgtttagagtgggtttcagagagaacaacaggaattgaagaagtaataaactttgccaaccagtttagctccaaaggaaaagagggaaatatgatggtagctggcaggggaagtgtggtcaagagaggttttttgtttgtttttcaagatggaagaaataacagtatgtatgtaagctcacaggagggatccagcaggcatggggaaattgatgatataggacagaaagggaagaatggctccttgtgaaagtgaaaggggatgggatctacaggatgaacatgcaaacaaagactggctgcaaagagaggcatgaatagttcatttacagaaacagcaaaggcagagtgttggtacagatgctggtaagtggaaaaatatcatggtaggaggttatggagttccattctaaacacttcaacttcatcagtgaaataagcacggtaatttagcagaatgtgaagatgtaaaagaacagaatttgagaaaacagacgatatgaaataattattagaaaagcagagactgaagaaactgtcatctccttatgtgctaatgagtttaataatgtcctccagtcaccacaagccttctttcaaactacacaattccaactgcttccgtctcagagtatcttgaaataatgatctgaccgcctgttagaccagtgaagggaaggaatttgggttgatttaagaagagaatcctcatggtcatggtagactgatatggagagaaaacattttgaggaaaaatactcaactaaattcatttctactccagcatgcagtttcaagtcaagttccaccttagctccaggtggcaggcagagcaggatgcagaggcacagcacaagtaagggatccaatgactgagtcaagaattacataacctggccagacagctggtacatgggaaagtgctaagagggcaccaacagcgttcctcctccccaaggagcataatgtgatggttcctgccggccctggctgactctcgccgtccttggagataattgggttcagtgccacctggaccagaactggggatgcggaagcaacctgccagacacgcgcgaggttcgaggctgagatggatcttgaggcggcaaagaacggaacagcctggcgccccacgagcgcggagggcgactttgaactgggcatcagcagcaaacaaaaaaggaaaaaaacgaagacagtgaaaatgattggagtattaacattgtttcgatactccgattggcaggataaattgtttatgtcgctgggtaccatcatggccatagctcacggatcaggtctccccctcatgatgatagtatttggagagatgactgacaaatttgttgatactgcaggaaacttctcctttccagtgaacttttccttgtcgctgctaaatccaggcaaaattctggaagaagaaatgactagatatgcatattactactcaggattgggtgctggagttcttgttgctgcctatatacaagtttcattttggactttggcagctggtcgacagatcaggaaaattaggcagaagttttttcatgctattctacgacaggaaataggatggtttgacatcaatgacaccactgaactcaatacgcggctaacagatgacatctccaaaatcagtgaaggaattggtgacaaggttggaatgttctttcaagcagtagccacgttttttgcaggattcatagtgggattcatcagaggatggaagctcacccttgtgataatggccatcagccctattctaggactctctgcagccgtttgggcaaagatactctcggcatttagtgacaaagaactagctgcttatgcaaaagcaggcgccgtggcagaagaggctctgggggccatcaggactgtgatagctttcgggggccagaacaaagagctggaaaggtatcagaaacatttagaaaatgccaaagagattggaattaaaaaagctatttcagcaaacatttccatgggtattgccttcctgttaatatatgcatcatatgcactggccttctggtatggatccactctagtcatatcaaaagaatatactattggaaatgcaatgacagtttttttttcaatcctaattggagctttcagtgttggccaggctgccccatgtattgatgcttttgccaatgcaagaggagcagcatatgtgatctttgatattattgataataatcctaaaattgacagtttttcagagagaggacacaaaccagacagcatcaaagggaatttggagttcaatgatgttcacttttcttacccttctcgagctaacgtcaagatcttgaagggcctcaacctgaaggtgcagagtgggcagacggtggccctggttggaagtagtggctgtgggaagagcacaacggtccagctgatacagaggctctatgaccctgatgagggcacaattaacattgatgggcaggatattaggaactttaatgtaaactatctgagggaaatcattggtgtggtgagtcaggagccggtgctgttttccaccacaattgctgaaaatatttgttatggccgtggaaatgtaaccatggatgagataaagaaagctgtcaaagaggccaacgcctatgagtttatcatgaaattaccacagaaatttgacaccctggttggagagagaggggcccagctgagtggtgggcagaagcagaggatcgccattgcacgtgccctggttcgcaaccccaagatccttctgctggatgaggccacgtcagcattggacacagaaagtgaagctgaggtacaggcagctctggataaggccagagaaggccggaccaccattgtgatagcacaccgactgtctacggtccgaaatgcagatgtcatcgctgggtttgaggatggagtaattgtggagcaaggaagccacagcgaactgatgaagaaggaaggggtgtacttcaaacttgtcaacatgcagacatcaggaagccagatccagtcagaagaatttgaactaaatgatgaaaaggctgccactagaatggccccaaatggctggaaatctcgcctatttaggcattctactcagaaaaaccttaaaaattcacaaatgtgtcagaagagccttgatgtggaaaccgatggacttgaagcaaatgtgccaccagtgtcctttctgaaggtcctgaaactgaataaaacagaatggccctactttgtcgtgggaacagtatgtgccattgccaatggggggcttcagccggcattttcagtcatattctcagagatcatagcgatttttggaccaggcgatgatgcagtgaagcagcagaagtgcaacatattctctttgattttcttatttctgggaattatttctttttttactttcttccttcagggtttcacgtttgggaaagctggcgagatcctcaccagaagactgcggtcaatggcttttaaagcaatgctaagacaggacatgagctggtttgatgaccataaaaacagtactggtgcactttctacaagacttgccacagatgctgcccaagtccaaggagccacaggaaccaggttggctttaattgcacagaatatagctaaccttggaactggtattatcatatcatttatctacggttggcagttaaccctattgctattagcagttgttccaattattgctgtgtcaggaattgttgaaatgaaattgttggctggaaatgccaaaagagataaaaaagaactggaagctgctggaaagattgcaacagaggcaatagaaaatattaggacagttgtgtctttgacccaggaaagaaaatttgaatcaatgtatgttgaaaaattgtatggaccttacagggtgttttctgcaattgtatttggtgcagtggctctaggacatgccagttcatttgctccagactatgctaaagctaagctgtctgcagcccacttattcatgctgtttgaaagacaacctctgattgacagctacagtgaagaggggctgaagcctgataaatttgaaggaaatataacatttaatgaagtcgtgttcaactatcccacccgagcaaacgtgccagtgcttcaggggctgagcctggaggtgaagaaaggccagacactagccctggtgggcagcagtggctgtgggaagagcacggtggtccagctcctggagcggttctacgaccccttggcggggacagtgcttctcgatggtcaagaagcaaagaaactcaatgtccagtggctcagagctcaactcggaatcgtgtctcaggagcctatcctatttgactgcagcattgccgagaatattgcctatggagacaacagccgggttgtatcacaggatgaaattgtgagtgcagccaaagctgccaacatacatcctttcatcgagacgttaccccacaaatatgaaacaagagtgggagataaggggactcagctctcaggaggtcaaaaacagaggattgctattgcccgagccctcatcagacaacctcaaatcctcctgttggatgaagctacatcagctctggatactgaaagtgaaaaggttgtccaagaagccctggacaaagccagagaaggccgcacctgcattgtgattgctcaccgcctgtccaccatccagaatgcagacttaatagtggtgtttcagaatgggagagtcaaggagcatggcacgcatcagcagctgctggcacagaaaggcatctatttttcaatggtcagtgtccaggctgggacacagaacttatgaacttttgctacagtatattttaaaaataaattcaaattattctacccatttt

SEQ ID NO: 12085 - DNA, 5764 bp, Homo sapiens
atctctatccttcttctggtccttcctagaaaatcaggtggagatgatagtggcttgcatgatggtggtagagctggaggtgcagggcaaaggtcagattctgaatatattttgaaagtaaaggcaacaagatttcctgacagattgattatggtgtgtcaaagaaagagaggaatgcaggatgattccagtgtttttgttgacaactataagtctggagctgccaactggatgcagaagttcactggagggcccagcctggggaaaggatcaggagcaggttaggcatgttaagcttgagatgtctgttaaacatccagataggaatgtcaaagatgcacttgtgtttaagagtcaggaatgcaagagggaattttaggctagaaacaaaaagttagaaattattcgatacagatggtatttaaagctgtgtgactgactgacatgacagaagtggcgagaatagactgagaagtccaaggaatgagccttggaccactccagtgttaggtaagtagttgaaaaaaagagagagagagaaggcatcaaaggagactgaggaagagtgatcaggaaagcataggaaaatccgagaaacatatggtgtcctggaatctatatgaaaaagatatattcagaaagacagagtgataaatctgtcaaattattgaatttgtcaggtaaaataagaacagagaattgatctttggacttagcaaagcagagattatcagtgacttttataaaaatagtttcggtagtgtggaaagatcaaacttctgtttagagtgggtttcagagagaacaacaggaattgaagaagtaataaactttgccaaccagtttagctccaaaggaaaagagggaaatatgatggtagctggcaggggaagtgtggtcaagagaggttttttgtttgtttttcaagatggaagaaataacagtatgtatgtaagctcacaggagggatccagcaggcatggggaaattgatgatataggacagaaagggaagaatggctccttgtgaaagtgaaaggggatgggatctacaggatgaacatgcaaacaaagactggctgcaaagagaggcatgaatagttcatttacagaaacagcaaaggcagagtgttggtacagatgctggtaagtggaaaaatatcatggtaggaggttatggagttccattctaaacacttcaacttcatcagtgaaataagcacggtaatttagcagaatgtgaagatgtaaaagaacagaatttgagaaaacagacgatatgaaataattattagaaaagcagagactgaagaaactgtcatctccttatgtgctaatgagtttaataatgtcctccagtcaccacaagccttctttcaaactacacaattccaactgcttccgtctcagagtatcttgaaataatgatctgaccgcctgttagaccagtgaagggaaggaatttgggttgatttaagaagagaatcctcatggtcatggtagactgatatggagagaaaacattttgaggaaaaatactcaactaaattcatttctactccagcatgcagtttcaagtcaagttccaccttagctccaggtggcaggcagagcaggatgcagaggcacagcacaagtaagggatccaatgactgagtcaagaattacataacctggccagacagctggtacatgggaaagtgctaagagggcaccaacagcgttcctcctccccaaggagcataatgtgatggttcctgccggccctggctgactctcgccgtccttggagataattgggttcagtgccacctggaccagaactggggatgcggaagcaacctgccagacacgcgcgaggttcgaggctgagatggatcttgaggcggcaaagaacggaacagcctggcgccccacgagcgcggagggcgactttgaactgggcatcagcagcaaacaaaaaaggaaaaaaacgaagacagtgaaaatgattggagtattaacattgtttcgatactccgattggcaggataaattgtttatgtcgctgggtaccatcatggccatagctcacggatcaggtctccccctcatgatgatagtatttggagagatgactgacaaatttgttgatactgcaggaaacttctcctttccagtgaacttttccttgtcgctgctaaatccaggcaaaattctggaagaagaaatgactagatatgcatattactactcaggattgggtgctggagttcttgttgctgcctatatacaagtttcattttggactttggcagctggtcgacagatcaggaaaattaggcagaagttttttcatgctattctacgacaggaaataggatggtttgacatcaatgacaccactgaactcaatacgcggctaacagatgacatctccaaaatcagtgaaggaattggtgacaaggttggaatgttctttcaagcagtagccacgttttttgcaggattcatagtgggattcatcagaggatggaagctcacccttgtgataatggccatcagccctattctaggactctctgcagccgtttgggcaaagatactctcggcatttagtgacaaagaactagctgcttatgcaaaagcaggcgccgtggcagaagaggctctgggggccatcaggactgtgatagctttcgggggccagaacaaagagctggaaaggtatcagaaacatttagaaaatgccaaagagattggaattaaaaaagctatttcagcaaacatttccatgggtattgccttcctgttaatatatgcatcatatgcactggccttctggtatggatccactctagtcatatcaaaagaatatactattggaaatgcaatgacagtttttttttcaatcctaattggagctttcagtgttggccaggctgccccatgtattgatgcttttgccaatgcaagaggagcagcatatgtgatctttgatattattgataataatcctaaaattgacagtttttcagagagaggacacaaaccagacagcatcaaagggaatttggagttcaatgatgttcacttttcttacccttctcgagctaacgtcaagatcttgaagggcctcaacctgaaggtgcagagtgggcagacggtggccctggttggaagtagtggctgtgggaagagcacaacggtccagctgatacagaggctctatgaccctgatgagggcacaattaacattgatgggcaggatattaggaactttaatgtaaactatctgagggaaatcattggtgtggtgagtcaggagccggtgctgttttccaccacaattgctgaaaatatttgttatggccgtggaaatgtaaccatggatgagataaagaaagctgtcaaagaggccaacgcctatgagtttatcatgaaattaccacagaaatttgacaccctggttggagagagaggggcccagctgagtggtgggcagaagcagaggatcgccattgcacgtgccctggttcgcaaccccaagatccttctgctggatgaggccacgtcagcattggacacagaaagtgaagctgaggtacaggcagctctggataaggccagagaaggccggaccaccattgtgatagcacaccgactgtctacggtccgaaatgcagatgtcatcgctgggtttgaggatggagtaattgtggagcaaggaagccacagcgaactgatgaagaaggaaggggtgtacttcaaacttgtcaacatgcagacatcaggaagccagatccagtcagaagaatttgaactaaatgatgaaaaggctgccactagaatggccccaaatggctggaaatctcgcctatttaggcattctactcagaaaaaccttaaaaattcacaaatgtgtcagaagagccttgatgtggaaaccgatggacttgaagcaaatgtgccaccagtgtcctttctgaaggtcctgaaactgaataaaacagaatggccctactttgtcgtgggaacagtatgtgccattgccaatggggggcttcagccggcattttcagtcatattctcagagatcatagcgatttttggaccaggcgatgatgcagtgaagcagcagaagtgcaacatattctctttgattttcttatttctgggaattatttctttttttactttcttccttcagggtttcacgtttgggaaagctggcgagatcctcaccagaagactgcggtcaatggcttttaaagcaatgctaagacaggacatgagctggtttgatgaccataaaaacagtactggtgcactttctacaagacttgccacagatgctgcccaagtccaaggagccacaggaaccaggttggctttaattgcacagaatatagctaaccttggaactggtattatcatatcatttatctacggttggcagttaaccctattgctattagcagttgttccaattattgctgtgtcaggaattgttgaaatgaaattgttggctggaaatgccaaaagagataaaaaagaactggaagctgctggaaagattgcaacagaggcaatagaaaatattaggacagttgtgtctttgacccaggaaagaaaatttgaatcaatgtatgttgaaaaattgtatggaccttacaggaattctgtgcagaaggcacacatctatggaattacttttagtatctcacaagcatttatgtatttttcctatgccggttgttttcgatttggtgcatatctcattgtgaatggacatatgcgcttcagagatgttattctggtgttttctgcaattgtatttggtgcagtggctctaggacatgccagttcatttgctccagactatgctaaagctaagctgtctgcagcccacttattcatgctgtttgaaagacaacctctgattgacagctacagtgaagaggggctgaagcctgataaatttgaaggaaatataacatttaatgaagtcgtgttcaactatcccacccgagcaaacgtgccagtgcttcaggggctgagcctggaggtgaagaaaggccagacactagccctggtgggcagcagtggctgtgggaagagcacggtggtccagctcctggagcggttctacgaccccttggcggggacagtgcttctcgatggtcaagaagcaaagaaactcaatgtccagtggctcagagctcaactcggaatcgtgtctcaggagcctatcctatttgactgcagcattgccgagaatattgcctatggagacaacagccgggttgtatcacaggatgaaattgtgagtgcagccaaagctgccaacatacatcctttcatcgagacgttaccccacaaatatgaaacaagagtgggagataaggggactcagctctcaggaggtcaaaaacagaggattgctattgcccgagccctcatcagacaacctcaaatcctcctgttggatgaagctacatcagctctggatactgaaagtgaaaaggttgtccaagaagccctggacaaagccagagaaggccgcacctgcattgtgattgctcaccgcctgtccaccatccagaatgcagacttaatagtggtgtttcagaatgggagagtcaaggagcatggcacgcatcagcagctgctggcacagaaaggcatctatttttcaatggtcagtgtccaggctgggacacagaacttatgaacttttgctacagtatattttaaaaataaattcaaattattctacccatttt

SEQ ID NO: 12086 - DNA, 6796 bp, Homo sapiens
ggccaaaggtcaagatacttctctgggaaatgttgctgctgatgctgctttacaaagtcatacaatgagtgtttggtttaagaaagattttcatacttaaaagattttcatcttggaaatacatcaagtgaaaattaaattcttttgggaaacattttccttctgatatattatacttgtaatgggcgacatggcaaacaactcagttgcttacagtggtgtgaaaaactctttgaaggaagctaatcatgatggagactttggaattacgctcgcagagctgcgggctctcatggagctcaggtccacagatgcattacgaaaaatacaggaaagctatggagatgtctatggaatttgcaccaaattgaaaacatctcccaatgaaggtttaagtggaaaccctgcagatttagaaagaagagaagcagtgtttggaaagaattttatacctcctaaaaagccaaaaacctttcttcaattagtatgggaagcattacaagatgtcactttaattatattagaaattgcagccatagtatcattgggcctttctttttatcagcctccagaaggggataatgcactttgtggagaagtttctgttggggaggaagaaggtgaaggtgaaactggttggattgaaggagctgcaatcctcttgtctgtagtgtgtgtggtgttagtaacagctttcaatgactggagtaaggaaaaacagtttagaggtttgcagagccgaattgaacaagaacagaagttcactgtcatcaggggtggtcaggtcattcagatacctgtagctgacattactgttggagatattgctcaagtgaaatatggtgatcttcttccagctgacggcatacttattcaaggcaacgatcttaaaattgatgaaagctcattgactggtgaatcagatcatgttaaaaagtctttagataaggatcccttacttctatcaggtactcatgtaatggaaggctctggaagaatggtagttacagctgtaggtgtaaattctcaaactggaattatctttaccttacttggagctggaggtgaagaggaagagaagaaagatgagaagaaaaaggaaaagaaaaataagaaacaagatggagctattgagaatcgcaacaaagcaaaagcccaggatggtgcagccatggaaatgcagccattgaagagtgaagaaggtggagatggtgatgaaaaagataaaaagaaagcaaatttgccaaaaaaggaaaaatctgttttacaagggaaacttacaaaactggctgttcagattggcaaagcaggtctgttgatgtctgccatcacagttatcattctagtattatattttgtcattgacaccttctgggttcagaaaagaccatggcttgctgagtgcacaccaatttatatacaatactttgtgaagttcttcattattggagttacagttttagtggtcgcagtgccagaaggtcttccacttgcagtcacgatctcactggcttattcagtcaaaaaaatgatgaaagataataacttagtaaggcatctggatgcttgtgaaaccatgggaaatgctacagctatttgttcagataaaacaggaactttgacaatgaacagaatgacagtcgttcaagcttacataaatgaaaaacattataaaaaggttcctgaaccagaagctattccaccaaatattttgtcctatcttgtaacaggaatttctgtgaattgtgcttatacatcaaaaatattgccaccagagaaagagggtggattacctcgtcacgttggtaataaaactgaatgtgccttgttgggacttcttttggatttaaaacgggattatcaggatgttagaaatgaaataccagaagaagcactgtacaaagtctacaccttcaattctgttaggaagtccatgagtactgtcctgaaaaattcagatggaagttatcgaatattcagcaagggtgcatctgagataattctgaaaaagtgtttcaaaatcttgagtgctaatggtgaggcaaaagtattcagaccaagggaccgtgatgatattgtaaaaactgtgattgaaccgatggcatcagaaggcttgagaaccatatgtcttgcattcagagattttccagcaggagaaccagaaccagagtgggataatgaaaatgatattgtcaccggccttacatgcattgctgttgtggggattgaagatcctgtgagacctgaggtgccagatgcaattaaaaagtgtcagagggctggaattactgtgcggatggtcactggtgataatattaatactgctcgggccattgctaccaaatgtggtattttacatcctggggaagattttctgtgcctagaaggtaaagattttaacagaagaatacgaaatgaaaaaggagagattgagcaagagaggatagacaagatttggccaaaacttcgagtacttgcaagatcatctcctactgataagcatacactggttaaaggtataattgacagcactgtctcagaccaacgccaggttgtagctgtaactggtgatggtacaaatgatggcccagcactaaagaaagcagatgttggatttgcaatgggtattgctggaactgatgtagctaaagaagcatccgatattattctcacagatgacaactttacaagcattgttaaagcagttatgtggggacgaaatgtctatgacagcatctcaaaattccttcagttccaacttactgttaatgtagtagcagtgattgttgcttttacgggcgcctgcattactcaagactcaccgcttaaggctgtgcagatgctgtgggtaaacctcataatggatacactcgcttccctggctctggcaacggaaccacccactgagtctctcttgcttcggaaaccttatggtagaaataagcctctcatctcacgtacaatgatgaagaatattttgggtcatgcattctatcaacttgtagtagtctttacactcttatttgctggagaaaagttttttgacattgatagtggaagaaatgctcctttgcatgctcctccttcagaacattatactattgtttttaatacctttgtgctgatgcaacttttcaacgaaataaatgcccggaaaattcatggtgaaagaaatgtattcgaaggaatctttaacaatgccatcttctgcacaattgttttaggcacttttgtggtacagataataattgtgcagtttggtggaaaacctttcagttgttcagaactttcaatagaacagtggctatggtcaatattcctaggaatgggaacattactctggggccagcttatttcaacaattccaactagccgtttaaaattcctcaaagaagctggtcatggaacacaaaaggaagaaatacctgaggaggaattagcagaggatgttgaagagattgatcacgctgaaagggagttgcggcgtggccaaatcttgtggtttagaggtctgaacagaatccaaacacagattcgagtggtgaatgcatttcgtagttctttatatgaagggttagaaaaaccggaatcaagaagttcgattcacaactttatgacacatcctgagtttaggatagaagattcagagcctcatatcccccttattgatgacactgatgccgaagatgatgctcctacaaaacgtaactccagtcctccaccctctcccaacaaaaataacaatgctgttgacagtggaattcaccttacaatagaaatgaacaagtctgctacctcttcatccccaggaagcccactacatagtttggaaacatcactctgattgtaagctgaatgttaacacactagctgcattgtaaagaaacaaattgaaactgggtcttttcacatattgtgatggacaagctagtattcttgtctttggacttcaacagaagacacacttgtacgaatgtagatttatttttttaaaaaaaaaaaagcaaagctttctgccagactgagggtgctttttggggggtgggagaaatgaactgacagataaacagtaactcagcgtaagtgacctgtggatcatcagtagtacccaagcatggtcctgaacagtgtattagcagagctttagtttatctcagtcctggatgggagagagagggaggagtaaaactgggcaagacaaagagccctggatcgttgaattgatagtttaatttctgctgttggctgttaataatttggattatttatgtttataaatgatacagatctgtttacaaggtttgtagatactttttttgttcctgttcatagatgggaagcttccttataactgatgcagagaaaaattagtccttcaaatactgctgtattttcaggaaaaaaaaaaaaaggggtgtttctattgaaactgtactaaatttttgcctacaatttaccttgttaaatattgtagataaattgctaatactaatagccaaatagataacactaatgctttgtttaaaaaaacgaaaaaaacaaaacaaaacaaaaaaacatgagcagtggtgttctaatgaagttatgacatctgtcctaattagtttcttaaatacatttactacttaatggttttgaagcaactgtttaatttttaaaatttttgaaaacttgctaataaccttttgttcagaatttagtagattgtttaatgcaggacatcaactacataatgaaagatgcttgaaatgcttttgttatttcaggcaaatcaaattaaatcagactatcaaactacaagagaaccttagtcttttttgtttttgtctaaacatgttagtttagtgatgtcttggtgaactgtgagtgaactgtattgatttttctaatctttagagaccttcacacagcatgagggctgttggcattttgaaaaaggttaataagtagaagcatacatgttttccttttgtttttgaaacttgtttgtaaacataaataaatatgcccttttattaaataaattcatggcaatgtttttttaaaagacatttcagcttctttactcagttctgcatatacagtgcatcagtctgttctctttgaccacaattggaatacatttcaagatggtaacagccccatgaagtaccgctttaattccttgctggtaatctaatagaatcagattaagaaaattaacacaattttaccatttgacatactcttcattgaatttagtttgtctaaaatagtctcacaggtaaaaaacataacaacaatgaccaccattgtctttgatacatttattttaattcttaagtggccaaataacagattaggtaaaatgagattacatgaaaaggttctaaaatgatatatttagatgcaataattaaccatatgctagaatgcccacctctaagccaattggattctttagctctctttttctttccttcatctaccttcttctcttttttgcctctgtctttaccctttagaaactggcatgtgttagggcccagatttcaccagatacacaatcctcaggctgacataaagtttacgaggactgctactataactgagagtgctgaccaagcaaagaaacatttagttgatggtgcttgatatttttggtgggtgggggaaatctttttctcaccatcaaatctttgcagtaatcctctgcaggtcttagaaacacattggctctgtcagcatttgtaattgtacatttattcatcaggtatttatagtgaatcatactgtaaaaaagaggtagcatgatatgctggaaagcatattagactaggagtcaagacctggtttctagtcttggttttgccattaatgtgctgcatgatcttgggaaaatcatttaccctaaataagggtggtggactatcttgaagaaccctttcaactctaaaaattgaccctatcaactggagagcccacaaggcatagggaatagagaaaagggaaatgttttcagttttcttttttattttggttatgcttaaatatgaatgtaattaccaaaagatttagaagtgcatgtgctttggaggatttgtattgagcttttacagtattcatttttcaactcaaggcaatggctttctacaccaactctaatccataaacgggtcttatgacatctatgaagtagtagcaagacatgcttagtgtgtatttctctctttgagacactgtaatttctaccagaaatttccagagcattatgtaggtagaaaaaaatgcaagcaagctgttaaagatcttggatcccattatatagtatgtatagctgaaatctgtaattcaatcactttttctcttttatcctctaaccaaaaaattgtttaattttgcatcccaaatgtttttaatctttgtatattttttaaaaatccttttctcctcatcattgccttttttgtggttgtaaatagacttacttgcactttgaagatgagttactccttgtcatcttacaaatatgtgatatggtaattttcataacagatgtcagttttgaaccaagaattggtgatttgtttataagaaaaaaactggcttcatttctgtgaaattgctctttgaaaatttctttttacacgtgtaagccaactgagataccgtgatggtgttgatttctttcaatgatgcttaccatctattttagccactgagccttttattatttgtctatttgtaaagtttatttgtcttaactcatttaataaatatactgtttatctgtttctgaaaaaaaaaaaaaaaaaaa

SEQ ID NO: 12087 - DNA, 6592 bp, Homo sapiens
gtgtccacgcttagcagctttctcaccgccgccaaaccttgcctgggcactgggaccgtgggtggccgcctgtccctagctgtggctgagccaagattgcacttgtgagaaggcctgacaggcagcatgggcgacatggccaatagttccatcgagttccaccccaagccccagcagcagcgggatgtcccccaggctggaggctttgggtgcacgctggcggagctgcgcaccctcatggagctgcgaggggccgaggcgctgcagaagatcgaggaggcctacggggatgtcagcgggctctgccggaggctgaagacctcacccacagagggcctggcggacaacaccaatgacctggagaagcgcaggcagatctacgggcagaacttcatccccccaaagcaacccaagaccttcctgcagctggtgtgggaggccctgcaggacgtgaccctcatcatcctggaggtggctgccatcgtctctctgggcctctcgttctatgcgccgccaggagaggagagtgaagcctgtgggaatgtgtcgggaggcgcagaagatgagggcgaggccgaagctggctggatcgagggggctgccatcctgctgtccgtcatctgtgtggtgctggtcacggccttcaatgactggagcaaggagaagcagttccgaggcctgcagagccgaattgagcaggagcagaagttcacggtcatccggaacgggcagctcctccaggtccccgtggctgcgctggtggtgggggacattgcccaggtcaagtacggcgacctgctgccagccgacggcgtgctcatccaggccaatgacctcaagatcgacgagagctccctgacgggcgagtctgaccacgtgcgcaagtcagctgacaaagatcccatgctgctctcaggcactcatgtcatggaaggttctggaagaatggtggtgaccgccgttggcgtgaattcccagacaggcatcatcttcacgctgcttggagctggcggagaggaggaagagaagaaagataagaaaggcaagcagcaggatggggccatggagagtagccagaccaaagctaagaagcaggatggtgcagtggccatggagatgcagcccctgaagagcgcggagggtggggagatggaggagcgggagaagaagaaagccaacgcacccaaaaaggagaagtctgtccttcaggggaagctcacaaagctagccgtgcagatcgggaaagcagggctggtgatgtctgccatcaccgtcatcatcctggtcctctactttgtgattgagacgtttgtcgtggaaggccggacatggctggcagagtgcacgccggtctatgtacaatacttcgtgaagttcttcatcattggtgtcactgtgctggtcgtggctgtcccagagggcctgcctcttgctgtcaccatctccttagcttactctgtcaagaaaatgatgaaagacaacaacctggtgcgccacctggatgcctgcgagaccatgggcaacgccacagccatctgctccgacaagacgggcacgctcaccaccaaccgtatgaccgtggtccagtcctacctaggggacacccactacaaagagattccggcccccagcgccctgacccctaagatcctcgacctcctggtccatgccatctccatcaacagtgcctataccaccaaaatactacctcctgagaaggaaggcgccctcccacgccaggtgggcaataagacggagtgcgccctgctgggcttcgtcttggacctgaagcgggacttccagcccgtgcgcgagcagatcccggaagacaagctttacaaagtgtacaccttcaactcggtccgcaagtccatgagcacagtcatccgcatgcccgacggtggcttccgcctcttcagcaagggggcctcagagatcctcttgaaaaagtgcaccaacatcttgaacagcaatggcgaactccggggctttcggcctcgggaccgggacgacatggtgaggaagatcatcgagccgatggcttgcgatggcctccgcaccatctgcatcgcctaccgggacttctctgcaggccaggagcccgactgggacaacgagaatgaggtcgtgggtgacctcacctgcatagctgtcgtgggcattgaggaccctgtgcggcccgaggtccctgaagctatccgaaaatgccagcgtgctggcatcacagtccgcatggtgactggggacaacatcaacacggcccgggccatcgcagccaaatgcggcatcatccagcccggggaggacttcctgtgcctagaagggaaggagttcaaccggcggatccgcaatgagaaaggcgagatagaacaggagcggctggacaaggtgtggcccaagctgagggtgctggcccggtcgtctcccaccgacaagcacacactggtcaaagggattatcgacagcaccactggtgagcagcggcaggtggtggctgtgacaggggatggcaccaacgatgggccggccctcaagaaggcggacgtgggcttcgccatgggcatcgcagggaccgacgtggccaaggaggcctccgacatcatcctgaccgatgacaacttcaccagcatcgtcaaggcagtcatgtggggccgtaacgtctatgacagcatctccaagttcctgcagtttcaactgacggtcaatgtggtggctgtgatcgtggccttcacaggtgcctgcattactcaggactctcctctcaaagccgtgcagatgttgtgggtgaacttgatcatggacacatttgcctctctggccctggcgacggagccacccacagagtcgctgctgctgcggaagccgtacggccgcgacaagcccctcatctcccgcaccatgatgaagaacattctgggccacgccgtgtaccagctcgccatcatcttcaccctgctgtttgtcggggagctcttcttcgacatcgacagcgggaggaatgcgcccctgcactcgccaccctcagagcactacaccatcatcttcaacacgttcgtcatgatgcagctctttaacgagatcaacgcccgcaagatccacggcgagaggaacgtgttcgacggcatcttcagcaaccccatcttctgcaccatcgttttgggcactttcgggattcagattgtcatcgtccagtttggcgggaagcccttcagctgctccccactatccacagaacagtggctctggtgcctgtttgttggtgttggggagctggtctggggacaggtcattgccaccatccccaccagccagctcaagtgcctgaaggaagccgggcacgggcccgggaaggacgagatgaccgacgaggagctggccgaaggcgaggaagagatcgaccatgccgagcgggagctccgcaggggccagatcctctggttccggggcctgaaccggattcagacgcagatggaggtagtgagtaccttcaagagaagcggttcagttcagggtgctgtgcgccggcggtcttcggtcctcagccagcttcatgacgtaaccaatctttctacccctactcacgcaattctctctgctgccaatcctaccagtgctgctgggaatccgggtggtgaaagcgttccgtagctcgctctatgaaggcctggagaaaccagaatccaagacctccattcacaacttcatggccacgcccgagtttctgatcaatgactacacccacaacatcccgctcattgacgacacggacgtggacgagaacgaggagcgcctccgggcccccccgcccccgtcccccaaccagaacaacaacgccatagacagcggcatctacctgaccacgcatgtcaccaagtcagctacctcttcagtgttttcctccagtcccgggagcccgctccacagcgtggagacgtccctctaacaagaacttgtctcagcacatgcgcacacgcacactcggactcacacgaagtcacacgcacacatgcacgcacacacacatatggggacctgcacacctgcaaaacgagggaacaactaaggtggctgaagacctttctggcagggcatttgcaaggacccaaatccattcaacaagggtgcagcctgccacaggctcctcatccggactgaggaagacgaggacagggaggaggaaaaggaggaagaggaggacaaaaagggggaggagaaggttcttcgtccaaaggaggaaggagaagaagtagaaagtgcgaagagctgagttccccacctttttttctattgatgcttcttttttaacaaactacagttttaccgtgtgtttgccatttgagctgtgtggtgggcagggggctggtttgggtttatggggagcttttgttgcacccatgcaggggcaatcagatcagcatcttcatgcaaaaaaaaaaaaaaagttgagtgctctgcaggcctgtgaagggtgccacctgagggagccgcctgcaagcggccctgcagccacaaagcaacccgccctctgcaaaaactaggcacatccgcagtgcgcatgtgtgtgcgtgcatgcacatatgtgtatgtgtgtggatctgtacacacacacgtatatatggccagatgcgtatttcaataaggaactatttactggcatgatatttgcattcctcttatcaggcattttcatttggaaatttcattattgaatgtagcaaggttgtagttgtttttttttttttttcagggaactagactgcaagaatatctttctggtcaacccatttttgtccctcatcaccccgcccccacctttcgctcctgccctctgcccggccctactgagattcccaaggagaaggccgagagggggcgctccaggtctggagcaggtataattggagcatttgcactgagacccctgccagagaggagaaaaccctttcaagggaaattttaatctaaaaggaaaaaaccaaaatattgatgagaaggagtcctccagttagtgaaaggggagtttcgttttcagctttctttggttcctactccaattccacatccttcatcctggccatgcccccaccttcaagagcatgaagcactcttggagttgtgggtcctgcccagagtccagagagcagcctcagctgagcacaggtccgagggggcgggggcagggccaagagttcaaaagaagccaatggagggagagggagcgtcagaagcccggaggagctggtggtgggagaatgacggcagggacgcagccacagttcagaccctgtcccctcagcacctggatggactcccactgtttgctttggcaaatgccgaggagtcctcggtagaccaccttgatgtctgctgtgacatcagaggtgccaccaccaaagcactcttcccaccctagtctttgtgtccagcggccaagcttaagccatgaagtcatggatttgtggctcagcaccaggtcccgaggggagcctatcctggcagtgtgggcacctggtggccaagcctcagtttcccccaaatgagcaaaggggataaagaggggcccgacttttgccaccctcctgaggaagcccctaggtccacacagtgatgccatgggggacccttgccttccacacttgcaggtgtcacgttttgcagggaggtgtttgggcctggggctcagccactgggagacagttgggacctgagggacagaggatcggaatggaaaccaccaacgtgcactggcaccctcagaaggcttgtctcacctccaccggcatccacacaaaaccaaacaggagcaggcgtcatccccactattcccatgaatgccatgtcacccctgagcagaagcagtcaaatcttgggcaaaagaatttcggttagaaaagaaaatcccactttaaaatgccagctgcagataactcaaagccatcccttttttctaaagggcacattgagaatgtcacccatttgtaaactgttccctgatgtccttgtttaaacgataataagaaaaagggcaactccatttgttgagggtctttgtgttcttcaatgagaaatcaaatttgagacgttgaaattggagctgcgtgctgctgcactcaccggcttcttctcactctctgtcgtagacacaccgataggaccaatggccaatagatattaaaagcaaaccctcactgctgctgtataaagttgcctaatgtaaatgtctattgtttagtccctaggtcacctttgtgctgtgctgtggagttcagaaacggggtaccatgacctggaatcttttgctcttgtttttgcagtcttcaaggctgggggccctgtctcattgggaagcccctctttataaagcattatattacttggaatggcttggtcaactgtgttcagttcataaatatgttttacatttttatctgcctgttataaagatgaacaaaaaaacttaatgagaaagatcacagatacgtaataatttaaagtctgtagttgaatttcctaacttaaagaatagaccaaaatttctgtgtataaaaaaaaatgaaaggctccttacatcctgaaaaaaaaaaaaaaaaaa

SEQ ID NO: 12088 - DNA, 8733 bp, Homo sapiens
ttggggagagctggtgagcaagagtctggcccgagttagctagagctgttgccatgacaagcattttcttaagaaagctctgctgttgagatcgtccaaagctgggggctgggagggggggcacgaacttcgtggggcaccatccctccgaagagagcaagatcagagacacccgcccagctctcctgcaccctttttctttcaggaacctgagaggtccttcccattggaggggcagggggaggagacccagcccactccccggccttagccagaaaggcaagagagcaaagccagcgtctctagcttggttgccacactggggagactggtgggtggtcaccccaccctaccctcatccatggaaacccggagggagagtcccgcctgaagaaacctggatctttgctagaaagagagagatccagttgtcatcggtatccaggaagctctcctcttcctcctcctgacgtctaccactacagttgctggttgttgctaaggttgctgccatggtaacatgcacatcctgtttacaccttcatctgggcaagttggtctaagctaggaacctacctaccctggacaaccactatcatcaccacctggggacaccaatcatcgtgacacggagtccaccttccactcagttcccccatcctcttcctcctctcgctgccagacttcatacggaagaaaggatctagacttcggacggctactcgggagcttattgcacaagatatattcaatctattccctcactgggcccccagagaagcaagaagtaggaagaagttgagacagggaggcaggagacactggtcagttgaagggaaacgctacatcttctctggttgaggggcttggtaacagcaggcaaaatgacgaacccatcagaccgtgtcttgcctgccaactcgatggccgagagccgtgaaggggactttggctgcacagtaatggaactgaggaagctcatggagctgcgttcaagggatgcactgacccagattaatgtccactatggaggtgtacagaatctctgcagtagactgaaaacctcccctgtggaaggtctgtctgggaaccctgcagatctggagaaacgtaggcaggtgtttggacacaacgtgatcccccccaaaaagcccaagactttcttagaattagtgtgggaagctcttcaagatgtcacgctcatcatcctggagattgcagccatcatctccctggtcctgtccttttatcgccctgctggtgaagaaaatgaactgtgtggtcaagtcgcaactaccccagaagatgaaaatgaggcacaagctggctggattgagggggcagccatccttttctcagtgatcatcgtggtgttagtgactgcctttaatgattggagcaaagagaagcaattccgggggctgcagtgccgcattgaacaggagcaaaagttctccatcatccgaaacggtcaactcatccagctccctgtggctgagattgtggttggtgatattgcccaagtcaaatacggtgatctgctgcctgcagatggaatcctgatccaagggaatgatctgaagattgatgagagctctctgacaggggaatctgaccatgtcaagaagtccctggacaaagaccccatgttgctctcagggacccatgtcatggaaggttctggccggatggtggtgacagctgttggtgtcaactctcagactggaatcatccttactctcttgggggtcaatgaggatgacgaaggggagaaaaagaagaaaggtaaaaaacaaggagtccctgaaaatcgcaacaaagcaaagacccaagacggagtggccctggaaatccagccactcaacagccaggagggaatcgacaatgaggaaaaggacaagaaggcagtcaaggtgcctaaaaaggagaagtcagtgctgcagggcaagctgactcgcctggctgttcagattgggaaagccggtctgctcatgtctgctctcacggttttcatcctgattctatactttgtgattgacaactttgtgataaatcgcagaccatggctccctgagtgtactcccatctacatccagtactttgtcaagttcttcatcatcggcatcactgtactggtggtggctgtgccagaggggctgcctctggctgtcaccatctcactggcctactctgtgaagaaaatgatgaaagacaataacctagtacggcacttggatgcttgtgagaccatgggcaacgccaccgccatctgctctgataagacaggcacgttgaccatgaaccgcatgactgtggtacaagcttatattgggggcatccattaccgtcaaatcccaagccctgatgtcttcctgcccaaagtcctggacctcattgtcaatggcatttctatcaacagtgcttatacctccaagattctgcctccagagaaggagggaggcctgcctcggcaggtgggcaacaagaccgagtgtgctctgctaggctttgtcacagatctgaagcaggattatcaggctgtgcgtaatgaagtgcccgaggagaagctctacaaggtgtacacctttaactcagtgcgcaagtcaatgagcaccgtcatcaggaatcccaacggtggcttccgtatgtacagcaagggcgcctctgagatcatcttgcgcaagtgtaatcgaatcctggaccggaaaggggaagcagtgccattcaagaataaagacagagatgatatggtacgcactgtcatcgagcccatggcctgtgatggactccggactatctgcatagcttaccgggacttcgatgacacagagccctcttgggacaatgagaatgagatcctcaccgaactgacctgtatcgcggtggtgggcattgaggaccctgtgcgcccagaggtgccagatgctattgccaaatgcaaacaagctggcattactgtcagaatggtgacaggtgacaacatcaacacagcccgggccattgccaccaaatgtggcattctgacacctggggatgacttcctgtgcttagaaggcaaagaattcaaccggctcatccgcaacgagaaaggcgaggtagagcaagaaaagctggacaagatctggcctaagcttcgggtcctggcgcgatcttctcccactgacaagcacaccctggtgaaaggcataattgacagcactgttggggaacaccggcaggtcgtggctgtcactggtgatggcacaaatgacgggcctgctctgaagaaagcggatgttggttttgccatgggcatcgcaggcacagatgtagcaaaggaggcttcagacatcatcctaacagatgacaacttcaccagcattgtgaaggcagtgatgtggggacgaaatgtctatgacagcatctccaagttcctgcagttccagctcactgtcaatgtggtggccgtgattgtagccttcactggagcctgtatcactcaggattccccattgaaagctgtgcagatgttgtgggttaatctgatcatggacacttttgcttcattggccctggccacagagccccctacggaatctctgttgaagcggcgcccctatggccgaaataagcctctgatctcacgcactatgatgaagaacatcttgggccatgcattctatcagctcattgtcatctttatccttgtctttgcgggtgagaaattctttgatattgatagtgggaggaaggcacctctacattcaccacccagccagcactataccattgtttttaacaccttcgtgctgatgcagctcttcaatgaaatcaactcccgaaagatccatggagagaagaacgtcttttcaggcatctaccgcaacattatcttctgctctgtagtcttgggcacattcatctgccagattttcatcgtggaatttgggggtaaacccttcagttgtacaagcctcagcctgtctcagtggctgtggtgtctcttcattgggattggagaacttctgtggggccagttcatctccgcaatacctacccgatccctgaagttcctgaaggaggctgggcatggcaccaccaaagaggagatcaccaaggatgccgagggactggatgagattgaccatgctgagatggagctgcgccgaggccagatcctctggttccggggcctgaaccgtatccagactcagatcaaagtggtcaaagcgttccatagttccctccacgaaagcattcagaaaccctacaaccaaaagtccatccacagcttcatgacccaccctgaattcgccatagaggaggagttgccacgaacaccactcctggatgaggaagaggaggaaaatcctgacaaggcttctaagtttgggactagggtgctcctgttggatggtgaggtcactccatatgccaatacaaacaacaatgcggtggattgcaaccaagtgcagctcccccagtcggacagctctctacagagcctagagacatcagtttgaattttctttctctgactctcatccctattttacctatttccattttcgtctatcccatctatgaggtgatgatgggacttttcattgtcacgtcagctgctgtgttaacagcagtgtgtgtgaagtgaacctctacctgaccatgaagaggcaagagcacagacttacaaggatttcaacttaagcttgacttggggtttgtagcgggacccagtcaaaccccattcaggtcatggtagaatctactccttggtagtcacttgtcatttttaaagaaatgatgacaatcctcttggcatcaccccaccccacattctccccgatgttcctctcctgaattctggattttgtcctacaagtctgtgccatttataagctaagttgagggttcagagggagacaaatatccccaagtgaaatatgttgcggtagagatggaatgtataaaatccgccagtagtgtgattgtttttcaatttttcccactttgaaaacttacacctaaaggcctgtaggcctctaactctttctgccctttcattcaaacctctccaaagttctttgtcttttgtcttcccttcctttccttttttttttttttttttatgatgattaagaaaatggaaaggatatggatgaattgtgtaaacttagatccttctcccttttggcccaaaagaacccttgatttagttccagaatccaaccagtttctttgttaaaagggtccttttgaagcaattaagtgctggtaagaatatttctctgttgttgccaggttaccttctgcttttaaattgccatcttgtaaagtgtatgtggttcttaagtgccagggagatcagccttgcccatgaaggttgcatatgtgtggtatacagtttttacctgaaagcctgagctttctcttattcctaaagtggtggcaaaagaatgaactgggtatgaccctgcccccttactgggcttggatattgaggaccagacgctgccaaatctaggacaagacagaccatcaaagcagacttttgtgggctcctctttggggtgaccactgctttcaaagccatctgccaaggctctccagggcaggacctgactggtggggaatgagtgttcagaagccttgggagaggccaaagagccattctagcatgatctgagaaaaccttcctgcagaggccagaaaccttgagcttaggtgcctggggaccagcttcgacattctctccagtttctgattctaatttttgccacgtgtcacaacttttccagtctctgagaaggtcccagcctttctcaaatattctgattttgaaaatatgtatccaaagtgggaggcccctgtgacattttgccaacttaaacgagaaaaagaccccccgcacccggcacactcccccttcctccagccccgcttcagccacatgctccagctgctgcccagtaaagccctgtgcctttttttcccctgaatactgcccaaagcatccccttcccatctgcctctcaggagttggggactttgctaggagattttttaagtgttccttactgggacaacgtggagccacgtttgcaggagctccatttgtatccctgctggtgttgacttctgtgtaggggccagttcatgtccctgactctcacctcccattagataaatgaagcccacccccctttctagagtgatgagagtcaagaagaggggatgtatgaacggccaaattcccatgtgagaggaagatgacctgatccacctagccttttcttctggatctgtcctccctcacccctttcacctgagctgtccacagtaggaaacataaagaaacaatgtcccctacatatccccatgactacataatccatcatcgtaggaaataggaaagcaaatttgattttggttttgtaaaacgtacatgcttcaataattcttttttgtgtcttaaatactcataggggaaaaaaacagctcacccaaggtgttaggtttcacatatatattcatcaactattttagaagatttaattctatcaaatcttgtattacctcagatcattttaaatagcaagccaataacgagctttgaaggctattttaccattcctgttcacaaaaggttctcatggtgcctgacaggttacccttgagggcttgtgtctactttttaaaagtcaatggttttttttcttgtgttctagtttccataataggagagaaaatatagaaatatatgcaaaaattatagttttctttagatcagaaactgatatttttgggtcagccatatgtattttgtttaaaggatttaaaataaagtgccgtcatgtagccctgtggaagggagcacataaccagctgtttggcatgacaggtgacttagtatatttgtaattggttttaaaaccaatacaccatactttctttctgcaaacagccatctttatacttagggaagaaaaattgttgggttctagacttttttaatataaattttgttgatatggaattaggtaagtttaagtgtctatgtgcatatgttttttatataagttttttctattcagtttcactgatccaactggcagtgggtaaatatggcataagttaataacacttttccccaaaatggtgctttggatttgaaaagggtctgatggggagaaggagaacgtatcatcctagcttcctctcttaataaacctagaaaaacgggtagtaaactgtggatagtcaggaaaacacccagcaagggacacagctgtcaggaaatgaatcttccccccaacccccaccatgcagatggatagacagaatctttcctgactagtcattaggatcaggggcctctgttggatttgtgtttcttgaagaatagctggcagagtggtataaaagacacgaatatctcctggtctataaggatactctgatttggggtttgcatttttcatggtttttatttcctgttccccctggagttttccattagtgagtttttgtgcaaggatcttatttgtgatgccttccctcccctagaaagattttgtgcaatatattaaatggggacagaattctaaatggataaaacaatggctggttctagccctgagtgacagtcttaaggctagatccttcccatagtatcatctgtcctctggaatgactctcctgtccctaaaggggttaagagagagatcacctagaaatccctctggacacttgtgggttctttagggtttgagtttcttcttccccttgagcttcagagaggagagttggcatggttaaatctgaatggttacctcactgctgaaaacccagaggggcgtggcacactcgcttgtgtggaaaagcctctaaatgcatcccttcctttctttcctgcttcctttgccttacaattgaagcagcccgtggtaccatcacagtatgcagagacttcctcacctttcatatctagggaccacccccgatgcattggtgagggtgggcacttataaatgcctgctattgttaagccattccagcctcttcctctgaatagaccagacgccctttcacttagttcagtgccagtccttttgccttcccaaccctgctgttaggcctgctgttccctttgctcttgattaggagagatggaaggagatgagctcccataactgaattggcctttggttcatgttttctccccatatgtatatatgccatatgtgaatatgccatatatatgtgccaacaaatctatctacgttgttcttttcaaattagcacgcagataggaattttgagtttcttcttcttttagtaactagtataacaagcactggtatttttgtacaaaaaagaaaaacaaaagattgactattgtggtctgcatgacataaacaaacaaatggtgatatcaaagcaacgtataccccagtccagtgtgtgttgccataatttgcaattcagcttaacagtgcacccaatctatatttgcattttgatattatttaagctctatgtacaaggttttgcatgtatttatatggttcttagggaaaaaaaatgctataaactgcaaatctgaaattcaaatgtgttgttccactgagaccagaagaagaagaggagttttaaaagggataatttgttggagccaataaagctttttgctgatgaacagaaaccaatactgctgtgcactgagaataaaaactcatgcccacttgtaaaaaa

SEQ ID NO: 12089 - DNA, 3359 bp, Homo sapiens
cacaccttcggcagcaggagggcggcagcttctcgcaggcggcagggcgggcggccaggatcatgtccaccaccacatgccaagtggtggcgttcctcctgtccatcctggggctggccggctgcatcgcggccaccgggatggacatgtggagcacccaggacctgtacgacaaccccgtcacctccgtgttccagtacgaagggctctggaggagctgcgtgaggcagagttcaggcttcaccgaatgcaggccctatttcaccatcctgggacttccagccatgctgcaggcagtgcgagccctgatgatcgtaggcatcgtcctgggtgccattggcctcctggtatccatctttgccctgaaatgcatccgcattggcagcatggaggactctgccaaagccaacatgacactgacctccgggatcatgttcattgtctcaggtctttgtgcaattgctggagtgtctgtgtttgccaacatgctggtgactaacttctggatgtccacagctaacatgtacaccggcatgggtgggatggtgcagactgttcagaccaggtacacatttggtgcggctctgttcgtgggctgggtcgctggaggcctcacactaattgggggtgtgatgatgtgcatcgcctgccggggcctggcaccagaagaaaccaactacaaagccgtttcttatcatgcctcaggccacagtgttgcctacaagcctggaggcttcaaggccagcactggctttgggtccaacaccaaaaacaagaagatatacgatggaggtgcccgcacagaggacgaggtacaatcttatccttccaagcacgactatgtgtaatgctctaagacctctcagcacgggcggaagaaactcccggagagctcacccaaaaaacaaggagatcccatctagatttcttcttgcttttgactcacagctggaagttagaaaagcctcgatttcatctttggagaggccaaatggtcttagcctcagtctctgtctctaaatattccaccataaaacagctgagttatttatgaattagaggctatagctcacattttcaatcctctatttctttttttaaatataactttctactctgatgagagaatgtggttttaatctctctctcacattttgatgatttagacagactccccctcttcctcctagtcaataaacccattgatgatctatttcccagcttatccccaagaaaacttttgaaaggaaagagtagacccaaagatgttattttctgctgtttgaattttgtctccccacccccaacttggctagtaataaacacttactgaagaagaagcaataagagaaagatatttgtaatctctccagcccatgatctcggttttcttacactgtgatcttaaaagttaccaaaccaaagtcattttcagtttgaggcaaccaaacctttctactgctgttgacatcttcttattacagcaacaccattctaggagtttcctgagctctccactggagtcctctttctgtcgcgggtcagaaattgtccctagatgaatgagaaaattattttttttaatttaagtcctaaatatagttaaaataaataatgttttagtaaaatgatacactatctctgtgaaatagcctcacccctacatgtggatagaaggaaatgaaaaaataattgctttgacattgtctatatggtactttgtaaagtcatgcttaagtacaaattccatgaaaagctcactgatcctaattctttccctttgaggtctctatggctctgattgtacatgatagtaagtgtaagccatgtaaaaagtaaataatgtctgggcacagtggctcacgcctgtaatcctagcactttgggaggctgaggaggaaggatcacttgagcccagaagttcgagactagcctgggcaacatggagaagccctgtctctacaaaatacagagagaaaaaatcagccagtcatggtggcctacacctgtagtcccagcattccgggaggctgaggtgggaggatcacttgagcccagggaggttggggctgcagtgagccatgatcacaccactgcactccagccaggtgacatagcgagatcctgtctaaaaaaataaaaaataaataatggaacacagcaagtcctaggaagtaggttaaaactaattctttaaaaaaaaaaaaaagttgagcctgaattaaatgtaatgtttccaagtgacaggtatccacatttgcatggttacaagccactgccagttagcagtagcactttcctggcactgtggtcggttttgttttgttttgctttgtttagagacggggtctcactttccaggctggcctcaaactcctgcactcaagcaattcttctaccctggcctcccaagtagctggaattacaggtgtgcgccatcacaactagctggtggtcagttttgttactctgagagctgttcacttctctgaattcacctagagtggttggaccatcagatgtttgggcaaaactgaaagctctttgcaaccacacaccttccctgagcttacatcactgcccttttgagcagaaagtctaaattccttccaagacagtagaattccatcccagtaccaaagccagataggccccctaggaaactgaggtaagagcagtctctaaaaactacccacagcagcattggtgcaggggaacttggccattaggttattatttgagaggaaagtcctcacatcaatagtacatatgaaagtgacctccaaggggattggtgaatactcataaggatcttcaggctgaacagactatgtctggggaaagaacggattatgccccattaaataacaagttgtgttcaagagtcagagcagtgagctcagaggcccttctcactgagacagcaacatttaaaccaaaccagaggaagtatttgtggaactcactgcctcagtttgggtaaaggatgagcagacaagtcaactaaagaaaaaagaaaagcaaggaggagggttgagcaatctagagcatggagtttgttaagtgctctctggatttgagttgaagagcatccatttgagttgaaggccacagggcacaatgagctctcccttctaccaccagaaagtccctggtcaggtctcaggtagtgcggtgtggctcagctgggtttttaattagcgcattctctatccaacatttaattgtttgaaagcctccatatagttagattgtgctttgtaattttgttgttgttgctctatcttattgtatatgcattgagtattaacctgaatgttttgttacttaaatattaaaaacactgttatcctacagtt

SEQ ID NO: 12090 - DNA, 2670 bp, Homo sapiens
ggccgagccggaagaccctctctttcgctgtttgagagtctctcggctcaaggaccgggaggtaagaggtttgggactgccccggcaactccagggtgtctggtccacgacctatcctaggcgccatgggtgtgataggtatacagctggttgttaccatggtgatggccagtgtcatgcagaagattatacctcactattctcttgctcgatggctactctgtaatggcagtttgaggtggtatcaacatcctacagaagaagaattaagaattcttgcagggaaacaacaaaaagggaaaaccaaaaaagataggaaatataatggtcacattgaaagtaagccattaaccattccaaaggatattgaccttcatctagaaacaaagtcagttacagaagtggatactttagcattgcattactttccagaataccagtggctggtggatttcacagtggctgctacagttgtgtatctagtaactgaagtctactacaattttatgaagcctacacaggaaatgaatatcagcttagtctggtgcctacttgttttgtcttttgcaatcaaagttctattttcattaactacacactattttaaagtagaagatggtggtgaaagatctgtttgtgtcacctttggattttttttctttgtcaaagcaatggcagtgttgattgtaacagaaaattatctggaatttggacttgaaacagggtttacaaatttttcagacagtgcgatgcagtttcttgaaaagcaaggtttagaatctcagagtcctgtttcaaaacttactttcaaatttttcctggctattttctgttcattcattggggcttttttgacatttcctggattacgactggctcaaatgcatctggatgccctgaatttggcaacagaaaaaattacacaaactttacttcatatcaacttcttggcacctttatttatggttttgctctgggtaaaaccaatcaccaaagactacattatgaacccaccactgggcaaagaaagtatccctttaatgacagaagccacattcgatactctgcgactctggttaataatcctgctgtgtgctttgcggttggccatgatgcgtagtcacctgcaagcttatttaaatttagcccaaaaatgtgtggatcagatgaagaaagaagcggggcgaataagcacggttgagctacagaaaatggtggctcgagtcttttattatctttgtgtcattgcactgcagtatgtggcgcctctggtaatgctgcttcacacaactctgcttttgaaaacactaggtaatcattcctggggtatttatccagaatctatctctaccttaccagtggataatagtctactgtccaattctgtttactctgaattaccatcagctgaagggaaaatgaaggtaactgttacacaaataacagtggcactgagcagcttaaaaaatatttttactcctcttctttttcgaggacttctgtcttttctgacctggtggattgctgcttgcctcttttctacaagcctttttgggcttttctatcaccagtatctgactgtggcatgaatctcagttaacaaaaaagcatatccaaatcaccctttaaattaaaatatctgtgcccttaaagggctgatgaaaaccagaagaaagcaaatacaatgggaaaaaaaaacatatcagaatgtcttgtattaaatgtttcctctgtattctcagggtgaattaatgtagtaatatttaaaattacaaaatagattgttaactgttacactgtggcattggaattttaactctttgtatttactggtatgagagggctatctacaagggtaatatttctgattaccctggtttacagaaacctccagcagtctttgaaacatctcacatgactctagttattgattgcttttaatggttttatggtactgttgatagtcatagtggctgcctatagaacaatcttcaaactgagccatgctttaggggagggaaaggggctaaagtctcttctgttggtaatttattagttactcttgaaacagtaaaatccaacagaaaggaagagatagctactgtatattacagtaaagaaagctgcatagttattttaaatttaatggagatgaatatggttaaaatatataactactgctgcttgagaatagcaagagtattgttttaaaacatattccacccaacttgagagttcttttaaaatgattggccatatgaacatttgtaatcttgccattaggtttggacctgccatattttgttttattctgtgatcctaactagttccttttaataggctaaaatatttatcaatactgatcagactttaaagaaattactttgtaaacctgctgactacctgtatgtattgtatatatattatatattaaatatataatatattgagattataaaagatgaaaatattgaatccttataatattttaagttgcagaatgtatgttaaaaagtgacttgaatgagatgtatttgtatctagaaattttatttctttttggaatgagattaaaatacattttgaaagttaaaaaaaaaaaaaaaaaaaaaaaaaaaaaaaaaaaaaaaaaaaaaaaaaaaaaaaaaaaaaaccaaaaaaaaaaaaaaa

SEQ ID NO: 12091 - DNA, 12563 bp, Homo sapiens
cgcgccggggcctggtgctcggtcggcgggtgctgccgctttaagcgggggcgggactgcgcgcggccgagcggttgcgacgagggctcggctgggggtcgccggggtcgcgggccgggcctgcaggagccgggccgccgaggtcggggctggttgaactcatggacctgatacttttctcttgagaagcaaaccagcccaaaagaaaaatggcgtttgttgcaacacagggggccacggtggttgaccagaccactttgatgaaaaagtaccttcagtttgtggcagctctcacagatgtgaatacacctgatgaaacaaagttgaaaatgatgcaagaagttagtgaaaattttgagaatgtcacgtcatctcctcagtattctacattcctagaacatatcatccctcgattccttacatttctccaagatggagaagttcagtttcttcaggagaaaccagcacagcaactgcggaagctcgtacttgaaataattcatagaataccaaccaacgaacatcttcgtcctcacacaaaaaatgttttgtctgtgatgtttcgctttttagagacggaaaatgaagaaaatgttcttatttgtctaagaataattattgagctacacaaacagttcaggccaccgatcacacaagaaattcatcattttctggattttgtgaaacagatttacaaggagcttccaaaagtagtgaaccgctactttgagaaccctcaagtgatccccgagaacacagtgcctcccccagaaatggttggtatgataacaacgattgctgtgaaagtcaacccggagcgtgaggacagtgagactcgaacacattccatcattccgaggggatcactttctctgaaagtgttggcagaattgcccattattgttgttttaatgtatcagctctacaaactgaacatccacaatgttgttgctgagtttgtgcccttgatcatgaacaccattgccattcaggtgtctgcacaagcgaggcaacataagctttacaacaaggagttgtatgctgacttcattgctgctcagattaaaacattgtcatttttagcttacattatcaggatttaccaggagttggtgactaagtattctcagcagatggtgaaaggaatgctccagttactttcaaattgtccagcagagactgcacacctcagaaaggagcttctgattgctgccaaacacatcctcaccacagagctgagaaaccagttcattccttgcatggacaagctgtttgatgaatccatactaattggctcaggatatactgccagagagactctaaggcccctcgcctacagcacgctggccgacctcgtgcaccatgtccgccagcacctgcccctcagcgacctctccctcgccgtccagctcttcgccaagaacatcgacgatgagtccctgcccagcagcatccagaccatgtcctgcaagctcctgctgaacctggtggactgcatccgttccaagagcgagcaggagagtggcaatgggagagacgtcctgatgcggatgctggaggttttcgttctcaaattccacacaattgctcggtaccagctctctgccatttttaagaagtgtaagcctcagtcagaacttggagccgtggaagcagctctgcctggggtgcccactgcccctgcagctcctggccctgctccctccccagcccctgtccctgccccacctccacccccgcccccacccccacctgccacccctgtgaccccggcccccgtgcctcccttcgagaagcaaggagaaaaggacaaggaagacaagcagacattccaagtcacagactgtcgaagtttggtcaaaaccttggtgtgtggtgtcaagacaatcacgtggggcataacatcatgcaaagcacctggtgaagctcagttcattcccaacaagcagttacaacccaaagagacacagatttacatcaaacttgtgaaatatgcaatgcaagctttagatatttatcaggtccagatagcaggaaatggacagacatacatccgtgtggccaactgccagactgtgagaatgaaagaggagaaggaggtattggagcatttcgctggtgtgttcacaatgatgaaccccttaacgttcaaagaaatcttccaaactacggtcccttatatggtggagagaatctcaaaaaattatgctcttcagattgttgccaattccttcttggcaaatcctactacctctgctctgtttgctacgattctggtggaatatctccttgatcgcctgccagaaatgggctccaacgtggagctctccaacctgtacctcaagctgttcaagctggtctttggctctgtctccctctttgcagctgaaaatgaacaaatgctgaagcctcacttgcacaagattgtgaacagctctatggagctcgcgcagactgccaaggaaccctacaactacttcttgctgctacgggcgctgtttcgctctattggtggaggtagccacgatctcttgtatcaggagttcttgcctctccttccaaacctcctgcaagggctgaacatgcttcagagtggcctgcacaagcagcacatgaaggacctctttgtggagctgtgtctcaccgtccctgtgcggctgagctcgcttttgccgtacctgcccatgcttatggatcccttggtgtctgcactcaatgggtctcagacattggtcagccaaggcctcaggacgctggagctgtgtgtggacaacctgcagcccgacttcctctacgaccacatccagccggtgcgcgcagagcttatgcaggctctgtggcgcaccttacgcaaccctgctgacagcatctcccacgtggcctaccgtgtgctcggtaagtttggcggcagtaacaggaagatgctgaaggagtcgcagaagctgcactacgttgtgaccgaggttcagggccccagcatcactgtggagttttccgactgcaaagcttctctccagctccccatggagaaggccattgaaactgctctggactgcctgaaaagcgccaacactgagccctactaccggaggcaggcgtgggaagtgatcaaatgcttcctggtggccatgatgagcctggaggacaacaagcacgcactctaccagctcctggcacaccccaactttacagaaaagaccatccccaatgttatcatctcacatcgctacaaagcccaggacactccagcccggaagacttttgagcaggccctgacaggcgccttcatgtctgctgtcattaaggacctgcggcccagcgccctgccctttgtcgccagcttgatccgccactatacgatggtggcagtcgcccagcagtgtggccctttcttgctgccttgctaccaggtgggcagccagcccagcacagccatgtttcacagtgaagaaaatggctcgaaaggaatggatcctttggttctcattgatgcaattgctatttgtatggcatatgaagaaaaggagctttgcaaaatcggggaggtggccctagctgtgatatttgatgttgcaagtatcatcctgggctccaaggagagggcctgccagctgcccctgttttcttacatcgtggagcgcctgtgtgcatgttgttatgaacaggcgtggtatgcaaagctggggggtgtggtgtctattaagtttctcatggagcggctgcctctcacttgggttctccagaaccagcagacattcctgaaagcacttctctttgtcatgatggacttaactggagaggtttccaatggggcagtcgctatggcaaagaccacgctggagcagcttctgatgcggtgcgcaacgcctttaaaagacgaggagagagccgaagagatcgtggccgcccaggaaaagtctttccaccatgtgacacacgacttggttcgagaagtcacctctccaaactccactgtgaggaagcaggccatgcattcgctgcaggtgttggcccaggtcactgggaagagtgtcacggtgatcatggaaccccacaaagaggtcctgcaggatatggtcccccctaagaagcacctgctccgacaccagcctgccaacgcacagattggcctgatggaggggaacacgttctgtaccacgttgcagcccaggctcttcacaatggaccttaacgtggtggagcataaggtgttctacacagagctgttgaatttgtgtgaggctgaagattcagctttaacaaagctgccctgttataaaagccttccgtcactcgtacctttacgaattgcggcattaaatgcacttgctgcctgcaattaccttcctcagtccagggagaaaatcatcgctgcactcttcaaagccctgaattccaccaatagtgagctccaagaggccggagaagcctgtatgagaaagtttttagaaggtgctaccatagaagtcgatcaaatccacacacatatgcgacctttgctgatgatgctgggagattaccggagcttgacgctgaatgttgtgaatcgcctgacttcggtcacgaggctcttcccaaattccttcaatgataaattttgtgatcagatgatgcaacatctgcgcaagtggatggaagtggtggtgatcacccacaaagggggccagaggagcgacggaaacgaaatgaagatttgctcagcaattataaacctttttcatctgatcccggctgctcctcagacactggtgaagcctttgctagaggttgtcatgaaaacggagcgggcgatgctgatcgaggcggggagtccattccgagagcccctgatcaagttcctgactcgacatccctcgcagacagtggagctgttcatgatggaagccacactgaacgatccccagtggagcagaatgtttatgagttttttaaaacacaaagacgccagacctctgcgggatgtgctggctgccaaccccaacaggttcatcaccctgctgctgccggggggtgcccagacggctgtgcgccccggttcgcccagcaccagcaccatgcgcctggacctccagttccaggccatcaagatcataagcattatagtgaaaaacgatgactcctggctggccagccagcactctctggtgagccagttgcgacgtgtgtgggtgagtgagaacttccaagagaggcaccgcaaggagaacatggcagccaccaactggaaggagcccaagctgctggcctactgcctgctgaactactgcaaaaggaattacggagatatagaattgctgttccagctgctccgagcctttactggtcgttttctctgcaacatgacattcttaaaagagtatatggaggaagagattcccaaaaattacagcatcgctcagaaacgtgccctgttctttcgctttgtagacttcaacgaccccaacttcggagatgaattaaaagctaaagttctgcagcatatcttgaatcctgctttcttgtacagctttgagaagggggaaggagagcagctcttgggacctcccaatccagaaggagataacccagaaagcatcaccagtgtgtttattaccaaggtcctggaccccgagaagcaggcggacatgctggactcgctgcggatctacctgctgcagtacgccacgctgctggtggagcacgccccccaccacatccatgacaacaacaagaaccgcaacagcaagctgcgccgcctcatgaccttcgcctggccctgcctgctctccaaggcctgcgtggacccagcctgcaagtacagcggacacttgctcctggcgcacattatcgccaaattcgccatacacaagaagatcgtcctgcaggtttttcatagtctcctcaaggctcacgcaatggaagctcgagcgatcgtcagacaggcgatggccattctgaccccggcggtgccggccaggatggaggacgggcaccagatgctgacccactggacccggaagatcattgtggaggaggggcacaccgtcccgcagctggtccacattctgcacctgatagtgcaacacttcaaggtgtactacccggtacggcaccacttggtgcagcacatggtgagcgccatgcagaggctgggcttcacgcccagtgtcaccatcgagcagaggcggctggccgtggacctgtctgaagtcgtcatcaagtgggagctgcagaggatcaaggaccagcagccggattcagatatggacccaaattccagtggagaaggagtcaattctgtctcatcctccattaagagaggcctgtccgtggattctgcccaggaagtgaaacgctttaggacggccaccggagccatcagtgcagtctttgggaggagccagtcgctacctggagcagactctctcctcgccaagcccattgacaagcagcacacagacactgtggtgaacttccttatccgcgtggcctgtcaggttaatgacaacaccaacacagcggggtcccctggggaggtgctctctcgccggtgtgtgaaccttctgaagactgcgttgcggccagacatgtggcccaagtccgaactcaagctgcagtggttcgacaagctgctgatgactgtggagcagccaaaccaagtgaactatgggaatatctgcacgggcctagaagtgctgagcttcctgctaactgtcctccagtccccagccatcctcagtagcttcaaacctctgcagcgtggaattgccgcctgcatgacatgtggaaacaccaaggtgttgcgagccgtccacagccttctctcgcgcctgatgagcattttcccaacagagccgagtacttccagtgtggcctccaaatatgaagagctggagtgcctctacgcagccgtcggaaaggtcatctatgaagggctcaccaactacgagaaggccaccaatgccaatccctcccagctcttcgggacccttatgatcctcaagtctgcctgcagcaacaaccccagctacatagacaggctgatctccgtctttatgcgctccctgcagaagatggtccgggagcatttaaaccctcaggcagcgtcaggaagcaccgaagccacctcaggtacaagcgagctggtgatgctgagtctggagctggtgaagacgcgcctggcagtgatgagcatggagatgcggaagaacttcatccaggccatcctgacatccctcatcgaaaaatcaccagatgccaaaatcctccgggctgtggtcaaaatcgtggaagaatgggtcaagaataactccccaatggcagccaatcagacacctacactccgggagaagtccattttgcttgtgaagatgatgacttacatagaaaaacgctttccggaagaccttgaattaaatgcccagtttttagatcttgttaactatgtctacagggatgagaccctctctggcagcgagctgacggcgaaacttgagcctgcctttctctctgggctgcgctgtgcccagccactcatcagggcaaagtttttcgaggtttttgacaactccatgaaacgtcgtgtctacgagcgcttgctctatgtgacctgttcgcagaactgggaagccatggggaaccacttctggatcaagcagtgcattgagctgcttctggccgtgtgtgagaagagcacccccattggcaccagctgccaaggagccatgctcccgtccatcaccaacgtcatcaacctggccgatagccacgaccgtgccgccttcgccatggtcacacatgtcaagcaggagccccgggagcgggagaacagcgagtccaaagaggaggatgtagagatagacatcgaactagctcctggggatcagaccagcacgcccaaaaccaaagaactttcagaaaaggacattggaaaccagctgcacatgctaaccaacaggcacgacaagtttctggacactctccgagaggtgaagactggagcgctgctcagcgctttcgttcagctgtgccacatttccacgacgctggcagagaagacgtgggtccagcttttccccagattgtggaagatcctctctgacagacagcagcatgcactcgcgggtgagataagtccatttctgtgcagcggcagtcaccaggtgcagcgggactgccagcccagcgcgctgaactgctttgtggaagccatgtcccagtgcgtgccgccaatccccatccgaccctgcgtcctgaagtacctggggaagacacacaacctctggttccggtccacgctgatgttggagcaccaggcttttgaaaagggtctgagtcttcagattaagccgaagcaaacaacggagttttatgagcaggagagcatcaccccgccgcagcaggagatactggattcccttgcggagctttactccctgttacaagaggaagatatgtgggctggtctgtggcagaagcggtgcaagtactcggagacagcgactgcgattgcttacgagcagcacgggttctttgagcaggcacaagaatcctatgaaaaggcaatggataaagccaaaaaagaacatgagaggagtaacgcctcccctgctattttccctgaataccagctctgggaagaccactggattcgatgctccaaggaattgaaccagtgggaagccctgacggagtacggtcagtccaaaggccacatcaacccctacctcgtcctggagtgcgcctggcgggtgtccaactggactgccatgaaggaggcgctggtgcaggtggaagtgagctgtccgaaggagatggcctggaaggtgaacatgtaccgcggatacctggccatctgccaccccgaggagcagcagctcagcttcatcgagcgcctggtggagatggccagcagcctggccatccgcgagtggcggcggctgccccacgtagtgtcccacgtgcacacgcctctcctacaggcagcccagcaaatcatcgaactccaggaagctgcacaaatcaacgcaggcttacagccaaccaacctgggaaggaacaacagcctgcacgacatgaagacggtggtgaagacctggaggaaccgactgcccatcgtgtctgacgacttgtcccactggagcagcatcttcatgtggaggcagcatcattaccaggcgattgtaactgcctatgagaatagctctcagcatgatcccagttcaaataacgctatgcttggggttcatgcatcagcttcagcgatcatccagtatggaaaaatcgcccggaaacaaggactggtcaatgtagctctggatatattaagtcggattcatactattccaactgttcctatcgtggattgcttccagaagattcgacagcaagttaaatgctacctccagctggcaggcgtcatgggcaaaaacgagtgcatgcagggccttgaagttattgaatctacaaatttaaaatacttcacaaaagagatgacagccgaattttatgcactgaagggaatgttcttggctcagatcaacaagtccgaggaggcaaacaaagccttctctgcagctgtgcagatgcacgatgtgctggtgaaagcctgggccatgtggggcgactacctggagaacatctttgtgaaggagcggcagctgcacctgggcgtgtctgccatcacctgctacctgcacgcctgccggcatcagaacgagagcaaatcgaggaaatacttagccaaggtgctgtggcttttgagttttgatgatgacaaaaacactttggcagatgccgtcgacaagtactgcattggtgtgccacccatccagtggctggcctggatcccacagctgctcacctgcctggttggctcggagggaaagctgctcttgaacctcattagccaggttggacgcgtgtatccccaagcggtctactttcccatccggaccctgtacctgaccctgaaaatagaacagcgggaacgctacaagagcgatccagggcccataagagcaacagcacccatgtggcgctgcagccgaatcatgcacatgcagcgagagctccaccccacccttctgtcttccctggaaggcatcgtcgatcagatggtctggttcagagaaaattggcatgaagaggttctcaggcagctccaacagggcctggcgaaatgttactccgtggcgtttgagaaaagtggagcggtgtccgatgctaaaatcaccccccacactctcaattttgtgaagaagttggtgagcacgtttggggtgggcctggagaatgtgtccaacgtctcgaccatgttctccagcgcagcctctgagtctctggcccggcgggcgcaggccactgcacaagaccctgtctttcagaagctgaaaggccagttcacgacggattttgacttcagcgttccaggatccatgaagcttcataatcttatttctaagttgaaaaagtggatcaaaatcttggaggccaagaccaagcaactccccaaattcttcctcatagaggaaaagtgccggttcttgagcaatttctcggcacagacagctgaagtggaaattcctggggagtttctgatgccaaagccaacgcattattacatcaagattgcacggttcatgccccgggtagagattgtgcagaagcacaacaccgcagcccggcggctgtacatccggggacacaatggcaagatctacccatacctcgtcatgaacgacgcctgcctcacagagtcacggcgagaggagcgtgtgttgcagctgctgcgtctgctgaacccctgtttggagaagagaaaggagaccaccaagaggcacttgtttttcacagtgccccgggttgtggcagtttccccacagatgcgcctcgtggaggacaacccctcttcactttcccttgtggagatctacaagcagcgctgcgccaagaagggcatcgagcatgacaaccccatctcccgttactatgaccggctggctacggtgcaggcgcggggaacccaagccagccaccaggtcctccgcgacatcctcaaggaggttcagagtaacatggtgccgcgcagcatgctcaaggagtgggcgctgcacaccttccccaatgccacggactactggacgttccggaagatgttcaccatccagctggctctgataggcttcgcggaattcgtcctgcatttaaatagactcaaccccgagatgttacagatcgctcaggacactggcaaactgaatgttgcctactttcgatttgacataaacgacgcgactggagacctggatgccaaccgtcctgtcccatttcgactcacgcccaacatttctgagtttctgaccaccatcggggtctccggcccgttgacagcgtccatgattgcggtcgcccggtgcttcgcccagccaaactttaaggtggatggcattctgaaaacggttctccgggacgagatcattgcttggcacaaaaaaacacaagaggacacgtcctctcctctctcggccgccgggcagccagagaacatggacagccagcaactggtgtccctggttcagaaagccgtcaccgccatcatgacccgcctgcacaacctcgcccagttcgaaggcggggaaagcaaggtgaacaccctggtggccgcggcaaacagcctggacaatctgtgccgcatggaccccgcctggcacccctggctgtgactgtggccgccacggcacgcgggaatgtgaagggcgctccgggctctgagcccgcagcttttacgacttctccctgcgtcgttccttatattcacagaagccccatagtttcactgggttgcggttattttcctggtagtttgcgtgtaagaaagggagaatatagttttagaggaagctgaactatgacgatgctgggcgaacggtttgggaaatggcagagctgaaacttattccaagctttcaaaataatcttttaagaagccaggattctccggtctggaatttctgagtgagtcctttttttatggtgtcctccctctgtgaatgtacaggcggaactgtacgaacagctcccttccatccatttttaactctttcggaaataacacctcacagcagcttcgtgcttttgtacagacctttgtaacaagtgtacagaaaactcattttgtttgagaaacaggagttgatgaacccatcatgctggtttttctctgagcacaaagttttaggctgtacacagccagccttgggaatctcgttgagcgttcggcgtggatccacggggccaggccaccctgcgggaggccacacgcatccacttcggattcagtgggtgaagacagaactctgagagtctgcaggcggctcctgtgctttttatttctggctcttcggatgtcttctagacatttactatcactgcacctgaagaaaaaatcacttttaccttcctaatttaaaaagacaaaacagaaatgtacgttccttcgctagctttagtctttctgttcccatttttataaatctgagcattgataatgttctatctaaatttgtacagtgtgattttttttt

SEQ ID NO: 12092 - DNA, 3570 bp, Homo sapiens
gaaatcacaaattacaaaacgtcagagtactttctggaaataagccttcctctccagggaacaacgcatttgacacttgactgggatacactaccggatcctccgagggtgatggttctcaagaaggcagaagcaatggtgaccaatagacctccttaaaggctgagccgctgggcaccttcctactcctctcgaccgtgctaggatgactgcagcagagtccccgagtcctttgatgcaagggtctagcaaccaccaaacagacaagcccttcggcctgtcctggagggcgttgaatggcatggcctggagctcaaccaggagaaccgtgctcaggaggaagagaccagaaggataactcaaaaagttctgagaagttcctaagaccacctgaagagaaggagcctgctgccaatggtgtggacaccgcagtgtgcttgaggagacttcagaaacgagaactggaaaaatccctctgctttctctggccagtttcacacaatcatcaggtgagccgaggatccattggaggaaggcattatctgtatccagaggaaatagccaaggatattcagaggtgtgcctgggaagtttgagctgcagcagtggaaccttaatgcccaggatgatcctgtctaacaccacagcggtgacgccctttctgaccaagctgtggcaggagacagttcagcagggtggcaacatgtcgggcctggcccgcaggtccccccgcagcagtgacggcaagctggaggccctctacgtcctcatggtactgggattcttcggcttcttcaccctgggcatcatgctgagctacatccgctccaagaagctggagcactcgaacgacccattcaacgtctacatcgagtccgatgcctggcaagagaaggacaaggcctatgtccaggcccgggtcctggagagctacaggtcgtgctatgtcgttgaaaaccatctggccatagaacaacccaacacacaccttcctgagacgaagccttccccatgaaccccaccactggctaaaactggacacatcctgcctggcaacctgattttctaatcacattcctctcatactctttattgtgatggataccactggatttctttttggctgttgtaaggggtgaggggtggattaatgacactgtttcactgtttctctaaaatcacgttcttttgtgatagactgtcagtggttcccccatatctgtccctgccttgctaaatttagcagaatccctgaggacatggcctctgagaatagcagctgcatttcccagactcccttgcagctagcaaggttgtgtgactaagccctggccagtaggcatggaagtgaagactgtaatgtccaagtaatccttggaaagaaaagaacgtgcccttaactaactttgtcctgcttcccagtggctggatgtggaggaggtggagagcagttatgagactgggaaagaacggggcactcaaagagccacacacatctgggcctgggcgacgtggatcctccttaccacccaccaggccagatttacaggagagagaaatccactccactcttccttaagccactgttattctgatctctgttaaggtcgcagaatcaatgcccttactgatacacctaccttataggactgaacctaaaggcatgacatttccatacttgtcacaagcacacactgattctgcccttgtcacttctgtgctcactcttgtggctctatcctcctcctgcccttccgccttccactcctcccttgcacccatcctgcacacatctccctgaaaacacacaggcacatacactcatatacatagacacacatacacacctcaatctagaaagaacttgctttgtacagggctgagatggaggagaaaaaaatgcccccttcagaatgcataccaaggggaaggtgctcggtcactgtgggagcagggaaaggtgcccccactccccgagagccaggggaaggagtggctctgggcagagagggacacatagcactggggtggcaggtccttttgaggtgatgggccggttttgtgagatgaattgtatcccccaaaaagacaggtaccttcaatgtgacctaattgggaaatagagtctttgcagatgatctagttgagatgaggtcattggggtgggccctcacccaatatgactggagtccttatcggaagagggaaattcagacacagatgcatagggaggacaccatgccgtgacagaggcagagggtgcagtgacacagccacaaaccaaggaaggccgaggatggatgcgcatccccatcccaagaagtcgggaagaagccaggaaggctcctctcccacaggtttcagaggaagcacagccctgcttgaattcaaacttttggcctccagaactgtgagtcagtacctgttgttgaagccacccagcttaggatactctggcagcctactgccatacagtattgggatactatagtgagcccatgcagcacctctcacccacccagagatggagctgctctgccttccagcggggcacccggagggctgccccagcagatagagagggcctccgttctgccacctgccttgaaagggtctccagctgccatatgtagcattggagtcctctgcaatgcgacatcctgaaagctcagctgcctgggcattcctgaagagtatggaatatttaaatgaaacatatttttttaaaacctgcgcataagataaaagcagcccgtgtgcatcttgggccatcctcaaatggacagacttggtcttgtgaggttccagtccttgtttcacataataaacactggcatggctcagcccctgagttaccacagtccttgagatgagtggttctttgggttacaaagtcctctgaaagtctagtgagagctgtgatctttgccccacccgaataatgcatatggacaccacaccttgcctgccgtgtccaggattcatgaccagtagcagcccagctatgcctgccacgtctcatggcccctgtgtaagccagacccttcttaggcagttgcatattcccagactgaggcagggcaggtttgcagagagagacccagagtgcacgtgacccgcagtgtgatccctggcacgcactgactttgatattccaggcacacggactggctatttatcaccacttctttttccccactaagattcctgtgccttttaaggcagagggagatccctatggcgttagtcttcccaggccttaaagggcccttgtcttcactcacaaacctcttatctcttcttctccttcctctacattttaaagggggagagggaaaagtaaccgggagacaaattgagccacatattttcagacacttgttaccatattttaaaatctggcttcacatacacagagtctttgctatgcaccatgtactgttctaagcttcttaaaaatagaatctcaattattattttgcaggcaatactctatgcattcattagctaggacaacaatgcatttgcagtagtgagatttcgctaaaaaattaaagccatttactatga

SEQ ID NO: 12093 - DNA, 3018 bp, Homo sapiens
cgcaccccgcgcagcggctgagccgggagccagcgcagcctcggccccgcagctcaagcctcgtccccgccgccgccgccgccgccgccgccgccgcccccggggcatggcctgtctgatggccgctttctcggtcggcaccgccatgaatgccagcagttactctgcagagatgacggagcccaagtcggtgtgtgtctcggtggatgaggtggtgtccagcaacatggaggccactgagacggacctgctgaatggacatctgaaaaaagtagataataacctcacggaagcccagcgcttctcctccttgcctcggagggcagctgtgaacattgaattcagggacctttcctattcggttcctgaaggaccctggtggaggaagaaaggatacaagaccctcctgaaaggaatttccgggaagttcaatagtggtgagttggtggccattatgggtccttccggggccgggaagtccacgctgatgaacatcctggctggatacagggagacgggcatgaagggggccgtcctcatcaacggcctgccccgggacctgcgctgcttccggaaggtgtcctgctacatcatgcaggatgacatgctgctgccgcatctcactgtgcaggaggccatgatggtgtcggcacatctgaagcttcaggagaaggatgaaggcagaagggaaatggtcaaggagatactgacagcgctgggcttgctgtcttgcgccaacacgcggaccgggagcctgtcaggtggtcagcgcaagcgcctggccatcgcgctggagctggtgaacaaccctccagtcatgttcttcgatgagcccaccagcggcctggacagcgcctcctgcttccaggtggtctcgctgatgaaagggctcgctcaagggggtcgctccatcatttgcaccatccaccagcccagcgccaaactcttcgagctgttcgaccagctttacgtcctgagtcaaggacaatgtgtgtaccggggaaaagtctgcaatcttgtgccatatttgagggatttgggtctgaactgcccaacctaccacaacccagcagattttgtcatggaggttgcatccggcgagtacggtgatcagaacagtcggctggtgagagcggttcgggagggcatgtgtgactcagaccacaagagagacctcgggggtgatgccgaggtgaacccttttctttggcaccggccctctgaagaggtaaagcagacaaaacgattaaaggggttgagaaaggactcctcgtccatggaaggctgccacagcttctctgccagctgcctcacgcagttctgcatcctcttcaagaggaccttcctcagcatcatgagggactcggtcctgacacacctgcgcatcacctcgcacattgggatcggcctcctcattggcctgctgtacttggggatcgggaacgaagccaagaaggtcttgagcaactccggcttcctcttcttctccatgctgttcctcatgttcgcggccctcatgcctactgttctgacatttcccctggagatgggagtctttcttcgggaacacctgaactactggtacagcctgaaggcctactacctggccaagaccatggcagacgtgccctttcagatcatgttcccagtggcctactgcagcatcgtgtactggatgacgtcgcagccgtccgacgccgtgcgctttgtgctgtttgccgcgctgggcaccatgacctccctggtggcacagtccctgggcctgctgatcggagccgcctccacgtccctgcaggtggccactttcgtgggcccagtgacagccatcccggtgctcctgttctcggggttcttcgtcagcttcgacaccatccccacgtacctacagtggatgtcctacatctcctatgtcaggtatgggttcgaaggggtcatcctctccatctatggcttagaccgggaagatctgcactgtgacatcgacgagacgtgccacttccagaagtcggaggccatcctgcgggagctggacgtggaaaatgccaagctgtacctggacttcatcgtactcgggattttcttcatctccctccgcctcattgcctattttgtcctcaggtacaaaatccgggcagagaggtaaaacacctgaatgccaggaaacaggaagattagacactgtggccgagggcacgtctagaatcgaggaggcaagcctgtgcccgaccgacgacacagagactcttctgatccaacccctagaaccgcgttgggtttgtgggtgtctcgtgctcagccactctgcccagctgggttggatcttctctccattcccctttctagctttaactaggaagatgtaggcagattggtggtttttttttttttaacatacagaattttaaataccacaactggggcagaatttaaagctgcaacacagctggtgatgagaggcttcctcagtccagtcgctccttagcaccaggcaccgtgggtcctggatggggaactgcaagcagcctctcagctgatggctgcacagtcagatgtctggtggcagagagtccgagcatggagcgattccattttatgactgttgtttttcacattttcatctttctaaggtgtgtctcttttccaatgagaagtcatttttgcaagccaaaagtcgatcaatcgcattcattttaagaaattatacctttttagtacttgctgaagaatgattcagggtaaatcacatactttgtttagagaggcgaggggtttaaccgagtcacccagctggtctcatacatagacagcacttgtgaaggattgaatgcaggttccaggtggagggaagacgtggacaccatctccactgagccatgcagacatttttaaaagctatacaaaaaattgtgagaagacattggccaactctttcaaagtctttctttttccacgtgcttcttattttaagcgaaatatattgtttgtttcttcctaaaaaaaaaaaaaaaaaaaaaaaaa

SEQ ID NO: 12094 - DNA, 2696 bp, Homo sapiens
ggctaatgcacagacatgaacatctattgaggaaaaccacaaaaaacttcaaaacagctacaacgggaaaaagagagttttgtcccacagtcagcaggccactagtttattaacttccagtcaccttgatttttgctaaaatgaagactctgcagtctacacttctcctgttactgcttgtgcctctgataaagccagcaccaccaacccagcaggactcacgcattatctatgattatggaacagataattttgaagaatccatatttagccaagattatgaggataaatacctggatggaaaaaatattaaggaaaaagaaactgtgataatacccaatgagaaaagtcttcaattacaaaaagatgaggcaataacaccattacctcccaagaaagaaaatgatgaaatgcccacgtgtctgctgtgtgtttgtttaagtggctctgtatactgtgaagaagttgacattgatgctgtaccacccttaccaaaggaatcagcctatctttacgcacgattcaacaaaattaaaaagctgactgccaaagattttgcagacatacctaacttaagaagactcgattttacaggaaatttgatagaagatatagaagatggtactttttcaaaactttctctgttagaagaactttcacttgctgaaaatcaactactaaaacttccagttcttcctcccaagctcactttatttaatgcaaaatacaacaaaatcaagagtaggggaatcaaagcaaatgcattcaaaaaactgaataacctcaccttcctctacttggaccataatgccctggaatccgtgcctcttaatttaccagaaagtctacgtgtaattcatcttcagttcaacaacatagcttcaattacagatgacacattctgcaaggctaatgacaccagttacatccgggaccgcattgaagagatacgcctggagggcaatccaatcgtcctgggaaagcatccaaacagttttatttgcttaaaaagattaccgatagggtcatacttttaacctctattggtacaacatataaatgaaagtacacctacactaatagtctgtctcaacaatgagtaaaggaacttaagtattggtttaatattaaccttgtatctcattttgaaggaatttaatattttaagcaaggatgttcaaaatcttacatataataagtaaaaagtaagactgaatgtctacgttcgaaacaaagtaatatggaaaatatttaaacagcattacaaaatcctagtttatactatactaccatttaaatatcatgtttttatataaatgcccaaatttgagatgcattattcctattactaatgatgtaagtacgaggataaatccaagaaactttcaactctttgcctttcctggcctttactggatcccaaaagcatttaaggtacatgttccaaaaactttgaaaagctaaatgtttcccatgatcgctcattcttcttttattattcatacgttattccttataaagtaagaactttgttttcctcctatcaaggcagctattttattaaatttttcacttagtctgagaaatagcagatagtctcatatttaggaaaactttccaaataaaataaatgttattctctgataaagagctaatacagaaatgttcaagttattttactttctggtaatgtcttcagtaaaatattttctttatctaaatattaacattctaagtctaccaaaaaaagttttaaactcaagcaggccaaaaccaatatgcttataagaaataatgaaaagttcatccatttctgataaagttctctatggcaaagtctttcaaatacgagataactgcaaaatattttccttttatactacagaaatgagaatctcatcaataaattagttcaagcataagatgaaaacagaatattctgtggtgccagtgcacactaccttcccacccatacacatccatgttcactgtaacaaactgaatattcacaataaagcttctgagtaacactttctgattactcatgataaactgacatggctaactgcaagaattaaatcttctatctgagagtaataatttatgatgactcagtggtgccagagtaaagtttctaaaataacattcctctcacttgtaccccactaaaagtattagtctacacattacattgaagttaaacacaaaattatcagtgttttagaaacatgagtccggactgtgtaagtaaaagtacaaacattatttccaccataaagtatgtattgaaatcaagttgtctctgtgtacagaatacatacttattcccatttttaagcatttgcttctgttttccctacctagaatgtcagatgtttttcagttatctccccatttgtcaaagttgacctcaagataacatttttcattaaagcatctgagatctaagaacacaattattattctaacaatgattattagctcattcacttattttgataactaatgatcacagctattatactactttctcgttattttgtgtgcatgcctcatttccctgacttaaacctcactgagagcgcaaaatgcagctttatactttttactttcaattgcctagcacaatagtgagtacatttgaattgaatatataataaatattgcaaaataaaatccaaaaaaaaaaaaaaaaa

SEQ ID NO: 12095 - DNA, 2793 bp, Homo sapiens
ggctaatgcacagacatgaacatctattgaggaaaaccacaaaaaacttcaaaacagctacaacgggttaaatactgttctctggcccttactgcgcacaccctgccaaaacatcctctaagcttttaaatattgcttcgatggtctgaatttttatttccagggaaaaagagagttttgtcccacagtcagcaggccactagtttattaacttccagtcaccttgatttttgctaaaatgaagactctgcagtctacacttctcctgttactgcttgtgcctctgataaagccagcaccaccaacccagcaggactcacgcattatctatgattatggaacagataattttgaagaatccatatttagccaagattatgaggataaatacctggatggaaaaaatattaaggaaaaagaaactgtgataatacccaatgagaaaagtcttcaattacaaaaagatgaggcaataacaccattacctcccaagaaagaaaatgatgaaatgcccacgtgtctgctgtgtgtttgtttaagtggctctgtatactgtgaagaagttgacattgatgctgtaccacccttaccaaaggaatcagcctatctttacgcacgattcaacaaaattaaaaagctgactgccaaagattttgcagacatacctaacttaagaagactcgattttacgggaaatttgatagaagatatagaagatggtactttttcaaaactttctctgttagaagaactttcacttgctgaaaatcaactactaaaacttccagttcttcctcccaagctcactttatttaatgcaaaatacaacaaaatcaagagtaggggaatcaaagcaaatgcattcaaaaaactgaataacctcaccttcctctacttggaccataatgccctggaatccgtgcctcttaatttaccagaaagtctacgtgtaattcatcttcagttcaacaacatagcttcaattacagatgacacattctgcaaggctaatgacaccagttacatccgggaccgcattgaagagatacgcctggagggcaatccaatcgtcctgggaaagcatccaaacagttttatttgcttaaaaagattaccgatagggtcatacttttaacctctattggtacaacatataaatgaaagtacacctacactaatagtctgtctcaacaatgtgtaaaggaacttaagtattggtttaatattaaccttgtatctcattttgaaggaatttaatattttaagcaaggatgttcaaaatcttacatataataagtaaaaagtaagactgaatgtctacgttcgaaacaaagtaatatgaaaatatttaaacagcattacaaaatcctagtttatactagactaccatttaaaaatcatgtttttatataaatgcccaaatttgagatgcattattcctattactaatgatgtaagtacgaggataaatccaagaaactttcaactctttgcctttcctggcctttactggatcccaaaagcatttaaggtacatgttccaaaaactttgaaaagctaaatgtttcccatgatcgctcattcttcttttatgattcatacgttattccttataaagtaagaactttgttttcctcctatcaaggcagctattttattaaatttttcacttagtctgagaaatagcagatagtctcatatttaggaaaactttccaaataaaataaatgttattctctgataaagagctaatacagaaatgttcaagttattttactttctggtaatgtcttcagtaaaatattttctttatctaaatattaacattctaagtctaccaaaaaaagttttaaactcaagcaggccaaaaccaatatgcttataagaaataatgaaaagttcatccatttctgataaagttctctatggcaaagtctttcaaatacgagataactgcaaaatattttccttttatactacagaaatgagaatctcatcaataaattagttcaagcataagatgaaaacagaatattctgtggtgccagtgcacactaccttcccacccatacacatccatgttcactgtaacaaactgaatattcacaataaagcttctgagtaacactttctgattactcatgataaactgacatggctaactgcaagaattaaatcttctatctgagagtaataatttatgatgactcagtggtgccagagtaaagtttctaaaataacattcctctcacttgtaccccactaaaagtattagtctacacattacattgaagttaaacacaaaattatcagtgttttagaaacatgagtccggactgtgtaagtaaaagtacaaacattatttccaccataaagtatgtattgaaatcaagttgtctctgtgtacagaatacatacttattcccatttttaagcatttgcttctgttttccctacctagaatgtcagatgtttttcagttatctccccatttgtcaaagttgacctcaagataacatttttcattaaagcatctgagatctaagaacacaattattattctaacaatgattattagctcattcacttattttgataactaatgatcacagctattatactactttctcgttattttgtgtgcatgcctcatttccctgacttaaacctcactgagagcgcaaaatgcagctttatactttttactttcaattgcctagcacaatagtgagtacatttgaattgaatatataataaatattgcaaaataaaatccaaaaaaaaaaaaaaaaa

SEQ ID NO: 12096 - DNA, 2976 bp, Homo sapiens
ggctaatgcacagacatgaacatctattgaggaaaaccacaaaaaacttcaaaacagctacaacggtatcctaagaatatttcaattaaatattagtatgtctgctgaaggcactaattattaagaaacttaaaattatcaatctttcttgaatttctgatagagaagtaaaactattttccaaaactatttttcagaatgttcactgatacataaaaactgctagcatctaattaaagatcactaagggttaaatactgttctctggcccttactgcgcacaccctgccaaaacatcctctaagcttttaaatattgcttcgatggtctgaatttttatttccagggaaaaagagagttttgtcccacagtcagcaggccactagtttattaacttccagtcaccttgatttttgctaaaatgaagactctgcagtctacacttctcctgttactgcttgtgcctctgataaagccagcaccaccaacccagcaggactcacgcattatctatgattatggaacagataattttgaagaatccatatttagccaagattatgaggataaatacctggatggaaaaaatattaaggaaaaagaaactgtgataatacccaatgagaaaagtcttcaattacaaaaagatgaggcaataacaccattacctcccaagaaagaaaatgatgaaatgcccacgtgtctgctgtgtgtttgtttaagtggctctgtatactgtgaagaagttgacattgatgctgtaccacccttaccaaaggaatcagcctatctttacgcacgattcaacaaaattaaaaagctgactgccaaagattttgcagacatacctaacttaagaagactcgattttacgggaaatttgatagaagatatagaagatggtactttttcaaaactttctctgttagaagaactttcacttgctgaaaatcaactactaaaacttccagttcttcctcccaagctcactttatttaatgcaaaatacaacaaaatcaagagtaggggaatcaaagcaaatgcattcaaaaaactgaataacctcaccttcctctacttggaccataatgccctggaatccgtgcctcttaatttaccagaaagtctacgtgtaattcatcttcagttcaacaacatagcttcaattacagatgacacattctgcaaggctaatgacaccagttacatccgggaccgcattgaagagatacgcctggagggcaatccaatcgtcctgggaaagcatccaaacagttttatttgcttaaaaagattaccgatagggtcatacttttaacctctattggtacaacatataaatgaaagtacacctacactaatagtctgtctcaacaatgtgtaaaggaacttaagtattggtttaatattaaccttgtatctcattttgaaggaatttaatattttaagcaaggatgttcaaaatcttacatataataagtaaaaagtaagactgaatgtctacgttcgaaacaaagtaatatgaaaatatttaaacagcattacaaaatcctagtttatactagactaccatttaaaaatcatgtttttatataaatgcccaaatttgagatgcattattcctattactaatgatgtaagtacgaggataaatccaagaaactttcaactctttgcctttcctggcctttactggatcccaaaagcatttaaggtacatgttccaaaaactttgaaaagctaaatgtttcccatgatcgctcattcttcttttatgattcatacgttattccttataaagtaagaactttgttttcctcctatcaaggcagctattttattaaatttttcacttagtctgagaaatagcagatagtctcatatttaggaaaactttccaaataaaataaatgttattctctgataaagagctaatacagaaatgttcaagttattttactttctggtaatgtcttcagtaaaatattttctttatctaaatattaacattctaagtctaccaaaaaaagttttaaactcaagcaggccaaaaccaatatgcttataagaaataatgaaaagttcatccatttctgataaagttctctatggcaaagtctttcaaatacgagataactgcaaaatattttccttttatactacagaaatgagaatctcatcaataaattagttcaagcataagatgaaaacagaatattctgtggtgccagtgcacactaccttcccacccatacacatccatgttcactgtaacaaactgaatattcacaataaagcttctgagtaacactttctgattactcatgataaactgacatggctaactgcaagaattaaatcttctatctgagagtaataatttatgatgactcagtggtgccagagtaaagtttctaaaataacattcctctcacttgtaccccactaaaagtattagtctacacattacattgaagttaaacacaaaattatcagtgttttagaaacatgagtccggactgtgtaagtaaaagtacaaacattatttccaccataaagtatgtattgaaatcaagttgtctctgtgtacagaatacatacttattcccatttttaagcatttgcttctgttttccctacctagaatgtcagatgtttttcagttatctccccatttgtcaaagttgacctcaagataacatttttcattaaagcatctgagatctaagaacacaattattattctaacaatgattattagctcattcacttattttgataactaatgatcacagctattatactactttctcgttattttgtgtgcatgcctcatttccctgacttaaacctcactgagagcgcaaaatgcagctttatactttttactttcaattgcctagcacaatagtgagtacatttgaattgaatatataataaatattgcaaaataaaatccaaaaaaaaaaaaaaaaa

SEQ ID NO: 12097 - DNA, 1632 bp, Homo sapiens
gccggccgaacccagacccgaggttttagaagcagagtcaggcgaagctgggccagaaccgcgacctccgcaaccttgagcggcatccgtggagtgcgcctgcgcagctacgaccgcagcaggaaagcgccgccggccaggcccagctgtggccggacagggactggaagagaggacgcggtcgagtaggtgtgcaccagccctggcaacgagagcgtctaccccgaactctgctggccttgaggtggggaagccggggagggcagttgaggaccccgcggaggcgcgtgactggttgagcgggcaggccagcctccgagccgggtggacacaggttttaaaacatgaatcctacactcatccttgctgccttttgcctgggaattgcctcagctactctaacatttgatcacagtttagaggcacagtggaccaagtggaaggcgatgcacaacagattatacggcatgaatgaagaaggatggaggagagcagtgtgggagaagaacatgaagatgattgaactgcacaatcaggaatacagggaagggaaacacagcttcacaatggccatgaacgcctttggagacatgaccagtgaagaattcaggcaggtgatgaatggctttcaaaaccgtaagcccaggaaggggaaagtgttccaggaacctctgttttatgaggcccccagatctgtggattggagagagaaaggctacgtgactcctgtgaagaatcagggtcagtgtggttcttgttgggcttttagtgctactggtgctcttgaaggacagatgttccggaaaactgggaggcttatctcactgagtgagcagaatctggtagactgctctgggcctcaaggcaatgaaggctgcaatggtggcctaatggattatgctttccagtatgttcaggataatggaggcctggactctgaggaatcctatccatatgaggcaacagaagaatcctgtaagtacaatcccaagtattctgttgctaatgacaccggctttgtggacatccctaagcaggagaaggccctgatgaaggcagttgcaactgtggggcccatttctgttgctattgatgcaggtcatgagtccttcctgttctataaagaaggcatttattttgagccagactgtagcagtgaagacatggatcatggtgtgctggtggttggctacggatttgaaagcacagaatcagataacaataaatattggctggtgaagaacagctggggtgaagaatggggcatgggtggctacgtaaagatggccaaagaccggagaaaccattgtggaattgcctcagcagccagctaccccactgtgtgagctggtggacggtgatgaggaaggacttgactggggatggcgcatgcatgggaggaattcatcttcagtctaccagcccccgctgtgtcggatacacactcgaatcattgaagatccgagtgtgatttgaattctgtgatattttcacactggtaaatgttacctctattttaattactgctataaataggtttatattattgattcacttactgactttgcattttcgtttttaaaaggatgtataaatttttacctgtttaaataaaatttaatttcaaatgta

SEQ ID NO: 12098 - DNA, 1487 bp, Homo sapiens
gccggccgaacccagacccgaggttttagaagcagagtcaggcgaagctgggccagaaccgcgacctccgcaaccttgagcggcatccgtggagtgcgcctgcgcagctacgaccgcagcaggaaagcgccgccggccaggcccagctgtggccggacagggactggaagagaggacgcggtcgagtaggttttaaaacatgaatcctacactcatccttgctgccttttgcctgggaattgcctcagctactctaacatttgatcacagtttagaggcacagtggaccaagtggaaggcgatgcacaacagattatacggcatgaatgaagaaggatggaggagagcagtgtgggagaagaacatgaagatgattgaactgcacaatcaggaatacagggaagggaaacacagcttcacaatggccatgaacgcctttggagacatgaccagtgaagaattcaggcaggtgatgaatggctttcaaaaccgtaagcccaggaaggggaaagtgttccaggaacctctgttttatgaggcccccagatctgtggattggagagagaaaggctacgtgactcctgtgaagaatcagggtcagtgtggttcttgttgggcttttagtgctactggtgctcttgaaggacagatgttccggaaaactgggaggcttatctcactgagtgagcagaatctggtagactgctctgggcctcaaggcaatgaaggctgcaatggtggcctaatggattatgctttccagtatgttcaggataatggaggcctggactctgaggaatcctatccatatgaggcaacagaagaatcctgtaagtacaatcccaagtattctgttgctaatgacaccggctttgtggacatccctaagcaggagaaggccctgatgaaggcagttgcaactgtggggcccatttctgttgctattgatgcaggtcatgagtccttcctgttctataaagaaggcatttattttgagccagactgtagcagtgaagacatggatcatggtgtgctggtggttggctacggatttgaaagcacagaatcagataacaataaatattggctggtgaagaacagctggggtgaagaatggggcatgggtggctacgtaaagatggccaaagaccggagaaaccattgtggaattgcctcagcagccagctaccccactgtgtgagctggtggacggtgatgaggaaggacttgactggggatggcgcatgcatgggaggaattcatcttcagtctaccagcccccgctgtgtcggatacacactcgaatcattgaagatccgagtgtgatttgaattctgtgatattttcacactggtaaatgttacctctattttaattactgctataaataggtttatattattgattcacttactgactttgcattttcgtttttaaaaggatgtataaatttttacctgtttaaataaaatttaatttcaaatgta

SEQ ID NO: 12099 - DNA, 4760 bp, Homo sapiens
gaaagaggcagcttacacacgccttccagtccctctactcagagcagcccggagaccgctgccgccgctgccgctgctaccaccgctgccacctgaggagacccgccgcccccccgtcgccgcctcctgcgagtccttcttagcacctggcgtttcatgcacattgccactgccattattattatcattccaatacaaggaaaataaaagaagataccagcgaaaagaaccgcttacacctttccgaattactcaagtgtctcctggaaacagagggtcgttgtccccggaggagcagccgaagggcccgtgggctggtgttgaccgggagggaggaggagttgggggcattgcgtggtggaaagttgcgtgcggcagagaaccgaaggtgcagcgccacagcccaggggacggtgtgtctgggagaagacgctgcccctgcgtcgggacccgccagcgcgcgggcaccgcggggcccgggacgacgccccctcctgcggcgtggactccgtcagtggcccaccaagaaggaggaggaatatggaatccaagggggccagttcctgccgtctgctcttctgcctcttgatctccgccaccgtcttcaggccaggccttggatggtatactgtaaattcagcatatggagataccattatcataccttgccgacttgacgtacctcagaatctcatgtttggcaaatggaaatatgaaaagcccgatggctccccagtatttattgccttcagatcctctacaaagaaaagtgtgcagtacgacgatgtaccagaatacaaagacagattgaacctctcagaaaactacactttgtctatcagtaatgcaaggatcagtgatgaaaagagatttgtgtgcatgctagtaactgaggacaacgtgtttgaggcacctacaatagtcaaggtgttcaagcaaccatctaaacctgaaattgtaagcaaagcactgtttctcgaaacagagcagctaaaaaagttgggtgactgcatttcagaagacagttatccagatggcaatatcacatggtacaggaatggaaaagtgctacatccccttgaaggagcggtggtcataatttttaaaaaggaaatggacccagtgactcagctctataccatgacttccaccctggagtacaagacaaccaaggctgacatacaaatgccattcacctgctcggtgacatattatggaccatctggccagaaaacaattcattctgaacaggcagtatttgatatttactatcctacagagcaggtgacaatacaagtgctgccaccaaaaaatgccatcaaagaaggggataacatcactcttaaatgcttagggaatggcaaccctcccccagaggaatttttgttttacttaccaggacagcccgaaggaataagaagctcaaatacttacacactgacggatgtgaggcgcaatgcaacaggagactacaagtgttccctgatagacaaaaaaagcatgattgcttcaacagccatcacagttcactatttggatttgtccttaaacccaagtggagaagtgactagacagattggtgatgccctacccgtgtcatgcacaatatctgctagcaggaatgcaactgtggtatggatgaaagataacatcaggcttcgatctagcccgtcattttctagtcttcattatcaggatgctggaaactatgtctgcgaaactgctctgcaggaggttgaaggactaaagaaaagagagtcattgactctcattgtagaaggcaaacctcaaataaaaatgacaaagaaaactgatcccagtggactatctaaaacaataatctgccatgtggaaggttttccaaagccagccattcaatggacaattactggcagtggaagcgtcataaaccaaacagaggaatctccttatattaatggcaggtattatagtaaaattatcatttcccctgaagagaatgttacattaacttgcacagcagaaaaccaactggagagaacagtaaactccttgaatgtctctgctataagtattccagaacacgatgaggcagacgagataagtgatgaaaacagagaaaaggtgaatgaccaggcaaaactaattgtgggaatcgttgttggtctcctccttgctgcccttgttgctggtgtcgtctactggctgtacatgaagaagtcaaagactgcatcaaaacatgtaaacaaggacctcggtaatatggaagaaaacaaaaagttagaagaaaacaatcacaaaactgaagcctaagagagaaactgtcctagttgtccagagataaaaatcatatagaccaattgaagcatgaacgtggattgtatttaagacataaacaaagacattgacagcaattcatggttcaagtattaagcagttcattctaccaagctgtcacaggttttcagagaattatctcaagtaaaacaaatgaaatttaattacaaacaataagaacaagttttggcagccatgataataggtcatatgttgtgtttggttcaattttttttccgtaaatgtctgcactgaggatttctttttggtttgccttttatgtaaattttttacgtagctatttttatacactgtaagctttgttctgggagttgctgttaatctgatgtataatgtaatgtttttatttcaattgtttatatggataatctgagcaggtacatttctgattctgattgctatcagcaatgccccaaactttctcataagcacctaaaacccaaaggtggcagcttgtgaagattggggacactcatattgccctaattaaaaactgtgatttttatcacaagggaggggaggccgagagtcagactgatagacaccataggagccgactctttgatatgccaccagcgaactctcagaaataaatcacagatgcatatagacacacatacataatggtactcccaaactgacaattttacctattctgaaaaagacataaaacagaatttggtagcacttacctctacagacacctgctaataaattattttctgtcaaaagaaaaaacacaagcatgtgtgagagacagtttggaaaaatcatggtcaacattcccattttcatagatcacaatgtaaatcactataattacaaattggtgttaaatcctttgggttatccactgccttaaaattatacctatttcatgtttaaaaagatatcaatcagaattggagtttttaacagtggtcattatcaaagctgtgttattttccacagaatatagaatatatatttttttcgtgtgtgtttttgttaactaccctacagatattgaatgcaccttgagataatttagtgtttttaactgatacataatttatcaagcagtacatgaaagtgtaataataaaatgtctatgtatctttagttacattcaaatttgtaactttataaacatgttttatgcttgaggaaatttttaaggtggtagtataaatggaaactttttgaagtagaccagatatgggctacttgtgactagacttttaaactttgctctttcaagcagaagcctggtttctgggagaacactgcacagcgatttctttcccaggatttacacaactttaaagggaagataaatgaacatcagatttctaggtatagaactatgttattgaaaggaaaaggaaaactggtgtttgtttcttagactcatgaaataaaaaattatgaaggcaatgaaaaataaattgaaaattaaagtcagatgagaataggaataatactttgccacttctgcattatttagaaacatacgttattgtacatttgtaaaccatttactgtctgggcaatagtgactccgtttaataaaagcttccgtagtgcattggtatggattaaatgcataaaatattcttagactcgatgctgtataaaatattatgggaaaaaaagaaaatatgttattttgcctctaaacttttattgaagttttatttggcaggaaaaaaaattgaatcttggtcaacatttaaaccaaagtaaaaggggaaaaaccaaagttatttgttttgcatggctaagccattctgttatctctgtaaatactgtgatttcttttttattttctctttagaattttgttaaagaaattctaaaatttttaaacacctgctctccacaataaatcacaaacactaaaataaaattacttccatataaatattattttctcttttggtgtgggagatcaaaggtttaaagtctaacttctaagatatatttgcagaaagaagcaacatgacaatagagagagttatgctacaattatttcttggtttccacttgcaatggttaattaagtccaaaaacagctgtcagaacctcgagagcagaacatgagaaactcagagctctggaccgaaagcagaaagtttgccgggaaaaaaaaagacaacattattaccatcgattcagtgcctggataaagaggaaagcttacttgtttaatggcagccacatgcacgaagatgctaagaagaaaaagaattccaaatcctcaacttttgaggtttcggctctccaatttaactctttggcaacaggaaacaggttttgcaagttcaaggttcactccctatatgtgattataggaattgtttgtggaaatggattaacatacccgtctatgcctaaaagataataaaactgaaatatgtcttcaaaaaaaaaaaaaaaaaaaa

SEQ ID NO: 12100 - DNA, 9649 bp, Homo sapiens
cagcgactcctctggctcccgagaagtggatccggtcgcggccactacgatgccgggagccgccggggtcctcctccttctgctgctctccggaggcctcgggggcgtacaggcgcagcggccgcagcagcagcggcagtcacaggcacatcagcaaagaggtttattccctgctgtcctgaatcttgcttctaatgctcttatcacgaccaatgcaacatgtggagaaaaaggacctgaaatgtactgcaaattggtagaacatgtccctgggcagcctgtgaggaacccgcagtgtcgaatctgcaatcaaaacagcagcaatccaaaccagagacacccgattacaaatgctattgatggaaagaacacttggtggcagagtcccagtattaagaatggaatcgaataccattatgtgacaattacactggatttacagcaggtgttccagatcgcgtatgtgattgtgaaggcagctaactccccccggcctggaaactggattttggaacgctctcttgatgatgttgaatacaagccctggcagtatcatgctgtgacagacacggagtgcctaacgctttacaatatttatccccgcactgggccaccgtcatatgccaaagatgatgaggtcatctgcacttcattttactccaagatacaccccttagaaaatggagagattcacatctctttaatcaatgggagaccaagtgccgatgatccttctccagaactgctagaatttacctccgctcgctatattcgcctgagatttcagaggatccgcacactgaatgctgacttgatgatgtttgctcacaaagacccaagagaaattgaccccattgtcaccagaagatattactactcggtcaaggatatttcagttggagggatgtgcatctgctatggtcatgccagggcttgtccacttgatccagcgacaaataaatctcgctgtgagtgtgagcataacacatgtggcgatagctgtgatcagtgctgtccaggattccatcagaaaccctggagagctggaacttttctaactaaaactgaatgtgaagcatgcaattgtcatggaaaagctgaagaatgctattatgatgaaaatgttgccagaagaaatctgagtttgaatatacgtggaaagtacattggagggggtgtctgcattaattgtacccaaaacactgctggtataaactgcgagacatgtacagatggcttcttcagacccaaaggggtatctccaaattatccaaggccatgccagccatgtcattgcgatccaattggttccttaaatgaagtctgtgtcaaggatgagaaacatgctcgacgaggtttggcacctggatcctgtcattgcaaaactggttttggaggtgtgagctgtgatcggtgtgccaggggctacactggctacccggactgcaaagcctgtaactgcagtgggttagggagcaaaaatgaggatccttgttttggcccctgtatctgcaaggaaaatgttgaaggaggagactgtagtcgttgcaaatccggcttcttcaatttgcaagaggataattggaaaggctgcgatgagtgtttctgttcaggggtttcaaacagatgtcagagttcctactggacctatggcaaaatacaagatatgagtggctggtatctgactgaccttcctggccgcattcgagtggctccccagcaggacgacttggactcacctcagcagatcagcatcagtaacgcggaggcccggcaagccctgccgcacagctactactggagcgcgccggctccctatctgggaaacaaactcccagcagtaggaggacagttgacatttaccatatcatatgaccttgaagaagaggaagaagatacagaacgtgttctccagcttatgattatcttagagggtaatgacttgagcatcagcacagcccaagatgaggtgtacctgcacccatctgaagaacatactaatgtattgttacttaaagaagaatcatttaccatacatggcacacattttccagtccgtagaaaggaatttatgacagtgcttgcgaatttgaagagagtcctcctacaaatcacatacagctttgggatggatgccatcttcaggttgagctctgttaaccttgaatccgctgtctcctatcctactgatggaagcattgcagcagctgtagaagtgtgtcagtgcccaccagggtatactggctcctcttgtgaatcttgttggcctaggcacaggcgagttaacggcactatttttggtggcatctgtgagccatgtcagtgctttggtcatgcggagtcctgtgatgacgtcactggagaatgcctgaactgtaaggatcacacaggtggcccatattgtgataaatgtcttcctggtttctatggcgagcctactaaaggaacctctgaagactgtcaaccctgtgcctgtccactcaatatcccatccaataactttagcccaacgtgccatttagaccggagtcttggattgatctgtgatggatgccctgtcgggtacacaggaccacgctgtgagaggtgtgcagaaggctattttggacaaccctctgtacctggaggatcatgtcagccatgccaatgcaatgacaaccttgacttctccatccctggcagctgtgacagcttgtctggctcctgtctgatatgtaaaccaggtacaacaggccggtactgtgagctctgtgctgatggatattttggagatgcagttgatgcgaagaactgtcagccctgtcgctgtaatgccggtggctctttctctgaggtttgccacagtcaaactggacagtgtgagtgcagagccaacgttcagggtcagagatgtgacaaatgcaaggctgggacctttggcctacaatcagcaaggggctgtgttccctgcaactgcaattcttttgggtctaagtcattcgactgtgaagagagtggacaatgttggtgccaacctggagtcacagggaagaaatgtgaccgctgtgcccacggctatttcaacttccaagaaggaggctgcacagcttgtgaatgttctcatctgggtaataattgtgacccaaagactgggcgatgcatttgcccacccaataccattggagagaaatgttctaaatgtgcacccaatacctggggccacagcattaccactggttgtaaggcttgtaactgcagcacagtgggatccttggatttccaatgcaatgtaaatacaggccaatgcaactgtcatccaaaattctctggtgcaaaatgtacagagtgcagtcgaggtcactggaactaccctcgctgcaatctctgtgactgcttcctccctgggacagatgccacaacctgtgattcagagactaaaaaatgctcctgtagtgatcaaactgggcagtgcacttgtaaggtgaatgtggaaggcatccactgtgacagatgccggcctggcaaattcggactcgatgccaagaatccacttggctgcagcagctgctattgcttcggcactactacccagtgctctgaagcaaaaggactgatccggacgtgggtgactctgaaggctgagcagaccattctacccctggtagatgaggctctgcagcacacgaccaccaagggcattgtttttcaacatccagagattgttgcccacatggacctgatgagagaagatctccatttggaacctttttattggaaacttccagaacaatttgaaggaaagaagttgatggcctatgggggcaaactcaagtatgcaatctatttcgaggctcgggaagaaacaggtttctctacatataatcctcaagtgatcattcgaggtgggacacctactcatgctagaattatcgtcaggcatatggctgctcctctgattggccaattgacaaggcatgaaattgaaatgacagagaaagaatggaaatattatggggatgatcctcgagtccatagaactgtgacccgagaagacttcttggatatactatatgatattcattacattcttatcaaagctacttatggaaatttcatgcgacaaagcaggatttctgaaatctcaatggaggtagctgaacaaggacgtggaacaacaatgactcctccagctgacttgattgaaaaatgtgattgtcccctgggctattctggcctgtcctgtgaggcatgcttgccgggattttatcgactgcgttctcaaccaggtggccgcacccctggaccaaccctgggcacctgtgttccatgtcaatgtaatggacacagcagcctgtgtgaccctgaaacatcgatatgccagaattgtcaacatcacactgctggtgacttctgtgaacgatgtgctcttggatactatggaattgtcaagggattgccaaatgactgtcagcaatgtgcctgccctctgatttcttccagtaacaatttcagcccctcttgtgtcgcagaaggacttgacgactaccgctgcacggcttgtccacggggatatgaaggccagtactgtgaaaggtgtgcccctggctatactggcagtccaggcaaccctggaggctcctgccaagaatgtgagtgtgatccctatggctcactgcctgtgccctgtgaccctgtcacaggattctgcacgtgccgacctggagccacgggaaggaagtgtgacggctgcaagcactggcatgcacgcgagggctgggagtgtgttttttgtggagatgagtgcactggccttcttctcggtgacttggctcgcctggagcagatggtcatgagcatcaacctcactggtccgctgcctgcgccatataaaatgctgtatggtcttgaaaatatgactcaggagctaaagcacttgctgtcacctcagcgggccccagagaggcttattcagctggcagagggcaatctgaatacactcgtgaccgaaatgaacgagctgctgaccagggctaccaaagtgacagcagatggcgagcagaccggacaggatgctgagaggaccaacacaagagcaaagtccctgggagaattcattaaggagcttgcccgggatgcagaagctgtaaatgaaaaagctataaaactaaatgaaactctaggaactcgagacgaggcctttgagagaaatttggaagggcttcagaaagagattgaccagatgattaaagaactgaggaggaaaaatctagagacacaaaaggaaattgctgaagatgagttggtagctgcagaagcccttctgaaaaaagtgaagaagctgtttggagagtcccggggggaaaatgaagaaatggagaaggatctccgggaaaaactggctgactacaaaaacaaagttgatgatgcttgggaccttttgagagaagccacagataaaatcagagaagctaatcgcctatttgcagtaaatcagaaaaacatgactgcattggagaaaaagaaggaggctgttgagagcggcaaacgacaaattgagaacactttaaaagaaggcaatgacatactcgatgaagccaaccgtcttgcagatgaaatcaactccatcatagactatgttgaagacatccaaactaaattgccacctatgtctgaggagcttaatgataaaatagatgacctctcccaagaaataaaggacaggaagcttgctgagaaggtgtcccaggctgagagccacgcagctcagttgaatgactcatctgctgtccttgatggaatccttgatgaggctaaaaacatctccttcaatgccactgcagccttcaaagcttacagcaatattaaggactatattgatgaagctgagaaagttgccaaagaagccaaagatcttgcacatgaagctacaaaactggcaacaggtcctcggggtttattaaaggaagatgccaaaggctgtcttcagaaaagcttcaggattcttaacgaagccaagaagttagcaaatgatgtaaaagaaaatgaagaccatctaaatggcttaaaaaccaggatagaaaatgctgatgctagaaatggggatctcttgagaactttgaatgacactttgggaaagttatcagctattccaaatgatacagctgctaaactgcaagctgttaaggacaaagccagacaagccaacgacacagctaaagatgtactggcacagattacagagctccaccagaacctcgatggcctgaagaagaattacaataaactagcagacagcgtcgccaaaacgaatgctgtggttaaagatccttccaagaacaaaatcattgccgatgcagatgccactgtcaaaaatttagaacaggaagctgaccggctaatagataaactcaaacccatcaaggaacttgaggataacctaaagaaaaacatctctgagataaaggaattgataaaccaagctcggaaacaagccaattctatcaaagtatctgtgtcttcaggaggtgactgcattcgaacatacaaaccagaaatcaagaaaggaagttacaataatattgttgtcaacgtaaagacagctgttgctgataacctcctcttttatcttggaagtgccaaatttattgactttctggctatagaaatgcgtaaaggcaaagtcagcttcctctgggatgttggatctggagttggacgtgtagagtacccagatttgactattgatgactcatattggtaccgtatcgtagcatcaagaactgggagaaatggaactatttctgtgagagccctggatggacccaaagccagcattgtgcccagcacacaccattcgacgtctcctccagggtacacgattctagatgtggatgcaaatgcaatgctgtttgttggtggcctgactgggaaattaaagaaggctgatgctgtacgtgtgattacattcactggctgcatgggagaaacatactttgacaacaaacctataggtttgtggaatttccgagaaaaagaaggtgactgcaaaggatgcactgtcagtcctcaggtggaagatagtgaggggactattcaatttgatggagaaggttatgcattggtcagccgtcccattcgctggtaccccaacatctccactgtcatgttcaagttcagaacattttcttcgagtgctcttctgatgtatcttgccacacgagacctgagagatttcatgagtgtggagctcactgatgggcacataaaagtcagttacgatctgggctcaggaatggcttccgttgtcagcaatcaaaaccataatgatgggaaatggaaatcattcactctgtcaagaattcaaaaacaagccaatatatcaattgtagatatagatactaatcaggaggagaatatagcaacttcgtcttctggaaacaactttggtcttgacttgaaagcagatgacaaaatatattttggtggcctgccaacgctgagaaacttgagtatgaaagcaaggccagaagtaaatctgaagaaatattccggctgcctcaaagatattgaaatttcaagaactccgtacaatatactcagtagtcccgattatgttggtgttaccaaaggatgttccctggagaatgtttacacagttagctttcctaagcctggttttgtggagctctcccctgtgccaattgatgtaggaacagaaatcaacctgtcattcagcaccaagaatgagtccggcatcattcttttgggaagtggagggacaccagcaccacctaggagaaaacgaaggcagactggacaggcctattatgtaatactcctcaacaggggccgtctggaagtgcatctctccacaggggcacgaacaatgaggaaaattgtcatcagaccagagccgaatctgtttcatgatggaagagaacattccgttcatgtagagcgaactagaggcatctttacagttcaagtggatgaaaacagaagatacatgcaaaacctgacagttgaacagcctatcgaagttaaaaagcttttcgttgggggtgctccacctgaatttcaaccttccccactcagaaatattcctccttttgaaggctgcatatggaatcttgttattaactctgtccccatggactttgcaaggcctgtgtccttcaaaaatgctgacattggtcgctgtgcccatcagaaactccgtgaagatgaagatggagcagctccagctgaaatagttatccagcctgagccagttcccaccccagcctttcctacgcccaccccagttctgacacatggtccttgtgctgcagaatcagaaccagctcttttgatagggagcaagcagttcgggctttcaagaaacagtcacattgcaattgcatttgatgacaccaaagttaaaaaccgtctcacaattgagttggaagtaagaaccgaagctgaatccggcttgcttttttacatggctcgcatcaatcatgctgattttgcaacagttcagctgagaaatggattgccctacttcagctatgacttggggagtggggacacccacaccatgatccccaccaaaatcaatgatggccagtggcacaagattaagataatgagaagtaagcaagaaggaattctttatgtagatggggcttccaacagaaccatcagtcccaaaaaagccgacatcctggatgtcgtgggaatgctgtatgttggtgggttacccatcaactacactacccgaagaattggtccagtgacctatagcattgatggctgcgtcaggaatctccacatggcagaggcccctgccgatctggaacaacccacctccagcttccatgttgggacatgttttgcaaatgctcagaggggaacatattttgacggaaccggttttgccaaagcagttggtggattcaaagtgggattggaccttcttgtagaatttgaattccgcacaactacaacgactggagttcttctggggatcagtagtcaaaaaatggatggaatgggtattgaaatgattgatgaaaagttgatgtttcatgtggacaatggtgcgggcagattcactgctgtctatgatgctggggttccagggcatttgtgtgatggacaatggcataaagtcactgccaacaagatcaaacaccgcattgagctcacagtcgatgggaaccaggtggaagcccaaagcccaaacccagcatctacatcagctgacacaaatgaccctgtgtttgttggaggcttcccagatgacctcaagcagtttggcctaacaaccagtattccgttccgaggttgcatcagatccctgaagctcaccaaaggcacaggcaagccactggaggttaattttgccaaggccctggaactgaggggcgttcaacctgtatcatgcccagccaactaataaaaataagtgtaaccccaggaagagtctgtcaaaacaagtatatcaagtaaaacaaacaaatatattttacctatatatgttaattaaactaatttgtgcatgtacatagaattctttctgtattcagatggtgctaattcagactccagactgaattttaattcaagttctttctcaagtctataaatattaaactgattatttcattctaaaaaaaaaaaaaaaaaa

SEQ ID NO: 12101 - DNA, 2448 bp, Homo sapiens
ggccgagctgcagcccgggctcagtctccgccgccgccgtgaacatggagcccccggacgcaccggcccaggcgcgcggggccccgcggctgctgttgctcgcagtcctgctggcggcgcacccagatgcccaggcggaggtgcgcttgtctgtacccccgctggtggaggtgatgcgaggaaagtctgtcattctggactgcacccctacgggaacccacgaccattatatgctggaatggttccttaccgaccgctcgggagctcgcccccgcctagcctcggctgagatgcagggctctgagctccaggtcacaatgcacgacacccggggccgcagtcccccataccagctggactcccaggggcgcctggtgctggctgaggcccaggtgggcgacgagcgagactacgtgtgcgtggtgagggcaggggcggcaggcactgctgaggccactgcgcggctcaacgtgtttgcaaagccagaggccactgaggtctcccccaacaaagggacactgtctgtgatggaggactctgcccaggagatcgccacctgcaacagccggaacgggaacccggcccccaagatcacgtggtatcgcaacgggcagcgcctggaggtgcccgtagagatgaacccagagggctacatgaccagccgcacggtccgggaggcctcgggcctgctctccctcaccagcaccctctacctgcggctccgcaaggatgaccgagacgccagcttccactgcgccgcccactacagcctgcccgagggccgccacggccgcctggacagccccaccttccacctcaccctgcactatcccacggagcacgtgcagttctgggtgggcagcccgtccaccccagcaggctgggtacgcgagggtgacactgtccagctgctctgccggggggacggcagccccagcccggagtatacgcttttccgccttcaggatgagcaggaggaagtgctgaatgtgaatctcgaggggaacttgaccctggagggagtgacccggggccagagcgggacctatggctgcagagtggaggattacgacgcggcagatgacgtgcagctctccaagacgctggagctgcgcgtggcctatctggaccccctggagctcagcgaggggaaggtgctttccttacctctaaacagcagtgcagtcgtgaactgctccgtgcacggcctgcccacccctgccctacgctggaccaaggactccactcccctgggcgatggccccatgctgtcgctcagttctatcaccttcgattccaatggcacctacgtatgtgaggcctccctgcccacagtcccggtcctcagccgcacccagaacttcacgctgctggtccaaggctcgccagagctaaagacagcggaaatagagcccaaggcagatggcagctggagggaaggagacgaagtcacactcatctgctctgcccgcggccatccagaccccaaactcagctggagccaattggggggcagccccgcagagccaatccccggacggcagggttgggtgagcagctctctgaccctgaaagtgaccagcgccctgagccgcgatggcatctcctgtgaagcctccaacccccacgggaacaagcgccatgtcttccacttcggcaccgtgagcccccagacctcccaggctggagtggccgtcatggccgtggccgtcagcgtgggcctcctgctcctcgtcgttgctgtcttctactgcgtgagacgcaaagggggcccctgctgccgccagcggcgggagaagggggctccgccgccaggggagccagggctgagccactcggggtcggagcaaccagagcagaccggccttctcatgggaggtgcctccggaggagccaggggtggcagcgggggcttcggagacgagtgctgagccaagaacctcctagaggctgtccctggacctggagctgcaggcatcagagaaccagccctgctcacgccatgcccgcccccgccttccctcttccctcttccctctccctgcccagccctcccttccttcctctgccggcaaggcagggacccacagtggctgcctgcctccgggagggaaggagagggagggtgggtgggtgggagggggccttcctccagggaatgtgactctcccaggccccagaatagctcctggacccaagcccaaggcccagcctgggacaaggctccgagggtcggctggccggagctatttttacctcccgcctcccctgctggtccccccacctgacgtcttgctgcagagtctgacactggattcccccccctcaccccgcccctggtcccactcctgcccccgccctacctccgccccaccccatcatctgtggacactggagtctggaataaatgctgtttgtcacatcaacaccaaaaaaaaaaaaaaaaaa

SEQ ID NO: 12102 - DNA, 14294 bp, Homo sapiens
gcccggagcgagcgagcgagagagcggcgcgggccgggccatggggtggcgggcgccgggcgcgctgctgctggcgctgctgctgcacgggcggctgctggcggtgacccatgggctgagggcatacgatggcttgtctctgcctgaggacatagagaccgtcacagcaagccaaatgcgctggacacattcgtacctttctgatgatgaggacatgctggctgacagcatctcaggagacgacctgggcagtggggacctgggcagcggggacttccagatggtttatttccgagccctggtgaatttcactcgctccatcgagtacagccctcagctggaggatgcaggctccagagagtttcgagaggtgtccgaggctgtggtagacacgctggagtcggagtacttgaaaattcccggagaccaggttgtcagtgtggtgttcatcaaggagctggatggctgggtttttgtggagctggatgtgggctcggaagggaatgcggatggggctcagattcaggagatgctgctcagggtcatctccagcggctctgtggcctcctacgtcacctctccccagggattccagttccgacgcctgggcacagtgccccagttcccaagagcctgcacggaggccgagtttgcctgccacagctacaatgagtgtgtggccctggagtatcgctgtgaccggcggcccgactgcagggacatgtctgatgagctcaattgtgaggagccagtcctgggtatcagccccacattctctctccttgtggagacgacatctttaccgccccggccagagacaaccatcatgcgacagccaccagtcacccacgctcctcagcccctgcttcccggttccgtcaggcccctgccctgtgggccccaggaggccgcatgccgcaatgggcactgcatccccagagactacctctgcgacggacaggaggactgcgaggacggcagcgatgagctagactgtggccccccgccaccctgtgagcccaacgagttcccctgcgggaatggacattgtgccctcaagctgtggcgctgcgatggtgactttgactgtgaggaccgaactgatgaagccaactgccccaccaagcgtcctgaggaagtgtgcgggcccacacagttccgatgcgtctctaccaacatgtgcatcccagccagcttccactgtgacgaggagagcgactgtcctgaccggagcgacgagtttggctgcatgcccccccaggtggtgacacctccccgggagtccatccaggcttcccggggccagacagtgaccttcacctgcgtggccattggcgtccccacccccatcatcaattggaggctcaactggggccacatcccctctcatcccagggtgacagtgaccagcgagggtggccgtggcacactgatcatccgtgatgtgaaggagtcagaccagggtgcctacacctgtgaggccatgaacgcccggggcatggtgtttggcattcctgacggtgtccttgagctcgtcccacaacgaggcccctgccctgacggccacttctacctggagcacagcgccgcctgcctgccctgcttctgctttggcatcaccagcgtgtgccagagcacccgccgcttccgggaccagatcaggctgcgctttgaccaacccgatgacttcaagggtgtgaatgtgacaatgcctgcgcagcccggcacgccacccctctcctccacgcagctgcagatcgacccatccctgcacgagttccagctagtcgacctgtcccgccgcttcctcgtccacgactccttctgggctctgcctgaacagttcctgggcaacaaggtggactcctatggcggctccctgcgttacaacgtgcgctacgagttggcccgtggcatgctggagccagtgcagcggccggacgtggtcctcgtgggtgccgggtaccgcctcctctcccgaggccacacacccacccaacctggtgctctgaaccagcgccaggtccagttctctgaggagcactgggtccatgagtctggccggccggtgcagcgcgcggagctgctgcaggtgctgcagagcctggaggccgtgctcatccagaccgtgtacaacaccaagatggctagcgtgggacttagcgacatcgccatggataccaccgtcacccatgccaccagccatggccgtgcccacagtgtggaggagtgcagatgccccattggctattctggcttgtcctgcgagagctgtgatgcccacttcactcgggtgcctggtgggccctacctgggcacctgctctggttgcagttgcaatggccatgccagctcctgtgaccctgtgtatggccactgcctgaattgccagcacaacacggaggggccacagtgcaacaagtgcaaggctggcttctttggggacgccatgaaggccacggccacttcctgccggccctgcccttgcccatacatcgatgcctcccgcagattctcagacacttgcttcctggacacggatggccaagccacatgtgacgcctgtgccccaggctacactggccgccgctgtgagagctgtgcccccggatacgagggcaaccccatccagcccggcgggaagtgcaggcccgtcaaccaggagattgtgcgctgtgacgagcgtggcagcatggggacctccggggaggcctgccgctgtaagaacaatgtggtggggcgcttgtgcaatgaatgtgctgacggctctttccacctgagtacccgaaaccccgatggctgcctcaagtgcttctgcatgggtgtcagtcgccactgcaccagctcttcatggagccgtgcccagttgcatggggcctctgaggagcctggtcacttcagcctgaccaacgccgcaagcacccacaccaccaacgagggcatcttctcccccacgcccggggaactgggattctcctccttccacagactcttatctggaccctacttctggagcctcccttcacgcttcctgggggacaaggtgacctcctatggaggagagctgcgcttcacagtgacccagaggtcccagccgggctccacacccctgcacgggcagccgttggtggtgctgcaaggtaacaacatcatcctagagcaccatgtggcccaggagcccagccccggccagcccagcaccttcattgtgcctttccgggagcaagcatggcagcggcccgatgggcagccagccacacgggagcacctgctgatggcactggcaggcatcgacaccctcctgatccgagcatcctacgcccagcagcccgctgagagcagggtctctggcatcagcatggacgtggctgtgcccgaggaaaccggccaggaccccgcgctggaagtggaacagtgctcctgcccacccgggtaccgtgggccgtcctgccaggactgtgacacaggctacacacgcacgcccagtggcctctacctgggtacctgtgaacgctgcagctgccatggccactcagaggcctgcgagccagaaacaggtgcctgccagggctgccagcatcacacggagggccctcggtgtgagcagtgccagccaggatactacggggacgcccagcgggggacaccacaggactgccagctgtgcccctgctacggagaccctgctgccggccaggctgcccacacttgttttctggacacagacggccaccccacctgtgatgcgtgctccccaggccacagtgggcgtcactgtgagaggtgcgcccctggctactatggcaaccccagccagggccagccatgccagagagacagccaggtgccagggcccataggctgcaactgtgacccccaaggcagcgtcagcagccagtgtgatgctgctggtcagtgccagtgcaaggcccaggtggaaggcctcacttgcagccactgccggccccaccacttccacctgagtgccagcaacccagacggctgcctgccctgcttctgtatgggcatcacccagcagtgcgccagctctgcctacacacgccacctgatctccacccactttgcccctggggacttccaaggctttgccctggtgaacccacagcgaaacagccgcctgacaggagaattcactgtggaacccgtgcccgagggtgcccagctctcttttggcaactttgcccaactcggccatgagtccttctactggcagctgccggagacataccagggagacaaggtggcggcctacggtgggaagttgcgatacaccctctcctacacagcaggcccacagggcagcccactctctgaccccgatgtgcagatcacgggcaacaacatcatgctagtggcctcccagccagcgctgcagggccctgagaggaggagctacgagatcatgttccgagaggaattctggcgccggcccgatgggcagccggccacacgcgagcacctcctgatggcactggccgacctggatgagctcctgatccgggccacgttctcctccgtgccgctggtggccagcatcagcgcagtcagcctggaggtcgcccagccggggccctcaaacagaccccgcgccctcgaggtggaggagtgccgctgcccgccaggctacatcggtctgtcctgccaggactgtgcccccggctacacgcgcaccgggagtgggctctacctcggccactgcgagctatgtgaatgcaatggccactcagacctgtgccacccagagactggggcctgctcgcaatgccagcacaacgccgcaggggagttctgcgagctttgtgcccctggctactacggagatgccacagccgggacgcctgaggactgccagccctgtgcctgcccactgaccaacccagagaacatgttttcccgcacctgtgagagcctgggagccggcgggtaccgctgcacggcctgcgaacccggctacactggccagtactgtgagcagtgtggcccaggttacgtgggtaaccccagtgtgcaagggggccagtgcctgccagagacaaaccaagccccactggtggtcgaggtccatcctgctcgaagcatagtgccccaaggtggctcccactccctgcggtgtcaggtcagtgggagcccaccccactacttctattggtcccgtgaggatgggcggcctgtgcccagcggcacccagcagcgacatcaaggctccgagctccacttccccagcgtccagccctcggatgctggggtctacatttgcacctgccgtaatctccaccaatccaataccagccgggcagagctgctggtcactgaggctccaagcaagcccatcacagtgactgtggaggagcagcggagccagagcgtgcgccccggagctgacgtcaccttcatctgcacagccaaaagcaagtccccagcctataccctggtgtggacccgcctgcacaacgggaaactgcccacccgagccatggatttcaatggcatcctgaccattcgcaacgtccagctgagtgatgcaggcacctacgtgtgcaccggctccaacatgtttgccatggaccagggcacagccactctacatgtgcaggcctcgggcaccttgtccgcccccgtggtctccatccatccgccacagctcacagtgcagcccgggcaactggcggagttccgctgcagcgccacagggagccccacgcccaccctcgagtggacagggggccccggcggccagctccctgcgaaggcacaaatccacggcggcatcctgcgcctgccagctgtcgagcccacggatcaggcccagtacttgtgccgagcccacagcagcgctgggcagcaggtggccagggctgtgctccacgtgcatgggggcggtgggcccagagtccaagtgagcccagagaggacccaggtccacgcaggccgcaccgtcaggctgtactgcagggctgcaggcgtgcctagcgccaccatcacctggaggaaggaagggggcagcctcccaccacaggcccggtcagagcgcacagacatcgcgacactgctcatcccagccatcacgactgctgacgccggcttctacctctgcgtggccaccagccctgcaggcactgcccaggcccggatccaagtggttgtcctttcagcctcagatgccagcccaccgccggtcaagattgagtcctcatcgccttctgtgacagaagggcaaacactcgacctcaactgtgtggtggcagggtcagcccatgcccaggtcacctggtacaggcgagggggtagcctgcctccccacacccaggtgcacggctcccgtctgcggctcccccaggtctcaccagctgattctggagaatatgtgtgccgtgtggagaatggatcgggccccaaggaggcctccattactgtgtctgtgctccacggcacccattctggccccagctacaccccagtgcccggcagcacccggcccatccgcatcgagccctcctcctcacacgtggcggaagggcagaccctggatctgaactgcgtggtgcccgggcaggcccacgcccaggtcacgtggcacaagcgtgggggcagcctccctgcccggcaccagacccacggctcgctgctgcggctgcaccaggtgaccccggccgactcaggcgagtatgtgtgccatgtggtgggcacctccggccccctagaggcctcagtcctggtcaccatcgaagcctctgtcatccctggacccatcccacctgtcaggatcgagtcttcatcctccacagtggccgagggccagaccctggatctgagctgcgtggtggcagggcaggcccacgcccaggtcacatggtacaagcgtgggggcagcctccctgcccggcaccaggttcgtggctcccgcctgtacatcttccaggcctcacctgccgatgcgggacagtacgtctgccgggccagcaacggcatggaggcctccatcacggtcacagtaactgggacccagggggccaacttagcctaccctgccggcagcacccagcccatccgcatcgagccctcctcctcgcaagtggcggaagggcagaccctggatctgaactgcgtggtgcccgggcagtcccatgcccaggtcacgtggcacaagcgtgggggcagcctccctgtccggcaccagacccacggctccctgctgagactctaccaagcgtcccccgccgactcgggcgagtacgtgtgccgagtgttgggcagctccgtgcctctagaggcctctgtcctggtcaccattgagcctgcgggctcagtgcctgcacttggggtcacccccacggtccggatcgagtcatcgtcttcgcaagtggccgaggggcagaccctggacctgaactgcctcgttgctggtcaggcccatgcccaggtcacgtggcacaagcgcgggggcagcctcccggcccggcaccaggtgcatggctcgaggctacgcctgctccaggtgaccccagctgattcaggggagtacgtgtgccgtgtggtcggcagctcaggtacccaggaagcctcagtccttgtcaccatccagcagcgccttagtggctcccactcccagggtgtggcgtaccccgtccgcatcgagtcctcctcagcctccctggccaatggacacaccctggacctcaactgcctggttgccagccaggctccccacaccatcacctggtataagcgtggaggcagcttacccagccggcaccagatcgtgggctcccggctgcggatccctcaggtgactccggcagactcgggcgagtacgtgtgtcacgtcagtaacggtgcaggctcccgggagacctcgctcatcgtcaccatccagggcagcggttcctcccacgtgcccagcgtctccccaccgatcaggatcgagtcgtcttcccccacggtggtggaagggcagaccttggatctgaactgcgtggtcgccaggcagccccaggctatcatcacatggtacaagcgtgggggcagccttccctcccgacaccagacccatggctcccacctgcggttgcaccaaatgtctgtggctgactcgggcgagtatgtgtgccgggccaacaacaacatcgatgccctggaggcctccatcgtcatctccgtctcccctagcgccggcagcccctccgcccctggcagctccatgcccatcagaattgagtcatcctcctcacacgtggccgaaggggagaccctggatctgaactgcgtggtccccgggcaggcccatgcccaggtcacttggcacaagcgtgggggcagcctccccagtcaccatcagacccgcggctcacggctgcggctgcaccatgtgtccccggccgactcgggtgaatacgtgtgccgggtgatgggcagctctggccccctggaggcctcagtcctggtcaccatcgaagcctctggctcaagtgctgtccacgtccccgccccaggtggagccccacccatccgcatcgagccctcctcctcccgagtggcagaagggcagaccctggatctgaagtgcgtggtgcccgggcaggcccacgcccaggtcacgtggcacaagcgtggaggaaacctccctgcccggcaccaggtccacggcccactgctgaggctgaaccaggtgtccccggctgactctggcgagtactcgtgccaagtgaccggaagctcaggcaccctggaggcatctgtcctggtcacaattgagccctccagcccaggacccattcctgctccaggactggcccagcccatctacatcgaggcctcctcttcacacgtgactgaagggcagactctggatctgaactgtgtggtgcccgggcaggcccatgcccaggtcacgtggtacaagcgcgggggcagcctccccgcccggcaccagacccatggctcccagctgcggctccacctcgtctcccctgccgactcaggcgagtatgtgtgtcgtgcagccagcggcccaggccctgagcaagaagcctccttcacagtcaccgtcccgcccagtgaggggtcttcctaccgccttaggagcccggtcatctccatcgacccgcccagcagcaccgtgcagcagggccaggatgccagcttcaagtgcctcatccatgacggggcagcccccatcagcctcgagtggaagacccggaaccaggagctggaggacaacgtccacatcagtcccaatggctccatcatcaccatcgtgggcacccggcccagcaaccacggtacctaccgctgcgtggcctccaatgcctacggtgtggcccagagtgtggtgaacctcagtgtgcacgggccccctacagtgtccgtgctccccgagggccccgtgtgggtgaaagtgggaaaggctgtcaccctggagtgtgtcagtgccggggagccccgctcctctgctcgttggacccggatcagcagcacccctgccaagttggagcagcggacatatgggctcatggacagccacgcggtgctgcagatttcatcagctaaaccatcagatgcgggcacttatgtgtgccttgctcagaatgcactaggcacagcacagaagcaggtggaggtgatcgtggacacgggcgccatggccccaggggcccctcaggtccaagctgaagaagctgagctgactgtggaggctggacacacggccaccttgcgctgctcagccacaggcagccccgcgcccaccatccactggtccaagctgcgttccccactgccctggcagcaccggctggaaggtgacacactcatcataccccgggtagcccagcaggactcgggccagtacatctgcaatgccactagccctgctgggcacgctgaggccaccatcatcctgcacgtggagagcccaccatatgccaccacggtcccagagcacgcttcggtgcaggcaggggagacggtgcagctccagtgcctggctcacgggacacccccactcaccttccagtggagccgcgtgggcagcagccttcctgggagggcgaccgccaggaacgagctgctgcactttgagcgtgcagcccctgaggactcaggccgctaccgctgccgggtcaccaacaaggtgggctcagccgaggcctttgcccagctgctcgtccaaggccctcccggctctctccctgccacctccatcccagcagggtccacgcccaccgtgcaggtcacgcctcagctagagaccaagagcattggggccagcgttgagttccactgtgctgtgcccagcgaccggggtacccagctccgttggttcaaggaagggggtcagctgcctccgggtcacagcgtgcaggatggggtgctccgaatccagaacttggaccagagctgccaagggacgtatatatgccaggcccatggaccttgggggaaggcccaggccagtgcccagctggttatccaagccctgccctcggtgctcatcaacatccggacctctgtgcagaccgtggtggttggccacgccgtggagttcgaatgcctggcactgggtgaccccaagcctcaggtgacatggagcaaagttggagggcacctgcggccaggcattgtgcagagcggaggtgtcgtcaggatcgcccacgtagagctggctgatgcgggacagtatcgctgcactgccaccaacgcagctggcaccacacaatcccacgtcctgctgcttgtgcaagccttgccccagatctcaatgccccaagaagtccgtgtgcctgctggttctgcagctgtcttcccctgcatagcctcaggctaccccactcctgacatcagctggagcaagctggatggcagcctgccacctgacagccgcctggagaacaacatgctgatgctgccctcagtccgaccccaggacgcaggtacctacgtctgcaccgccactaaccgccagggcaaggtcaaagcctttgcccacctgcaggtgccagagcgggtggtgccctacttcacgcagaccccctactccttcctaccgctgcccaccatcaaggatgcctacaggaagttcgagatcaagatcaccttccggcccgactcagccgatgggatgctgctgtacaatgggcagaagcgagtcccagggagccccaccaacctggccaaccggcagcccgacttcatctccttcggcctcgtggggggaaggcccgagttccggttcgatgcaggctcaggcatggccaccatccgccatcccacaccactggccctgggccatttccacaccgtgaccctgctgcgcagcctcacccagggctccctgattgtgggtgacctggccccggtcaatgggacctcccagggcaagttccagggcctggatctgaacgaggaactctacctgggtggctatcctgactatggtgccatccccaaggcggggctgagcagcggcttcataggctgtgtccgggagctgcgcatccagggcgaggagatcgtcttccatgacctcaacctcacggcgcacggcatctcccactgccccacctgtcgggaccggccctgccagaatggcggtcagtgccatgactctgagagcagcagctacgtgtgcgtctgcccagctggcttcaccgggagccgctgtgagcactcgcaggccctgcactgccatccagaggcctgtgggcccgacgccacctgtgtgaaccggcctgacggtcgaggctacacctgccgctgccacctgggccgctcggggttgcggtgtgaggaaggtgtgacagtgaccaccccctcgctgtcgggtgctggctcctacctggcactgcccgccctcaccaacacacaccacgagctacgcctggacgtggagttcaagccactcgcccctgacggggtcctgctgttcagcggggggaagagcgggcctgtggaggacttcgtgtccctggcgatggtgggcggccacctggagttccgctatgagttggggtcagggctggccgttctgcggagcgccgagccgctggccctgggccgctggcaccgtgtgtctgcagagcgtctcaacaaggacggcagcctgcgggtgaatggtggacgccctgtgctgcgctcctcgcccggcaagagccagggcctcaacctgcacaccctgctctacctggggggtgtggagccttccgtgccactgtccccggccaccaacatgagcgctcacttccgcggctgtgtgggcgaggtgtcagtgaatggcaaacggctggacctcacctacagtttcctaggcagccagggcatcgggcaatgctatgatagctccccatgtgagcgccagccttgccaacatggtgccacgtgcatgcccgctggcgagtatgagttccagtgcctgtgtcgagatggattcaaaggagacctgtgtgagcacgaggagaacccctgccagctccgtgaaccctgtctgcatgggggcacctgccagggcacccgctgcctctgcctccctggcttctctggcccacgctgccaacaaggctctggacatggcatagcagagtccgactggcatcttgaaggcagcgggggcaatgatgcccctgggcagtacggagcctatttccacgatgatggcttcctcgccttccctggccatgtcttctccaggagcctgcccgaggtgcccgagaccatcgagctggaggttcggaccagcacagccagtggcctcctgctctggcagggtgtggaggtgggagaggccggccaaggcaaggacttcatcagcctcgggcttcaagacgggcaccttgtcttcaggtaccagctgggtagtggggaggcccgcctggtctctgaggaccccatcaatgacggcgagtggcaccgggtgacagcactgcgggagggccgcagaggttccatccaagtcgacggtgaggagctggtcagcggccggtccccaggtcccaacgtggcagtcaacgccaagggcagcgtctacatcggcggagcccctgacgtggccacgctgaccgggggcagattctcctcaggcatcacaggctgtgtcaagaacctggtgctgcactcggcccgacccggcgccccgcccccacagcccctggacctgcagcaccgcgcccaggccggggccaacacacgcccctgcccctcgtaggcacctgcctgccccacacggactcccgggccacgccccagcccgacaatgtcgagtatattattattaatattattatgaatttttgtaagaaaccgaggcgatgccacgctttgctgctaccgccctgggctggactggaggtgggcatgccaccctcacacacacagctgggcaaagccacaaggctggccagcaaggcaggttggatgggagtgggcacctcagaaagtcaccaggacttggggtcaggaacagtggctgggtgggcccagaactgcccccactgtccccctacccaccgatggagcccccagatagagctgggtggcctgtttctgcagcccttgggcagttctcactcctaggagagccaacctcggcttgtgggctggtgccccacagctacctgagacgggcatcgcaggagtctctgccacccactcaggattgggaattgtctttagtgccggctgtggagcaaaaggcagctcacccctgggcaggcggtccccatccccaccagctcgtttttcagcacccccacccacctccacccagcccctggcacctcctctggcagactccccctcctaccacgtcctcctggcctgcattcccaccccctcctgccagcacacagcctggggtccctccctcaggggctgtaagggaaggcccaccccaactcttaccaggagctgctacaggcagagcccagcactgatagggccccgcccaccgggccccgcccaccccaggccacatccccacccatctggaagtgaaggcccagggactcctccaacagacaacggacggacggatgccgctggtgctcaggaagagctagtgccttaggtgggggaaggcaggactcacgactgagagagagaggagggggatatgaccaccctgccccatctgcaggagcctgaagatccagctcaagtgccatcctgccagtggcccccagactgtggggttgggacgcctggcctctgtgtcctagaagggaccctcctgtggtctttgtcttgatttttcttaataaacggtgctatccccgccaaaaaaa

SEQ ID NO: 12103 - DNA, 2765 bp, Homo sapiens
ccggcctcagggacgcaccggagccgcctttccgggcctcaggcggattctccggcgcggcccgccccgcccctcggactccccgggccgcccccggcccccattcgggccgggcctcgctgcggcggcgactgagccaggctgggccgcgtccctgagtcccagagtcggcgcggcgcggcaggggcagccttccaccacggggagcccagctgtcagccgcctcacaggaagatgctgcgtcggcggggcagccctggcatgggtgtgcatgtgggtgcagccctgggagcactgtggttctgcctcacaggagccctggaggtccaggtccctgaagacccagtggtggcactggtgggcaccgatgccaccctgtgctgctccttctcccctgagcctggcttcagcctggcacagctcaacctcatctggcagctgacagataccaaacagctggtgcacagctttgctgagggccaggaccagggcagcgcctatgccaaccgcacggccctcttcccggacctgctggcacagggcaacgcatccctgaggctgcagcgcgtgcgtgtggcggacgagggcagcttcacctgcttcgtgagcatccgggatttcggcagcgctgccgtcagcctgcaggtggccgctccctactcgaagcccagcatgaccctggagcccaacaaggacctgcggccaggggacacggtgaccatcacgtgctccagctaccggggctaccctgaggctgaggtgttctggcaggatgggcagggtgtgcccctgactggcaacgtgaccacgtcgcagatggccaacgagcagggcttgtttgatgtgcacagcgtcctgcgggtggtgctgggtgcgaatggcacctacagctgcctggtgcgcaaccccgtgctgcagcaggatgcgcacggctctgtcaccatcacagggcagcctatgacattccccccagaggccctgtgggtgaccgtggggctgtctgtctgtctcattgcactgctggtggccctggctttcgtgtgctggagaaagatcaaacagagctgtgaggaggagaatgcaggagctgaggaccaggatggggagggagaaggctccaagacagccctgcagcctctgaaacactctgacagcaaagaagatgatggacaagaaatagcctgaccatgaggaccagggagctgctacccctccctacagctcctaccctctggctgcaatggggctgcactgtgagccctgcccccaacagatgcatcctgctctgacaggtgggctccttctccaaaggatgcgatacacagaccactgtgcagccttatttctccaatggacatgattcccaagtcatcctgctgccttttttcttatagacacaatgaacagaccacccacaaccttagttctctaagtcatcctgcctgctgccttatttcacagtacatacatttcttagggacacagtacactgaccacatcaccaccctcttcttccagtgctgcgtggaccatctggctgccttttttctccaaaagatgcaatattcagactgactgaccccctgccttatttcaccaaagacacgatgcatagtcaccccggccttgtttctccaatggccgtgatacactagtgatcatgttcagccctgcttccacctgcatagaatcttttcttctcagacagggacagtgcggcctcaacatctcctggagtctagaagctgtttcctttcccctccttcctcctcttgctctagccttaatactggccttttccctccctgccccaagtgaagacagggcactctgcgcccaccacatgcacagctgtgcatggagacctgcaggtgcacgtgctggaacacgtgtggttcccccctggcccagcctcctctgcagtgcccctctcccctgcccatcctccccacggaagcatgtgctggtcacactggttctccaggggtctgtgatggggcccctgggggtcagcttctgtccctctgccttctcacctctttgttcctttcttttcatgtatccattcagttgatgtttattgagcaactacagatgtcagcactgtgttaggtgctgggggccctgcgtgggaagataaagttcctccctcaaggactccccatccagctgggagacagacaactaactacactgcaccctgcggtttgcagggggctcctgcctggctccctgctccacacctcctctgtggctcaaggcttcctggatacctcacccccatcccacccataattcttacccagagcatggggttggggcggaaacctggagagagggacatagcccctcgccacggctagagaatctggtggtgtccaaaatgtctgtccaggtgtgggcaggtgggcaggcaccaaggccctctggacctttcatagcagcagaaaaggcagagcctggggcagggcagggccaggaatgctttggggacaccgaggggactgccccccacccccaccatggtgctattctggggctggggcagtcttttcctggcttgcctctggccagctcctggcctctggtagagtgagacttcagacgttctgatgccttccggatgtcatctctccctgccccaggaatggaagatgtgaggacttctaatttaaatgtgggactcggagggattttgtaaactgggggtatattttggggaaaataaatgtctttgtaaaaagcttaaaaaaaaaaaaaaaaaa

SEQ ID NO: 12104 - DNA, 2653 bp, Homo sapiens
ctcaaaaggggccggatttccttctcctggaggcagatgttgcctctctctctcgctcggattggttcagtgcactctagaaacactgctgtggtggagaaactggaccccaggtctggagcgaattccagcctgcagggctgataagcgaggcattagtgagattgagagagactttaccccgccgtggtggttggagggcgcgcagtagagcagcagcacaggcgcgggtcccgggaggccggctctgctcgcgccgagatgtggaatctccttcacgaaaccgactcggctgtggccaccgcgcgccgcccgcgctggctgtgcgctggggcgctggtgctggcgggtggcttctttctcctcggcttcctcttcgggtggtttataaaatcctccaatgaagctactaacattactccaaagcataatatgaaagcatttttggatgaattgaaagctgagaacatcaagaagttcttatataattttacacagataccacatttagcaggaacagaacaaaactttcagcttgcaaagcaaattcaatcccagtggaaagaatttggcctggattctgttgagctagcacattatgatgtcctgttgtcctacccaaataagactcatcccaactacatctcaataattaatgaagatggaaatgagattttcaacacatcattatttgaaccacctcctccaggatatgaaaatgtttcggatattgtaccacctttcagtgctttctctcctcaaggaatgccagagggcgatctagtgtatgttaactatgcacgaactgaagacttctttaaattggaacgggacatgaaaatcaattgctctgggaaaattgtaattgccagatatgggaaagttttcagaggaaataaggttaaaaatgcccagctggcaggggccaaaggagtcattctctactccgaccctgctgactactttgctcctggggtgaagtcctatccagatggttggaatcttcctggaggtggtgtccagcgtggaaatatcctaaatctgaatggtgcaggagaccctctcacaccaggttacccagcaaatgaatatgcttataggcgtggaattgcagaggctgttggtcttccaagtattcctgttcatccaattggatactatgatgcacagaagctcctagaaaaaatgggtggctcagcaccaccagatagcagctggagaggaagtctcaaagtgccctacaatgttggacctggctttactggaaacttttctacacaaaaagtcaagatgcacatccactctaccaatgaagtgacaagaatttacaatgtgataggtactctcagaggagcagtggaaccagacagatatgtcattctgggaggtcaccgggactcatgggtgtttggtggtattgaccctcagagtggagcagctgttgttcatgaaattgtgaggagctttggaacactgaaaaaggaagggtggagacctagaagaacaattttgtttgcaagctgggatgcagaagaatttggtcttcttggttctactgagtgggcagaggagaattcaagactccttcaagagcgtggcgtggcttatattaatgctgactcatctatagaaggaaactacactctgagagttgattgtacaccgctgatgtacagcttggtacacaacctaacaaaagagctgaaaagccctgatgaaggctttgaaggcaaatctctttatgaaagttggactaaaaaaagtccttccccagagttcagtggcatgcccaggataagcaaattgggatctggaaatgattttgaggtgttcttccaacgacttggaattgcttcaggcagagcacggtatactaaaaattgggaaacaaacaaattcagcggctatccactgtatcacagtgtctatgaaacatatgagttggtggaaaagttttatgatccaatgtttaaatatcacctcactgtggcccaggttcgaggagggatggtgtttgagctagccaattccatagtgctcccttttgattgtcgagattatgctgtagttttaagaaagtatgctgacaaaatctacagtatttctatgaaacatccacaggaaatgaagacatacagtgtatcatttgattcacttttttctgcagtaaagaattttacagaaattgcttccaagttcagtgagagactccaggactttgacaaaagcaacccaatagtattaagaatgatgaatgatcaactcatgtttctggaaagagcatttattgatccattagggttaccagacaggcctttttataggcatgtcatctatgctccaagcagccacaacaagtatgcaggggagtcattcccaggaatttatgatgctctgtttgatattgaaagcaaagtggacccttccaaggcctggggagaagtgaagagacagatttatgttgcagccttcacagtgcaggcagctgcagagactttgagtgaagtagcctaagaggattctttagagaatccgtattgaatttgtgtggtatgtcactcagaaagaatcgtaatgggtatattgataaattttaaaattggtatatttgaaataaagttgaatattatatataaaaaaaaaaaaaaaaaaa

SEQ ID NO: 12105 - DNA, 2159 bp, Homo sapiens
tgcgtgtcggggtccgctcgtgcgcgcctctccggggtctgtgcgcgtggccctccgctcgcgccggagggcgtgggcgtggcctcggcgtgggtgtggccgctcggggaggggcctcccgggggcggggccggcctggtccgcgcggtgacgcgccctgcagccccgagcgagcgagcgagcgagcgagttgccgagcgcgccccgtccctcgcgcgcgatgctcccctggacggcgctcggcctggccctgagcttgcggctggcgctggcgcggagcggcgcggagcgcggagctcaaggacctgggcgtcaccgtgttcattgtcagcaccggccgaggcaacttcctggagctgtcagccgctgcctcagcccctgccgagaagcacctgcactttgtggacgtggatgacctgcacatcattgtccaagagctgaggggctccattctcgacgcgatgcggccgcagcagctccatgccacggagatcacgtccagcggcttccgcctggcctggccacccctgctgaccgcagactcgggctactatgtgctggagctggtgcccagcgcccagccgggggctgcaagacgccagcagctgccagggaacgccacggactggatctgggccggcctcgacccggacacggactacgacgtggcgctagtgcctgagtccaacgtgcgcctcctgaggccccagatcctgcgggtgcgcacgcggcccggtgaggcagggccgggggcttcgggcccggagtcgggggctgggccggcccccacgcagctcgccgccctccccgccccagaggaggccgggccagagcgcatcgtcatctcccacgcccggccgcgcagcctccgcgtgagttgggccccagcgctgggctcagccgcggcgctcggctaccacgtgcagttcgggccgctgcggggcggggaggcgcagcgggtggaggtgcccgcgggccgcaactgcaccacgctgcagggcctggcgccgggcaccgcctacctggtgaccgtgaccgccgccttccgctcgggccgcgagagcgcgctgtccgccaaggcctgcacgcccgacggcccgcgcccgcgcccacgccccgtgccccgcgccccgaccccggggaccgccagccgtgagccgtaagccggcgtccccgcccagccgagagggccggcgcctacctgagggcccctgtgtcccgaacccggagcggaggcgcccaacccggcagacgggtgcaggcccggcctttccccacgcggactccgcgcgaccccggccctctccctgcggccgcagggcttccccgcctggcgcctgccctccagggctggggcctcgcctggcgggaccccgcagcagccccggccccatccccgcccagagccgggcgtcgtgtgggtccgtgggtgataattgagagcgtcagacccaggactgttcagggaggagccccggtcagactcccacgtgtgaagaccgggccccaagtggcaagggctggcctggggcgggcagcttgggtcctggacgttgataggaagcggaaggggaatcgcgggaagctggcccaggtcaggtccgcaaaggcttctgaagaagaggaagggcgagtaggggcacctggacgctgatggtggccaggatgctcagctggccaggagggcagcacctgctggggacggtggccctgccttcatgcccaggacaccagctgggtccagctagcagccactgggaatcagaggaatggggcagagctgggcattcaggaccttgaggacacgtgaccccacccgcccaccgccactatcaggccccgggaccgcactgacaggaaaccttccgtcgtgagggagcacttcccaggggccgcagggacgacactctccagggaggccccagcaaccacaccatcttcttgctgtgagaggtctcaccccgggctacctcctgtcactactcactgccctggggtccgtgggcaagttgcccagggtgggggtgcctagccaggtgcagtccccgccccgcctagtcctcggcgtcacgcaatgctcacctcgcctcttccccactaacatcccagactttaaaattcagtaaatcagatgtacaccgaaaaaaaaaaaaaaaaaa

SEQ ID NO: 12106 - DNA, 2554 bp, Homo sapiens
tgcgtgtcggggtccgctcgtgcgcgcctctccggggtctgtgcgcgtggccctccgctcgcgccggagggcgtgggcgtggcctcggcgtgggtgtggccgctcggggaggggcctcccgggggcggggccggcctggtccgcgcggtgacgcgccctgcagccccgagcgagcgagcgagcgagcgagttgccgagcgcgccccgtccctcgcgcgcgatgctcccctggacggcgctcggcctggccctgagcttgcggctggcgctggcgcggagcggcgcggagcgcggtccaccagcatcagccccccgaggggacctgatgttcctgctggacagctcagccagcgtctctcactacgagttctcccgggttcgggagtttgtggggcagctggtggctccactgcccctgggcaccggggccctgcgtgccagtctggtgcacgtgggcagtcggccatacaccgagttccccttcggccagcacagctcgggtgaggctgcccaggatgcggtgcgtgcttctgcccagcgcatgggtgacacccacactggcctggcgctggtctatgccaaggaacagctgtttgctgaagcatcaggtgcccggccaggggtgcccaaagtgctggtgtgggtgacagatggcggctccagcgaccctgtgggcccccccatgcaggagctcaaggacctgggcgtcaccgtgttcattgtcagcaccggccgaggcaacttcctggagctgtcagccgctgcctcagcccctgccgagaagcacctgcactttgtggacgtggatgacctgcacatcattgtccaagagctgaggggctccattctcgacgcgatgcggccgcagcagctccatgccacggagatcacgtccagcggcttccgcctggcctggccacccctgctgaccgcagactcgggctactatgtgctggagctggtgcccagcgcccagccgggggctgcaagacgccagcagctgccagggaacgccacggactggatctgggccggcctcgacccggacacggactacgacgtggcgctagtgcctgagtccaacgtgcgcctcctgaggccccagatcctgcgggtgcgcacgcggcccggtgaggcagggccgggggcttcgggcccggagtcgggggctgggccggcccccacgcagctcgccgccctccccgccccagaggaggccgggccagagcgcatcgtcatctcccacgcccggccgcgcagcctccgcgtgagttgggccccagcgctgggctcagccgcggcgctcggctaccacgtgcagttcgggccgctgcggggcggggaggcgcagcgggtggaggtgcccgcgggccgcaactgcaccacgctgcagggcctggcgccgggcaccgcctacctggtgaccgtgaccgccgccttccgctcgggccgcgagagcgcgctgtccgccaaggcctgcacgcccgacggcccgcgcccgcgcccacgccccgtgccccgcgccccgaccccggggaccgccagccgtgagccgtaagccggcgtccccgcccagccgagagggccggcgcctacctgagggcccctgtgtcccgaacccggagcggaggcgcccaacccggcagacgggtgcaggcccggcctttccccacgcggactccgcgcgaccccggccctctccctgcggccgcagggcttccccgcctggcgcctgccctccagggctggggcctcgcctggcgggaccccgcagcagccccggccccatccccgcccagagccgggcgtcgtgtgggtccgtgggtgataattgagagcgtcagacccaggactgttcagggaggagccccggtcagactcccacgtgtgaagaccgggccccaagtggcaagggctggcctggggcgggcagcttgggtcctggacgttgataggaagcggaaggggaatcgcgggaagctggcccaggtcaggtccgcaaaggcttctgaagaagaggaagggcgagtaggggcacctggacgctgatggtggccaggatgctcagctggccaggagggcagcacctgctggggacggtggccctgccttcatgcccaggacaccagctgggtccagctagcagccactgggaatcagaggaatggggcagagctgggcattcaggaccttgaggacacgtgaccccacccgcccaccgccactatcaggccccgggaccgcactgacaggaaaccttccgtcgtgagggagcacttcccaggggccgcagggacgacactctccagggaggccccagcaaccacaccatcttcttgctgtgagaggtctcaccccgggctacctcctgtcactactcactgccctggggtccgtgggcaagttgcccagggtgggggtgcctagccaggtgcagtccccgccccgcctagtcctcggcgtcacgcaatgctcacctcgcctcttccccactaacatcccagactttaaaattcagtaaatcagatgtacaccgaaaaaaaaaaaaaaaaaa

SEQ ID NO: 12107 - DNA, 2364 bp, Homo sapiens
ctgctgaaaaagcagaaagagattaccagccacagacgggtcatgagcgcggtattactgctggccctcctggggttcatcctcccactgccaggagtgcaggcgctgctctgccagtttgggacagttcagcatgtgtggaaggtgtccgacctgccccggcaatggacccctaagaacaccagctgcgacagcggcttggggtgccaggacacgttgatgctcattgagagcggaccccaagtgagcctggtgctctccaagggctgcacggaggccaaggaccaggagccccgcgtcactgagcaccggatgggccccggcctctccctgatctcctacaccttcgtgtgccgccaggaggacttctgcaacaacctcgttaactccctcccgctttgggccccacagcccccagcagacccaggatccttgaggtgcccagtctgcttgtctatggaaggctgtctggaggggacaacagaagagatctgccccaaggggaccacacactgttatgatggcctcctcaggctcaggggaggaggcatcttctccaatctgagagtccagggatgcatgccccagccagtttgcaacctgctcaatgggacacaggaaattgggcccgtgggtatgactgagaactgcgatatgaaagattttctgacctgtcatcgggggaccaccattatgacacacggaaacttggctcaagaacccactgattggaccacatcgaataccgagatgtgcgaggtggggcaggtgtgtcaggagacgctgctgctcctagatgtaggactcacatcaaccctggtggggacaaaaggctgcagcactgttggggctcaaaattcccagaagaccaccatccactcagcccctcctggggtgcttgtggcctcctatacccacttctgctcctcggacctgtgcaatagtgccagcagcagcagcgttctgctgaactccctccctcctcaagctgcccctgtcccaggagaccggcagtgtcctacctgtgtgcagccccttggaacctgttcaagtggctccccccgaatgacctgccccaggggcgccactcattgttatgatgggtacattcatctctcaggaggtgggctgtccaccaaaatgagcattcagggctgcgtggcccaaccttccagcttcttgttgaaccacaccagacaaatcgggatcttctctgcgcgtgagaagcgtgatgtgcagcctcctgcctctcagcatgagggaggtggggctgagggcctggagtctctcacttggggggtggggctggcactggccccagcgctgtggtggggagtggtttgcccttcctgctaactctattacccccacgattcttcaccgctgctgaccacccacactcaacctccctctgacctcataacctaatggccttggacaccagattctttcccattctgtccatgaatcatcttccccacacacaatcattcatatctactcacctaacagcaacactggggagagcctggagcatccggacttgccctatgggagaggggacgctggaggagtggctgcatgtatctgataatacagaccctgtcctttctcccagtgctgggatttctccatgtgagggggcagcaggacacccagggatctagcgtgggggaggagaggagcctaatgagaaaatgaccatctaaagcctgcccttcattggtctggttcacgtctccaaaccagcttggatggtagcagagacttcagggtgctccagccaaacgtatttgggcatcaccatgacctgggaggggaagatgcactgagacgtatgaggcttccagcctagcagccagggccctagcacaaacaggaggctcgccccatctgagcaactgcaggagaggttagtacagtcatgcattgcttaacgacagggacgtgtcgttagaaatgtgtcgttaggtgattttatgaccataggaacattgtagcgtgcacttacaccaacccagatggtacagcccaatacacacccaggatggacgctagagtcgactgctcctaggctacaagcctgcagtgcatgttatggtgtgaatactgcaggcaatcttaacaccacggcaagtatttgtgcatctacacacatctaaacatagaaaaggtacagcataaatacactattgtcatctcagcagaccaccgttctatacgcaattcgtcgctgacccaaacgttgctatgtagcatctgcgtatcgtgggataattgacatgagggcttgagagaactccagaaaaaaatgggttagcattttcccagagctgttatcattgggtctctcttaccaccata

SEQ ID NO: 12108 - DNA, 2855 bp, Homo sapiens
cgcccgggcaggtcggagacggaggaaaggtggcagccagattacttagagaggcacagaggagagagatcggggtgagtcgccatggggactcccagggcccagcacccgccgcctccccagctgctgttcctaattctgctgagctgtccctggatccagggtctgcccctgaaggaggaggagatattgccagagcctggaagtgagacccccacggtggcctctgaggccctggctgaactgcttcatggggccctgctgaggaggggcccagagatgggctacctgccagggcctccccttgggcctgagggaggagaggaggagacgacgaccaccatcatcaccacgacaactgttaccactacggtgaccagcccagttctgtgtaataacaacatctccgagggcgaagggtatgtggagtctccagatctggggagccccgtcagccgcaccctggggctcctggactgcacttacagcatccatgtctaccctggctacggcattgagatccaggtgcagacgctgaacctgtcacaggaagaggagctcctggtgctggctggtgggggatccccaggcctggccccccgactcctggccaactcatccatgcttggagaaggacaagtccttcggagcccaaccaaccggctgcttctgcacttccagagcccacgggtcccaaggggcggtggcttcaggatccactatcaggcctacctcctgagctgtggcttccctccccggccggcccatggggacgtgagtgtgacggacctgcaccctgggggcactgccacctttcactgtgattcgggctaccagctgcagggagaggagaccctcatctgcctcaatggcacccggccatcctggaacggtgaaacccccagctgcatggcatcctgtggtggcaccatccacaatgccaccctgggccgcatcgtgtccccagagcctgggggagccgtagggcccaacctcacctgccgttgggtcattgaagcagctgaggggcgccggctgcacctgcactttgaaagggtctcgctggatgaggacaatgaccggctgatggtgcgctcagggggcagccccctatcccccgtgatctatgattcggacatggacgatgtccccgagcggggtctcatcagtgacgcccagtccctctacgtggagctgctgtcagagacacctgccaatcccctgctgttaagccttcgatttgaagcctttgaggaggatcgctgcttcgcccccttcctggcacatggaaatgtcactaccacggaccctgagtatcgcccaggggcactggcaaccttctcgtgcctcccaggatatgccctggagccccctgggccccccaatgccatcgaatgtgtggatcccacagaaccccactggaacgacacagagccggcctgcaaagccatgtgtggaggggagctgtcggaaccagctggcgtggtcctctctcccgactggccccagagctatagcccgggccaagactgcgtgtggggcgtgcacgtccaggaagagaagcgcatcttgctccaagttgagatattgaatgtgcgggaaggggacatgctgacgctgttcgacggggacggtcccagcgcccgagtcttggcccagctgcggggacctcagccgcgccgccgccttctctcctctgggcccgacctcacactgcagtttcaggcaccgcccgggcccccaaatccaggcctgggccagggcttcgtattgcacttcaaagaggtcccgaggaacgacacgtgccccgagctgccacctccggagtggggctggagaacggcatcccacggggacctgatccggggcacggtgctcacctaccagtgcgagcctggctacgagctgctaggctccgacattctcacttgccagtgggacctgtcttggagcgccgcgccgcccgcctgccaaaagatcatgacttgtgctgaccctggcgagattgccaacgggcaccgcaccgcctcggacgccggcttccccgttggctcccacgtccagtaccgctgcctgccagggtacagcctcgagggggcagccatgctcacctgctacagccgggacacaggcacacccaagtggagcgatagggtccccaaatgcgccttgaagtacgagccgtgcctgaacccgggggttcccgagaatggctaccagacgctgtacaagcaccactaccaggcgggcgagtctctgcgcttcttctgctatgagggctttgagcttatcggcgaggtcaccatcacctgtgtgcccggccacccctcccagtggaccagccagcccccactctgcaaagttgcctatgaggagctcctggacaaccgaaaactggaagtgacccagaccacagatccatcacggcagctggaaggggggaacctggccctggccatcctgctgcctctaggcttggtcattgtcctcggcagtggcgtttacatctactacaccaagcttcagggaaagtcccttttcggcttctcgggctcccactcctacagccccatcaccgtggagtcggacttcagcaacccgctgtatgaagctggggatacgcgggagtatgaagtttccatctgaaccccaagactacagctgcaggacccaggacgcccctcccctcctcattcgggcagagggaaatacgggacccggtctctgcctcctggctgccctcctccctggctgtgtaaatagtctccctatcccacgagggggctttgatggccctggagatcctacagtaaataaaccagcatcctgccgcccaaaaaaaaaaaaaaaaaaaa

SEQ ID NO: 12109 - DNA, 5026 bp, Homo sapiens
agaggaggaaattgttcctcgtctgataagacaacagtggagaaaggacgcatgctgtttcttagggacacggctgacttccagatatgaccatgtatttgtggcttaaactcttggcatttggctttgcctttctggacacagaagtatttgtgacagggcaaagcccaacaccttcccccactggattgactacagcaaagatgcccagtgttccactttcaagtgaccccttacctactcacaccactgcattctcacccgcaagcacctttgaaagagaaaatgacttctcagagaccacaacttctcttagtccagacaatacttccacccaagtatccccggactctttggataatgctagtgcttttaataccacaggtgtttcatcagtacagacgcctcaccttcccacgcacgcagactcgcagacgccctctgctggaactgacacgcagacattcagcggctccgccgccaatgcaaaactcaaccctaccccaggcagcaatgctatctcagatgtcccaggagagaggagtacagccagcacctttcctacagacccagtttccccattgacaaccaccctcagccttgcacaccacagctctgctgccttacctgcacgcacctccaacaccaccatcacagcgaacacctcagatgcctaccttaatgcctctgaaacaaccactctgagcccttctggaagcgctgtcatttcaaccacaacaatagctactactccatctaagccaacatgtgatgaaaaatatgcaaacatcactgtggattacttatataacaaggaaactaaattatttacagcaaagctaaatgttaatgagaatgtggaatgtggaaacaatacttgcacaaacaatgaggtgcataaccttacagaatgtaaaaatgcgtctgtttccatatctcataattcatgtactgctcctgataagacattaatattagatgtgccaccaggggttgaaaagtttcagttacatgattgtacacaagttgaaaaagcagatactactatttgtttaaaatggaaaaatattgaaacctttacttgtgatacacagaatattacctacagatttcagtgtggtaatatgatatttgataataaagaaattaaattagaaaaccttgaacccgaacatgagtataagtgtgactcagaaatactctataataaccacaagtttactaacgcaagtaaaattattaaaacagattttgggagtccaggagagcctcagattattttttgtagaagtgaagctgcacatcaaggagtaattacctggaatccccctcaaagatcatttcataattttaccctctgttatataaaagagacagaaaaagattgcctcaatctggataaaaacctgatcaaatatgatttgcaaaatttaaaaccttatacgaaatatgttttatcattacatgcctacatcattgcaaaagtgcaacgtaatggaagtgctgcaatgtgtcatttcacaactaaaagtgctcctccaagccaggtctggaacatgactgtctccatgacatcagataatagtatgcatgtcaagtgtaggcctcccagggaccgtaatggcccccatgaacgttaccatttggaagttgaagctggaaatactctggttagaaatgagtcgcataagaattgcgatttccgtgtaaaagatcttcaatattcaacagactacacttttaaggcctattttcacaatggagactatcctggagaaccctttattttacatcattcaacatcttataattctaaggcactgatagcatttctggcatttctgattattgtgacatcaatagccctgcttgttgttctctacaaaatctatgatctacataagaaaagatcctgcaatttagatgaacagcaggagcttgttgaaagggatgatgaaaaacaactgatgaatgtggagccaatccatgcagatattttgttggaaacttataagaggaagattgctgatgaaggaagactttttctggctgaatttcagagcatcccgcgggtgttcagcaagtttcctataaaggaagctcgaaagccctttaaccagaataaaaaccgttatgttgacattcttccttatgattataaccgtgttgaactctctgagataaacggagatgcagggtcaaactacataaatgccagctatattgatggtttcaaagaacccaggaaatacattgctgcacaaggtcccagggatgaaactgttgatgatttctggaggatgatttgggaacagaaagccacagttattgtcatggtcactcgatgtgaagaaggaaacaggaacaagtgtgcagaatactggccgtcaatggaagagggcactcgggcttttggagatgttgttgtaaagatcaaccagcacaaaagatgtccagattacatcattcagaaattgaacattgtaaataaaaaagaaaaagcaactggaagagaggtgactcacattcagttcaccagctggccagaccacggggtgcctgaggatcctcacttgctcctcaaactgagaaggagagtgaatgccttcagcaatttcttcagtggtcccattgtggtgcactgcagtgctggtgttgggcgcacaggaacctatatcggaattgatgccatgctagaaggcctggaagccgagaacaaagtggatgtttatggttatgttgtcaagctaaggcgacagagatgcctgatggttcaagtagaggcccagtacatcttgatccatcaggctttggtggaatacaatcagtttggagaaacagaagtgaatttgtctgaattacatccatatctacataacatgaagaaaagggatccacccagtgagccgtctccactagaggctgaattccagagacttccttcatataggagctggaggacacagcacattggaaatcaagaagaaaataaaagtaaaaacaggaattctaatgtcatcccatatgactataacagagtgccacttaaacatgagctggaaatgagtaaagagagtgagcatgattcagatgaatcctctgatgatgacagtgattcagaggaaccaagcaaatacatcaatgcatcttttataatgagctactggaaacctgaagtgatgattgctgctcagggaccactgaaggagaccattggtgacttttggcagatgatcttccaaagaaaagtcaaagttattgttatgctgacagaactgaaacatggagaccaggaaatctgtgctcagtactggggagaaggaaagcaaacatatggagatattgaagttgacctgaaagacacagacaaatcttcaacttatacccttcgtgtctttgaactgagacattccaagaggaaagactctcgaactgtgtaccagtaccaatatacaaactggagtgtggagcagcttcctgcagaacccaaggaattaatctctatgattcaggtcgtcaaacaaaaacttccccagaagaattcctctgaagggaacaagcatcacaagagtacacctctactcattcactgcagggatggatctcagcaaacgggaatattttgtgctttgttaaatctcttagaaagtgcggaaacagaagaggtagtggatatttttcaagtggtaaaagctctacgcaaagctaggccaggcatggtttccacattcgagcaatatcaattcctatatgacgtcattgccagcacctaccctgctcagaatggacaagtaaagaaaaacaaccatcaagaagataaaattgaatttgataatgaagtggacaaagtaaagcaggatgctaattgtgttaatccacttggtgccccagaaaagctccctgaagcaaaggaacaggctgaaggttctgaacccacgagtggcactgaggggccagaacattctgtcaatggtcctgcaagtccagctttaaatcaaggttcataggaaaagacataaatgaggaaactccaaacctcctgttagctgttatttctatttttgtagaagtaggaagtgaaaataggtatacagtggattaattaaatgcagcgaaccaatatttgtagaagggttatattttactactgtggaaaaatatttaagatagttttgccagaacagtttgtacagacgtatgcttattttaaaattttatctcttattcagtaaaaaacaacttctttgtaatcgttatgtgtgtatatgtatgtgtgtatgggtgtgtgtttgtgtgagagacagagaaagagagagaattctttcaagtgaatctaaaagcttttgcttttcctttgtttttatgaagaaaaaatacattttatattagaagtgttaacttagcttgaaggatctgtttttaaaaatcataaactgtgtgcagactcaataaaatcatgtacatttctgaaatgacctcaagatgtcctccttgttctactcatatatatctatcttatatacttactattttacttctagagatagtacataaaggtggtatgtgtgtgtatgctactacaaaaaagttgttaactaaattaacattgggaaatcttatattccatatattagcatttagtccaatgtctttttaagcttatttaattaaaaaatttccagtgagcttatcatgctgtctttacatggggttttcaattttgcatgctcgattattccctgtacaatatttaaaatttattgcttgatacttttgacaacaaattaggttttgtacaattgaacttaaataaatgtcattaaaataaataaatgcaatatgtattaatattcattgtataaaaatagaagaatacaaacatatttgttaaatatttacatatgaaatttaatatagctatttttatggaatttttcattgatatgaaaaatatgatattgcatatgcatagttcccatgttaaatcccattcataactttcattaaagcatttactttgaatttc

SEQ ID NO: 12110 - DNA, 4543 bp, Homo sapiens
agaggaggaaattgttcctcgtctgataagacaacagtggagaaaggacgcatgctgtttcttagggacacggctgacttccagatatgaccatgtatttgtggcttaaactcttggcatttggctttgcctttctggacacagaagtatttgtgacagggcaaagcccaacaccttcccccactgatgcctaccttaatgcctctgaaacaaccactctgagcccttctggaagcgctgtcatttcaaccacaacaatagctactactccatctaagccaacatgtgatgaaaaatatgcaaacatcactgtggattacttatataacaaggaaactaaattatttacagcaaagctaaatgttaatgagaatgtggaatgtggaaacaatacttgcacaaacaatgaggtgcataaccttacagaatgtaaaaatgcgtctgtttccatatctcataattcatgtactgctcctgataagacattaatattagatgtgccaccaggggttgaaaagtttcagttacatgattgtacacaagttgaaaaagcagatactactatttgtttaaaatggaaaaatattgaaacctttacttgtgatacacagaatattacctacagatttcagtgtggtaatatgatatttgataataaagaaattaaattagaaaaccttgaacccgaacatgagtataagtgtgactcagaaatactctataataaccacaagtttactaacgcaagtaaaattattaaaacagattttgggagtccaggagagcctcagattattttttgtagaagtgaagctgcacatcaaggagtaattacctggaatccccctcaaagatcatttcataattttaccctctgttatataaaagagacagaaaaagattgcctcaatctggataaaaacctgatcaaatatgatttgcaaaatttaaaaccttatacgaaatatgttttatcattacatgcctacatcattgcaaaagtgcaacgtaatggaagtgctgcaatgtgtcatttcacaactaaaagtgctcctccaagccaggtctggaacatgactgtctccatgacatcagataatagtatgcatgtcaagtgtaggcctcccagggaccgtaatggcccccatgaacgttaccatttggaagttgaagctggaaatactctggttagaaatgagtcgcataagaattgcgatttccgtgtaaaagatcttcaatattcaacagactacacttttaaggcctattttcacaatggagactatcctggagaaccctttattttacatcattcaacatcttataattctaaggcactgatagcatttctggcatttctgattattgtgacatcaatagccctgcttgttgttctctacaaaatctatgatctacataagaaaagatcctgcaatttagatgaacagcaggagcttgttgaaagggatgatgaaaaacaactgatgaatgtggagccaatccatgcagatattttgttggaaacttataagaggaagattgctgatgaaggaagactttttctggctgaatttcagagcatcccgcgggtgttcagcaagtttcctataaaggaagctcgaaagccctttaaccagaataaaaaccgttatgttgacattcttccttatgattataaccgtgttgaactctctgagataaacggagatgcagggtcaaactacataaatgccagctatattgatggtttcaaagaacccaggaaatacattgctgcacaaggtcccagggatgaaactgttgatgatttctggaggatgatttgggaacagaaagccacagttattgtcatggtcactcgatgtgaagaaggaaacaggaacaagtgtgcagaatactggccgtcaatggaagagggcactcgggcttttggagatgttgttgtaaagatcaaccagcacaaaagatgtccagattacatcattcagaaattgaacattgtaaataaaaaagaaaaagcaactggaagagaggtgactcacattcagttcaccagctggccagaccacggggtgcctgaggatcctcacttgctcctcaaactgagaaggagagtgaatgccttcagcaatttcttcagtggtcccattgtggtgcactgcagtgctggtgttgggcgcacaggaacctatatcggaattgatgccatgctagaaggcctggaagccgagaacaaagtggatgtttatggttatgttgtcaagctaaggcgacagagatgcctgatggttcaagtagaggcccagtacatcttgatccatcaggctttggtggaatacaatcagtttggagaaacagaagtgaatttgtctgaattacatccatatctacataacatgaagaaaagggatccacccagtgagccgtctccactagaggctgaattccagagacttccttcatataggagctggaggacacagcacattggaaatcaagaagaaaataaaagtaaaaacaggaattctaatgtcatcccatatgactataacagagtgccacttaaacatgagctggaaatgagtaaagagagtgagcatgattcagatgaatcctctgatgatgacagtgattcagaggaaccaagcaaatacatcaatgcatcttttataatgagctactggaaacctgaagtgatgattgctgctcagggaccactgaaggagaccattggtgacttttggcagatgatcttccaaagaaaagtcaaagttattgttatgctgacagaactgaaacatggagaccaggaaatctgtgctcagtactggggagaaggaaagcaaacatatggagatattgaagttgacctgaaagacacagacaaatcttcaacttatacccttcgtgtctttgaactgagacattccaagaggaaagactctcgaactgtgtaccagtaccaatatacaaactggagtgtggagcagcttcctgcagaacccaaggaattaatctctatgattcaggtcgtcaaacaaaaacttccccagaagaattcctctgaagggaacaagcatcacaagagtacacctctactcattcactgcagggatggatctcagcaaacgggaatattttgtgctttgttaaatctcttagaaagtgcggaaacagaagaggtagtggatatttttcaagtggtaaaagctctacgcaaagctaggccaggcatggtttccacattcgagcaatatcaattcctatatgacgtcattgccagcacctaccctgctcagaatggacaagtaaagaaaaacaaccatcaagaagataaaattgaatttgataatgaagtggacaaagtaaagcaggatgctaattgtgttaatccacttggtgccccagaaaagctccctgaagcaaaggaacaggctgaaggttctgaacccacgagtggcactgaggggccagaacattctgtcaatggtcctgcaagtccagctttaaatcaaggttcataggaaaagacataaatgaggaaactccaaacctcctgttagctgttatttctatttttgtagaagtaggaagtgaaaataggtatacagtggattaattaaatgcagcgaaccaatatttgtagaagggttatattttactactgtggaaaaatatttaagatagttttgccagaacagtttgtacagacgtatgcttattttaaaattttatctcttattcagtaaaaaacaacttctttgtaatcgttatgtgtgtatatgtatgtgtgtatgggtgtgtgtttgtgtgagagacagagaaagagagagaattctttcaagtgaatctaaaagcttttgcttttcctttgtttttatgaagaaaaaatacattttatattagaagtgttaacttagcttgaaggatctgtttttaaaaatcataaactgtgtgcagactcaataaaatcatgtacatttctgaaatgacctcaagatgtcctccttgttctactcatatatatctatcttatatacttactattttacttctagagatagtacataaaggtggtatgtgtgtgtatgctactacaaaaaagttgttaactaaattaacattgggaaatcttatattccatatattagcatttagtccaatgtctttttaagcttatttaattaaaaaatttccagtgagcttatcatgctgtctttacatggggttttcaattttgcatgctcgattattccctgtacaatatttaaaatttattgcttgatacttttgacaacaaattaggttttgtacaattgaacttaaataaatgtcattaaaataaataaatgcaatatgtattaatattcattgtataaaaatagaagaatacaaacatatttgttaaatatttacatatgaaatttaatatagctatttttatggaatttttcattgatatgaaaaatatgatattgcatatgcatagttcccatgttaaatcccattcataactttcattaaagcatttactttgaatttc

SEQ ID NO: 12111 - DNA, 2056 bp, Homo sapiens
cgcagcgcagcccagccgagcgtcgcggggccgccccccgccctgccggccgcctcgccgagcctcctggggcgcccgggcccgcgacccccgcacccagctccgcaggaccggcgggcgcgcgcgggctctggaggccacgggcatgatgcttcgggtcctggtgggggctgtcctccctgccatgctactggctgccccaccacccatcaacaagctggcactgttcccagataagagtgcctggtgcgaagccaagaacatcacccagatcgtgggccacagcggctgtgaggccaagtccatccagaacagggcgtgcctaggacagtgcttcagctacagcgtccccaacaccttcccacagtccacagagtccctggttcactgtgactcctgcatgccagcccagtccatgtgggagattgtgacgctggagtgcccgggccacgaggaggtgcccagggtggacaagctggtggagaagatcctgcactgtagctgccaggcctgcggcaaggagcctagtcacgaggggctgagcgtctatgtgcagggcgaggacgggccgggatcccagcccggcacccaccctcacccccatccccacccccatcctggcgggcagacccctgagcccgaggacccccctggggccccccacacagaggaagagggggctgaggactgaggcccccccaactcttcctcccctctcatccccctgtggaatgttgggtctcactctctggggaagtcaggggagaagctgaagcccccctttggcactggatggacttggcttcagactcggacttgaatgctgcccggttgccatggagatctgaaggggcggggttagagccaagctgcacaatttaatatattcaagagtggggggaggaagcagaggtcttcagggctctttttttggggggggtggtctcttcctgtctggcttctagagatgtgcctgtgggagggggaggaagttggctgagccattgagtgctgggggaggccatccaagatggcatgaatcgggctaaggtccctgggggtgcagatggtactgctgaggtcccgggcttagtgtgagcatcttgccagcctcaggcttgagggagggctgggctagaaagaccactggcagaaacaggaggctccggcccacaggtttccccaaggcctctcaccccacttcccatctccagggaagcgtcgccccagtggcactgaagtggccctccctcagcggaggggtttgggagtcaggcctgggcaggaccctgctgactcgtggcgcgggagctgggagccaggctctccgggcctttctctggcttccttggcttgcctggtgggggaaggggaggaggggaagaaggaaagggaagagtcttccaaggccagaaggagggggacaaccccccaagaccatccctgaagacgagcatccccctcctctccctgttagaaatgttagtgccccgcactgtgccccaagttctaggccccccagaaagctgccagagccggccgccttctcccctctcccagggatgctctttgtaaatatcggatgggtgtgggagtgaggggttacctccctcgccccaaggttccagaggccctaggcgggatgggctcgctgaacctcgaggaactccaggacgaggaggacatgggacttgcgtggacagtcagggttcacttgggctctctctagctccccaattctgcctgcctcctccctcccagctgcactttaaccctagaaggtggggacctggggggagggacagggcaggcgggcccatgaagaaagcccctcgttgcccagcactgtctgcgtctgctcttctgtgcccagggtggctgccagcccactgcctcctgcctggggtggcctggccctcctggctgttgcgacgcgggcttctggagcttgtcaccattggacagtctccctgatggaccctcagtcttctcatgaataaattccttcaacgccaaaaaaaaaaaaaaaaaaaaaaaaaaaaaaaaaaaaaaaaaa

SEQ ID NO: 12112 - DNA, 2096 bp, Homo sapiens
gatgcaggctgggtgtggagggtgcgagtaggctggagtacaccagggagttcccagcaggccactaggagccacccaggatgcccggcaacctcatgagtcagacaagcagggctgtgtctatctggaagtttccagccaagctaggtaaaacacatggacacagggctctggaggccacgggcatgatgcttcgggtcctggtgggggctgtcctccctgccatgctactggctgccccaccacccatcaacaagctggcactgttcccagataagagtgcctggtgcgaagccaagaacatcacccagatcgtgggccacagcggctgtgaggccaagtccatccagaacagggcgtgcctaggacagtgcttcagctacagcgtccccaacaccttcccacagtccacagagtccctggttcactgtgactcctgcatgccagcccagtccatgtgggagattgtgacgctggagtgcccgggccacgaggaggtgcccagggtggacaagctggtggagaagatcctgcactgtagctgccaggcctgcggcaaggagcctagtcacgaggggctgagcgtctatgtgcagggcgaggacgggccgggatcccagcccggcacccaccctcacccccatccccacccccatcctggcgggcagacccctgagcccgaggacccccctggggccccccacacagaggaagagggggctgaggactgaggcccccccaactcttcctcccctctcatccccctgtggaatgttgggtctcactctctggggaagtcaggggagaagctgaagcccccctttggcactggatggacttggcttcagactcggacttgaatgctgcccggttgccatggagatctgaaggggcggggttagagccaagctgcacaatttaatatattcaagagtggggggaggaagcagaggtcttcagggctctttttttggggggggtggtctcttcctgtctggcttctagagatgtgcctgtgggagggggaggaagttggctgagccattgagtgctgggggaggccatccaagatggcatgaatcgggctaaggtccctgggggtgcagatggtactgctgaggtcccgggcttagtgtgagcatcttgccagcctcaggcttgagggagggctgggctagaaagaccactggcagaaacaggaggctccggcccacaggtttccccaaggcctctcaccccacttcccatctccagggaagcgtcgccccagtggcactgaagtggccctccctcagcggaggggtttgggagtcaggcctgggcaggaccctgctgactcgtggcgcgggagctgggagccaggctctccgggcctttctctggcttccttggcttgcctggtgggggaaggggaggaggggaagaaggaaagggaagagtcttccaaggccagaaggagggggacaaccccccaagaccatccctgaagacgagcatccccctcctctccctgttagaaatgttagtgccccgcactgtgccccaagttctaggccccccagaaagctgccagagccggccgccttctcccctctcccagggatgctctttgtaaatatcggatgggtgtgggagtgaggggttacctccctcgccccaaggttccagaggccctaggcgggatgggctcgctgaacctcgaggaactccaggacgaggaggacatgggacttgcgtggacagtcagggttcacttgggctctctctagctccccaattctgcctgcctcctccctcccagctgcactttaaccctagaaggtggggacctggggggagggacagggcaggcgggcccatgaagaaagcccctcgttgcccagcactgtctgcgtctgctcttctgtgcccagggtggctgccagcccactgcctcctgcctggggtggcctggccctcctggctgttgcgacgcgggcttctggagcttgtcaccattggacagtctccctgatggaccctcagtcttctcatgaataaattccttcaacgccaaaaaaaaaaaaaaaaaaaaaaaaaaaaaaaaaaaaaaaaaa

SEQ ID NO: 12113 - DNA, 5883 bp, Homo sapiens
ctaaactcgaattaagagggaaaaaaaatcagggaggaggtggcaagccacaccccacggtgcccgcgaacttccccggcagcggactgtagcccaggcagacgccgtcgagatgcagggcccaccgctcctgaccgccgcccacctcctctgcgtgtgcaccgccgcgctggccgtggctcccgggcctcggtttctggtgacagccccagggatcatcaggcccggaggaaatgtgactattggggtggagcttctggaacactgcccttcacaggtgactgtgaaggcggagctgctcaagacagcatcaaacctcactgtctctgtcctggaagcagaaggagtctttgaaaaaggctcttttaagacacttactcttccatcactacctctgaacagtgcagatgagatttatgagctacgtgtaaccggacgtacccaggatgagattttattctctaatagtacccgcttatcatttgagaccaagagaatatctgtcttcattcaaacagacaaggccttatacaagccaaagcaagaagtgaagtttcgcattgttacactcttctcagattttaagccttacaaaacctctttaaacattctcattaaggaccccaaatcaaatttgatccaacagtggttgtcacaacaaagtgatcttggagtcatttccaaaacttttcagctatcttcccatccaatacttggtgactggtctattcaagttcaagtgaatgaccagacatattatcaatcatttcaggtttcagaatatgtattaccaaaatttgaagtgactttgcagacaccattatattgttctatgaattctaagcatttaaatggtaccatcacggcaaagtatacatatgggaagccagtgaaaggagacgtaacgcttacatttttacctttatccttttggggaaagaagaaaaatattacaaaaacatttaagataaatggatctgcaaacttctcttttaatgatgaagagatgaaaaatgtaatggattcttcaaatggactttctgaatacctggatctatcttcccctggaccagtagaaattttaaccacagtgacagaatcagttacaggtatttcaagaaatgtaagcactaatgtgttcttcaagcaacatgattacatcattgagttttttgattatactactgtcttgaagccatctctcaacttcacagccactgtgaaggtaactcgtgctgatggcaaccaactgactcttgaagaaagaagaaataatgtagtcataacagtgacacagagaaactatactgagtactggagcggatctaacagtggaaatcagaaaatggaagctgttcagaaaataaattatactgtcccccaaagtggaacttttaagattgaattcccaatcctggaggattccagtgagctacagttgaaggcctatttccttggtagtaaaagtagcatggcagttcatagtctgtttaagtctcctagtaagacatacatccaactaaaaacaagagatgaaaatataaaggtgggatcgccttttgagttggtggttagtggcaacaaacgattgaaggagttaagctatatggtagtatccaggggacagttggtggctgtaggaaaacaaaattcaacaatgttctctttaacaccagaaaattcttggactccaaaagcctgtgtaattgtgtattatattgaagatgatggggaaattataagtgatgttctaaaaattcctgttcagcttgtttttaaaaataagataaagctatattggagtaaagtgaaagctgaaccatctgagaaagtctctcttaggatctctgtgacacagcctgactccatagttgggattgtagctgttgacaaaagtgtgaatctgatgaatgcctctaatgatattacaatggaaaatgtggtccatgagttggaactttataacacaggatattatttaggcatgttcatgaattcttttgcagtctttcaggaatgtggactctgggtattgacagatgcaaacctcacgaaggattatattgatggtgtttatgacaatgcagaatatgctgagaggtttatggaggaaaatgaaggacatattgtagatattcatgacttttctttgggtagcagtccacatgtccgaaagcattttccagagacttggatttggctagacaccaacatgggttacaggatttaccaagaatttgaagtaactgtacctgattctatcacttcttgggtggctactggttttgtgatctctgaggacctgggtcttggactaacaactactccagtggagctccaagccttccaaccatttttcatttttttgaatcttccctactctgttatcagaggtgaagaatttgctttggaaataactatattcaattatttgaaagatgccactgaggttaaggtaatcattgagaaaagtgacaaatttgatattctaatgacttcaaatgaaataaatgccacaggccaccagcagacccttctggttcccagtgaggatggggcaactgttctttttcccatcaggccaacacatctgggagaaattcctatcacagtcacagctctttcacccactgcttctgatgctgtcacccagatgattttagtaaaggctgaaggaatagaaaaatcatattcacaatccatcttattagacttgactgacaataggctacagagtaccctgaaaactttgagtttctcatttcctcctaatacagtgactggcagtgaaagagttcagatcactgcaattggagatgttcttggtccttccatcaatggcttagcctcattgattcggatgccttatggctgtggtgaacagaacatgataaattttgctccaaatatttacattttggattatctgactaaaaagaaacaactgacagataatttgaaagaaaaagctctttcatttatgaggcaaggttaccagagagaacttctctatcagagggaagatggctctttcagtgcttttgggaattatgacccttctgggagcacttggttgtcagcttttgttttaagatgtttccttgaagccgatccttacatagatattgatcagaatgtgttacacagaacatacacttggcttaaaggacatcagaaatccaacggtgaattttgggatccaggaagagtgattcatagtgagcttcaaggtggcaataaaagtccagtaacacttacagcctatattgtaacttctctcctgggatatagaaagtatcagcctaacattgatgtgcaagagtctatccattttttggagtctgaattcagtagaggaatttcagacaattatactctagcccttataacttatgcattgtcatcagtggggagtcctaaagcgaaggaagctttgaatatgctgacttggagagcagaacaagaaggtggcatgcaattctgggtgtcatcagagtccaaactttctgactcctggcagccacgctccctggatattgaagttgcagcctatgcactgctctcacacttcttacaatttcagacttctgagggaatcccaattatgaggtggctaagcaggcaaagaaatagcttgggtggttttgcatctactcaggataccactgtggctttaaaggctctgtctgaatttgcagccctaatgaatacagaaaggacaaatatccaagtgaccgtgacggggcctagctcaccaagtcctgtaaagtttctgattgacacacacaaccgcttactccttcagacagcagagcttgctgtggtacagccaatggcagttaatatttccgcaaatggttttggatttgctatttgtcagctcaatgttgtatataatgtgaaggcttctgggtcttctagaagacgaagatctatccaaaatcaagaagcctttgatttagatgttgctgtaaaagaaaataaagatgatctcaatcatgtggatttgaatgtgtgtacaagcttttcgggcccgggtaggagtggcatggctcttatggaagttaacctattaagtggctttatggtgccttcagaagcaatttctctgagcgagacagtgaagaaagtggaatatgatcatggaaaactcaacctctatttagattctgtaaatgaaacccagttttgtgttaatattcctgctgtgagaaactttaaagtttcaaatacccaagatgcttcagtgtccatagtggattactatgagccaaggagacaggcggtgagaagttacaactctgaagtgaagctgtcctcctgtgacctttgcagtgatgtccagggctgccgtccttgtgaggatggagcttcaggctcccatcatcactcttcagtcatttttattttctgtttcaagcttctgtactttatggaactttggctgtgatttatttttaaaggactctgtgtaacactaacatttccagtagtcacatgtgattgttttgttttcgtagaagaatactgcttctattttgaaaaaagagttttttttctttctatggggttgcagggatggtgtacaacaggtcctagcatgtatagctgcatagatttcttcacctgatctttgtgtggaagatcagaatgaatgcagttgtgtgtctatattttcccctcacaaaatcttttagaatttttttggaggtgtttgttttctccagaataaaggtattactttagaaataggtattctcctcattttgtgaaagaaatgaacctagattcttaagcattattacacatccatgtttgcttaaagatggatttccctgggaatgggagaaaacagccagcaggaggagcttcatctgttcccttcccacctccaacctagccctactgcccaccccaccccaacccaccccatgcccagtggtctcagtagatacttcttaactggaaattctttcttttcagaatctaggtggtgaattttttttaagtggcacggtctttttctgcttgaaatctgatcacaccccccagccattgccctccctctctttttcctctgtagagaaatgtgaggggcagtacatttactgtgcttttcacaccatctcagaggttgaggagcatactgaaaattgccctggggggtgctgggtgtgctgtctccttcccacatcctcagccccacaccagctctatttcaggggtgagagtcagagagcactgcaatatgtgcttcatgggatttcgattcgaagatcctagaccagggagacactgtgagccagggatacaacaaaatactaggtaagtcactgcagaccgacctccctgcagtttgggaaagaagctgggtttgtggagaatcagagcatcttgacatgactgctgacctaaagatccctggcattggccagggatcctgtggaacctcttctagttcaggggtgtgagcattagactgccagttgtctagtgacatctgatgcttgctgtgaacttttaagatccccgaatcctgagcacctcaatctttaattgccctgtattccgaagggtaatataatttatctggatggaaattttaaagatgaatcccccttttttcttttcttctctcttttctttccttctccctttcttctttgccttctaaatatactgaaatgatttagatatgtgtcaacaattaatgatcttttattcaatctaagaaatggtttagtttttctctttagctctatggcatttcactcaagtggacaggggaaaaagtaattgccatgggctccaaagaatttgctttatgtttttagctatttaaaaataaatccatcaaaaataaagtatgcaaatgtatctttt

SEQ ID NO: 12114 - DNA, 2431 bp, Homo sapiens
gaccagaccgggcgtcgggtgagcccagaagtgagagcagttggctgtgccccagtgctgtgtgacccagaggcgccgctcaccctctctgagctggtggacatcatagcgggtgcagcccagaactgtcttctgaggaagaggtgctctcctgggcccccactgtccccaggcctcagcaaggcaagtgaggtgctgccgtcatccaggctggacagttcagtgatttgcctgaggccccacagcagagttcaactggagacagagaaaccagctagaggcagagggaggtaacacggagtcccccagaaaggtctgggctgcgcgtgcttcaggtaacctcccttgaccttcaggagaacgagaaggctgcctgatcagagagtccctgaagaagattctgtggctacaggcttcagcagagtgtgagggagaccccggttatttcctcagctatttccaccaaatcctcctgtctttcgtggccaacaccccaggcaaggcttggggcccccgtctgctgctggacgcagagccatgaagaagaagttagtggtgctgggcctgctggccgtggtcctggtgctggtcattgtcggcctctgtctctggctgccctcagcctccaaggaacctgacaaccatgtgtacaccagggctgccgtggccgcggatgccaagcagtgctcgaagattgggagggatgcactgcgggacggtggctctgcggtggatgcagccattgcagccctgttgtgtgtggggctcatgaatgcccacagcatgggcatcgggggtggcctcttcctcaccatctacaacagcaccacacgaaaagctgaggtcatcaacgcccgcgaggtggcccccaggctggcctttgccaccatgttcaacagctcggagcagtcccagaagggggggctgtcggtggcggtgcctggggagatccgaggctatgagctggcacaccagcggcatgggcggctgccctgggctcgcctcttccagcccagcatccagctggcccgccagggcttccccgtgggcaagggcttggcggcagccctggaaaacaagcggaccgtcatcgagcagcagcctgtcttgtgtgaggtgttctgccgggatagaaaggtgcttcgggagggggagagactgaccctgccgcagctggctgacacctacgagacgctggccatcgagggtgcccaggccttctacaacggcagcctcacggcccagattgtgaaggacatccaggcggccgggggcattgtgacagctgaggacctgaacaactaccgtgctgagctgatcgagcacccgctgaacatcagcctgggagacgtggtgctgtacatgcccagtgcgccgctcagcgggcccgtgctggccctcatcctcaacatcctcaaagggtacaacttctcccgggagagcgtggagagccccgagcagaagggcctgacgtaccaccgcatcgtagaggctttccggtttgcctacgccaagaggaccctgcttggggaccccaagtttgtggatgtgactgaggtggtccgcaacatgacctccgagttcttcgctgcccagctccgggcccagatctctgacgacaccactcacccgatctcctactacaagcccgagttctacacgccggatgacgggggcactgctcacctgtctgtcgtcgcagaggacggcagtgctgtgtccgccaccagcaccatcaacctctactttggctccaaggtccgctccccggtcagcgggatcctgttcaataatgaaatggacgacttcagctctcccagcatcaccaacgagtttggggtacccccctcacctgccaatttcatccagccagggaagcagccgctctcgtccatgtgcccgacgatcatggtgggccaggacggccaggtccggatggtggtgggagctgctgggggcacacagatcaccacggccactgcactggccatcatctacaacctctggttcggctatgacgtgaagcgggccgtggaggagccccggctgcacaaccagcttctgcccaacgtcacgacagtggagagaaacattgaccaggcagtgactgcagccctggagacccggcaccatcacacccagatcgcgtccaccttcatcgctgtggtgcaagccatcgtccgcacggctggtggctgggcagctgcctcggactccaggaaaggcggggagcctgccggctactgagtgctccaggaggacaaggctgacaagcaatccagggacaagatactcaccaggaccaggaaggggactctgggggaccggcttcccctgtgagcagcagagcagcacaataaatgaggccactgtgccaggctccaggtggcctccctggcctgtctccccactcaaaaaaaaaaaaaaaaaa

SEQ ID NO: 12115 - DNA, 2381 bp, Homo sapiens
gcctggattctcccagagattgcctggaacaccagctcgggtcctcgcacaccatcctgcgggtgcagcccagaactgtcttctgaggaagaggtgctctcctgggcccccactgtccccaggcctcagcaaggcaagtgaggtgctgccgtcatccaggctggacagttcagtgatttgcctgaggccccacagcagagttcaactggagacagagaaaccagctagaggcagagggaggtaacacggagtcccccagaaaggtctgggctgcgcgtgcttcaggtaacctcccttgaccttcaggagaacgagaaggctgcctgatcagagagtccctgaagaagattctgtggctacaggcttcagcagagtgtgagggagaccccggttatttcctcagctatttccaccaaatcctcctgtctttcgtggccaacaccccaggcaaggcttggggcccccgtctgctgctggacgcagagccatgaagaagaagttagtggtgctgggcctgctggccgtggtcctggtgctggtcattgtcggcctctgtctctggctgccctcagcctccaaggaacctgacaaccatgtgtacaccagggctgccgtggccgcggatgccaagcagtgctcgaagattgggagggatgcactgcgggacggtggctctgcggtggatgcagccattgcagccctgttgtgtgtggggctcatgaatgcccacagcatgggcatcgggggtggcctcttcctcaccatctacaacagcaccacacgaaaagctgaggtcatcaacgcccgcgaggtggcccccaggctggcctttgccaccatgttcaacagctcggagcagtcccagaagggggggctgtcggtggcggtgcctggggagatccgaggctatgagctggcacaccagcggcatgggcggctgccctgggctcgcctcttccagcccagcatccagctggcccgccagggcttccccgtgggcaagggcttggcggcagccctggaaaacaagcggaccgtcatcgagcagcagcctgtcttgtgtgaggtgttctgccgggatagaaaggtgcttcgggagggggagagactgaccctgccgcagctggctgacacctacgagacgctggccatcgagggtgcccaggccttctacaacggcagcctcacggcccagattgtgaaggacatccaggcggccgggggcattgtgacagctgaggacctgaacaactaccgtgctgagctgatcgagcacccgctgaacatcagcctgggagacgtggtgctgtacatgcccagtgcgccgctcagcgggcccgtgctggccctcatcctcaacatcctcaaagggtacaacttctcccgggagagcgtggagagccccgagcagaagggcctgacgtaccaccgcatcgtagaggctttccggtttgcctacgccaagaggaccctgcttggggaccccaagtttgtggatgtgactgaggtggtccgcaacatgacctccgagttcttcgctgcccagctccgggcccagatctctgacgacaccactcacccgatctcctactacaagcccgagttctacacgccggatgacgggggcactgctcacctgtctgtcgtcgcagaggacggcagtgctgtgtccgccaccagcaccatcaacctctactttggctccaaggtccgctccccggtcagcgggatcctgttcaataatgaaatggacgacttcagctctcccagcatcaccaacgagtttggggtacccccctcacctgccaatttcatccagccagggaagcagccgctctcgtccatgtgcccgacgatcatggtgggccaggacggccaggtccggatggtggtgggagctgctgggggcacacagatcaccacggccactgcactggccatcatctacaacctctggttcggctatgacgtgaagcgggccgtggaggagccccggctgcacaaccagcttctgcccaacgtcacgacagtggagagaaacattgaccaggcagtgactgcagccctggagacccggcaccatcacacccagatcgcgtccaccttcatcgctgtggtgcaagccatcgtccgcacggctggtggctgggcagctgcctcggactccaggaaaggcggggagcctgccggctactgagtgctccaggaggacaaggctgacaagcaatccagggacaagatactcaccaggaccaggaaggggactctgggggaccggcttcccctgtgagcagcagagcagcacaataaatgaggccactgtgccaggctccaggtggcctccctggcctgtctccccactcaaaaaaaaaaaaaaaaaa

SEQ ID NO: 12116 - DNA, 1496 bp, Homo sapiens
cgcactccctgctgggtgagcagcactgtaaagatgaagctggctaactggtactggctgagctcagctgttcttgccacttacggttttttggttgtggcaaacaatgaaacagaggaaattaaagatgaaagagcaaaggatgtctgcccagtgagactagaaagcagagggaaatgcgaagaggcaggggagtgcccctaccaggtaagcctgccccccttgactattcagctcccgaagcaattcagcaggatcgaggaggtgttcaaagaagtccaaaacctcaaggaaatcgtaaatagtctaaagaaatcttgccaagactgcaagctgcaggctgatgacaacggagacccaggcagaaacggactgttgttacccagtacaggagccccgggagaggttggtgataacagagttagagaattagagagtgaggttaacaagctgtcctctgagctaaagaatgccaaagaggagatcaatgtacttcatggtcgcctggagaagctgaatcttgtaaatatgaacaacatagaaaattatgttgacagcaaagtggcaaatctaacatttgttgtcaatagtttggatggcaaatgttcaaagtgtcccagccaagaacaaatacagtcacgtccagttcaacatctaatatataaagattgctctgactactacgcaataggcaaaagaagcagtgagacctacagagttacacctgatcccaaaaatagtagctttgaagtttactgtgacatggagaccatggggggaggctggacagtgctgcaggcacgtctcgatgggagcaccaacttcaccagaacatggcaagactacaaagcaggctttggaaacctcagaagggaattttggctggggaacgataaaattcatcttctgaccaagagtaaggaaatgattctgagaatagatcttgaagactttaatggtgtcgaactatatgccttgtatgatcagttttatgtggctaatgagtttctcaaatatcgtttacacgttggtaactataatggcacagctggagatgcattacgtttcaacaaacattacaaccacgatctgaagtttttcaccactccagataaagacaatgatcgatatccttctgggaactgtgggctgtactacagttcaggctggtggtttgatgcatgtctttctgcaaacttaaatggcaaatattatcaccaaaaatacagaggtgtccgtaatgggattttctggggtacctggcctggtgtaagtgaggcacaccctggtggctacaagtcctccttcaaagaggctaagatgatgatcagacccaagcactttaagccataaatcactctgttcattcctccaggtattcgttatctaatagggcaattaattccttcagcactttagaatatgccttgtttcatatttttcatagctaaaaaatgtttgacatcctttgagatattttattactaaaatctgcc

SEQ ID NO: 12117 - DNA, 2156 bp, Homo sapiens
gcgcatgcgtggattgtcgtcttctgtccaagttggtcgcttccctgcgccaaagtgagcagtagccaacatgtcagggtgggagtcatattacaaaaccgagggcgatgaagaagcagaggaagaacaagaagagaaccttgaagcaagtggagactataaatattcaggaagagatagtttgatttttttggttgatgcctccaaggctatgtttgaatctcagagtgaagatgagttgacaccttttgacatgagcatccagtgtatccaaagtgtgtacatcagtaagatcataagcagtgatcgagatctcttggctgtggtgttctatggtaccgagaaagacaaaaattcagtgaattttaaaaatatttacgtcttacaggagctggataatccaggtgcaaaacgaattctagagcttgaccagtttaaggggcagcagggacaaaaacgtttccaagacatgatgggccacggatctgactactcactcagtgaagtgctgtgggtctgtgccaacctctttagtgatgtccaattcaagatgagtcataagaggatcatgctgttcaccaatgaagacaacccccatggcaatgacagtgccaaagccagccgggccaggaccaaagccggtgatctccgagatacaggcatcttccttgacttgatgcacctgaagaaacctgggggctttgacatatccttgttctacagagatatcatcagcatagcagaggatgaggacctcagggttcactttgaggaatccagcaagctagaagacctgttgcggaaggttcgcgccaaggagaccaggaagcgagcactcagcaggttaaagctgaagctcaacaaagatatagtgatctctgtgggcatttataatctggtccagaaggctctcaagcctcctccaataaagctctatcgggaaacaaatgaaccagtgaaaaccaagacccggacctttaatacaagtacaggcggtttgcttctgcctagcgataccaagaggtctcagatctatgggagtcgtcagattatactggagaaagaggaaacagaagagctaaaacggtttgatgatccaggtttgatgctcatgggtttcaagccgttggtactgctgaagaaacaccattacctgaggccctccctgttcgtgtacccagaggagtcgctggtgattgggagctcaaccctgttcagtgctctgctcatcaagtgtctggagaaggaggttgcagcattgtgcagatacacaccccgcaggaacatccctccttattttgtggctttggtgccacaggaagaagagttggatgaccagaaaattcaggtgactcctccaggcttccagctggtctttttaccctttgctgatgataaaaggaagatgccctttactgaaaaaatcatggcaactccagagcaggtgggcaagatgaaggctatcgttgagaagcttcgcttcacatacagaagtgacagctttgagaaccccgtgctgcagcagcacttcaggaacctggaggccttggccttggatttgatggagccggaacaagcagtggacctgacattgcccaaggttgaagcaatgaataaaagactgggctccttggtggatgagtttaaggagcttgtttacccaccagattacaatcctgaagggaaagttaccaagagaaaacacgataatgaaggttctggaagcaaaaggcccaaggtggagtattcagaagaggagctgaagacccacatcagcaagggtacgctgggcaagttcactgtgcccatgctgaaagaggcctgccgggcttacgggctgaagagtgggctgaagaagcaggagctgctggaagccctcaccaagcacttccaggactgaccagaggccgcgcgtccagctgcccttccgcagtgtggccaggctgcctggccttgtcctcagccagttaaaatgtgtttctcctgagctaggaagagtctacccgacataagtcgagggactttatgtttttgaggctttctgttgccatggtgatggtgtagccctcccactttgctgttccttactttactgcctgaataaagagccctaagtttgtactatatactgttaaaaaaaaaaaaaaaaaaaaaaa

SEQ ID NO: 12118 - DNA, 5062 bp, Homo sapiens
gaacaagggagctggcgccgccagcagccgccgagctgggttgagccgctgggccgcgccgcgcgccgccgccgtctgggaggctcggcccggccgcccgagcaggccgcgcgcgggccgccgggcccgaggccagagccatgggcgagaccaagatcatctaccacttggatgggcaggagacgccgtaccttgtgaagctgcccctgcccgccgagcgcgtcaccttggcggactttaagggcgttttgcagcgacccagctataagttcttcttcaagtctatggacgacgatttcggagtggtgaaggaggagatctcggatgacaatgccaagctaccatgcttcaatggccgggtggtgtcctggctggtgtcagctgagggctcacacccagacccagcccccttctgtgctgataacccatcggagctgccaccacctatggagcgcacgggaggcatcggggactcccgacccccatccttccaccctcatgctggtgggggcagccaggagaacctggacaatgacacagagacggactctttggtgtctgcccagcgagagcggccacgccggagggatggcccagagcatgcaacccggctaaatggaactgcgaagggggaacggcggcgagaaccagggggttatgatagctcatccacccttatgagcagtgagctggagaccaccagcttctttgactcagatgaggatgactccaccagcaggttcagcagctccacagaacagagcagtgcctcacgcctgatgagaagacacaagcggcggcggcggaagcagaaggtttctcggattgagcggtcctcgtccttcagcagcatcacggactccaccatgtcactcaacatcatcacggtcactctcaacatggaaaaatataacttcttgggcatctccattgtgggccaaagcaacgagcgtggtgacggcggcatctacattggctctatcatgaagggtggggccgtggctgctgatggacgcatcgagccaggagatatgttgttacaggtaaacgagatcaactttgagaacatgagtaatgacgatgcagtccgggtactgcgggagattgtgcacaaaccggggcccatcaccctgactgtagccaagtgctgggacccaagtccacgtggttgcttcacattgcccaggagcgagcccatccggcccattgaccctgcggcctgggtctcccacactgcagccatgaccggcaccttccctgcatacggcatgagcccctccctgagcaccatcacctccaccagctcctccatcaccagttccatccctgacacagagcgcctagacgacttccacttgtccatccacagtgacatggctgccatcgtaaaagccatggcctcccctgaatcagggttggaggtccgtgaccgcatgtggctcaagattaccatccctaatgctttcatcggctcagatgtggtggactggctgtaccacaatgtggaaggcttcacggaccggagggaggcccgcaagtatgccagcaacctgctgaaagctggcttcatccgccataccgtcaacaagatcaccttctccgagcagtgctactacatcttcggtgacctctgcggcaacatggccaacctgtctctccacgatcacgatggctccagtggcgcctctgaccaggacacactggcccctttgccgcacccgggggccgccccttggcccatggctttcccgtaccagtacccgccacccccgcacccatacaacccgcacccgggcttcccggagctgggctacagctacggcgggggcagcgccagcagtcagcacagcgaaggcagtcggagcagtggctccaaccgtagcggcagcgatcggaggaaggagaaggacccgaaggccggggactccaagtccgggggcagcggcagcgaatcggaccacaccacacgcagcagcctgcgggggccgcgggagcgggcgcccagcgagcgctcagggccggcggccagcgagcacagccaccgcagccaccattccctggccagcagccttcgcagccaccacacacacccgagctacggtcctcccggagtgccccctctctacggcccccccatgctgatgatgcccccgccgcccgcggccatggggcccccaggagcccctccgggccgcgacctggcctcagtgcccccggaactgaccgccagcagacagtccttccgcatggccatgggaaaccccagtgagttctttgtggatgtgatgtgagcagggcccctcccccagctccattccgctcccaccccagccggctgcgttcctctctccatccgtccgtcttttttactttgtctggtacctgaaagggaaataaaaggaactaaatccaggtgcgctaactgctcgcagggtgctgcgagggtggggtgcacctaccgattggctctgcagccccctaacctgcctctggccccagttcgtttcctctgcccactaatccctgcgcaggacttcccaggaccccttttgtctctgggaccagacttgttggtgctaccccttactcccctctgcaacccccattttgggagttgaccccagcaatgaccttggtggcacgctcactccctcattctctcgtttcccctttagctccctttcaccatttattcagctacatcatccctctattaaccccaccccatcaggcacgtgtgcaaacctcttgactttaccccacattactgaaaccaaaatatatttgcttcatctgcccctactaaccatccccctgcctgctgcctcagtcctgcaacctaaagctgtagtcgcctccaatagccatccatgccatccctgcctgtgcctagatcagaggcccagagggccccctcagttgcctgagcagctggtggcttccagggagcatctctgctctacccctgccccatgcctgccctgcgtgctggttccttcagacccctaaccctactaaccagcaggctcatctcacctccaggcctgaaacatttcttttctttcttttttcctcccccaatttaccctgggcctggagcagccaagaatttcgggctgtttgactttctgtgagcccccagcgaggggaggcccagcctccgaggagaccaggaaccctgcttcagcagcccctcagggcttcccaaggatgtccagcccccacacccacacgttaacataatgagtcactaggcttctggggagggcccaacttcacccatgcatgagagactctcctcctttccagagagaatcggatcgcaccacgtgtggcagcctgcggcggggggaggggggcctctttagctctctttatctttctctctcactcatgtatgcatacatgcacagagatgcatacacaggtgcctatgcaagttcatttaagcctcagggctggtccctgcccaaagggctggaccctcctaatcctctcctaggttgtggggctggtcccctgacacccttctccccttcctggtagaccttaaacctcgcacacatgtccccagcattttctcacctggataaagcccataagctgggtctcaggctgggctcagcaaaggactcgccttgcaaccgacaggccattcccacccccacacacaacctcccctgttttcacattcaccatggcatcccagagcaaggacacaggagcccacaggccagttgaggttgggcaaggagacttccaggacttccagacagagtaccaggttttatttttcaccttattctctactttaaacaaatcataactttctctttaagcctctgctataaattctcctggctctcctgggcttccatattttgggggctggggtgtcaaaagtgagatgaagttcttagctccaggttttggggtaaaccaaggtaggaacattttggcatttatttcaattaacaatacttccttggacgggtgcggtggctcacgtctgtaatcccagcactttgggaggctgagacaggtggatcacttgaggtcgggagttcgagaccagcctggccaacatagcaaaaccctgtctctactaaaaatacaaaaattagatgggtgttttggcacctgcctgtaatctcagctactcaggaggctgaggcacaagaatcgcttgaatccaggaagcaagcggaggttgcagtgagttgagatcgcactccagcctgggtgacagagtgagattctgtctcaaaagcaaactaacaaagaaaaacaatacttcctggggttttggtgtgcagagggctttgttggaagtgtgactcaatcttgcctgccttctgggagctctagaattgttcccaacccagtccatggcttctagccaccactacagggctgtttcatgtacttctctctctgactctgtcttgtccgactctcttgagaatttctcaacgattgctcatgcctgtcagtatcagtgcttccatcgttccatctttgattcacttctctttcctttctatttactcccaaaatggagtcattcatcctgatgtcctcaattgctgctgatatgctggtgattcccaaatacatagctccaacccccaacttcccccagactttagatctgtattggtattacctactggacatctctatggacagttccgtatagactcaactcatctgcccaaccaagtatgttcctcctgaattcctctcctggttacttcatcacaatctacataggctcaccagctagaaacatttatgagcttacattccttcttcccatatcttatcagcatatcatatccatttcactccaacactctgtcttgaatttggccctccctctcccctctctactttaattcattggagcatgggatttggagttaggtggttttgggtttgaattccagctctactatttttggttgtgtgatagagttatttaacctctctgagcctcagttccctcgtatgtaaaatgatgataataatacctacctcacagggttgttgtgaggattta

SEQ ID NO: 12119 - DNA, 7193 bp, Homo sapiens
agaataagggcagggaccgcggctcctatctcttggtgatccccttccccattccgcccccgcctcaacgcccagcacagtgccctgcacacagtagtcgctcaataaatgttcgtggatgatgatgatgatgatgatgaaaaaaatgcagcatcaacggcagcagcaagcggaccacgcgaacgaggcaaactatgcaagaggcaccagacttcctctttctggtgaaggaccaacttctcagccgaatagctccaagcaaactgtcctgtcttggcaagctgcaatcgatgctgctagacaggccaaggctgcccaaactatgagcacctctgcacccccacctgtaggatctctctcccaaagaaaacgtcagcaatacgccaagagcaaaaaacagggtaactcgtccaacagccgacctgcccgcgcccttttctgtttatcactcaataaccccatccgaagagcctgcattagtatagtggaatggaaaccatttgacatatttatattattggctatttttgccaattgtgtggccttagctatttacatcccattccctgaagatgattctaattcaacaaatcataacttggaaaaagtagaatatgccttcctgattatttttacagtcgagacatttttgaagattatagcgtatggattattgctacatcctaatgcttatgttaggaatggatggaatttactggattttgttatagtaatagtaggattgtttagtgtaattttggaacaattaaccaaagaaacagaaggcgggaaccactcaagcggcaaatctggaggctttgatgtcaaagccctccgtgcctttcgagtgttgcgaccacttcgactagtgtcaggggtgcccagtttacaagttgtcctgaactccattataaaagccatggttcccctccttcacatagcccttttggtattatttgtaatcataatctatgctattataggattggaactttttattggaaaaatgcacaaaacatgtttttttgctgactcagatatcgtagctgaagaggacccagctccatgtgcgttctcagggaatggacgccagtgtactgccaatggcacggaatgtaggagtggctgggttggcccgaacggaggcatcaccaactttgataactttgcctttgccatgcttactgtgtttcagtgcatcaccatggagggctggacagacgtgctctactgggtaaatgatgcgataggatgggaatggccatgggtgtattttgttagtctgatcatccttggctcatttttcgtccttaacctggttcttggtgtccttagtggagaattctcaaaggaaagagagaaggcaaaagcacggggagatttccagaagctccgggagaagcagcagctggaggaggatctaaagggctacttggattggatcacccaagctgaggacatcgatccggagaatgaggaagaaggaggagaggaaggcaaacgaaatactagcatgcccaccagcgagactgagtctgtgaacacagagaacgtcagcggtgaaggcgagaaccgaggctgctgtggaagtctctggtgctggtggagacggagaggcgcggccaaggcggggccctctgggtgtcggcggtggggtcaagccatctcaaaatccaaactcagccgacgctggcgtcgctggaaccgattcaatcgcagaagatgtagggccgccgtgaagtctgtcacgttttactggctggttatcgtcctggtgtttctgaacaccttaaccatttcctctgagcactacaatcagccagattggttgacacagattcaagatattgccaacaaagtcctcttggctctgttcacctgcgagatgctggtaaaaatgtacagcttgggcctccaagcatatttcgtctctcttttcaaccggtttgattgcttcgtggtgtgtggtggaatcactgagacgatcctggtggaactggaaatcatgtctcccctggggatctctgtgtttcggtgtgtgcgcctcttaagaatcttcaaagtgaccaggcactggacttccctgagcaacttagtggcatccttattaaactccatgaagtccatcgcttcgctgttgcttctgctttttctcttcattatcatcttttccttgcttgggatgcagctgtttggcggcaagtttaattttgatgaaacgcaaaccaagcggagcacctttgacaatttccctcaagcacttctcacagtgttccagatcctgacaggcgaagactggaatgctgtgatgtacgatggcatcatggcttacgggggcccatcctcttcaggaatgatcgtctgcatctacttcatcatcctcttcatttgtggtaactatattctactgaatgtcttcttggccatcgctgtagacaatttggctgatgctgaaagtctgaacactgctcagaaagaagaagcggaagaaaaggagaggaaaaagattgccagaaaagagagcctagaaaataaaaagaacaacaaaccagaagtcaaccagatagccaacagtgacaacaaggttacaattgatgactatagagaagaggatgaagacaaggacccctatccgccttgcgatgtgccagtaggggaagaggaagaggaagaggaggaggatgaacctgaggttcctgccggaccccgtcctcgaaggatctcggagttgaacatgaaggaaaaaattgcccccatccctgaagggagcgctttcttcattcttagcaagaccaacccgatccgcgtaggctgccacaagctcatcaaccaccacatcttcaccaacctcatccttgtcttcatcatgctgagcagcgctgccctggccgcagaggaccccatccgcagccactccttccggaacacgatactgggttactttgactatgccttcacagccatctttactgttgagatcctgttgaagatgacaacttttggagctttcctccacaaaggggccttctgcaggaactacttcaatttgctggatatgctggtggttggggtgtctctggtgtcatttgggattcaatccagtgccatctccgttgtgaagattctgagggtcttaagggtcctgcgtcccctcagggccatcaacagagcaaaaggacttaagcacgtggtccagtgcgtcttcgtggccatccggaccatcggcaacatcatgatcgtcactaccctcctgcagttcatgtttgcctgtatcggggtccagttgttcaaggggaagttctatcgctgtacggatgaagccaaaagtaaccctgaagaatgcaggggacttttcatcctctacaaggatggggatgttgacagtcctgtggtccgtgaacggatctggcaaaacagtgatttcaacttcgacaacgtcctctctgctatgatggcgctcttcacagtctccacgtttgagggctggcctgcgttgctgtataaagccatcgactcgaatggagagaacatcggcccaatctacaaccaccgcgtggagatctccatcttcttcatcatctacatcatcattgtagctttcttcatgatgaacatctttgtgggctttgtcatcgttacatttcaggaacaaggagaaaaagagtataagaactgtgagctggacaaaaatcagcgtcagtgtgttgaatacgccttgaaagcacgtcccttgcggagatacatccccaaaaacccctaccagtacaagttctggtacgtggtgaactcttcgcctttcgaatacatgatgtttgtcctcatcatgctcaacacactctgcttggccatgcagcactacgagcagtccaagatgttcaatgatgccatggacattctgaacatggtcttcaccggggtgttcaccgtcgagatggttttgaaagtcatcgcatttaagcctaaggggtattttagtgacgcctggaacacgtttgactccctcatcgtaatcggcagcattatagacgtggccctcagcgaagcggacccaactgaaagtgaaaatgtccctgtcccaactgctacacctgggaactctgaagagagcaatagaatctccatcacctttttccgtcttttccgagtgatgcgattggtgaagcttctcagcaggggggaaggcatccggacattgctgtggacttttattaagtcctttcaggcgctcccgtatgtggccctcctcatagccatgctgttcttcatctatgcggtcattggcatgcagatgtttgggaaagttgccatgagagataacaaccagatcaataggaacaataacttccagacgtttccccaggcggtgctgctgctcttcaggtgtgcaacaggtgaggcctggcaggagatcatgctggcctgtctcccagggaagctctgtgaccctgagtcagattacaaccccggggaggagtatacatgtgggagcaactttgccattgtctatttcatcagtttttacatgctctgtgcatttctgatcatcaatctgtttgtggctgtcatcatggataatttcgactatctgacccgggactggtctattttggggcctcaccatttagatgaattcaaaagaatatggtcagaatatgaccctgaggcaaagggaaggataaaacaccttgatgtggtcactctgcttcgacgcatccagcctcccctggggtttgggaagttatgtccacacagggtagcgtgcaagagattagttgccatgaacatgcctctcaacagtgacgggacagtcatgtttaatgcaaccctgtttgctttggttcgaacggctcttaagatcaagaccgaagggaacctggagcaagctaatgaagaacttcgggctgtgataaagaaaatttggaagaaaaccagcatgaaattacttgaccaagttgtccctccagctggtgatgatgaggtaaccgtggggaagttctatgccactttcctgatacaggactactttaggaaattcaagaaacggaaagaacaaggactggtgggaaagtaccctgcgaagaacaccacaattgccctacaggcgggattaaggacactgcatgacattgggccagaaatccggcgtgctatatcgtgtgatttgcaagatgacgagcctgaggaaacaaaacgagaagaagaagatgatgtgttcaaaagaaatggtgccctgcttggaaaccatgtcaatcatgttaatagtgataggagagattcccttcagcagaccaataccacccaccgtcccctgcatgtccaaaggccttcaattccacctgcaagtgatactgagaaaccgctgtttcctccagcaggaaattcggtgtgtcataaccatcataaccataattccataggaaagcaagttcccacctcaacaaatgccaatctcaataatgccaatatgtccaaagctgcccatggaaagcggcccagcattgggaaccttgagcatgtgtctgaaaatgggcatcattcttcccacaagcatgaccgggagcctcagagaaggtccagtgtgaaaagaacccgctattatgaaacttacattaggtccgactcaggagatgaacagctcccaactatttgccgggaagacccagagatacatggctatttcagggacccccactgcttgggggagcaggagtatttcagtagtgaggaatgctacgaggatgacagctcgcccacctggagcaggcaaaactatggctactacagcagatacccaggcagaaacatcgactctgagaggccccgaggctaccatcatccccaaggattcttggaggacgatgactcgcccgtttgctatgattcacggagatctccaaggagacgcctactacctcccaccccagcatcccaccggagatcctccttcaactttgagtgcctgcgccggcagagcagccaggaagaggtcccgtcgtctcccatcttcccccatcgcacggccctgcctctgcatctaatgcagcaacagatcatggcagttgccggcctagattcaagtaaagcccagaagtactcaccgagtcactcgacccggtcgtgggccacccctccagcaacccctccctaccgggactggacaccgtgctacacccccctgatccaagtggagcagtcagaggccctggaccaggtgaacggcagcctgccgtccctgcaccgcagctcctggtacacagacgagcccgacatctcctaccggactttcacaccagccagcctgactgtccccagcagcttccggaacaaaaacagcgacaagcagaggagtgcggacagcttggtggaggcagtcctgatatccgaaggcttgggacgctatgcaagggacccaaaatttgtgtcagcaacaaaacacgaaatcgctgatgcctgtgacctcaccatcgacgagatggagagtgcagccagcaccctgcttaatgggaacgtgcgtccccgagccaacggggatgtgggccccctctcacaccggcaggactatgagctacaggactttggtcctggctacagcgacgaagagccagaccctgggagggatgaggaggacctggcggatgaaatgatatgcatcaccaccttgtagcccccagcgaggggcagactggctctggcctcaggtggggcgcaggagagccaggggaaaagtgcctcatagttaggaaagtttaggcactagttgggagtaatattcaattaattagacttttgtataagagatgtcatgcctcaagaaagccataaacctggtaggaacaggtcccaagcggttgagcctggcagagtaccatgcgctcggccccagctgcaggaaacagcaggccccgccctctcacagaggatgggtgaggaggccagacctgccctgccccattgtccagatgggcactgctgtggagtctgcttctcccatgtaccagggcaccaggcccacccaactgaaggcatggcggcggggtgcaggggaaagttaaaggtgatgacgatcatcacacctcgtgtcgttacctcagccatcggtctagcatatcagtcactgggcccaacatatccatttttaaaccctttcccccaaatacactgcgtcctggttcctgtttagctgttctgaaata

SEQ ID NO: 12120 - DNA, 3346 bp, Homo sapiens
gcggaggcgggcgcgcgccccgcaggggagggggcggagagcgcgagaaggagggaggaggcgtccccgtgcgggagcccggctgaccgcgccagacccagacagagcatcgcggctttggctgcaacaggcggtgggctcggctcgggggcggaggcggcgaaagggcggggagcgcgaggaggagcgacctggcctcaccgctgccgcctcttccccgccgcatggacgagcgcctcagccttctgcgctcgccgccgccgccctcagcccgccaccgcgcccaccctcctcagcgcccagcgagcagcggcggtgcccacacgctggtgaaccacggctacgcggagcccgccgcaggccgcgagctgccgcccgacatgaccgtggtgcccggggaccacctgctggagccggaggtggccgatggtggaggggccccgcctcaaggcggctgtggcggcggcggctgcgaccgctacgagccgctgccgccctcactgccggccgcgggcgagcaggactgctgcggggagcgcgtggtcatcaacatctccgggctgcgcttcgagacgcagctgaagaccctttgccagttccccgagacgctgctgggcgaccccaagcggcgcatgaggtacttcgacccgctccgcaacgagtacttcttcgaccgcaaccggcccagcttcgacgccatcctctactactatcagtccgggggccgcatccgccggccggtcaacgtgcccatcgacattttctccgaggagatccgcttctaccagctgggcgaggaggccatggagaagttccgcgaggacgagggcttcctgcgggaggaggagcggcccttgccccgccgcgacttccagcgccaggtgtggctgctcttcgagtaccccgagagctccgggccggcccggggcatcgccatcgtgtccgtgctggtcatcctcatctccattgtcatcttctgcctggagacgctgccggagttccgcgacgagaaggactaccccgcctcgacgtcgcaggactcattcgaagcagccggcaacagcacgtcggggtcccgcgcaggagcctccagcttctccgatcccttcttcgtggtggagacgctgtgcatcatctggttctccttcgaactgctggtgcggttcttcgcttgtcctagcaaagccaccttctcgcgaaacatcatgaacctgatcgacattgtggccatcattccttattttatcactctgggtaccgagctggccgaacgacagggcaatggacagcaggccatgtctctggccatcctgagggtcatccgcctggtaagggtcttccgcatcttcaagctgtcgcgccactccaaggggctgcagatcctcgggcaaacgctgaaggcgtccatgcgggagctgggattgctcatcttcttcctctttattggggtcatccttttctccagcgcggtctactttgccgaggcagacgaccccacttcaggtttcagcagcatcccggatgccttctggtgggcagtggtaaccatgacaacagtgggttacggcgatatgcacccagtgaccatagggggcaagattgtgggatctctctgtgccatcgccggtgtcttgaccatcgcattgccagttcccgtgattgtttccaacttcaattacttctaccaccgggagacagaaggggaagagcaatcccagtacatgcacgtgggaagttgccagcacctctcctcttcagccgaggagctccgaaaagcaaggagtaactcgactctgagtaagtcggagtatatggtgatcgaagaggggggtatgaaccatagcgctttcccccagacccctttcaaaacgggcaattccactgccacctgcaccacgaacaataatcccaactcttgtgtcaacatcaaaaagatattcaccgatgtttaatatgtgatacaagtgacatgctgtgctcagtattgtgtggaacgtgcccccttggtctgcctatgcccttgttttatacatttccagaccattcatcaaggaaaggacctgaagaagtggaaagcacacttcattctccctctccctgctgcttcatactgaaacaggtgcctgttttgcaagtgggctgcattctctcagctctccttttccctcttaccctctctctcttaacattgtaaacaacagacttacgttaaacttcatttctagtacacgccctatttaaaaaagagcagtacatcctgggaggaaatgaaactaaagaacagttagagtaactgtttaacctcagaattttaaaggcagttgtttctttcctaagcacatcaattcgtagtaaatgatgcttcggtttgatggacctttcaacgttatttattgaatatgtatttcggttgcctaccctgtagatatgtggatgaagagtctaactagaataatgacttgtaaacccaccatgagttatttggtttttgacttaaattcctatttgaatcccctttcccggaattttaagtgtctctacaactttgaataaagggaaatgcccaagatgtcctgatctgactaattagtttaattctttcgggcttgctaagcatttctaaagcattagactaacagattcctgtgaagttctgtgcatatgtcccagccccaacaactatcaaagtctagaaacagatgttttcagtgttgctgagagaaacaaaaaatttcctaatgcatctgagagataagcttcggcagtatcacaagaagattaaagtggcagacaccccttccagcggaagttactaattcggacctgactgatgcagtttccatagcaacccatgtttcctgggaaacccgaaaaaggttgtcatggcatctcttgctctctagccccacctcccagcccctgccgtttccacagtaacctttccagatggttcctacttaaatgatttcataaggaaaaccactgtttgaataagccgcacaaaaaataaagttaagtctgagactctaaggaggtgaaatgaatcccaaatgcattttttaactatgaaaatcattatgtcattccataatgactgaatcaaggaggaaaatatggtgtttggaatgttagatattaaccacaataaggcatgatctggattaaatgccatttattaggcaataatttttaaagatgcttctctacagttttctttctccaagaactttcaagccaacaaatgaaatttaaaagcaaatgtaaaagtgttctgtacataagcaaatgagagattcgatcagtgtgcctgaaaccttactacaagggaccttcaggctttctcttt

SEQ ID NO: 12121 - DNA, 2324 bp, Homo sapiens
acatcgggaagccggaattacttgcagggctaacctagtgcctatagctaaggcaggtacctgcatccttgtttttgtttagtggatcctctatccttcagagactctggaacccctgtggtcttctcttcatctaatgaccctgaggggatggagttttcaagtccttccagagaggaatgtcccaagcctttgagtagggtaagcatcatggctggcagcctcacaggattgcttctacttcaggcagtgtcgtgggcatcaggtgcccgcccctgcatccctaaaagcttcggctacagctcggtggtgtgtgtctgcaatgccacatactgtgactcctttgaccccccgacctttcctgcccttggtaccttcagccgctatgagagtacacgcagtgggcgacggatggagctgagtatggggcccatccaggctaatcacacgggcacaggcctgctactgaccctgcagccagaacagaagttccagaaagtgaagggatttggaggggccatgacagatgctgctgctctcaacatccttgccctgtcaccccctgcccaaaatttgctacttaaatcgtacttctctgaagaaggaatcggatataacatcatccgggtacccatggccagctgtgacttctccatccgcacctacacctatgcagacacccctgatgatttccagttgcacaacttcagcctcccagaggaagataccaagctcaagatacccctgattcaccgagccctgcagttggcccagcgtcccgtttcactccttgccagcccctggacatcacccacttggctcaagaccaatggagcggtgaatgggaaggggtcactcaagggacagcccggagacatctaccaccagacctgggccagatactttgtgaagttcctggatgcctatgctgagcacaagttacagttctgggcagtgacagctgaaaatgagccttctgctgggctgttgagtggataccccttccagtgcctgggcttcacccctgaacatcagcgagacttcattgcccgtgacctaggtcctaccctcgccaacagtactcaccacaatgtccgcctactcatgctggatgaccaacgcttgctgctgccccactgggcaaaggtggtactgacagacccagaagcagctaaatatgttcatggcattgctgtacattggtacctggactttctggctccagccaaagccaccctaggggagacacaccgcctgttccccaacaccatgctctttgcctcagaggcctgtgtgggctccaagttctgggagcagagtgtgcggctaggctcctgggatcgagggatgcagtacagccacagcatcatcacgaacctcctgtaccatgtggtcggctggaccgactggaaccttgccctgaaccccgaaggaggacccaattgggtgcgtaactttgtcgacagtcccatcattgtagacatcaccaaggacacgttttacaaacagcccatgttctaccaccttggccacttcagcaagttcattcctgagggctcccagagagtggggctggttgccagtcagaagaacgacctggacgcagtggcactgatgcatcccgatggctctgctgttgtggtcgtgctaaaccgctcctctaaggatgtgcctcttaccatcaaggatcctgctgtgggcttcctggagacaatctcacctggctactccattcacacctacctgtggcgtcgccagtgatggagcagatactcaaggaggcactgggctcagcctgggcattaaagggacagagtcagctcacacgctgtctgtgactaaagagggcacagcagggccagtgtgagcttacagcgacgtaagcccaggggcaatggtttgggtgactcactttcccctctaggtggtgccaggggctggaggcccctagaaaaagatcagtaagccccagtgtccccccagcccccatgcttatgtgaacatgcgctgtgtgctgcttgctttggaaactgggcctgggtccaggcctagggtgagctcactgtccgtacaaacacaagatcagggctgagggtaaggaaaagaagagactaggaaagctgggcccaaaactggagactgtttgtctttcctggagatgcagaactgggcccgtggagcagcagtgtcagcatcagggcggaagccttaaagcagcagcgggtgtgcccaggcacccagatgattcctatggcaccagccaggaaaaatggcagctcttaaaggagaaaatgtttgagcccaaaaaaaaaaaaaaaaaaaaa

SEQ ID NO: 12122 - DNA, 3285 bp, Homo sapiens
ctagaattcagcggccgctgaattctagacccggatgaagagtaacgccattaccgcccgagccgccgagagccttagccgacggaaactggacactggaccggcagcgccatgagactcctcccccgcttgctgctgcttctcttactcgtgttccctgccactgtcttgttccgaggcggccccagaggctcgttagcagtggcacaagatcttacagaggatgaagaaacagtagaagattccataattgaggatgaagatgatgaagccgaggtagaagaagatgaacccacagatttggtagaagataaagaggaagaagatgtgtctggtgaacctgaagcttcaccgagtgcagatacaactatactgtttgtaaaaggagaagattttccagcaaataacattgtgaagttcctggtaggctttaccaacaagggtacagaagattttattgttgaatccttagatgcctcattccgttatcctcaggaccaccagttttatatccagaatttcacagctcttcctctgaacactgtagtgccaccccagagacaggcaacttttgagtactctttcattcctgcagagcccatgggcggacgaccatttggtttggtcatcaatctgaactacaaagatttgaacggcaatgtattccaagatgcagtcttcaatcaaacagttacagttattgaaagagaggatgggttagatggagaaacaatctttatgtatatgttccttgctggtcttgggcttctggttattgttggccttcatcaactcctagaatctagaaagcgtaagagacccatacagaaagtagaaatgggtacatcaagtcagaatgatgttgacatgagttggattcctcaggaaacattgaatcaaatcaataaagcttcaccaagaaggttgcccaggaaacgggcacagaagagatcagtgggatctgatgagtaaatgttcctttgtgcaacaattcggtctttacttaacctgccctaatatttttcggcctgatgggaattagtgcagagaagccagtcaccatagaaggcaactcctacttgtgtgtggactgagcaatcagagtctgtggcgataatattgctgaaaatgcactgcattcatttttctaaagtaacaaatttggtttttttttaaaccattaaaatctatgtgtgtgcgtgtgtatgtatgtgagcagttggtcttaccagaatcattgttgaactacctgaaacaagtctttagaatactaaatataatgctgttgtctcttcctttttgacattttctgattttttcccccaaaactcagttaatatttacccactatgattattgatgtcctgccttgaacagttttaaagaaaacaatttttggaatagctcaaatttcaattgatggcacaaatcagcattttgttgttgttactgtattacaattagtattctaaaggcagaagcagaagtagctgctttttagcaatagaattgtttcagtattttgctgctgtttaatgcgcatcttcagaaaacttcccagtggcttcaaggaatttggggatctctctggcaacaaattgtgaaacatgaaatttctgctgactttaatatatgaaacctaatcctacccccttttttaacaaaaagaaactagtacatttgtgaaaattgtgttgtgttgtccattgttgctctagttctgacccagaggtagctctggagtgattttagacctactcactcagttgtgtgtaggtttttttgttttgttttgagagagaatttttctctccttaatagaagcatcctttttaaagagaagttgccttggtccacacactaagcagaaaaccaagttatcaggacagagatatttcccagttactcctaatcaatgaagaaagtgagttggatatttttaaagcagttaactaattttttcttacctaatcttttgggagttttgcttgttgatataacctttttagttaacctgaaagattccaaaaattgttcttaagtgcttgagactggaaccaaaattaaattgtacttcataaaatcctcttatagagttactcttgccctagattgtaaattaagtttggcattattgtcagactggatggagggtgaagtaaaatagtatgaacaattaagaggctctccccctcttgtctttaagccatattctcctacatgtattttataagaaaatgttaagtcaaattttagtggctctttaattcctgacctcttcattctccttttcagtataacctcccctatgctcatgcccacacagacaaaaaaacaaaacgaaatacacacagaaaaaagtctttccaaactgtttaagtatttaaacatctgagccaaagcagatagaagttattgtataattgttaatcactttgcaaataggggctatcaaattacctatattggcattgctggattataaactctatatctgtaatataaagtgtttgagtttttaattgggctgttatgatcagtaattgattttgagaaagctctatgagctctaagtaactgcatggttttttgtttaatgtaatataggagacccttcacattcccaaggaatatattccaaaacatttttgtgaatatctaagtttgtgaaactactagggcatgatacagtaaggtgtaattacagaatttacgaaatgtaaatggcctctacagagttttatggaatacctggtactaacgtaggcagctgcaaaaccacactgagttacagctgtcagccctcctcattcctaaataacttgccttacatatcagccctcccacttctgaagttcaaattagtgcctcggaaatgtagaatttattatttgtcattttttttttttagcatagattgagaacagttgaactcttaaatcctcagatgccaggggtctgctctagcatcagtaagtatttagcagaaactaactccgtaatgaatggaattcaattccacacatggtttgttcaagcacacttaataagtagcctattttttaaatgtctttttaaaatgtaaatatttggatgaagtttttctttgttttgatatattcatttgctacaccaactatgttttcagaattcatcttttgaacaacttggtttcagaatatgtaaaatgactttaaggatcttgtgtatcaaacctatccccggatgtgtgagaataatgtgttcataaagcatggatctcgtaaaaaaaaaaaaaaaaaaaaa

SEQ ID NO: 12123 - DNA, 5411 bp, Homo sapiens
gtgtcccatagtgtttccaaacttggaaagggcgggggagggcgggaggatgcggagggcggaggtatgcagacaacgagtcagagtttccccttgaaagcctcaaaagtgtccacgtcctcaaaaagaatggaaccaatttaagaagccagccccgtggccacgtcccttcccccattcgctccctcctctgcgcccccgcaggctcctcccagctgtggctgcccgggcccccagccccagccctcccattggtggaggcccttttggaggcaccctagggccagggaaacttttgccgtataaatagggcagatccgggctttattattttagcaccacggcagcaggaggtttcggctaagttggaggtactggccacgactgcatgcccgcgcccgccaggtgatacctccgccggtgacccaggggctctgcgacacaaggagtctgcatgtctaagtgctagacatgctcagctttgtggatacgcggactttgttgctgcttgcagtaaccttatgcctagcaacatgccaatctttacaagaggaaactgtaagaaagggcccagccggagatagaggaccacgtggagaaaggggtccaccaggccccccaggcagagatggtgaagatggtcccacaggccctcctggtccacctggtcctcctggcccccctggtctcggtgggaactttgctgctcagtatgatggaaaaggagttggacttggccctggaccaatgggcttaatgggacctagaggcccacctggtgcagctggagccccaggccctcaaggtttccaaggacctgctggtgagcctggtgaacctggtcaaactggtcctgcaggtgctcgtggtccagctggccctcctggcaaggctggtgaagatggtcaccctggaaaacccggacgacctggtgagagaggagttgttggaccacagggtgctcgtggtttccctggaactcctggacttcctggcttcaaaggcattaggggacacaatggtctggatggattgaagggacagcccggtgctcctggtgtgaagggtgaacctggtgcccctggtgaaaatggaactccaggtcaaacaggagcccgtgggcttcctggtgagagaggacgtgttggtgcccctggcccagctggtgcccgtggcagtgatggaagtgtgggtcccgtgggtcctgctggtcccattgggtctgctggccctccaggcttcccaggtgcccctggccccaagggtgaaattggagctgttggtaacgctggtcctgctggtcccgccggtccccgtggtgaagtgggtcttccaggcctctccggccccgttggacctcctggtaatcctggagcaaacggccttactggtgccaagggtgctgctggccttcccggcgttgctggggctcccggcctccctggaccccgcggtattcctggccctgttggtgctgccggtgctactggtgccagaggacttgttggtgagcctggtccagctggctccaaaggagagagcggtaacaagggtgagcccggctctgctgggccccaaggtcctcctggtcccagtggtgaagaaggaaagagaggccctaatggggaagctggatctgccggccctccaggacctcctgggctgagaggtagtcctggttctcgtggtcttcctggagctgatggcagagctggcgtcatgggccctcctggtagtcgtggtgcaagtggccctgctggagtccgaggacctaatggagatgctggtcgccctggggagcctggtctcatgggacccagaggtcttcctggttcccctggaaatatcggccccgctggaaaagaaggtcctgtcggcctccctggcatcgacggcaggcctggcccaattggcccagctggagcaagaggagagcctggcaacattggattccctggacccaaaggccccactggtgatcctggcaaaaacggtgataaaggtcatgctggtcttgctggtgctcggggtgctccaggtcctgatggaaacaatggtgctcagggacctcctggaccacagggtgttcaaggtggaaaaggtgaacagggtccccctggtcctccaggcttccagggtctgcctggcccctcaggtcccgctggtgaagttggcaaaccaggagaaaggggtctccatggtgagtttggtctccctggtcctgctggtccaagaggggaacgcggtcccccaggtgagagtggtgctgccggtcctactggtcctattggaagccgaggtccttctggacccccagggcctgatggaaacaagggtgaacctggtgtggttggtgctgtgggcactgctggtccatctggtcctagtggactcccaggagagaggggtgctgctggcatacctggaggcaagggagaaaagggtgaacctggtctcagaggtgaaattggtaaccctggcagagatggtgctcgtggtgctcctggtgctgtaggtgcccctggtcctgctggagccacaggtgaccggggcgaagctggggctgctggtcctgctggtcctgctggtcctcggggaagccctggtgaacgtggtgaggtcggtcctgctggccccaatggatttgctggtcctgctggtgctgctggtcaacctggtgctaaaggagaaagaggagccaaagggcctaagggtgaaaacggtgttgttggtcccacaggccccgttggagctgctggcccagctggtccaaatggtccccccggtcctgctggaagtcgtggtgatggaggcccccctggtatgactggtttccctggtgctgctggacggactggtcccccaggaccctctggtatttctggccctcctggtccccctggtcctgctgggaaagaagggcttcgtggtcctcgtggtgaccaaggtccagttggccgaactggagaagtaggtgcagttggtccccctggcttcgctggtgagaagggtccctctggagaggctggtactgctggacctcctggcactccaggtcctcagggtcttcttggtgctcctggtattctgggtctccctggctcgagaggtgaacgtggtctaccaggtgttgctggtgctgtgggtgaacctggtcctcttggcattgccggccctcctggggcccgtggtcctcctggtgctgtgggtagtcctggagtcaacggtgctcctggtgaagctggtcgtgatggcaaccctgggaacgatggtcccccaggtcgcgatggtcaacccggacacaagggagagcgcggttaccctggcaatattggtcccgttggtgctgcaggtgcacctggtcctcatggccccgtgggtcctgctggcaaacatggaaaccgtggtgaaactggtccttctggtcctgttggtcctgctggtgctgttggcccaagaggtcctagtggcccacaaggcattcgtggcgataagggagagcccggtgaaaaggggcccagaggtcttcctggcttaaagggacacaatggattgcaaggtctgcctggtatcgctggtcaccatggtgatcaaggtgctcctggctccgtgggtcctgctggtcctaggggccctgctggtccttctggccctgctggaaaagatggtcgcactggacatcctggtacagttggacctgctggcattcgaggccctcagggtcaccaaggccctgctggcccccctggtccccctggccctcctggacctccaggtgtaagcggtggtggttatgactttggttacgatggagacttctacagggctgaccagcctcgctcagcaccttctctcagacccaaggactatgaagttgatgctactctgaagtctctcaacaaccagattgagacccttcttactcctgaaggctctagaaagaacccagctcgcacatgccgtgacttgagactcagccacccagagtggagcagtggttactactggattgaccctaaccaaggatgcactatggatgctatcaaagtatactgtgatttctctactggcgaaacctgtatccgggcccaacctgaaaacatcccagccaagaactggtataggagctccaaggacaagaaacacgtctggctaggagaaactatcaatgctggcagccagtttgaatataatgtagaaggagtgacttccaaggaaatggctacccaacttgccttcatgcgcctgctggccaactatgcctctcagaacatcacctaccactgcaagaacagcattgcatacatggatgaggagactggcaacctgaaaaaggctgtcattctacagggctctaatgatgttgaacttgttgctgagggcaacagcaggttcacttacactgttcttgtagatggctgctctaaaaagacaaatgaatggggaaagacaatcattgaatacaaaacaaataagccatcacgcctgcccttccttgatattgcacctttggacatcggtggtgctgaccaggaattctttgtggacattggcccagtctgtttcaaataaatgaactcaatctaaattaaaaaagaaagaaatttgaaaaaactttctctttgccatttcttcttcttcttttttaactgaaagctgaatccttccatttcttctgcacatctacttgcttaaattgtgggcaaaagagaaaaagaaggattgatcagagcattgtgcaatacagtttcattaactccttcccccgctcccccaaaaatttgaatttttttttcaacactcttacacctgttatggaaaatgtcaacctttgtaagaaaaccaaaataaaaattgaaaaataaaaaccataaacatttgcaccacttgtggcttttgaatatcttccacagagggaagtttaaaacccaaacttccaaaggtttaaactacctcaaaacactttcccatgagtgtgatccacattgttaggtgctgacctagacagagatgaactgaggtccttgttttgttttgttcataatacaaaggtgctaattaatagtatttcagatacttgaagaatgttgatggtgctagaagaatttgagaagaaatactcctgtattgagttgtatcgtgtggtgtattttttaaaaaatttgatttagcattcatattttccatcttattcccaattaaaagtatgcagattatttgcccaaatcttcttcagattcagcatttgttctttgccagtctcattttcatcttcttccatggttccacagaagctttgtttcttgggcaagcagaaaaattaaattgtacctattttgtatatgtgagatgtttaaataaattgtgaaaaaaatgaaataaagcatgtttggttttccaaaagaacatat

SEQ ID NO: 12124 - DNA, 4755 bp, Homo sapiens
gctgctctcgttcgcttggctcagctcagctcagctcagcgcagctccgcggccgccaagccgaggcgggcacggtctccgagtcgcggacgccagctccgagctccctctctccgccgcgcctccgccaggtcgcgccttcgtcgggaccacttcgggcaggagtcgcgtggcgaaggcctgcggccgcggcacaaagttgggggccgcgaagatgaggctgtccccggcgcccctgaagctgagccggactccggcactgctggccctggcgctgcccctggccgcggcgctggccttctccgacgagaccctggacaaagtgcccaagtcagagggctactgcagccgtatcctgcgcgcccagggcacgcggcgcgagggctacaccgagttcagcctccgcgtggagggcgaccccgacttctacaagccgggaaccagctaccgcgtaacactttcagctgctcctccctcctacttcagaggattcacattaattgccctcagagagaacagagagggtgataaggaagaagaccatgctgggaccttccagatcatagacgaagaagaaactcagtttatgagcaattgccctgttgcagtcactgaaagcactccacggaggaggacccggatccaggtgttttggatagcaccaccagcgggaacaggctgcgtgattctgaaggccagcatcgtacaaaaacgcattatttattttcaagatgagggctctctgaccaagaaactttgtgaacaagattccacatttgatggggtgactgacaaacccatcttagactgctgtgcctgcggaactgccaagtacagactcacattttatgggaattggtccgagaagacacacccaaaggattaccctcgtcgggccaaccactggtctgcgatcatcggaggatcccactccaagaattatgtactgtgggaatatggaggatatgccagcgaaggcgtcaaacaagttgcagaattgggctcacccgtgaaaatggaggaagaaattcgacaacagagtgatgaggtcctcaccgtcatcaaagccaaagcccagtggccagcctggcagcctctcaacgtgagagcagcaccttcagctgaattttccgtggacagaacgcgccatttaatgtccttcctgaccatgatgggccctagtcccgactggaacgtaggcttatctgcagaagatctgtgcaccaaggaatgtggctgggtccagaaggtggtgcaagacctgattccctgggacgctggcaccgacagcggggtgacctatgagtcacccaacaaacccaccattccccaggagaaaatccggcccctgaccagcctggaccatcctcagagtcctttctatgacccagagggtgggtccatcactcaagtagccagagttgtcatcgagagaatcgcacggaagggtgaacaatgcaatattgtacctgacaatgtcgatgatattgtagctgacctggctccagaagagaaagatgaagatgacacccctgaaacctgcatctactccaactggtccccatggtccgcctgcagctcctccacctgtgacaaaggcaagaggatgcgacagcgcatgctgaaagcacagctggacctcagcgtcccctgccctgacacccaggacttccagccctgcatgggccctggctgcagtgacgaagacggccccacctgcaccatgtccgagtggatcacctggtcgccctgcagcatctcctgcggcatgggcatgaggtcccgggagaggtatgtgaagcagttcccggaggacggctccgtgtgcacgctgcccactgaggaaacggagaagtgcacggtcaacgaggagtgctctcccagcagctgcctgatgaccgagtggggcgagtgggacgagtacagcgccacctgcggcatgggcatgaagaagcggcaccgcatgatcaagatgaaccccgcagatggctccatgtgcaaagccgagacatcacaggcagagaagcgcatgatgccagagtgccacaccatcccatgcttgctgtccccatggtccgagtggagtgactgcagcgtgacctgcgggaagggcatgcgaacccgacagcggatgctcaagtctctggcagaacttggagactgcaatgaggatctggagcaggtggagaagtgcatgctccctgaatgccccattgactgtgagctcaccgagtggtcccagtggtcggaatgtaacaagtcatgtgggaaaggccacgtgattcgaacccggatgatccaaatggagcctcagtttggaggtgcaccctgcccagagactgtgcagcgaaaaaagtgccgcatccgaaaatgccttcgaaatccatccatccaaaagctacgctggagggaggcccgagagagccggcggagtgagcagctgaaggaagagtctgaaggggagcagttcccaggttgtaggatgcgcccatggacggcctggtcagaatgcaccaaactgtgcggaggtggaattcaggaacgttacatgactgtaaagaagagattcaaaagctcccagtttaccagctgcaaagacaagaaggagatcagagcatgcaatgttcatccttgttagcaagggtacgagttccccagggctgcactctagattccagagtcaccaatggctggattatttgcttgtttaagacaatttaaattgtgtacgctagttttcatttttgcagtgtggttcgcccagtagtcttgtggatgccagagacatcctttctgaatacttcttgatgggtacaggctgagtggggcgccctcacctccagccagcctcttcctgcagaggagtagtgtcagccaccttgtactaagctgaaacatgtccctctggagcttccacctggccagggaggacggagactttgacctactccacatggagaggcaaccatgtctggaagtgactatgcctgagtcccagggtgcggcaggtaggaaacattcacagatgaagacagcagattccccacattctcatctttggcctgttcaatgaaaccattgtttgcccatctcttcttagtggaactttaggtctcttttcaagtctcctcagtcatcaatagttcctggggaaaaacagagctggtagacttgaagaggagcattgatgttgggtggcttttgttctttcactgagaaattcggaatacatttgtctcacccctgatattggttcctgatgcccccccaacaaaaataaataaataaattatggctgctttatttaaatataaggtagctagtttttacacctgagataaataataagcttagagtgtatttttcccttgcttttgggggttcagaggagtatgtacaattcttctgggaagccagccttctgaactttttggtactaaatccttattggaaccaagacaaaggaagcaaaattggtctctttagagaccaatttgcctaaattttaaaatcttcctacacacatctagacgttcaagtttgcaaatcagtttttagcaagaaaacatttttgctatacaaacattttgctaagtctgcccaaagcccccccaatgcattccttcaacaaaatacaatctctgtactttaaagttattttagtcatgaaattttatatgcagagagaaaaagttaccgagacagaaaacaaatctaagggaaaggaatattatgggattaagctgagcaagcaattctggtggaaagtcaaacctgtcagtgctccacaccagggctgtggtcctcccagacatgcataggaatggccacaggtttacactgccttcccagcaattataagcacaccagattcagggagactgaccaccaagggatagtgtaaaaggacattttctcagttgggtccatcagcagtttttcttcctgcatttattgttgaaaactattgtttcatttcttcttttataggccttattactgcttaatccaaatgtgtaccattggtgagacacatacaatgctctgaatacactacgaatttgtattaaacacatcagaatatttccaaatacaacatagtatagtcctgaatatgtacttttaacacaagagagactattcaataaaaactcactgggtctttcatgtctttaagctaagtaagtgttcagaaggttcttttttatattgtcctccacctccatcattttcaataaaagatagggcttttgctcccttgttcttggagggaccattattacatctctgaactacctttgtatccaacatgttttaaatccttaaatgaattgctttctcccaaaaaaagcacagtataaagaaacacaagatttaattatttttctacttggggggaaaaaagtcctcatgtagaagcacccacttttgcaatgttgttctaagctatctatctaactctcagcccatgataaagttccttaagctggtgattcctaatcaaggacaagccaccctagtgtctcatgtttgtatttggtcccagttgggtacattttaaaatcctgattttggagacttaaaaccaggttaatggctaagaatgggtaacatgactcttgttggattgttattttttgtttgcaatggggaatttataagaagcatcaagtctctttcttaccaaagtcttgttaggtggtttatagttcttttggctaacaaatcattttggaaataaagattttttactac

SEQ ID NO: 12125 - DNA, 3516 bp, Homo sapiens
tcgagggtgcgatggcgcggacgcgggaccgcgtacgcctgctgcttctcctgatctgctttaacgttggaagtggacttcacttacaggtcttaagcacaagaaatgaaaataagctgcttcctaaacatcctcatttagtgcggcaaaagcgcgcctggatcaccgcccccgtggctcttcgggagggagaggatctgtccaagaagaatccaattgccaagatacattctgatcttgcagaagaaagaggactcaaaattacttacaaatacactggaaaagggattacagagccaccttttggtatatttgtctttaacaaagatactggagaactgaatgttaccagcattcttgatcgagaagaaacaccattttttctgctaacaggttacgctttggatgcaagaggaaacaatgtagagaaacccttagagctacgcattaaggttcttgatatcaatgacaacgaaccagtgttcacacaggatgtctttgttgggtctgttgaagagttgagtgcagcacatactcttgtgatgaaaatcaatgcaacagatgcagatgagcccaataccctgaattcgaaaatttcctatagaatcgtatctctggagcctgcttatcctccagtgttctacctaaataaagatacaggagagatttatacaaccagtgttaccttggacagagaggaacacagcagctacactttgacagtagaagcaagagatggcaatggagaagttacagacaaacctgtaaaacaagctcaagttcagattcgtattttggatgtcaatgacaatatacctgtagtagaaaataaagtgcttgaagggatggttgaagaaaatcaagtcaatgtagaagttacgcgcataaaagtgttcgatgcagatgaaataggttctgataattggctggcaaattttacatttgcatcaggaaatgaaggaggttatttccacatagaaacagatgctcaaactaacgaaggaattgtgacccttattaaggaagtagattatgaagaaatgaagaatcttgacttcagtgttattgtcgctaataaagcagcttttcacaagtcgattaggagtaaatacaagcctacacccattcccatcaaggtcaaagtgaaaaatgtgaaagaaggcattcattttaaaagcagcgtcatctcaatttatgttagcgagagcatggatagatcaagcaaaggccaaataattggaaattttcaagcttttgatgaggacactggactaccagcccatgcaagatatgtaaaattagaagatagagataattggatctctgtggattctgtcacatctgaaattaaacttgcaaaacttcctgattttgaatctagatatgttcaaaatggcacatacactgtaaagattgtggccatatcagaagattatcctagaaaaaccatcactggcacagtccttatcaatgttgaagacatcaacgacaactgtcccacactgatagagcctgtgcagacaatctgtcacgatgcagagtatgtgaatgttactgcagaggacctggatggacacccaaacagtggccctttcagtttctccgtcattgacaaaccacctggcatggcagaaaaatggaaaatagcacgccaagaaagtaccagtgtgctgctgcaacaaagtgagaaaaagcttgggagaagtgaaattcagttcctgatttcagacaatcagggttttagttgtcctgaaaagcaggtccttacactcacagtttgtgaggttctgcatggcagcggctgcagggaagcacagcatgactcctatgtgggcctgggacccgcagcaattgcgctcatgattttggcctttctgctcctgctattggtaccacttttactgctgatgtgccattgcggaaagggcgccaaagcgtttacccccatacctggcaccatagagatgctgcatccttggaataatgaaggagcaccacctgaagacaaggtggtgccatcatttctgccagtggatcaagggggcagtctagtaggaagaaatggagtaggaggtatggccaaggaagccacgatgaaaggaagtagctctgcttccattgtcaaagggcaacatgagatgtccgagatggatggaaggtgggaagaacacagaagcctgctttctggtagagctacccagtttacaggggccacaggcgctatcatgaccactgaaaccacgaagaccgcaagggccacaggggcttccagagacatggccggagctcaggcagctgctgttgcactgaacgaagaattcttaagaaattatttcactgataaagcggcctcttacactgaggaagatgaaaatcacacagccaaagattgccttctggtttattctcaggaagaaactgaatcgctgaatgcttctattggttgttgcagttttattgaaggagagctagatgaccgcttcttagatgatttgggacttaaattcaagacgctagctgaagtttgcctgggtcaaaaaatagatataaataaggaaattgagcagagacaaaaacctgccacagaaacaagtatgaacacagcttcacattcactctgtgagcaaactatggttaattcagagaatacctactcctctggcagtagcttcccagttccaaaatctttgcaagaagccaatgcagagaaagtaactcaggaaatagtcactgaaagatctgtgtcttctaggcaggcgcaaaaggtagctacacctcttcctgacccaatggcttctagaaatgtgatagcaacagaaacttcctatgtcacagggtccactatgccaccaaccactgtgatcctgggtcctagccagccacagagccttattgtgacagagagggtgtatgctccagcttctaccttggtagatcagccttatgctaatgaaggtacagttgtggtcactgaaagagtaatacagcctcatgggggtggatcgaatcctctggaaggcactcagcatcttcaagatgtaccttacgtcatggtgagggaaagagagagcttccttgcccccagctcaggtgtgcagcctactctggccatgcctaatatagcagtaggacagaatgtgacagtgacagaaagagttctagcacctgcttccactctgcaatccagttaccagattcccactgaaaattctatgacggctaggaacaccacggtgtctggagctggagtccctggccctctgccagattttggtttagaggaatctggtcattctaattctaccataaccacatcttccaccagagtcaccaagcatagcactgtacagcattcttactcctaaacagcagtcagccacaaactgacccagagtttaattagcagtgactaatttcatgtttccaatgtacctgatttttcatgagccttacagacacacagagacacatacacattgatcttaaaatttttctcagtcactgatatgcaaagga

SEQ ID NO: 12126 - DNA, 4470 bp, Homo sapiens
aattcgcagcggggcactgactttacactcgtgtgtcttctgtgtttatttatggtctgtttctggaatgtccgctcctgggactgggaccatgattttctggcgcagtgcgggtgtctcggcgtccgggatcgggcgggtcgcagtagggctccacatttgttgagtgactgaacaccgttcccggccggggagagcgccgcagccgggtccacttcaggtaggggctgggctttcccggccccgcctaggccccgcccccagcgcgaacccgctcccacctcgcctgtccacggagcagcagggggtttgactgtgcttttccctcttgcttccctcgctctttctgcagctgccacgaaaacccggaacggcggagcggcgccgcccctcgcggcacctccctggcagcccttggaggccgcgctgggcatgctcagtcagctgggccgcctcagctctcggagtaggaagctcgggcgctccggctgtaaggagccgcggcggggggaaaatggagcccttcaccaatgatcggcttcagctccccaggaatatgattgaaaacagcatgtttgaggaagaaccagatgtggtggatttagccaaagagccttgtttacatcctctagagcctgatgaggtggaatatgagccccggggttcccgactgctggtgcggggtcttggtgagcatgagatggaggaggatgaagaggattatgagtcatcagcaaagctgctgggcatgtccttcatgaatagaagctcaggccttcggaacagtgcaactggttacaggcagagcccagatggggcttgttcagtaccctctgcaaggaccatggtggtctgtgcttttgtcatcgtggttgctgtttctgtaatcatggtgatttacttactgcccagatgtacctttaccaaagaaggctgccataaaaaaaaccagtcaattggactaattcagccatttgcaacaaatgggaaattgtttccatgggcacagatcaggcttcccactgccgttgtgccactacgctatgaactcagcctacacccgaacctaacctcgatgacattcaggggttctgtgacaatttcagttcaggctcttcaggtcacatggaatatcattcttcatagcacaggtcataatatttcaagagtgacctttatgtcagcagtttcaagccaagaaaaacaagctgagatcctggaatatgcatatcatggacagatcgccattgttgcccccgaagcccttctagcagggcacaattatacgttgaagatagagtactcggcaaatatatctagttcttattatgggttttatggcttctcctacacagatgaaagtaatgagaaaaagtactttgcagcaactcagtttgaacccctggcagcaagatctgcttttccttgttttgatgaaccagcatttaaagccacttttatcatcaagatcataagggatgagcaatacaccgctttatcaaatatgcctaagaagtcatcagtcgttctagatgatggacttgttcaggatgagttttctgagagtgtgaagatgagcacttacttggttgctttcattgtgggagagatgaagaacctgagtcaggacgtaaatggaaccctggtttctatatatgctgtaccagaaaagattggtcaagttcattatgccttggaaacaactgtgaagcttcttgagttttttcaaaactactttgaaattcagtacccacttaagaaattggatttggtggctattcctgactttgaagcaggagcaatggaaaattggggtttgctcaccttccgagaggagacacttctgtatgacagtaacacttcttcaatggcggatagaaagctggtgactaaaatcattgctcatgagctggcccaccagtggtttggcaatctggtaacaatgaagtggtggaatgacctatggctaaatgaaggttttgccactttcatggagtatttctctttggaaaaaatattcaaagagctttctagttatgaagatttcttagatgctcgatttaaaaccatgaagaaagattccttaaattcatctcatccaatatcatcatctgttcagtcttcagaacaaattgaagaaatgtttgattctctttcctattttaagggatcttctctcttgttgatgttgaaaacttaccttagtgaagatgtgtttcaacatgctgttgtcctttacctgcataatcacagctatgcatctattcaaagtgatgatctgtgggatagttttaatgaggtcacaaaccaaacactagatgtaaagagaatgatgaaaacctggaccctgcagaaaggatttcctttagtgactgttcaaaagaaaggaaaggaactttttatacaacaagagagattctttttaaatatgaagcctgaaattcagccttcagatacaagctacctgtggcatattccactatcctatgtcactgaaggaagaaattattcaaaatatcaatcggtatcattactggataagaaatcaggtgtcatcaatcttacagaagaagtgctgtgggtcaaagtgaatataaacatgaatggttattatattgtacactatgcagatgatgattgggaagcactaatccatcagttgaaaataaatccttatgttctgagtgacaaagaccgagccaaccttatcaacaacatctttgaacttgcaggcctaggcaaggtacctctcaagagggcctttgatttgattaattatcttggaaatgagaaccatactgcacccatcaccgaagccctgtttcagacagacctcatctataacctccttgaaaaactgggatacatggatctggcctcaagactggtgactagggtatttaaattacttcaaaaccaaattcaacaacaaacttggactgatgagggcactccatctatgcgagagcttcggtcagccctgctagagtttgcttgcacccacaacctggggaactgctctactactgccatgaaactgtttgatgactggatggcatccaatggaactcaaagcctacctactgatgtcatgacaactgtgttcaaagttggagcaaaaactgacaaaggctggtcattccttttgggcaaatacatttctataggctctgaagcagagaagaacaaaatactagaagcacttgccagctcagaggatgtgcggaagctttactggttaatgaaaagtagcctgaatggagataacttccgaacacagaagctgtcttttatcattagaacagtgggtcgacattttcctggacacttactggcatgggattttgtcaaagagaactggaataagcttgtacagaagttccctctggggtcctataccatacaaaatattgttgctggatcaacttacctgttttcaacaaagacacatttatctgaggttcaggcattctttgaaaatcagtcagaggcaaccttccggcttcgttgtgtccaggaggctttggaagtcattcagttgaatatccagtggatggagaagaacctcaaaagtctcacatggtggctgtagcatgcacaaccgcacctcattttgttgcccattcagagagcttgtaagcttgggctctgccgcttttgcaaaagccaaggtaaagccaggatcgctgccaagttgtttgcactctttggagttctagttagctcagggcctgactgtatttttcatccatcttttctgaagtgtctttgggcagtatgtagttatttattacaaaattatattcacctaaatgccaaccatctacaaaaacaatgagtaatttttctactttgaagatacacagatggggacaaaaaccctgttttggaattctgttctattcctcagtatccagaaagttactgacacagtaaaacaaggaaagttctaccctaagagccgccatcacttcaggccgctggtttgtcagccatctgttgcttcttattgatagatggcattggaatgtggtacaaagttagctctgaagaatatggtaacgaagacaataaagcatgcactgtaagaactgacctcaggtgtgcagatctactttgatttggggttttgattaattctttatttttctgaaaaaaagtttaaataatgtctgtaactattgtgtttttttcctgccgaatagccaggtgctacagatttttaaaatttttgttgtattgaaaagctaaacaaggccaaaaggttaaattttttgaatatttaagactttctttttcatcttttatagcgttaccataggaaactgttccaaactgagttagctttaattataattattttattcataaatggtgatagtccccagatctgtacacctttatcactccctgccgtagatatactttaggttagtatttctacattcgtggcaagcattttggtaacac

SEQ ID NO: 12127 - DNA, 6452 bp, Homo sapiens
cgagcgagtgtcatggcggccggcgtcgagttggcaggagtaacccacggaactgaggaaagtcattagagctgagaaagaagtggcccaatctggacggtgggaattcgtgggaatgagcagaaggccctccgtagtgactgtgtcactagaggcgggcccctggtaaaattccaggccaggcctctgcgtttctaggcagaacctggagtcggccttgcctgagaacccagctttgtgttatcgtatcctgtctcgcgaaggcaggcgttcaaggatatttggtcggatcgcccggcggcgctaaacgttttcttttttccgagcggaccgggtcgttctctaaactcgccgcgatgtcgtcctggcttgggggcctcggctccggattgggccagtctctgggtcaagtcgggggcagcctggcttccctcactggccagatatcaaactttacaaaggatatgctgatggagggcacggaggaagtggaagcagaattacctgattctaggacaaaggaaattgaagccattcatgcaatcttgagatcagagaatgaaaggcttaagaaactttgtactgatctagaagagaaacatgaagcatcagagattcaaataaagcagcaatctacaagttaccgaaatcaacttcaacaaaaagaggtagaaatcagccatcttaaagccagacagattgcactccaggatcagttgctgaaactgcagtcagctgctcagtcagtaccttcaggagctggtgtaccagcaaccactgcatcatcttcattcgcttatgggattagtcatcatccttcagctttccatgacgatgacatggactttggtgatataatttcatcccaacaagaaataaaccgactctcaaatgaagtttcaagacttgagtctgaagttggccattggaggcatattgctcagacttccaaagcacaaggaacagataactctgatcaaagtgaaatatgtaaactacaaaatatcattaaggaactaaaacagaaccgaagtcaggaaattgatgaccatcaacatgaaatgtcagtactgcagaatgcacaccaacagaaattgacagaaataagtcgacgacatcgagaagaattaagtgactatgaagaacgaattgaagaacttgaaaatctgttacaacaaggtggctctggagttatagaaactgatctctctaaaatctatgagatgcaaaaaactattcaagttctacaaatagaaaaagtggagtctaccaaaaaaatggaacaacttgaggataaaataaaagatataaataaaaaattatcttctgcagaaaatgacagagatattttgaggagggaacaagaacagctaaatgtggaaaagagacaaataatggaagaatgtgaaaacttgaaattggaatgtagtaaattgcagccttctgctgtgaagcaaagtgatactatgacagaaaaggaaagaattcttgcccagagtgcatcagtggaagaagtgttcagactacaacaagcactgtctgatgccgaaaatgaaataatgagattgagtagtttaaaccaggataacagtcttgctgaagacaatctgaaacttaaaatgcgtatcgaagttttagaaaaagagaagtcattactgagtcaagaaaaggaagaacttcagatgtcacttttaaaattgaacaatgaatatgaagtaattaaaagtacagctacaagagacataagtttggattcagaattacatgacttaagacttaatttggaggcaaaggaacaagaactcaatcagagtattagtgaaaaggaaacactgatagctgagatagaagaattggacagacagaatcaagaagctacaaagcacatgattttgataaaagatcagctatcaaaacaacaaaatgaaggagatagcatcatcagtaaactgaaacaagatctaaatgatgaaaaaaagagagttcatcaacttgaagatgataaaatggacattactaaagagttagatgtacagaaagaaaagctaattcaaagtgaagtggccctaaatgatttacatttaaccaagcagaaacttgaggacaaagtagaaaatttagtagatcagctaaataaatcacaagaaagtaatgtaagcatccagaaggagaatttagaacttaaggagcatattagacaaaatgaggaggagctttctagaataaggaatgagttaatgcagtctctaaatcaagactctaatagtaattttaaggataccttacttaaagaaagagaagctgaagttagaaacttaaagcaaaatctttcagaattagaacagctcaatgaaaatttaaagaaagttgcttttgatgtcaaaatggaaaatgaaaagttagttttagcatgtgaagatgtgaggcatcagttagaagaatgtcttgctggtaacaatcagctttctctggaaaaaaacactattgtggagactctaaaaatggaaaaaggagagatagaggcagaattgtgttgggctaaaaagaggctgttggaagaagcaaacaagtatgagaaaaccattgaagaactgtcaaatgcacgtaatttgaatacctctgccttacagctggaacatgagcatttaattaaactcaatcaaaagaaagacatggaaatagcagaactcaaaaagaatattgaacaaatggatactgaccataaagaaactaaggacgttttgtcatctagtttagaagagcagaagcagttgacacaacttataaacaagaaagaaatttttattgaaaagcttaaagaaagaagttcaaagctgcaggaggaattggataaatattctcaggccttaagaaaaaatgaaattttaagacagaccatagaggaaaaagaccgaagtcttggatccatgaaagaggaaaataatcatctgcaagaagaattggaacgactcagggaagagcagagtcgaaccgcacctgtggctgaccctaaaacccttgatagtgttactgaactagcatctgaggtatctcaactgaacacgatcaaggaacatcttgaagaggaaattaaacatcatcaaaagataattgaagatcaaaaccagagtaagatgcaactacttcagtctttacaagagcaaaagaaggaaatggatgagtttagataccagcatgagcaaatgaacgccacacacacccagctctttttagagaaggatgaggaaattaagagtttgcaaaaaacaattgaacaaatcaaaacccagttgcatgaagaaagacaggacattcaaacagataactctgatatttttcaagaaacaaaagttcagagccttaatatagaaaatggaagtgaaaagcatgatttatctaaagctgaaacggaaagattagtgaaaggaataaaagagcgagaactggagattaaacttctaaatgaaaagaatatatctttaactaaacagattgatcagttgtccaaagatgaagttggtaaactaactcagattattcagcagaaagatttggagatacaagctcttcatgctagaatttcttcaacttcccatactcaagatgttgtttaccttcaacagcaactgcaggcttatgctatggaaagagaaaaggtatttgctgttttgaatgagaagactagggaaaatagccatctaaaaacagaatatcacaaaatgatggatattgttgctgccaaggaagcagctcttatcaaactgcaagatgaaaataaaaaattgtccactagatttgaaagtagtggccaagatatgtttagagaaactattcagaatttatcacgtatcattcgagaaaaagacatcgaaatagatgcactaagtcagaaatgtcagactttattggcagttttacaaacatccagcactggtaatgaggctggaggtgttaatagtcatcaatttgaggagcttctacaggaacgtgacaagttaaaacagcaagtaaagaaaatggaagagtggaagcagcaggtgatgaccacagtacaaaatatgcaacacgagtcagcccagcttcaggaagagcttcaccaacttcaagcacaggttttggttgacagtgataataattctaaattacaagtggactatactggcctgatccaaagttatgagcagaatgaaaccaaactcaaaaattttgggcaggaattagcacaagttcagcacagcattgggcagctttgcaataccaaggatcttcttttaggaaaacttgatattatttcaccccagctgtcttctgcatcattgcttactccccagtctgcagagtgtcttagagcaagtaagtctgaagtattgagtgaatcttctgaattgcttcagcaagagttagaagagctaagaaaatcactacaggaaaaagatgcaacaattagaactctccaggaaaataaccacagattgtctgattcgattgctgccacctcagagctagaaagaaaagaacacgaacaaaccgattcagaaatcaagcagctaaaggagaaacaagatgttttgcaaaagttacttaaggaaaaagacctcttaatcaaagccaaaagtgatcaactactttcttccaatgaaaatttcactaacaaagtaaatgaaaacgaacttttgaggcaggcagtaacaaacctgaaggagagaatattaattctagagatggacattggcaaactaaaaggagaaaatgaaaaaatagtggaaacatacaggggaaaggaaacagaatatcaagcgttacaagagactaacatgaagttttctatgatgctgcgagaaaaagagtttgagtgccactcaatgaaggagaaggctcttgcttttgaacagctattgaaagagaaagaacagggcaagactggagagttaaatcagcttttaaatgcagttaaatcaatgcaggagaagacagttgtgtttcaacaggagagagaccaagtcatgttggccctgaaacaaaaacaaatggaaaatactgccctacagaatgaggttcaacgtttacgtgacaaagaatttcgttcaaaccaagagctagagagattgcgtaatcatcttttagaatcagaagattcttatacccgtgaagctttggctgcagaagatagagaggctaaactaagaaagaaagtcacagtattggaggaaaagctagtttcatcctctaatgcaatggaaaatgcaagccatcaagccagtgtgcaggtagagtcattgcaagaacagttgaatgtagtttccaagcaaagggatgaaactgcgctgcagctttctgtctctcaggaacaagtaaagcagtatgctctgtcactggccaacctgcagatggtactagagcatttccaacaagaggaaaaagctatgtattctgctgaactcgaaaagcaaaaacagcttatagctgaatggaagaaaaacgcagaaaatctggaaggaaaagtgatatcattacaggaatgtttggatgaagcaaatgctgcattggattcagcatcaagacttacagaacagttagatgtaaaagaagaacaaattgaagaacttaaaagacaaaatgagctccgacaagaaatgctggatgatgtacaaaagaaattgatgagcttagcaaacagctcagaaggaaaagtagacaaagtcctaatgagaaacctcttcattggtcatttccacacaccgaaaaatcagcgtcatgaagtgttacggttaatggggagcatcctgggcgtcagaagggaggagatggagcagttgtttcatgacgatcagggcagtgttaccaggtggatgactgggtggcttggaggaggatcaaaaagtgttcccaacacacctttgagaccaaatcagcaatctgtggttaatagttctttttcagaactttttgttaaatttctagaaacagaatctcatccatccattccaccaccaaagctttctgttcatgatatgaaacctctggattcaccaggaagaagaaaaagagatacaaatgcaccagaaagttttaaagatacagcagaatccaggtctggtagaagaacagatgtaaatccgtttttggctcctcgctcggcagctgtacctcttattaacccagctggacttggacctggtgggcccgggcatcttcttctgaaacccatctcagatgttttgcccacatttacacctttgccagcgttacctgacaacagtgctggggttgtgctgaaagaccttttaaagcaatagatgattctcaagccagagacaatctagcactttaaagaaaccatgaacactatatgtatgtactttatcacaaagtggcctttggggagaaagtcatgtatttgttcgcaattatgctttctctgaatttaataaaaatattcctaatgcttttag

SEQ ID NO: 12128 - DNA, 1411 bp, Homo sapiens
cgggaaacggcaaacagcgagatatccgagcgagagtcccgccctgcatcagtttgcggaaccgccttggtagaaggagagaaggggagtggaggaagcacgggactggagggaccaaagttccccgatggcggcccaggggtgcgcggcatcgcggctgctccagctgctgctgcagcttctgcttctactgttgctgctggcggcgggcggggcgcgcgcgcggtggcgcgcggagggcaccagcgcacacttgcgggacatcttcctgggccgctgcgccgagtaccgcgcactgctgagtcccgagcagcggaacaagaactgcacagccatctgggaagcctttaaagtggcgctggacaaggatccctgctccgtgctgccctcagactatgacctttttattaacttgtccaggcactctattcccagagataagtccctgttctgggaaaatagccacctccttgttaacagctttgcagacaacacccgtcgttttatgcccctgagcgatgttctgtatggcagggttgcagatttcttgagctggtgtcgacagaaaaatgactctggactcgattaccaatcctgccctacatcagaagactgtgaaaataatcctgtggattccttttggaaaagggcatccatccagtattccaaggatagttctggggtgatccacgtcatgctgaatggttcagagccaacaggagcctatcccatcaaaggtttttttgcagattatgaaattccaaacctccagaaggaaaaaattacacgaatcgagatctgggttatgcatgaaattgggggacccaatgtggaatcctgcggggaaggcagcatgaaagtcctggaaaagaggctgaaggacatggggttccagtacagctgtattaatgattaccgaccagtgaagctcttacagtgcgtggaccacagcacccatcctgactgtgccttaaagtcggcagcagccgctactcaaagaaaagccccaagtctttatacagaacaaagggcgggtcttatcattcccctctttctggtgctggcttcccggactcaactgtaactggaaactgtgttgctctaaccctcctccagccctgcagcctccccttgcagtcatcattcgtgttctgtgtataccaaatgattctgttatctaaagaagctttttgctgggaaaacgatgtcctgaaaatggtatttcaatgaggcatatgttcaggatttcagaaacaagaagttagttctatttagcaggttaaaaaatgctgcattagaattaaagcaagttattttcttatttgtataatgacacaaagcattgggagtcagactgcttgtatattatcaaacattttaagagaattctaataaagctgtattttacatc

SEQ ID NO: 12129 - DNA, 1496 bp, Homo sapiens
gctctaagcgcccggggccccgcccagtggccggcacagccaatcgcagcgcgggaaggcggtgggggcggggaaggccgcctggaaacttaaatcccgaggcgggcgaacctgcaccagaccgcggacgtctgtaatctcagaggcttgtttgctgagggtgcctgcgcagctgcgacggctgctggttttgaaacatgaatctttcgctcgtcctggctgccttttgcttgggaatagcctccgctgttccaaaatttgaccaaaatttggatacaaagtggtaccagtggaaggcaacacacagaagattatatggcgcgaatgaagaaggatggaggagagcagtgtgggaaaagaatatgaaaatgattgaactgcacaatggggaatacagccaagggaaacatggcttcacaatggccatgaatgcttttggtgacatgaccaatgaagaattcaggcagatgatgggttgctttcgaaaccagaaattcaggaaggggaaagtgttccgtgagcctctgtttcttgatcttcccaaatctgtggattggagaaagaaaggctacgtgacgccagtgaagaatcagaaacagtgtggttcttgttgggcttttagtgcgactggtgctcttgaaggacagatgttccggaaaactgggaaacttgtctcactgagcgagcagaatctggtggactgttcgcgtcctcaaggcaatcagggctgcaatggtggcttcatggctagggccttccagtatgtcaaggagaacggaggcctggactctgaggaatcctatccatatgtagcagtggatgaaatctgtaagtacagacctgagaattctgttgctaatgacactggcttcacagtggtcgcacctggaaaggagaaggccctgatgaaagcagtcgcaactgtggggcccatctccgttgctatggatgcaggccattcgtccttccagttctacaaatcaggcatttattttgaaccagactgcagcagcaaaaacctggatcatggtgttctggtggttggctacggctttgaaggagcaaattcgaataacagcaagtattggctcgtcaaaaacagctggggtccagaatggggctcgaatggctatgtaaaaatagccaaagacaagaacaaccactgtggaatcgccacagcagccagctaccccaatgtgtgagctgatggatggtgaggaggaaggacttaaggacagcatgtctggggaaattttatcttgaaactgaccaaacgcttattgtgtaagataaaccagttgaatcattgaggatccaagttgagattttaattctgtgacatttttacaagggtaaaatgttaccactactttaattattgttatacacagctttatgatatcaaagactcattgcttaattctaagacttttgaattttcattttttaaaaagatgtacaaaacagtttgaaataaattttaattcgtatataaa

SEQ ID NO: 12130 - DNA, 4624 bp, Homo sapiens
ggaggaggtggaggaggagggctgcttgaggaagtataagaatgaagttgtgaagctgagattcccctccattgggaccggagaaaccaggggagccccccgggcagccgcgcgccccttcccacggggccctttactgcgccgcgcgcccggcccccacccctcgcagcaccccgcgccccgcgccctcccagccgggtccagccggagccatggggccggagccgcagtgagcaccatggagctggcggccttgtgccgctgggggctcctcctcgccctcttgccccccggagccgcgagcacccaagtgtgcaccggcacagacatgaagctgcggctccctgccagtcccgagacccacctggacatgctccgccacctctaccagggctgccaggtggtgcagggaaacctggaactcacctacctgcccaccaatgccagcctgtccttcctgcaggatatccaggaggtgcagggctacgtgctcatcgctcacaaccaagtgaggcaggtcccactgcagaggctgcggattgtgcgaggcacccagctctttgaggacaactatgccctggccgtgctagacaatggagacccgctgaacaataccacccctgtcacaggggcctccccaggaggcctgcgggagctgcagcttcgaagcctcacagagatcttgaaaggaggggtcttgatccagcggaacccccagctctgctaccaggacacgattttgtggaaggacatcttccacaagaacaaccagctggctctcacactgatagacaccaaccgctctcgggcctgccacccctgttctccgatgtgtaagggctcccgctgctggggagagagttctgaggattgtcagagcctgacgcgcactgtctgtgccggtggctgtgcccgctgcaaggggccactgcccactgactgctgccatgagcagtgtgctgccggctgcacgggccccaagcactctgactgcctggcctgcctccacttcaaccacagtggcatctgtgagctgcactgcccagccctggtcacctacaacacagacacgtttgagtccatgcccaatcccgagggccggtatacattcggcgccagctgtgtgactgcctgtccctacaactacctttctacggacgtgggatcctgcaccctcgtctgccccctgcacaaccaagaggtgacagcagaggatggaacacagcggtgtgagaagtgcagcaagccctgtgcccgagtgtgctatggtctgggcatggagcacttgcgagaggtgagggcagttaccagtgccaatatccaggagtttgctggctgcaagaagatctttgggagcctggcatttctgccggagagctttgatggggacccagcctccaacactgccccgctccagccagagcagctccaagtgtttgagactctggaagagatcacaggttacctatacatctcagcatggccggacagcctgcctgacctcagcgtcttccagaacctgcaagtaatccggggacgaattctgcacaatggcgcctactcgctgaccctgcaagggctgggcatcagctggctggggctgcgctcactgagggaactgggcagtggactggccctcatccaccataacacccacctctgcttcgtgcacacggtgccctgggaccagctctttcggaacccgcaccaagctctgctccacactgccaaccggccagaggacgagtgtgtgggcgagggcctggcctgccaccagctgtgcgcccgagggcactgctggggtccagggcccacccagtgtgtcaactgcagccagttccttcggggccaggagtgcgtggaggaatgccgagtactgcaggggctccccagggagtatgtgaatgccaggcactgtttgccgtgccaccctgagtgtcagccccagaatggctcagtgacctgttttggaccggaggctgaccagtgtgtggcctgtgcccactataaggaccctcccttctgcgtggcccgctgccccagcggtgtgaaacctgacctctcctacatgcccatctggaagtttccagatgaggagggcgcatgccagccttgccccatcaactgcacccactcctgtgtggacctggatgacaagggctgccccgccgagcagagagccagccctctgacgtccatcatctctgcggtggttggcattctgctggtcgtggtcttgggggtggtctttgggatcctcatcaagcgacggcagcagaagatccggaagtacacgatgcggagactgctgcaggaaacggagctggtggagccgctgacacctagcggagcgatgcccaaccaggcgcagatgcggatcctgaaagagacggagctgaggaaggtgaaggtgcttggatctggcgcttttggcacagtctacaagggcatctggatccctgatggggagaatgtgaaaattccagtggccatcaaagtgttgagggaaaacacatcccccaaagccaacaaagaaatcttagacgaagcatacgtgatggctggtgtgggctccccatatgtctcccgccttctgggcatctgcctgacatccacggtgcagctggtgacacagcttatgccctatggctgcctcttagaccatgtccgggaaaaccgcggacgcctgggctcccaggacctgctgaactggtgtatgcagattgccaaggggatgagctacctggaggatgtgcggctcgtacacagggacttggccgctcggaacgtgctggtcaagagtcccaaccatgtcaaaattacagacttcgggctggctcggctgctggacattgacgagacagagtaccatgcagatgggggcaaggtgcccatcaagtggatggcgctggagtccattctccgccggcggttcacccaccagagtgatgtgtggagttatggtgtgactgtgtgggagctgatgacttttggggccaaaccttacgatgggatcccagcccgggagatccctgacctgctggaaaagggggagcggctgccccagccccccatctgcaccattgatgtctacatgatcatggtcaaatgttggatgattgactctgaatgtcggccaagattccgggagttggtgtctgaattctcccgcatggccagggacccccagcgctttgtggtcatccagaatgaggacttgggcccagccagtcccttggacagcaccttctaccgctcactgctggaggacgatgacatgggggacctggtggatgctgaggagtatctggtaccccagcagggcttcttctgtccagaccctgccccgggcgctgggggcatggtccaccacaggcaccgcagctcatctaccaggagtggcggtggggacctgacactagggctggagccctctgaagaggaggcccccaggtctccactggcaccctccgaaggggctggctccgatgtatttgatggtgacctgggaatgggggcagccaaggggctgcaaagcctccccacacatgaccccagccctctacagcggtacagtgaggaccccacagtacccctgccctctgagactgatggctacgttgcccccctgacctgcagcccccagcctgaatatgtgaaccagccagatgttcggccccagcccccttcgccccgagagggccctctgcctgctgcccgacctgctggtgccactctggaaaggcccaagactctctccccagggaagaatggggtcgtcaaagacgtttttgcctttgggggtgccgtggagaaccccgagtacttgacaccccagggaggagctgcccctcagccccaccctcctcctgccttcagcccagccttcgacaacctctattactgggaccaggacccaccagagcggggggctccacccagcaccttcaaagggacacctacggcagagaacccagagtacctgggtctggacgtgccagtgtgaaccagaaggccaagtccgcagaagccctgatgtgtcctcagggagcagggaaggcctgacttctgctggcatcaagaggtgggagggccctccgaccacttccaggggaacctgccatgccaggaacctgtcctaaggaaccttccttcctgcttgagttcccagatggctggaaggggtccagcctcgttggaagaggaacagcactggggagtctttgtggattctgaggccctgcccaatgagactctagggtccagtggatgccacagcccagcttggccctttccttccagatcctgggtactgaaagccttagggaagctggcctgagaggggaagcggccctaagggagtgtctaagaacaaaagcgacccattcagagactgtccctgaaacctagtactgccccccatgaggaaggaacagcaatggtgtcagtatccaggctttgtacagagtgcttttctgtttagtttttactttttttgttttgtttttttaaagatgaaataaagacccagggggagaatgggtgttgtatggggaggcaagtgtggggggtccttctccacacccactttgtccatttgcaaatatattttggaaaacagcta

SEQ ID NO: 12131 - DNA, 1528 bp, Homo sapiens
ggaaggcacaggcctgagaagtctgcggctgagctgggagcaaatcccccaccccctacctgggggacagggcaagtgagacctggtgagggtggctcagcaggaagggaaggagaggtgtctgtgcgtcctgcacccacatctttctctgtcccctccttgccctgtctggaggctgctagactcctatcttctgaattctatagtgcctgggtctcagcgcagtgccgatggtggcccgtccttgtggttcctctctacctggggaaataaggtgcagcggccatggctacagcaagacccccctggatgtgggtgctctgtgctctgatcacagccttgcttctgggggtcacagagcatgttctcgccaacaatgatgtttcctgtgaccacccctctaacaccgtgccctctgggagcaaccaggacctgggagctggggccggggaagacgcccggtcggatgacagcagcagccgcatcatcaatggatccgactgcgatatgcacacccagccgtggcaggccgcgctgttgctaaggcccaaccagctctactgcggggcggtgttggtgcatccacagtggctgctcacggccgcccactgcaggaagaaagttttcagagtccgtctcggccactactccctgtcaccagtttatgaatctgggcagcagatgttccagggggtcaaatccatcccccaccctggctactcccaccctggccactctaacgacctcatgctcatcaaactgaacagaagaattcgtcccactaaagatgtcagacccatcaacgtctcctctcattgtccctctgctgggacaaagtgcttggtgtctggctgggggacaaccaagagcccccaagtgcacttccctaaggtcctccagtgcttgaatatcagcgtgctaagtcagaaaaggtgcgaggatgcttacccgagacagatagatgacaccatgttctgcgccggtgacaaagcaggtagagactcctgccagggtgattctggggggcctgtggtctgcaatggctccctgcagggactcgtgtcctggggagattacccttgtgcccggcccaacagaccgggtgtctacacgaacctctgcaagttcaccaagtggatccaggaaaccatccaggccaactcctgagtcatcccaggactcagcacaccggcatccccacctgctgcagggacagccctgacactcctttcagaccctcattccttcccagagatgttgagaatgttcatctctccagcccctgaccccatgtctcctggactcagggtctgcttcccccacattgggctgaccgtgtctctctagttgaaccctgggaacaatttccaaaactgtccagggcgggggttgcgtctcaatctccctggggcactttcatcctcaagctcagggcccatcccttctctgcagctctgacccaaatttagtcccagaaataaactgagaagtggaaaaaaaaaaaaaaaaaaaaaaaaaaaaaaaaaaa

SEQ ID NO: 12132 - DNA, 2739 bp, Homo sapiens
tgccgcttaataccatcacatgatcctccccgaggccctgtatttaattaaaatagagagggaggcaccacagatgccagaagaacactgttgctcttggtggacgggcccagaggaattcagagttaaaccttgagtgcctgcgtccgtgagaattcagcatggaatgtctctactatttcctgggatttctgctcctggctgcaagattgccacttgatgccgccaaacgatttcatgatgtgctgggcaatgaaagaccttctgcttacatgagggagcacaatcaattaaatggctggtcttctgatgaaaatgactggaatgaaaaactctacccagtgtggaagcggggagacatgaggtggaaaaactcctggaagggaggccgtgtgcaggcggtcctgaccagtgactcaccagccctcgtgggctcaaatataacatttgcggtgaacctgatattccctagatgccaaaaggaagatgccaatggcaacatagtctatgagaagaactgcagaaatgaggctggtttatctgctgatccgtatgtttacaactggacagcatggtcagaggacagtgacggggaaaatggcaccggccaaagccatcataacgtcttccctgatgggaaaccttttcctcaccaccccggatggagaagatggaatttcatctacgtcttccacacacttggtcagtatttccagaaattgggacgatgttcagtgagagtttctgtgaacacagccaatgtgacacttgggcctcaactcatggaagtgactgtctacagaagacatggacgggcatatgttcccatcgcacaagtgaaagatgtgtacgtggtaacagatcagattcctgtgtttgtgactatgttccagaagaacgatcgaaattcatccgacgaaaccttcctcaaagatctccccattatgtttgatgtcctgattcatgatcctagccacttcctcaattattctaccattaactacaagtggagcttcggggataatactggcctgtttgtttccaccaatcatactgtgaatcacacgtatgtgctcaatggaaccttcagccttaacctcactgtgaaagctgcagcaccaggaccttgtccgccaccgccaccaccacccagaccttcaaaacccaccccttctttaggacctgctggtgacaaccccctggagctgagtaggattcctgatgaaaactgccagattaacagatatggccactttcaagccaccatcacaattgtagagggaatcttagaggttaacatcatccagatgacagacgtcctgatgccggtgccatggcctgaaagctccctaatagactttgtcgtgacctgccaagggagcattcccacggaggtctgtaccatcatttctgaccccacctgcgagatcacccagaacacagtctgcagccctgtggatgtggatgagatgtgtctgctgactgtgagacgaaccttcaatgggtctgggacgtactgtgtgaacctcaccctgggggatgacacaagcctggctctcacgagcaccctgatttctgttcctgacagagacccagcctcgcctttaaggatggcaaacagtgccctgatctccgttggctgcttggccatatttgtcactgtgatctccctcttggtgtacaaaaaacacaaggaatacaacccaatagaaaatagtcctgggaatgtggtcagaagcaaaggcctgagtgtctttctcaaccgtgcaaaagccgtgttcttcccgggaaaccaggaaaaggatccgctactcaaaaaccaagaatttaaaggagtttcttaaatttcgaccttgtttctgaagctcacttttcagtgccattgatgtgagatgtgctggagtggctattaacctttttttcctaaagattattgttaaatagatattgtggtttggggaagttgaattttttataggttaaatgtcattttagagatggggagagggattatactgcaggcagcttcagccatgttgtgaaactgataaaagcaacttagcaaggcttcttttcattattttttatgtttcacttataaagtcttaggtaactagtaggatagaaacactgtgtcccgagagtaaggagagaagctactattgattagagcctaacccaggttaactgcaagaagaggcgggatactttcagctttccatgtaactgtatgcataaagccaatgtagtccagtttctaagatcatgttccaagctaactgaatcccacttcaatacacactcatgaactcctgatggaacaataacaggcccaagcctgtggtatgatgtgcacacttgctagactcagaaaaaatactactctcataaatgggtgggagtattttggtgacaacctactttgcttggctgagtgaaggaatgatattcatatattcatttattccatggacatttagttagtgctttttatataccaggcatgatgctgagtgacactcttgtgtatatttccaaatttttgtacagtcgctgcacatatttgaaatcatatattaagactttccaaagatgaggtccctggtttttcatggcaacttgatcagtaaggatttcacctctgtttgtaactaaaaccatctactatatgttagacatgacattctttttctctccttcctgaaaaataaagtgtgggaagagacaagaaaaaaaaaa

SEQ ID NO: 12133 - DNA, 8439 bp, Homo sapiens
cgcactctccgtccccgcggctggcgcaggacctcactcgagcggagcgcccacggggagcgggtcgcggggcggcggcggcgaggaggaggcgagaaggagttggaggaggaggaggaggaggcgagggcgagctagcccagcggggtcccggccgccccgcgggccaaagtcgagccctcccgcccgtgggcgagcgcgccagccgccccttccagaacagccgccgccacaaagaagaacggggggtgccgaggtccccatgacctcctaaagtggtgcggtccctgctgagtgcgctgcccgggccgtgacccgcgcccctgtgcgtccccgcgcgcctccgagcgcccctgtgcgccccggcccgcgccccgccggcatggacgtccatacccgctggaaagcgcgcagcgcgctccgcccgggcgccccgctgctgcccccgctgctgctgctgctgctgtgggcgccgcctccgagccgcgcagctcagccagcagatctcctgaaggttctagattttcacaacttgcctgatggaataacaaagacaacaggcttttgcgccacgcggcgatcttccaaaggcccggatgtcgcttacagagtcaccaaagacgcgcagctcagcgcacccaccaagcagctgtaccctgcgtctgcatttcccgaggacttctccatcctaacaactgtgaaagccaagaaaggcagccaggccttcctggtctccatctacaacgagcagggtatccagcagattgggctggagctgggccgctctcccgtcttcctctacgaggaccacacggggaagcctggcccggaagactaccccctcttccggggcatcaacctgtcagatggcaagtggcacagaattgctctcagcgtccacaagaaaaatgtcaccttgatcctcgactgtaaaaagaagaccaccaaattcctcgaccgcagcgaccaccccatgatcgacatcaatggcatcatcgtgtttggcacccggatcctggatgaggaggtgtttgagggtgacatccagcagctgctctttgtctcggaccaccgggcagcttatgattactgtgagcactacagccctgactgtgacaccgcagtacctgacaccccacagtcgcaggaccccaatccagatgaatattacacggaaggagacggcgagggtgagacctattactacgaatacccctactacgaagaccccgaagacctagggaaggagcccacccccagcaagaagcccgtggaagctgccaaagaaaccacagaggtccccgaggagctgaccccgacccccacggaagctgctcccatgcctgaaaccagtgaaggggctgggaaggaagaggacgtcggcatcggggactatgactacgtgcccagtgaggactactacacgccctcaccgtatgatgacctcacctatggcgagggggaggagaaccccgaccagcccacagacccaggcgctggggccgaaattcccaccagcaccgccgacacctccaactcctccaatccagctccgcctccaggggaaggtgcggatgacttggagggggagttcactgaggaaacgatccggaaccttgacgagaactactacgacccctactacgaccccaccagctccccgtcggagatcgggccgggaatgccggcgaaccaggataccatctatgaagggattggaggacctcggggcgagaaaggccaaaagggagaaccagcgattatcgagccgggcatgctcatcgagggcccgcctggcccagaaggccccgcgggtcttcccggacctccaggaaccatgggtcccactggccaagtcggggaccctggagaaaggggcccccctggacgcccaggccttcctggggccgatggcctgcccggtcctccaggaaccatgctcatgctgcccttccggtttggaggtggcggcgatgcgggctccaaaggccccatggtctcagcccaggagtcccaggcgcaagccattctccagcaggccaggttggcactgaggggaccagctggcccgatgggtctcacagggagacctggccctgtgggtccccctgggagcggaggtttgaagggcgagccgggagacgtggggcctcagggtcctcgaggtgtgcaaggcccgcctggtccggccgggaagcccggaagacggggtcgggctgggagtgatggagccagaggaatgcctggacaaactggccccaagggtgaccggggtttcgacggcctggctgggttgccaggcgagaagggccacaggggtgaccctggtccttccggcccaccaggacctccgggagacgatggagaaaggggtgacgacggagaagttgggcccagggggctgcctggggagcccgggccacgtggtctgcttgggccgaaggggcccccaggtcctcccggacctcccggtgtcacgggtatggacggccagccggggccaaaaggaaatgtgggtccccagggagagcctggccccccaggacagcagggtaatccaggcgcccagggtcttccaggcccccagggtgcaattggtcctccaggagaaaagggtcccttggggaaaccaggccttccaggaatgcccggtgctgacggacccccgggacaccctggcaaagaaggccctccaggagagaaaggaggtcagggtccacctggcccccagggtccgattggctacccaggtcctcgaggagtcaagggggccgatggcatccgtggtctgaagggcacaaagggcgagaagggtgaagacggctttcctgggtttaaaggagacatgggcatcaagggtgatcggggggagatcggcccacccggtcccaggggagaagatggccctgaaggcccaaagggtcgcggaggtcccaatggtgaccccggtcctctgggaccccctggggagaagggaaaactcggagtcccagggttaccagggtatccaggaagacaaggaccaaagggctctattggattccctggatttcctggcgccaatggagagaagggcggcagggggacccctggaaagccaggaccgcgggggcagcgaggcccaacgggtccgaggggtgaaagaggcccccggggcatcactgggaagcctggccccaagggcaactccggaggtgacggcccagctggccctcctggtgaacggggacccaatggaccccaaggacccacaggatttcctggaccaaagggcccccctggccctccaggcaaggatggactcccaggacaccctggacagagaggcgagactggtttccaaggcaagaccggccctccaggcccccccggcgtggtcggccctcagggtcccacgggagaaacgggcccaatgggtgagcgtggccaccctgggccccctggaccccccggtgaacaggggcttccgggccttgctggaaaagaagggacgaagggtgacccaggccctgcaggcctccctgggaaagatggccctccaggattacgtggtttccctggggaccgagggcttcctggtccagtgggagctcttggactgaaaggcaatgaagggccccctggcccaccaggccctgcgggatctccaggggagagaggtccagctggagccgctgggcccatcggaattccagggagacctgggccccagggacccccagggccggcaggagagaaaggggctcctggcgagaaaggcccacaaggcccagctggccgagacggtctccaggggcctgtggggctcccgggtccagctggccctgtgggtccccctggagaagacggagataagggagagatcggggagccggggcagaaaggaagcaagggggacaaaggagaacagggtcctcctgggcctacaggtcctcaaggccccatcggacagccaggcccctctggagctgacggcgagccggggcctcggggccagcagggccttttcgggcagaaaggtgatgaaggtcccagaggctttcctggaccccctgggccagtggggctgcagggtttgccaggacctccaggcgagaagggtgagacaggagacgtgggccagatgggccccccgggtccccctggcccccgaggaccctccggagctccaggtgctgatggcccacaaggtcccccaggtggaataggaaaccctggtgcagtgggagagaagggcgagcctggcgaagcaggtgagcctggccttccgggagaaggcggccccccgggacccaaaggagaaaggggagagaagggcgagtcaggcccttcaggtgctgccggaccccctggacccaaaggccctcccggagatgatggtcccaaaggcagccctggcccagtgggttttcctggagatcctggcccccccggagagcctggccccgcgggtcaagatggtccccctggtgacaaaggagatgatggtgaacccgggcagacgggatcccccggccctactggtgaaccaggtccatcggggcctccaggaaaaaggggtcccccaggccccgcaggccccgaaggcagacagggagagaaaggggccaagggagaagccggcttggaaggccctcctgggaagactggccccatcggcccccagggggcccctgggaagcccggaccggatggccttcgagggatccctggccctgtgggagaacaaggtctcccaggatccccaggcccggacggtccccccggccccatgggtcccccaggacttcccggcctcaaaggagattctggtcccaaaggtgaaaagggtcatccaggcctgatcgggctcatcggtcctccgggtgaacagggtgagaagggcgaccgtggtctccctggcccccagggctcctccggtcctaagggagaacagggtatcactggtccttctggcccgattgggcctcctgggccccctggcctgccgggtccgcctggtccaaaaggtgctaagggctcctcgggtccaactggcccgaagggtgaggcaggccacccaggacccccaggccccccgggccccccgggagaggtcatccagcccctgccaatccaggcatccaggacgcggcggaacatcgacgccagccagctgctggacgacgggaatggcgagaactacgtggactacgcggacggcatggaagagatcttcggctctctcaactctctgaagctggagattgagcagatgaaacggcccctgggcacgcagcagaaccccgcccgcacctgcaaggacctgcagctctgccaccccgacttcccagatggtgaatactgggtcgatcctaaccaaggatgctccagggattccttcaaggtttactgcaacttcacagccggggggtcgacatgcgtcttccctgacaagaagtccgaaggggccagaatcacttcttggcccaaagaaaacccgggctcctggttcagtgaattcaagcgtgggaaactgctctcctatgtggacgccgagggcaaccctgtgggtgtggtacagatgaccttcctgcggctgctgagcgcctctgcccaccagaacgtcacctaccactgctaccagtcagtggcctggcaggacgcagccacgggcagctacgacaaggccctccgcttcctgggctccaacgacgaggagatgtcctatgacaacaacccctacatccgcgccctggtggacggctgtgctaccaagaaaggctaccagaagacggttctggagatcgacacccccaaagtggagcaggtgcccatcgtggacatcatgttcaatgacttcggtgaagcgtcacagaaatttggatttgaagtggggccggcttgcttcatgggctaggagccgccgagcccgggctcccgagagcaacctcgtgacctcagcatgccattcgttcgtgagtgtcccgtgcacgtcctgaccctggacagtgaaggcttctccctcccctcccacctgacttcatctacgcctcggcaccacggggtgtgggaccccagcccggagagaacagagggaaggagccgcgcccccacctggagctgaatcacatgacctagctgcaccccagcgcctgggcccgccccacgctctgtccacacccacgcgccccgggagcggggccatgcctccagccccccagctcgcccgacccatcctgttcgtgaataggtctcaggggttgggggagggactgccagatttggacactatatttttttctaaattcaacttgaagatgtgtatttcccctgaccttcaaaaaatgttccaaggtaagcctcgtaaaggtcatcccaccatcaccaaagcctccgtttttaacaacctccaacacgatccatttagaggccaaatgtcattctgcaggtgccttcccgatggattaaaggtgcttatgtttttgtgagttttaagtaaatatttgtattgtattgttataaatgttaagtgtgcctggctttcaatcatgcacggaaacccagtctcagtcccacggacagaatgggcgaggcatggattctgggttgcagtaccgttctgattagaaataggaagtctccccacccccgccctggccaagaacgtgcaataaattggaagtttgccccggggcagcaagaatttatgctgccattgaaaagcaggtaccagtgccccttttcagacagtttttgattcgctctagactttttttttttttaatagggaaaaaatttgataattttcttttttctacatgcacttaagactaaaacacaggtttggattaattttatttgcttcctttttccgcttttcttcccgcagagcctgatgggagaatgtccagggcagggaaaccacattttttgtaggtgataactcaatgaaaattggtgcttattttttacacttctctcttgtggctctcttgtggtgctatctatctgttttaaggtctccttgaaggcgcactggggaccctggccatgcctcgttctccctgctttctttatcctgttattgcctccacagtctgttgccaaggactctaagatcaatgcacgtcactttcctttccactgggcaggatagccaagcacactccctcctgcgctctcccgccccggtgcgtccactcccgagggctgttatgaggactgggttgtgcctacttgatttgaaaacacacacaagcaataaaaagcctcttcctgcattgtctgtggtgtgaccatagcagattatatttggttcctgaatgtttgtggtgctaatttctgtgtttgttccaagccgttcagtcatgccatgcgctgcctcggtagatggagtaatgtacaatgaactccatgagtctctccagggctgcctgcagcacgtcttttccaagtagcctatttggattcccatctcaaatgtcctggatgcgagcgtcagcggctccagagctcggggcgggtgaggtcccctttggggaaccctttcctggccatcgaggtcggggggctgccgtctgtgggcaggaggacccgaggggcagccaggaaaggcgatctcttcactgtgaaaagttgcccgggtgcagcgccttttccttctaccatgggaaatgcaggctgggcccttggggtgagcctgcggggctctggtgctgtccccgacccccaccaccaccagaatgcagttccagcttaggaagccacaaacaagccacccaggaggaacaaaacaccgccagcgtggattttccaaatttccctggaaagtaagtctcgctcttgccaaagaaaagtctggcttggagagtctctggagcccaggatgccagcatgtgccaatgactgtcaccttcatctcttcaaaagaaaagccatagccgaggactgtcccgcgacccccgtggactgcgtctaggtcatgtgattctgttttcatttctcatcccatccaatttgtccttttctcctgtcattttcttcctctgtggtcccttcaaagttgttataatttgtactgaacttcaaaatgtgtcccgttctccccagaccactctagccacagtatattgcaataaaattacttcttatatttgcagaaattcttttggtgtaattttattttttcctctcaatatatataattggacaaacgctggcaaaaagaaaaaaatggtaagcaaaaaacccaagataaagtttcgaggacatcaggccttttgaaatacaatgtcaaatgacacattgtacggtttcaaaaaatccgctagacatgtcataagttttaactgtaatgcccaggaaaggatatcttaaaatattctaaacttgtgtaacaaaggaataattaactgtaatagtttttcaataaatcgagttgggtgtttccaccgtaaa

SEQ ID NO: 12134 - DNA, 3201 bp, Homo sapiens
gcctcggagccactgcactgctggctgcagacacaggctgcaccatgaagccagccctcctgccctgggccctgctgctgctggcgacagccctcggcccgggccccggacccacagcagatgcccaagagagctgctccatgcgctgtggcgccctggacgggccatgttcctgccacccgacgtgctctggccttggcacctgctgcttggatttccgggacttctgcctggagatattgccctactcaggatccatgatgggcggcaaggactttgtggtgcggcacttcaagatgtccagccccacagacgccagtgtgatctgcaggtttaaggacagcatccagaccctcggccatgtggactcctccgggcaagtgcactgtgtgtcacctctgctctatgagagcggccgcatccccttcactgtgtcactggacaacggccactccttccctcgtgcgggcacctggctggctgtgcaccccaacaaagtgtcaatgatggagaagagcgagttggtgaacgagacgcgttggcaatactacggcaccgccaacacctcaggcaacctcagcctgacctggcatgtcaagtcgctgcccacgcagaccatcaccatcgaactgtggggctacgaggagacaggaatgccctactcacaggagtggactgcaaagtggtcgtacctgtaccccctggccacacacatccccaactccggctctttcactttcaccccaaaacctgctcctcccagctaccagagatggcgagtgggtgcacttcggatcatcgacagcaaaaattacgcagggcagaaggacgtgcaggcgctctggaccaacgaccacgcactggcctggcacctgagcgatgacttccgagaggaccctgtggcctgggcacgaactcagtgccaggcctgggaggagctggaggatcagctgcccaacttcctggaggagctgccggactgcccctgcaccctgacccaggcccgggctgactccggccgcttcttcacggactacggctgtgacatggagcagggcagcgtgtgcacctaccaccccggggccgtgcactgtgtgcgttctgtgcaggccagcctccggtacggctcaggtcagcagtgctgctacacagcggacgggacgcagctcctgacagctgactccagcggcggcagcactcccgaccgcggccatgactggggcgcacccccgttccgcacgccaccccgagtgcccagcatgtcccactggctctacgatgtcctcagcttctattactgctgcctctgggcacccgactgcccccgctacatgcaacggcggccctccaatgactgccgcaactaccggcccccaagactggcctccgccttcggagacccacactttgtgaccttcgacggcaccaacttcacattcaatgggcgcggagagtacgtgctgctggaggcagcgctgaccgacctgagggtgcaggcgcgggcccagcccgggacgatgtccaacggcacggagacccgtggcactgggctgaccgcagtggccgtccaggagggcaactcagatgtggtggaagtcaggctggccaacaggaccggaggtctggaggtgctgctgaaccaggaggtgctgagcttcaccgagcagagctggatggacctgaaaggaatgttcctgtcggtggctgccggggacagggtctccatcatgctggcatcaggggccggcctggaggtcagcgtgcagggcccgttcctgagtgtgtccgtcctgctgcctgagaagttcctcacccacacccacggcctcctcgggacactcaacaacgaccccaccgacgacttcaccctgcacagcgggcgcgtcctgcccccaggcaccagtccccaggagctgttcctgtttggggccaactggaccgtgcacaatgcgtcctccctgctcacctacgattcctggttcctggtccacaacttcctgtaccaacccaagcacgaccccaccttcgagcccctcttccccagtgagaccaccctcaaccccagcctggcacaagaggcagccaaactatgtggggacgatcatttctgcaactttgatgtggcagccactgggagcctgagcacgggcactgccactcgggtggcccaccagctgcaccagcgtcgcatgcagagcctgcagccagtggtgtcctgtggctggctggccccacctcccaacggacaaaaggagggcaacaggtacctggcgggttccaccatctacttccactgtgacaacggctacagcctggccggggcagagaccagcacctgccaggctgacggcacctggtcctcacccaccccgaagtgccagccaggacgcagctacgcggtgctgttgggcatcatctttgggggcctcgcggtggtggcggcggttgcgctcgtctatgtgctgctgcgccgcaggaagggcaacacgcacgtctggggtgcacagccctgatgggagcagcttggctgtgagcaccaggccaagactcctgagaacaggcagcccagtcctgcgactcccgcatccccaggaccagacacctgggacctggatacttgatacctgggcatttaaccccctactctgtcatctcagaccccaggcaggaggcccagtgttccaacacccaagccccgtgctagcagcgctccgtgctcttccccaaatactcacggctctaattccccaaacctgaaacttcataccctgggattctaatacctatgtcctgagccctgacactcccacacctgagcctcagattccaatagctcactccctagagcctgacgccggggcccctgacccctgagcctcagattccaatacctcactccccagagcctgatgccggggcccctgacccctgatctacggaggcctgctcccggaccgtgcgggcaccagtgcagtgctgccttggttcctggacccctgggcccatcctgggaccccagatggggtaaggagaggccccagaaccccaaagcagacagcgagacccccagcggcagaggcctccctcggcactccaggcttataatttcgaactcttctggaaggtcactcaggaacaccctccctgcctgtgcaaagagaaaacaagcgccttgtttccttcaaaaaaaaaaaaaaaaaa

SEQ ID NO: 12135 - DNA, 4001 bp, Homo sapiens
tgccgggaggagtgggggcggtgcctcacgtctggtacagtcatcacaagcctgttcggcgggactgtgatggccagagagatgacgatcttaggatcggctgttttgactctcctgttggccggctatttggcacaacagtatttaccattgcctactcctaaagtgattggtattgatcttggcaccacctattgttctgttggggtgttttttcctggcacaggaaaagtaaaggtgattccagatgaaaatgggcatatcagcatacccagcatggtgtcttttactgacaatgatgtatatgtgggatatgaaagcgtagagctggcagattcaaatcctcaaaacacaatatatgatgccaaaagattcataggcaagatttttaccgcagaagagttggaggctgaaattggcagatacccatttaaggttttaaacaaaaatggaatggttgagttttctgtgacaagtaatgagaccatcacagtgtccccagaatatgttggctctcgactattgttgaagttaaaggaaatggcagaggcatatcttggaatgccagttgccaatgctgtcatttctgtaccagcagaatttgatctaaaacagagaaattcaacaattgaagctgctaaccttgcaggactgaagattttgagggtaataaatgaacccacagcagcagctatggcctatggtctccacaaggctgacgtcttccacgtcttggtgatagacttgggcggaggaactctagatgtgtctttactgaataaacaaggagggatgtttctaacccgagcaatgtctggaaacaataaacttggaggacaggacttcaatcagagattgcttcagtacttatataaacagatctatcaaacatatggcttcgtgccctctaggaaagaggaaatccacagattgagacaagctgtggaaatggtcaaattaaatctgactcttcatcaatctgctcagttgtcagtattactaacggtggaggagcaggacaggaaggaacctcacagtagtgacactgaactgccaaaagacaaactttcctcagcagatgaccatcgcgtgaacagtgggtttggacgtggcctttctgataagaaaagtggagaaagtcaggttttatttgaaacagaaatatcacggaaactctttgatacccttaatgaagacctctttcagaaaatactggtacccattcagcaagtattgaaagaaggccacctggaaaagactgagattgatgaggtggttttagttgggggctccactcgtattcctcggatccgtcaagtcattcaagagttctttggaaaagatcccaacacatctgtagaccctgacctagcagtagtaacgggagtggctatccaagcagggattgatggaggctcttggcctctccaagtcagtgctttagaaattcccaataagcatttacaaaaaaccaacttcaactgaattctgcagaaataatggttatttgtgaacttgtctgatgatctcttcccatttatcagattaccttttccacaaaagaaagtctctaaaatatcacagatttacctagagggcaacatttagatacaggaaaattttacatagtgttttgtcttaggattagacgtgaccagattgatcctgtttgattttggagagatcctattctaacaaatactctaaaatgataaaattgaggtacaactctcttaaaagagtatggataactatattttctggattctggaggttgataaccatatgcacttaacattatattctataaacattaagtagtgccagttatgagattcccagttcttactaaattgtattagcaggagctggtaattacttgtattatcacatgtaactaataatttgaactatacttgaaggaccgtgttgatgtcaggtatttacagtggttggaagatagcagtattattagcataagctgcatacgtaatattcagtaactgccatattatataacaaatttacattcacaaattcagtatcctgttaagtgtcatattcttgtaatctgcattctccaggagttttatgtgtttaatagatgaatttattttatttctaaaggtattcaaatgtttcagcaccatataatagaaatacccaattatattctagttcctttatgtcctgtacatcattctctgcttggatttccattattctgtttggttagagaataaaattggtaattgcatttgaagaatgtgttaatgtcataataaagccatgattgctatcttatttttgttatccgagacctttgcaaacattggcaaatagcatcaattacctactgtatttgtttctttgtttatattttcagtaagccctggggaatatagcatggaattgagctactaaatggttttggttccgttttacggagatttttcctcatatttagttttgaatgaggaaaatgtgctcaattataaaagctgtgttattgttttctattattatttttaaataatcacacttggactcttttcaaacattaggttagtttgtaatgaaagcaaaaaatttgtgaatactggaagtaacgtggaaatctaatgtggaagccattgtggcaaggtttctacaaatcggcatttggagcagagttgtttgtttttgttgtttgtttcctttaagaaaaaccacagggaccaagaaagaaaatataacagtttgatttctgtcatacccattgtatttgaagatatatggatacagattatatatatatatacatattttccttaatagaggaatgcttcatattattcaaaaattatatcctgatcacctttttttgttttttattgtaaagtatctctgctttatccattgctgaattcgataggatgttgaaatgctggtcaccaaaaaaggaaactgagcaaattcatttcaacaacatcaaaacttcagcttctcatagtaaaaagctgaatgttactaatatttttcatatctaaaaaaaaattcttagcaatgaaattgctgttaaaacacaaatttcaatcaaatacttttgtgtatagaaaatatgtatagtaggtagatagaaaagtataaaatgtttgttgaagtatcttattttagaatgaatggagaaatgccaaagatgaatccttcactgcattatgaaaatatttcacatgttctcttggactttatataaatctgtaatagattttagaattgaaaaattctttgtgaaggtcttctaaaagtgttccaatttatctcaaaatctccatatataggatcagcttaaaacataaagaaaaccttgaatttctcaaatgtttgagatgttcaagacagtctcttaatccgttaatgcttttggaaacaattgacaaaatagggcaggcagctcatctcatgtcctgaagttggaatttaaataattcctatttgcaaattagaatgacagtgttggaatttggaggcagtagttgagcatattctctagtatatagctacacctttaataaaatgaaggaatgtcttcaatcatattttagtgggctatttataaatagtcttgaagtcaatttagtttatttatttaaaagataatgcatcctgaaagggatcatttatgaataacaatctgaagtcttttcataaaaaaaattaataaactttagttgtacatttagccagtgttatttgaagtatgtaacttttaaaatattaagtgtcttgtatgattagaatatgtgaatgagtaacttattttgtatcaggaatgttttggtactgtgttttcactcaaaccactgacttaacagatactgctgtgtataacatgtactaaatattacagttattgtgcataacagattgttcctcttatatttgtgtgtatacaggcaattcatgttttaatgtaaataaataccattttgcagtttgttttttaaaaaaaaaaaaaaaaa

SEQ ID NO: 12136 - DNA, 20431 bp, Homo sapiens
gctgcccagagcccccatagagagaggtccccgccgccaccctcatggatcagccacagttcagcggggcgccccgctttctcacccggcccaaggccttcgtggtgtcggtgggcaaggacgccaccctcagctgccagatcgtgggtaatcccacgccacaggtgagctgggagaaggaccagcagccggtggcggccggcgcgcgcttccgtctggcccaggacggcgacctctaccgcctcactatcctggacctggcgctgggcgacagtgggcaatacgtgtgccgcgcgcgcaatgccataggcgaggccttcgctgctgtgggcctgcaggtggacgcggaggccgcgtgcgccgagcaggcgccgcacttcctgctgcggcccacgtccatccgcgtgcgcgagggctcagaggccaccttccgctgccgcgtgggtggctccccgaggccggcagtgagctggtccaaggacgggcggcgcctgggtgagcccgacggcccccgcgtgcgcgtggaggagctcggcgaggcaagtgcgctgcgcattcgggcggcgcggccgcgcgacggcggcacttacgaggtccgcgccgagaacccgctgggcgctgccagcgccgccgcggcgctagtggtggactcggacgccgcggacacggccagccggcccgggacctccacggccgcgctcctggcgcacctgcagcggcggcgcgaggctatgcgcgccgagggcgcccccgcctcaccgcccagcaccggcacgcgcacctgcacggtgactgaaggcaagcacgcgcgcctcagctgctacgtgaccggcgagcccaagcccgagacggtgtggaagaaggacggccagctggtgaccgagggccggcgccacgtggtgtacgaggacgcgcaggagaacttcgtgctcaagatcctcttctgcaagcagtcggaccgcggcctctacacctgcacggcgtccaacctcgtgggccagacctacagctctgtgctggtcgtagtgcgcgagcccgcggttcccttcaaaaagcggctgcaagatctggaggtgcgggagaaggagtcggccacgttcctatgtgaggtgccccagccgtccactgaggccgcgtggttcaaggaggagacgcggttgtgggcgagcgccaagtacggcatcgaggaggagggcaccgagcgccgcctgaccgtgcgcaatgtctcggccgacgacgacgcggtgtacatctgcgagacgccagagggcagccgcacggtggcggagctcgcagtccaaggaaacctcctccgaaagctccctcggaagacggcggtgcgcgtgggcgacacggctatgttttgcgtggagctggcggtcccggtgggccccgtccactggctgcggaaccaggaggaagtggtggcggggggccgcgtggccatctccgcggagggcacgcgccacacactaaccatctcccagtgctgcctggaggatgtgggccaggtggcctttatggctggcgactgccagacgtccacccagttctgcgtgtcggcccccaggaagcctcccctgcaaccccctgtggatcctgtggtaaaggccaggatggagagttccgtgattctcagctggtccccaccaccccatggggaacgccctgtcactatcgacggctacctggtagagaagaagaagcttggcacctacacctggatcaggtgccacgaggctgaatgggtggctacacctgagctgaccgtggctgatgtggcggaggaggggaacttccagttccgagtgtccgctctcaacagctttggtcagagtccctacctcgagttcccggggactgtccacctggcccccaagctggccgtgaggacaccgctgaaggcggtgcaggcggtagagggtggcgaggtcactttctccgtggacctcacggtggcctcagcgggtgagtggttcctggatgggcaggccctgaaggccagcagtgtgtatgagatccactgtgatcgcacccggcacacgctcaccatccgggaggtgcccgccagcctgcacggggcgcagctgaagttcgtggccaacggcattgagagcagcatccggatggaggtccgggcggccccagggctgactgccaacaagccgccagccgcagctgcccgggaggtgctggctcggctgcacgaggaggcgcagctgctggctgagctgtcagatcaggctgcggctgtgacgtggctgaaggatggtcgcacactgtccccaggccccaagtatgaggtgcaggcatcggccgggcggcgggtgctccttgtgcgagatgtggcccgggacgatgcaggcctctacgagtgcgtcagccgcgggggccgcatcgcctaccagctctccgtgcaaggcctcgcgcgctttctgcacaaggacatggcgggcagctgtgtggatgccgtggctgggggcccggcgcagtttgagtgtgagacctccgaagcccacgtccacgtgcactggtacaaggatggcatggagctgggccactccggtgagcgcttcttgcaggaggatgtggggacgcggcaccggctggtggcagccacagtcaccaggcaggatgaaggcacctactcctgccgcgtgggcgaggactctgtggacttccggctccgcgtctctgagcccaaggtggtgtttgctaaggagcagctggcacgcaggaagctgcaggcagaggcaggagccagtgccacactgagctgcgaggtggcccaggcccagacggaggtgacgtggtacaaggatgggaagaagctgagctccagctcgaaagtgtgcatggaggccacaggctgcacgcgcaggctggttgtgcagcaggcaggccaggcggatgccggggagtatagctgcgaggctgggggccagcggctctccttccatctggatgtcaaagagcccaaggtggtgtttgccaaggaccaggtggcacacagtgaggtgcaggctgaggcaggggccagtgccacgctgagctgcgaggtggcccaggcccagacggaggtgatgtggtacaaagatgggaagaagctgagctccagcttgaaagtgcatgtagaggccaagggctgcagacggaggctggtggtgcagcaggcaggcaagacagatgccggggactacagctgcgaggccaggggccagagggtctccttccgcctgcacatcacagagcccaagatgatgtttgcaaaggagcagtcagtgcataatgaggtgcaggctgaggcgggggccagtgccatgctgagctgtgaggtggcccaggcccagacggaggtgacgtggtacaaggatgggaagaagctgagctccagctcaaaagtgggcatggaggtcaaagggtgcacacggaggctggtgctgccacaggcgggcaaagcagatgctggggagtacagctgtgaggctgggggccagagagtctccttccacctgcacatcacagagcccaagggggtgtttgcgaaggagcagtcagtgcataatgaggtgcaggctgaggcggggaccactgccatgctgagctgtgaggtggcccagccccagacagaggtgacgtggtacaaggacgggaagaagctgagctccagctcaaaagtacgcatggaggtcaagggctgcacacgaaggctggtagtgcagcaggtgggcaaagcagatgctggggagtacagctgcgaggctgggggccagagagtctcctttcaactgcacatcacagagcccaaggcagtgtttgccaaggagcagttggtgcataatgaggtgcggactgaggcaggggccagtgccacactgagctgtgaggtggcccaggcccagacagaggtgacgtggtacaaggatgggaagaagctgagctccagttcgaaagtgcgcatagaggctgcgggctgcatgcggcagctggtggtgcagcaggcaggccaggcagatgctggggagtacacctgtgaggctgggggccagcggctctccttccacctggatgtttcagagcccaaggcggtgtttgcaaaggagcagctggcacacaggaaggtgcaggccgaggcgggggccattgccacgctgagctgcgaggtggcccaggcccagacagaggtgacgtggtacaaggacgggaagaagctgagctccagctcgaaagttcgaatggaggctgtgggctgcacacggaggctggtggtgcagcaggcatgccaggcggacaccggggagtatagctgcgaggccgggggccagcggctctccttcagcctggacgtggcagagcccaaggtggtgtttgccaaggagcagccagtgcacagggaggtgcaggcccaggcgggggccagcaccacactcagctgcgaggtggctcaggcccagacggaggtgatgtggtacaaggacgggaagaagctgagcttcagctcgaaagtgcgcatggaggctgtgggctgcacacggaggctggtggtgcagcaggcgggccaggcggtcgccggggagtacagctgcgaggcggggagccagcggctctccttccacctgcacgtggcagagcccaaggcggtgtttgccaaggagcagccagcgagcagggaggtgcaggctgaggcggggaccagtgccacgctgagctgcgaggtggcccaggcccagacagaggtgacgtggtacaaggacgggaagaaactgagctccagctcgaaagtgcgaatggaggccgtgggctgcacacggaggctggtggtgcaggaggcaggccaggcggacgccggggagtacagctgcaaggccggggatcagcggctgtccttccacctgcacgtggcagagcccaaggtggtgtttgccaaggagcagccagcacacagggaggtgcaggctgaggcgggggccagtgccacgctgagctgcgaggtggcccaggcccagacagaggtgacgtggtacaaggatgggaagaagctgagttccagctcgaaagtgcgcgtggaggccgtgggctgcacacggaggctggtggtgcagcaggcgggccaggcggatgctggggagtacagctgtgaggcggggggccaacggctgtccttccgcctgcacgtggcagagctggagccccaaatttcagagagaccctgccgcagggagcctctggtggtcaaggagcatgaagacatcatcctgaccgccacactggccacaccctctgcggccacggtgacctggctcaaggatggtgtggagattcgccgcagcaagcggcatgagacagccagccagggggacacccacaccctgaccgtgcatggcgcccaggttctggacagcgccatctacagctgccgtgtgggcgcagaggggcaggacttcccagtgcaggtggaagaggtggccgccaagttctgccggctgctggagcctgtgtgcggcgagctgggtggcacggtgacactggcctgcgagctaagcccagcgtgtgcagaggtggtgtggcgctgcggcaacacgcagcttcgggtgggcaagcgcttccagatggtggccgaggggcccgtgcgctcactcactgtgttggggctgcgcgcagaggacgcaggggagtacgtgtgtgagagccgtgatgaccacaccagtgcgcagctcaccgtcagtgtgccccgagtggtgaagtttatgtctgggctgagcaccgtggtcgcagaggagggcggcgaggccaccttccagtgcgtggtgtcccccagtgatgtggcagtcgtgtggttccgggacggtgccctgcttcagcccagcgagaagtttgccatatcacagagtggcgccagccacagcctgaccatctcagacctggtgctggaggacgcgggccagatcaccgtggaggctgagggcgcctcatcctctgctgccctgagggtccgagaggcgcctgtgctgttcaaaaagaagctggagccgcagacggtggaggagcggagctcggtgaccctggaggtggagctgacgcggccgtggccggagctgaggtggacacggaacgcgacggccctggcgccgggaaagaacgtggagatccacgccgagggcgcccgccaccgcctggttctgcacaacgtaggttttgccgaccgtggcttctttggctgcgagacgccggatgacaagacacaggccaaactcaccgtggagatgcgccaggtacggctcgtacggggcctgcaggcagtggaggcacgggagcagggcacggctaccatggaggtgcagctgtcgcatgcggacgtggatggcagctggactcgtgacggtctgcggttccagcaggggcccacgtgccacctggctgtgcggggccccatgcacaccctcacactctcggggctgcggccagaggatagtggccttatggtcttcaaggccgaaggagtgcacacgtcggcgcggctcgtggtcaccgagcttcccgtgagcttcagccgcccgctgcaggacgtggtgaccactgagaaggagaaggttaccctggagtgcgagctgtcgcgtcctaatgtggatgtgcgctggctgaaggacggtgtggagctgcgggcaggcaagacgatggccatcgcagcccagggcgcctgcaggagcctcaccatttaccggtgcgagttcgcggatcagggagtgtatgtgtgtgatgcccatgatgcccagagctctgcctccgtgaaggtacaaggaaggacatacactctcatctaccggagagtcctggcggaagatgcaggagagatccaatttgtagccgaaaatgcagaatcgcgagcccagctccgagtgaaggagctgccagtgaccctcgtgcgcccgctgcgggacaagattgccatggagaagcaccgcggtgtgctggagtgtcaggtgtcccgggccagcgcccaggtgcggtggttcaagggcagtcaggagctgcagcccgggcccaagtacgagctggtcagtgatggcctctaccgcaagctgatcatcagtgatgtccacgcagaggacgaggacacctacacctgtgacgccggtgatgtcaagaccagtgcacagttcttcgtggaagagcaatccatcaccattgtgcggggtctgcaggacgtgacagtgatggagcccgctcctgcctggtttgagtgtgagacctccatcccctcagtgcggccacctaagtggctcctggggaagacggtgttgcaggctggggggaacgtgggcctggagcaggagggcacggtgcaccggctgatgctgcggcggacctgctccaccatgaccgggcccgtgcacttcaccgttggcaagtcgcgctcctctgcccgcctggtggtctcagacatccccgtagtcctcacacggccgttggagcccaagacagggcgtgagctgcagtcagtggtcctgtcctgcgacttccggccagcccccaaggctgtgcagtggtacaaggatgacacgcccctgtctccctctgagaagtttaagatgagcctggagggtcagatggctgagctgcgcatcctccggctcatgcctgctgatgctggtgtctaccggtgccaggcgggcagtgcccacagcagcactgaggtcactgtggaagcgcgggaggtgacagtgacagggccgctacaggatgcagaggccacggaggagggctgggccagcttctcctgtgagctgtcccacgaggatgaggaggtcgagtggtcgctcaacgggatgcccctgtacaacgacagcttccatgagatctcacacaagggccggcgccacacgctggtactgaagagcatccagcgggctgatgcgggcatagtacgcgcctcctccctgaaggtgtcgacctctgcccgcctggaggtccgagtgaagccggtggtgttcctgaaggcgctggatgacctgtccgcagaggagcgcggcaccctggccctgcagtgtgaagtctctgaccccgaggcccatgtggtgtggcgcaaagatggcgtgcagctgggccccagtgacaagtatgacttcctgcacacggcgggcacgcgggggctcgtggtgcatgacgtgagccctgaagacgccggcctgtacacctgccacgtgggctccgaggagacccgggcccgggtccgcgtgcacgatctgcacgtgggcatcaccaagaggctgaagacaatggaggtgctggaaggggaaagctgcagctttgagtgcgtcctgtcccacgagagtgccagcgacccggccatgtggacagtcggtgggaagacagtgggcagctccagccgcttccaggccacacgtcagggccgaaaatacatcctggtggtccgggaggctgcaccaagtgatgccggggaggtggtcttctctgtgcggggcctcacctccaaggcctcactcattgtcagagagaggccggccgccatcatcaagcccctggaagaccagtgggtggcgccaggggaggacgtggagctgcgctgtgagctgtcacgggcgggaacgcccgtgcactggctgaaggacaggaaggccatccgcaagagccagaagtatgatgtggtctgcgagggcacgatggccatgctggtcatccgcggggcctcgctcaaggacgcgggcgagtacacgtgtgaggtggaggcttccaagagcacagccagcctccatgtggaagaaaaagcaaactgcttcacagaggagctgaccaatctgcaggtggaggagaaaggcacagctgtgttcacgtgcaagacggagcaccccgcggccacagtgacctggcgcaagggcctcttggagctacgggcctcagggaagcaccagcccagccaggagggcctgaccctgcggctcaccatcagtgccctggagaaggcagacagcgacacctatacctgcgacattggccaggcccagtcccgggcccagctcctagtgcaaggccggagagtgcacatcatcgaggacctggaggatgtggatgtgcaggagggctcctcggccaccttccgttgccggatctccccggccaactacgagcctgtgcactggttcctggacaagacacccctgcatgccaacgagctcaatgagatcgatgcccagcccgggggctaccacgtgctgaccctgcggcagctggcgctcaaggactcgggcaccatctactttgaggcgggtgaccagcgggcctcggccgccctgcgggtcactgagaagccaagcgtcttctcccgggagctcacagatgccaccatcacagagggtgaggacttgaccctggtgtgcgagaccagcacctgcgacattcctgtgtgctggaccaaggatgggaagaccctgcgggggtctgcccggtgccagctgagccatgagggccaccgggcccagctgctcatcactggggccaccctgcaggacagtggacgctacaagtgtgaggctgggggcgcctgcagcagctccattgtcagggtgcatgcgcggccagtgcggttccaggaggccctgaaggacctggaggtgctggagggtggtgctgccacactgcgctgtgtgctgtcatctgtggctgcgcccgtgaagtggtgctatggaaacaacgtcctgaggccaggtgacaaatacagcctacgccaggagggtgccatgctggagctggtggtccggaacctccggccgcaggacagcgggcggtactcatgctccttcggggaccagactacttctgccaccctcacagtgactgccctgcctgcccagttcatcgggaaactgagaaacaaggaggccacagaaggggccacggccacgctgcggtgtgagctgagcaaggcagcccctgtggagtggagaaaggggtccgagaccctcagagatggggacagatactgtctgaggcaggacggggccatgtgtgagctgcagatccgtggcctggccatggtggatgccgcggagtactcgtgtgtgtgtggagaggagaggacctcagcctcactcaccatcaggcccatgcctgcccacttcataggaagactgagacaccaagagagcatagaaggggccacagccacgctgcggtgtgagctgagcaaggcggcccccgtggagtggaggaaggggcgtgagagcctcagagatggggacagacatagcctgaggcaggacggggctgtgtgcgagctgcagatctgtggcctggctgtggcagatgctggggagtactcctgtgtgtgtggggaggagaggacctctgccactctcaccgtgaaggccctgccagccaagttcacagagggtctgaggaatgaagaggccgtggaaggggccacagccatgttgtggtgtgaactgagcaaggtggcccctgtggagtggaggaaggggcccgagaacctcagagatggggacagatacatcctgaggcaggaggggaccaggtgtgagctgcagatctgtggcctggccatggcggacgccggggagtacttgtgtgtgtgcgggcaggagaggacctcagccacgctcaccatcagggctctgcctgccaggttcatagaagatgtgaaaaaccaggaggccagagaaggggccacagctgtgctgcagtgtgagctgaacagtgcagcccctgtggagtggagaaaggggtctgagacccttagagatggggacagatacagcctgaggcaggacgggactaaatgtgagctgcagattcgtggcctggccatggcagacactggggagtactcgtgcgtgtgcgggcaggagaggacctcggctatgctcaccgtcagggctctacccatcaagttcacagagggtctgaggaacgaagaggccacagaaggggcaacagccgtgctgcggtgtgagctgagcaagatggcccccgtggagtggtggaaggggcatgagaccctcagagatggagacagacacagcctgaggcaggacggggccaggtgtgagctgcagatccgcggcctcgtggcagaggacgctggggagtacctgtgcatgtgcgggaaggagaggacctcagccatgctcaccgtcagggccatgccttccaagttcatagagggtctgaggaatgaagaggccacagaaggggacacggccacgctgtggtgtgagctgagcaaggcggcaccggtggagtggaggaaggggcatgagaccctcagagatggggacagacacagcctgaggcaggacgggtccaggtgtgagctgcagatccgtggcctggctgtggtggatgccggggagtactcgtgtgtgtgcgggcaggagaggacctcagccacactcactgtcagggccctgcctgccagattcatagaagatgtgaaaaaccaggaggccagagaaggggccacggccgtgctgcaatgtgagctgagcaaggcggcccccgtggagtggaggaaggggtctgagaccctcagaggtggggacagatacagcctgaggcaggatgggaccagatgtgagctgcagattcatggcctgtctgtggcagacactggggagtactcgtgtgtgtgcgggcaggagaggacctcggccacactcaccgtcagggccccacagccagtgttccgggagccgctgcagagtctgcaggcggaggagggctccacggccaccctgcagtgtgagctgtctgagcccactgctacagtggtctggagcaagggtggcctgcagctgcaggccaatgggcgccgggagccacggcttcagggctgcaccgcggagctggtgttacaggacctacaacgtgaagacactggcgaatacacttgcacctgtggctcccaggccaccagtgccaccctcactgtcacagctgcgcctgtgcggttcctccgagagctgcagcaccaggaggtggatgagggaggcaccgcacacttatgctgcgagctgagccgggcgggtgcgagcgtggagtggcgcaagggctccctacagctcttcccttgtgccaagtaccagatggtgcaggatggtgcagctgcagagctgctggtacgcggagtggagcaggaggatgcgggtgactacacgtgtgacacgggccacacgcagagcatggccagcctctctgtccgtgtccccaggcccaagttcaagacccggcttcagagtctggagcaggagacaggtgacatagcccggctgtgctgtcagctgagtgatgcagagtcgggggccgtggtgcaatggctcaaggagggcgtggagctgcatgcgggccccaagtacgagatgcggagccagggggccacgcgggagctgctgatccaccaactggaggccaaggacacgggcgagtatgcctgtgtgacaggcggccagaaaaccgctgcctccctcagggtcacagagcctgaggtgaccattgtacgggggctggttgatgcggaggtgacggccgatgaggatgttgagttcagctgtgaggtgtccagggctggagccacaggcgtgcagtggtgcctacagggcctgccactgcaaagcaatgaggtgacagaggtggctgtgcgggatggccgcatccacaccctgcggctgaagggcgtgacgcccgaggacgctggcactgtctccttccatttgggaaaccatgcttcctctgcccagctcaccgtcagagctcctgaggtgaccatcctggagcccctgcaggacgtgcagctcagtgagggccaggatgccagcttccagtgccggctatccagagcttcaggccaggaggcccgctgggctttaggaggggtgcccctgcaggccaacgagatgaatgacatcactgtggagcagggcacactccacctgctcaccctgcacaaggtgacccttgaggatgctggaactgtcagtttccacgtgggcacgtgtagctctgaggcccagctgaaagtcacagccaagaacacggtggtgcgggggctggagaatgtggaggcgctggagggcggcgaggcgctgttcgagtgccagctgtcccagcccgaggtggccgcccacacctggctgctggacgacgaacccgtgcacacctcggagaacgccgaggtggtcttcttcgagaacggcctgcgccacctgctgctgctcaaaaacttgcggccacaagacagctgccgggtgaccttcctggctggggatatggtgacgtccgcattcctcacggtccgaggctggcgcctggagatcctggagcctctgaaaaacgcggcggtccgggccggcgcacaggcatgcttcacctgcacgctcagcgaggcggtgcccgtgggagaggcgtcctggtacatcaatggcgcggcagtgcagccggatgacagcgactggactgtcaccgccgacggcagtcaccacgccctactgctgcgcagcgcccagccccaccacgccggggaggtcaccttcgcttgccgcgacgccgtggcctctgcgcggctcaccgtgctgggcctccctgatcccccagaggatgctgaggtggtggctcgcagcagccacactgtgacactgtcttgggcagctcccatgagtgatggaggcggtggtctctgtggctaccgcgtggaggtgaaggagggggccacaggccagtggcggctgtgccacgagctggtgcctggacccgagtgtgtggtggatggcctggcccccggggagacctaccgcttccgtgtggcagctgtgggccctgtgggtgctggggaaccggttcacctgccccagacagtgcggcttgcagagccaccgaagcctgtgcctccccagccctcagcccctgagagccggcaggtggcagctggtgaagatgtctctctggagcttgaggtggtggctgaggctggtgaggtcatctggcacaagggaatggagcgcatccagcccggtgggcggttcgaggtggtctcccagggtcggcaacagatgctggtgatcaagggcttcacggcagaagaccagggcgagtaccactgtggcctggctcagggctccatctgccctgcggctgccaccttccaggtggcactgagcccagcctctgtggatgaggcccctcagcccagcttgccccccgaggcagcccaggagggtgacctgcacctactgtgggaggccctggctcggaaacgtcgcatgagccgtgagcccacgctggactccattagcgagctgccagaggaggacggccgctcgcagcgcctgccacaggaggcagaggaggtggcacctgatctctctgaaggctactccacggccgatgagctggcccgcactggagatgctgacctctcacacaccagctctgatgatgagtcccgggcaggcaccccttccctggtcacctacctcaagaaggctgggaggccaggcacctcaccactggccagcaaggttggggccccagcagccccctctgtgaagccacagcagcagcaggagccactggctgctgtgcgcccaccactgggagacctgagcaccaaagacctgggtgatccctcaatggacaaggcagctgtgaagatccaggctgcctttaagggctacaaggtccggaaggagatgaagcagcaggaagggcccatgttctcccacacatttggggacaccgaggcacaggtgggggatgccctgcggctggagtgtgtcgtggccagcaaggcagatgtgcgagcccgctggctgaaggatggtgtggagctgaccgatgggcggcaccatcacatcgaccagcttggggatggcacctgctctctgctgatcactggcctggaccgtgctgatgctggctgctacacctgtcaggtgagcaacaagtttggccaggtgacccacagtgcctgtgtggtggtcagtgggtcagagagtgaagccgagagctcctctgggggtgagctggacgatgccttccgccgggctgcccgtcggctgcaccggctcttccgcaccaaaagtccggctgaagtttcagatgaggagctcttcctgagtgcagacgagggccctgcagagccagaggagcccgcggactggcagacataccgcgaagatgagcatttcatctgcatccgttttgaggcgctcactgaggcccgccaggcggtaactcgcttccaggagatgtttgccacactgggcattggggtggagatcaagctggtggaacaggggcctcggagggtagagatgtgcatcagcaaagagactcctgcccctgtggtgcctccagagccattgcccagcctactgacttctgacgctgccccagtgttcctgactgagttgcagaaccaagaagtgcaggatgggtatcctgtgagctttgactgcgtggtgacaggtcagcccatgcccagtgtgcgctggttcaaggatgggaagttgttggaggaggatgatcactacatgattaatgaagaccaacagggtggccatcagctcatcatcacagccgtggtgccagcagacatgggcgtctaccgctgcctggccgagaacagcatgggtgtctcctccaccaaggctgagctccgtgtggacttgacaagcacagactatgacactgcagcagatgccacggagtcctcatcctacttcagtgcccaaggctacctgtccagccgggagcaggagggaacagagtccaccactgatgagggccagctgccccaggtggtggaggagctgagagacctccaggtggcccctggcacacgcctggccaagttccagctcaaggtgaaaggctaccctgctcccagattatactggttcaaagatggccagcccctgaccgcatctgcccacatccgcatgactgacaagaagatcctgcacaccctggagatcatctccgtcacccgggaggactctggccagtatgcagcctatatcagcaatgccatgggtgctgcctactcgtctgcccggctgctggttcgaggccctgatgagccagaagagaagcctgcatcagatgtgcatgagcagctggtgccgccccgaatgctggagaggttcacccccaagaaagtgaagaaaggctccagcatcaccttctctgtgaaggtagaaggacgcccggtgcccaccgtgcactggctcagggaggaggctgagagaggcgtgctgtggattggccctgacacaccgggctacaccgtggccagctctgcgcagcagcacagcctggtcctgctggacgtgggccggcagcaccagggcacctacacatgcattgccagcaacgctgccggccaggccctctgctccgccagcctgcacgtctcgggcctgcctaaggtggaggagcaggagaaagtgaaggaagcgctgatttccactttcctgcaggggaccacacaagccatctcagcacaggggttggaaactgcgagttttgctgaccttggtgggcagaggaaagaagagcctctggctgccaaggaggccctcggccacctgtccctcgctgaggtgggcacagaggagttcctgcagaaactgacctcccagatcactgagatggtatcggccaagatcacgcaggccaagctgcaggtgcccggaggtgacagtgatgaggactccaagacaccatctgcatccccccgccatggccgatcacggccatcctccagcatccaggagtcttcctcagagtcagaggacggcgatgcccgaggcgagatctttgacatctacgtggtcaccgctgactacctgcccctaggggctgagcaggatgccatcacgctgcgggaaggccagtatgtggaggtcctggatgcagcccacccactgcgctggcttgtccgcaccaagcccaccaagtccagcccctcacggcagggctgggtgtcaccagcctacctggacaggaggctcaagctgtcacctgagtggggggccgctgaggcccctgagttccctggggaggctgtgtctgaagacgaatacaaggcaaggctgagctctgtgatccaggagctgctgagttctgagcaggccttcgtggaggagctgcagttcctgcagagccaccacctgcagcacctggagcgctgcccccacgtgcccatagctgtggccggccagaaggcagtcatcttccgcaatgtgcgggacatcggccgcttccacagcagcttcctgcaggagttgcagcagtgcgacacggacgacgacgtggccatgtgcttcatcaagaaccaggcggcctttgagcagtacctggagttcctggtggggcgtgtgcaggctgagtcggtggtcgtcagcacggccatccaggagttctacaagaaatacgcggaggaggccctgttggcaggggacccctctcagcccccgccaccacctctgcagcactacctggagcagccagtggagcgggtgcagcgctaccaggccttgctgaaggagctgatccgcaacaaggcgcggaacagacagaactgcgcgctgctggagcaggcctatgccgtggtgtctgccctgccacagcgcgctgagaacaagctgcacgtgtccctcatggagaactacccaggcaccctgcaggccctgggcgagcccatccgccagggccacttcatcgtgtgggagggtgcaccgggggcccgcatgccctggaagggccacaaccgtcacgtgttcctcttccgcaaccacctggtaatctgcaagccccggcgagactcccgcaccgataccgtcagctacgtgttccggaacatgatgaagctgagcagcatcgacctgaacgaccaggtggagggggatgaccgcgccttcgaggtgtggcaggagcgggaggactcggtgcgcaagtacctgctgcaggcacggacagccattatcaagagctcgtgggtgaaggagatctgtggcatccagcagcgtctggccctgcctgtgtggcggcccccggactttgaagaggagctggccgactgcacagccgagctgggtgagacagtcaagctggcctgccgcgtgacgggcacacccaagcctgtcatcagctggtacaaagatgggaaagcagtgcaggtggacccccaccacatcctcattgaagaccctgatggctcgtgtgcactcatcctggacagcctgaccggtgtggactctggccagtacatgtgcttcgcggccagcgccgctggcaactgcagtaccctgggcaagatcctggtgcaagtcccaccacggttcgtgaacaaggtccgggcctcaccctttgtggagggagaggacgcccagttcacctgcaccatcgaaggcgccccgtacccgcagatcaggtggtacaaggacggggccctgctgaccactggcaacaagttccagacactgagtgagcctcgcagcggcctgctagtgctggtgatccgggcggccagcaaggaggacctggggctctacgagtgtgagctggtgaaccggctgggctccgcgcgggctagtgcggagctgcgcattcagagccccatgctgcaggcccaggagcagtgtcacagggagcagctcgtggctgcagtggaagtcactgagcaagagactaaagtccccaagaaaaccgtcatcatagaagagaccatcaccactgtggtgaagagcccacgtggccaacgacggtcccccagcaagtccccctcccgctcaccttcccgctgctctgccagcccgctgaggccaggcctactggcccccgacctgctgtacctgccaggtgctggccagccccgcaggccggaggcagaaccaggccagaagcccgtggtgcccacactgtatgtgacggaggccgaggcccactctccagctctgcccggactctcggggccccagcccaagtgggtggaggtggaggagaccattgaagtccgggtgaagaagatgggcccgcagggtgtgtctcccaccacagaggtgcccaggagctcatcggggcatctcttcacactgcccggtgcgacccccggaggggaccccaattccaacaactccaacaacaagctgctggcccaggaggcctgggcccagggcacagccatggtcggcgtcagagagccccttgtcttccgcgtggatgccagaggcagtgtggactgggctgcttctggcatgggcagcctggaggaggagggcaccatggaggaggcgggagaggaagagggggaagacggagacgcctttgtgacggaggagtcccaggacacacacagccttggggatcgtgaccccaagatcctcacgcacaacggccgcatgctgacactggctgacctggaagattacgtgcctggggaaggggagaccttccactgtggtggccctgggcctggcgcccctgatgaccctccctgcgaggtctcggtgatccagagagagatcggggagcccacggtggggcagcctgtgctgctcagcgtggggcatgcactgggtccccgaggccctctcggcctctttaggcctgagccccgtggggcgtcaccaccgggaccccaggtccgtagccttgagggcacctccttcctcttgcgggaggccccggctcggcctgtgggcagtgctccctggacgcagtctttctgcacccgcatccggcgttctgcggacagtggccagagcagcttcaccacagagctttccacccagaccgtcaacttcgggacagtgggggagacggtcacccttcacatctgcccagacagggatggggatgaggcggcacagccctgatgctgctgccatggtggcttggggcagcggggagaaaggagtgtccttgaggcctaggacgctgcccggcctcagcagcagccctgggagcctcctgagggccctccctgtccctggccacgggcccttcttacctcactcaacttcagccaggaggactgggtggtgcttgcaatgttggaatgaccggctcaaagacctcagctctgggctgtttcctgtcagcctggcaggagcctcaggactgtggacgaaggatgtggccttgggcatttgtcctgttcccacatgggcctggtccctccctcctggccccagccacagctgccaggcctgacatggccttgcctctcctgcagtcttggtgactgagacccttgggtggcgcttcccagctctgcaggccctcctggccttttctgcagggtggacacagggtctgtgtgtgggcagcagcccctgtctctcagcaagaataaagcagcttcctgtgcaaaaaaaaaaaaaaaaaaaaaaaaaaaaaa

SEQ ID NO: 12137 - DNA, 2157 bp, Homo sapiens
atgagagctgtactggacacagcagacattgccatagtggccctgtattttatcctggtcatgtgcattggtttttttgccatgtggaaatgtaatagaagcaccgtgagtggatacttcctggcggggcgctctatgacctgggtagcaattggtgcctctctgtttgtgagcaatattgggagtgagcacttcattgggctggcaggatctggagctgcaagtggatttgcagtgggcgcatgggaattcaatgccttactgcttttacaacttctgggatgggttttcatcccaatttacatccggtcaggggtatataccatgcctgaatacttgtccaagcgatttggtggccataggattcaggtctattttgcagccttgtctctgattctctatattttcaccaagctctcggtggatctgtattcgggtgccctttttatccaggagtctttgggttggaatctttatgtgtctgtcatcctgctcattggcatgactgctttgctgactgtcaccggaggccttgttgcagtgatctacacagacactctgcaggctctgctcatgatcattggggcacttacacttatgattattagcataatggagattggcgggtttgaggaagttaagagaaggtacatgttggcctcacccgatgtcacttccatcttattgacatacaacctttccaacacaaattcttgtaatgtctcccctaagaaagaagccctgaaaatgctgcggaatccaacagatgaagatgttccttggcctggattcattcttgggcagaccccagcttcagtatggtactggtgtgctgaccaagtcatcgtgcagagggtccttgcagccaaaaacattgctcatgccaaaggctctactcttatggctggcttcttaaagctcctgccaatgtttatcatagttgtcccaggaatgatttccaggatactgtttactgatgatatagcttgcatcaacccagagcactgcatgctggtgtgtggaagcagagctggttgctccaatattgcttacccacgcctggtgatgaagctggttcctgtgggccttcggggtttaatgatggcagtgatgattgcagctctgatgagtgacttagactctatctttaacagtgccagtaccatattcaccctcgatgtgtacaaacttatccgcaagagcgcaagctcccgggagttaatgattgtggggaggatatttgtggcatttatggtggtgatcagcatagcatgggtgccaatcatcgtggagatgcaaggaggccagatgtacctttacattcaggaggtagcagattacctgacacccccagtggcagccttgttcctgctggcaattttctggaagcgctgcaatgaacaaggggctttctatggtggaatggctggctttgttcttggagcagtccgtttgatactggcctttgcctaccgtgccccagaatgtgaccaacctgataataggccgggcttcatcaaagacatccattatatgtatgtggccacaggattgttttgggtcacgggactcattactgtaattgtgagccttctcacaccacctcccacaaaggaacagattcgaaccaccaccttttggtctaagaagaacctggtggtgaaggagaactgctccccaaaagaggaaccatacaaaatgcaagaaaagagcattctgagatgcagtgagaataatgagaccatcaaccacatcattcccaacgggaaatctgaagacagcattaagggccttcagcctgaagatgttaatctgttggtaacctgcagagaggagggcaacccagtggcatccttaggtcattcagaggcagaaacaccagttgacgcttactccaatgggcaagcagctctcatgggtgagaaagagagaaagaaagaaacggatgatggaggtcggtactggaagttcatagactggttttgtggctttaaaagtaagagcctcagcaagaggagtctcagagacctgatggaagaggaggctgtttgtttacagatgctagaagagactcggcaagttaaagtaatactaaatattggactttttgctgtgtgttcacttggaattttcatgtttgtttatttctccttatga

SEQ ID NO: 12138 - DNA, 3587 bp, Homo sapiens
agcctctgtgcggtgggaccaacggacggacggacggacgcgcgcacctaccgaggcgcgggcgctgcagaggctcccagcccaagcctgagcctgagcccgccccgaggtccccgccccgcccgcctggctctctcgccgcggagccgccaagatgggggacaagaaagatgacaaggactcacccaagaagaacaagggcaaggagcgccgggacctggatgacctcaagaaggaggtggctatgacagagcacaagatgtcagtggaagaggtctgccggaaatacaacacagactgtgtgcagggtttgacccacagcaaagcccaggagatcctggcccgggatgggcctaacgcactcacgccaccgcctaccaccccagagtgggtcaagttttgccggcagctcttcgggggcttctccatcctgctgtggatcggggctatcctctgcttcctggcctacggtatccaggcgggcaccgaggacgacccctctggtgacaacctgtacctgggcatcgtgctggcggccgtggtgatcatcactggctgcttctcctactaccaggaggccaagagctccaagatcatggagtccttcaagaacatggtgccccagcaagccctggtgatccgggaaggtgagaagatgcaggtgaacgctgaggaggtggtggtcggggacctggtggagatcaagggtggagaccgagtgccagctgacctgcggatcatctcagcccacggctgcaaggtggacaactcctccctgactggcgaatccgagccccagactcgctctcccgactgcactcacgacaaccccttggagactcggaacatcaccttcttttccaccaactgtgtggaaggcacggctcggggcgtggtggtggccacgggcgaccgcactgtcatgggccgtatcgccaccctggcatcagggctggaggtgggcaagacgcccatcgccatcgagattgagcacttcatccagctcatcaccggcgtggctgtcttcctgggtgtctccttcttcatcctctccctcattctcggatacacctggcttgaggctgtcatcttcctcatcggcatcatcgtggccaatgtcccagagggtctgctggccactgtcactgtgtgtctgacgctgaccgccaagcgcatggcccggaagaactgcctggtgaagaacctggaggctgtagaaaccctgggctccacgtccaccatctgctcagataagacagggaccctcactcagaaccgcatgacagtcgcccacatgtggtttgacaaccagatccacgaggctgacaccactgaggaccagtcagggacctcatttgacaagagttcgcacacctgggtggccctgtctcacatcgctgggctctgcaatcgcgctgtcttcaagggtggtcaggacaacatccctgtgctcaagagggatgtggctggggatgcgtctgagtctgccctgctcaagtgcatcgagctgtcctctggctccgtgaagctgatgcgtgaacgcaacaagaaagtggctgagattcccttcaattccaccaacaaataccagctctccatccatgagaccgaggaccccaacgacaaccgatacctgctggtgatgaagggtgcccccgagcgcatcctggaccgctgctccaccatcctgctacagggcaaggagcagcctctggacgaggaaatgaaggaggccttccagaatgcctaccttgagctcggtggcctgggcgagcgcgtgcttggtttctgccattattacctgcccgaggagcagttccccaagggctttgccttcgactgtgatgacgtgaacttcaccacggacaacctctgctttgtgggcctcatgtccatgatcgacccaccccgggcagccgtccctgacgcggtgggcaagtgtcgcagcgcaggcatcaaggtcatcatggtcaccggcgatcaccccatcacggccaaggccattgccaagggtgtgggcatcatctctgagggcaacgagactgtggaggacatcgccgcccggctcaacattcccgtcagccaggttaacccccgggatgccaaggcctgcgtgatccacggcaccgacctcaaggacttcacctccgagcaaatcgacgagatcctgcagaatcacaccgagatcgtcttcgcccgcacatccccccagcagaagctcatcattgtggagggctgtcagagacagggtgcaattgtggctgtgaccggggatggtgtgaacgactcccccgctctgaagaaggccgacattggggtggccatgggcatcgctggctctgacgtctccaagcaggcagctgacatgatcctgctggacgacaactttgcctccatcgtcacaggggtggaggagggccgcctgatcttcgacaacctaaagaagtccattgcctacaccctgaccagcaatatcccggagatcacgcccttcctgctgttcatcatggccaacatcccgctgcccctgggcaccatcaccatcctctgcatcgatctgggcactgacatggtccctgccatctcactggcgtacgaggctgccgaaagcgacatcatgaagagacagcccaggaacccgcggacggacaaattggtcaatgagagactcatcagcatggcctacgggcagattggaatgatccaggctctcggtggcttcttctcttactttgtgatcctggcagaaaatggcttcttgcccggcaacctggtgggcatccggctgaactgggatgaccgcaccgtcaatgacctggaagacagttacgggcagcagtggacatacgagcagaggaaggtggtggagttcacctgccacacggccttctttgtgagcatcgttgtcgtccagtgggccgatctgatcatctgcaagacccggaggaactcggtcttccagcagggcatgaagaacaagatcctgatcttcgggctgtttgaggagacggccctggctgccttcctgtcctactgccccggcatggacgtggccctgcgcatgtaccctctcaagcccagctggtggttctgtgccttcccctacagtttcctcatcttcgtctacgacgaaatccgcaaactcatcctgcgcaggaacccagggggttgggtggagaaggaaacctactactgacctcagccccaccacatcgcccatctcttccccgtcccccaggcccaggaccgcccctgtcagtccccccaattttgtattctggggggaggagccctctcttcctgtggccccaccttggcccccaccccctccactatctcctgccgcccccactctggctggcttctctcccctgccccaaacctctctcctctctcttttctgtgtcagtttctctccctctcctcacccctctatccattcctcccgccccagccacctccctgggctcttttttactccccttcagccccccggctgatgccatctctggttctggacaattatcaaatatatcagtggggagagagaaaaaaaaaaaaaaaaaaaaaaaaaaaaaaaaaaaaaa

SEQ ID NO: 12139 - DNA, 3565 bp, Homo sapiens
ccggtgcagcggctggcgatcggccgcggaggtgcgtgcagggcccgcgccgccgccggtatctccaccgccaacacctcagccactgccactgccacagccacacgaggccccccaccgtgcgctccgccgctgcggtcccggatccgcgctccacgcccgcagcccgcggcgccaccagcccagcatgcaccagaaaaccccagaaatttactccgtggagctcagcggaactaaggacatcgtgaaaacagacaagggggatggcaaggagaagtataggggtctgaagaacaactgcctggaactcaaaaagaaaaatcacaaagaggagtttcagaaagaactccatctggatgaccacaaactcagcaatagggaattggaagagaaatatggcacagacatcattatgggtctctccagcaccagagctgccgagctcctggcccgggatgggcccaactccctcacccctcccaagcagacgcctgagatcgtcaagttcctcaagcagatggtgggggggttctctatcctcctgtgggtgggcgcctttctctgttggattgcatatgggattcagtactccagcgacaagtctgcatccctgaacaacgtgtacttgggctgtgtgcttggtctggtggtcattttaacggggatctttgcttattaccaagaggcaaaaagcaccaacatcatgtccagcttcaataagatgatccctcagcaagctctcgtcatccgagattccgagaagaagaccatcccttcagagcagctggtggtgggggacattgtggaggtcaaaggaggagaccagatccctgcagacatcagggtgctgtcttctcaggggtgtcgggtggataactcatctctcacgggggagtctgagccccagccccgctcctctgagtttacccatgaaaaccccctggaaacaaagaacatctgcttctattccacaacgtgtctggaaggcactgtcaccggcatggttatcaacacgggtgaccgcaccatcattggccatattgcctcattggcctcaggagttggaaatgagaagacgcccattgccattgagatcgagcactttgttcacattgtggcaggagtggctgtctccatcggcatccttttcttcatcatcgctgtgtccctgaagtatcaagtcctggactccatcatcttcctcattggcatcattgtggccaatgtgcccgagggcctcctggccactgtcactgtgaccctgtcgctgacagcaaaacggatggccaagaagaactgcctggtgaagaacctggaggctgtggagaccctcggctccacctccatcatctgctcggacaagactgggacactgacccagaacaggatgacagtggcccatctgtggttcgacaatcagatctttgtggctgacaccagtgaggaccattcaaaccaagtctttgaccaaagctctaggacttgggcctccttatccaagataataacattgtgtaaccgagcagagttcaagccaggacaggaaaatgtccccatcatgaagaaagctgtgattggagatgcctcagaaactgctcttttaaaattctcagaggtcattttgggtgatgtgatggaaattagaaaaagaaaccgcaaagtagctgaaatcccttttaactctactaataaatttcagctctccatccacgagatggatgacccccacggcaagcgcttcctcatggtgatgaagggggcccctgagcgcattctagagaaatgcagcaccatcatgatcaacggcgaggagcacccactggacaagagcactgccaagaccttccacacagcctacatggagctgggcgggttgggcgagcgtgtgctgggtttctgtcatctctacctgccagcagacgagtttccagaaacctactcatttgacatagacgctatgaactttccgacctccaacctctgttttgtgggactcttgtcaatgatcgatccccctcggtccaccgtgccagatgcagtcaccaaatgccggagtgcagggatcaaggttattatggttactggtgatcatcccatcacagccaaagctattgccaagagtgtggggatcatttcagccaacagtgaaacagtggaagacattgcacatcgcctcaacattgctgtggagcaagttaacaaacgggatgccaaggccgctgtggtgactggcatggagctgaaggacatgagctcagaacagctggatgagatcttagccaactaccaggagattgtctttgcccggacatccccccagcagaagctgatcattgtggagggctgtcagaggcaggatgctgttgttgctgtgaccggggatggagttaatgactctccggctctaaagaaggcagacattgggattgccatggggatagcaggttctgatgcagccaaaaatgcagccgacatggtcttgctggacgacaacttcgcatccatcgtcacaggggtggaggaaggtcgcctgatctttgacaacctcaagaagactattgcttattccctgaccaagaacattgccgagctgtgcccctttctgatctacatcattgtcgggctccccctgcccattggcaccatcaccattctgttcattgacttggggacagacattatcccctccattgccttggcgtacgagaaagctgaaagtgacatcatgaacaggaagcctcgccacaagaataaggacaggctggtgaaccagccgctcgctgtgtactcatacctgcacattggcctcatgcaagccctgggagctttccttgtgtatttcaccgtctatgcacaagagggctttctgccccgcactctcattaacctgcgggtagaatgggagaaggactacgtgaatgacttgaaagacagctatgggcaggaatggacaaggtaccagagggaatacctagaatggacgggctacacggctttctttgttggcatcctagtccagcaaatagcagatctgatcatcaggaaaacccggaggaattccatcttccagcagggtctcttcagaaataaagtcatctgggtggggatcacctcacagatcatcattggtctgatcctctcctatggcctcggaagtgtcacagccttgagtttcaccatgcttagggctcagtactggtttgtggctgtgccgcacgccatcctgatctgggtgtatgatgaggtgcggaagctcttcatcaggctctaccctggaagctggtgggataagaacatgtattattaagaccacctcccttcctatgtctctcagcagcacgttggggcacacttgttcatcttctgaccgtttgctgggctattcccctgcagtgcagacatcgtcaaaattcagacaagaggaaattttcatgcagaaagctgtatgcaggatgctcactgatgttttgcactttaaaactgaaattcaactctttatataggattttcttttctatctccatctcctcattaaaaaatacgtacatttcgaggtaatggtata

SEQ ID NO: 12140 - DNA, 3582 bp, Homo sapiens
gttgggtgggagcacaggcaccgggcaccatggggaaggccgagaactatgagctctactcggtggagctgggtcctggccctggcggggacatggctgccaagatgagcaagaagaagaaggcgggtggcgggggtggcaagaggaaggagaagctggagaacatgaagaaggagatggagattaacgaccaccagctgtcagtggcggagctggaacagaaataccagaccagtgccaccaagggcctctctgcgagcctggctgctgagctgctgctgcgggatgggcccaacgcactgcggccaccacggggcaccccagagtacgtcaagttcgcgaggcagctggccgggggcctgcagtgcctcatgtgggttgccgccgccatctgcctcatcgcctttgccatccaggctagtgagggggacctcaccaccgacgacaatctgtacctggcaatcgctctcattgctgtggttgtcgtcaccggctgctttggctactaccaggaattcaagagcaccaacatcatcgccagctttaagaaccttgtgccacagcaagccactgtcatccgcgatggagacaaattccagatcaacgctgaccaactggtggtgggcgacctggtggagatgaaaggtggggacagagtgcccgccgacatccgcatcctggcggcccagggctgcaaggtggacaactcctcgctgacaggggagtctgagccacagacccgctcacccgagtgcacgcacgagagccctctggagacccgcaacatcgccttcttctccaccatgtgccttgagggcaccgtgcagggcctggtggtgaacacgggcgaccgcaccatcattgggcgcatcgcatcgctggcgtcgggggtggaaaacgagaagacacccatcgctatcgagatcgagcattttgtggacatcatcgcgggcctggccattctcttcggtgccacattttttattgtggccatgtgcattggctacaccttcctgcgggccatggtcttcttcatggccatcgtggtggcctatgtgcctgaggggctgctggccactgtcacagtctgcctgtccctgacagccaagcgcctggccagtaagaactgcgtggtcaagaacctggaggcggtggagacattgggctccacttcggtgatctgctcggacaagacagggactctcactcagaaccgcatgactgtgtcccatctgtggtttgacaaccacatccacacagctgacaccacggaagaccagtcagggcagacgtttgaccagtcctcggagacgtggcgggcgctgtgccgggtgctcaccctgtgcaaccgcgccgccttcaagtccggccaggatgcagtgcctgtgcccaagcgcatcgtgattggagacgcatcggagacggcgctgctcaagttctcggagctgacgctgggcaacgccatgggctaccgggaccgcttcccaaaagtctgcgagatacccttcaactccaccaacaagttccagctgtccatccatacgctggaggacccgcgggacccgcgacacttgctggtgatgaagggcgcccccgagcgcgtgctggagcgctgcagctccatccttatcaagggccaggagctgccgctggacgagcagtggcgcgaggccttccagaccgcctacctcagcctgggaggcctgggcgaacgcgtgctcggcttctgccagctctacctgaatgagaaggactacccgcctggctatgccttcgacgtagaggccatgaactttccatctagcggcctctgctttgcgggacttgtatccatgattgacccaccccgggccaccgtccctgatgctgtgctcaagtgtcgcaccgcaggcatccgggtgatcatggtaacgggtgaccaccccatcaccgccaaggccattgcagccagtgtgggcatcatctcggaaggcagcgagacagtggaggacatcgctgcccgcctccgtgtgcccgtagaccaggttaatcgcaaggatgcccgtgcctgtgtgatcaatggcatgcagctgaaggacatggacccatcggaactggtcgaggccctgcgcacccaccccgagatggtgtttgcgcgcaccagcccccagcagaagctggtgatcgtggagagctgccagcggctgggtgcgattgtggccgtcacgggggatggtgtgaatgactccccagctctgaagaaggcagacatcggagtagccatgggcatcgctggctcagatgctgccaaaaatgcagctgacatgatcctgctggatgacaactttgcctccattgtgacaggcgtggagcagggtcgactgatcttcgacaacctgaagaagtctattgcctacacattgaccaagaacatcccagagctgacaccctacctcatctacatcaccgtcagcgtgcccctgcccctcgggtgcatcaccatcctcttcatcgaactctgcactgacattttcccatctgtgtccctggcatatgaaaaggccgagagtgacatcatgcacctgcgtccacgcaacccaaagcgtgacagattggtcaacgagcccctggctgcctactcctacttccagattggtgccattcagtcctttgctggcttcactgactacttcacggcaatggcccaggagggctggttcccactgctgtgcgtggggctgcgggcgcagtgggaggaccaccacctacaagatctgcaggacagctacggccaggagtggacattcgggcagcgcctgtaccagcagtacacctgctacaccgtgttcttcatcagcattgaggtgtgccagatcgccgatgtcctcatccgcaagacgcgccgtctctctgccttccagcaaggcttcttcaggaataagatcctggtgatcgccatcgtgttccaggtctgcatcggctgcttcctgtgctactgccccggcatgcccaacatcttcaacttcatgcccattcggttccagtggtggctggtccccctgccctacggcatcctcatcttcgtctatgatgagatccggaagcttggagttcgctgttgcccagggagctggtgggaccaggaactctactattagagggacgactgccttcaagcatccctgcaactgccacagcaggtgggggcagggctcgtgggaccctctggacagccaccaagatatctgagcaaccaagagtcccagccccaccagtatctgcttctgtagcccacggcaccccaaacttggagggacctgcccactcccctcccccattcccaaggttcgcacctcctggagcagcagcgcctgggcagtcctctgggctggcctcgggaaagccgccacctgtggtggcggtggggctctgacagggagtacagctgaccgcttctggagggtgtttctgttcttaggactccagtccaggctggacggctgcctgagggcccttcgttaaagacacgcttgtgtcctgggcgatggtaataaaaccagctcatgctgactgtgctgtaaaaaaaaaaaaaaaaaaaaaaaa

SEQ ID NO: 12141 - DNA, 3873 bp, Homo sapiens
aaccacagggcctgggactggggggttcccagatccttgaagctcactccgcctcctcactctcactgcatttcccaccttcctgtgggccttgcggcatcttcatcactgaggcacctggttacgcttcacctcttgtttcctgccctcactgcattccctcacctctacctttttatccttccaccctaggcttctctcctccctcttccctcactcctgactcttcctcttcccagcggacggctggaggaccgctcagtctctcctctctcacttcccttcctctctctcaccttcaccacccaacacctccctccctgcctctttctttctgctccctcattctctccccaccactctcttctcgtggcccccttgcccgcgcgccctcttcccttccccttgcctcactctctcagctttcttcccacagttgagctcgggcagctctttctggggatagctatggggctttgggggaagaaagggacagtggctccccatgaccagagtccaagacgaagacctaaaaaagggcttatcaagaaaaaaatggtgaagagggaaaaacagaagcgcaatatggaggaactgaagaaggaagtggtcatggatgatcacaaattaaccttggaagagctgagcaccaagtactccgtggacctgacaaagggccatagccaccaaagggcaaaggaaatcctgactcgagatggacccaatactgttaccccaccccccaccactccagaatgggtcaaattctgtaagcaactgttcggaggcttctccctcctactatggactggggccattctctgctttgtggcctacagcatccagatatatttcaatgaggagcctaccaaagacaacctctacctgagcatcgtactgtccgtcgtggtcatcgtcactggctgcttctcctattatcaggaggccaagagctccaagatcatggagtcttttaagaacatggtgcctcagcaagctctggtaattcgaggaggagagaagatgcaaattaatgtacaagaggtggtgttgggagacctggtggaaatcaagggtggagaccgagtccctgctgacctccggcttatctctgcacaaggatgtaaggtggacaactcatccttgactggggagtcagaaccccagagccgctcccctgacttcacccatgagaaccctctggagacccgaaacatctgcttcttttccaccaactgtgtggaaggaaccgcccggggtattgtgattgctacgggagactccacagtgatgggcagaattgcctccctgacgtcaggcctggcggttggccagacacctatcgctgctgagatcgaacacttcatccatctgatcactgtggtggccgtcttccttggtgtcactttttttgcgctctcacttctcttgggctatggttggctggaggctatcatttttctcattggcatcattgtggccaatgtgcctgaggggctgttggccacagtcactgtgtgcctgaccctcacagccaagcgcatggcgcggaagaactgcctggtgaagaacctggaggcggtggagacgctgggctccacgtccaccatctgctcagacaagacgggcaccctcacccagaaccgcatgaccgtcgcccacatgtggtttgatatgaccgtgtatgaggccgacaccactgaagaacagactggaaaaacatttaccaagagctctgatacctggtttatgctggcccgaatcgctggcctctgcaaccgggctgactttaaggctaatcaggagatcctgcccattgctaagagggccacaacaggtgatgcttccgagtcagccctcctcaagttcatcgagcagtcttacagctctgtggcggagatgagagagaaaaaccccaaggtggcagagattccctttaattctaccaacaagtaccagatgtccatccaccttcgggaggacagctcccagacccacgtactgatgatgaagggtgctccggagaggatcttggagttttgttctacctttcttctgaatgggcaggagtactcaatgaacgatgaaatgaaggaagccttccaaaatgcctatttagaactgggaggtctgggggaacgtgtgctaggcttctgcttcttgaatctgcctagcagcttctccaagggattcccatttaatacagatgaaataaatttccccatggacaacctttgttttgtgggcctcatatccatgattgaccctccccgagctgcagtgcctgatgctgtgagcaagtgtcgcagtgcaggaattaaggtgatcatggtaacaggagatcatcccattacagctaaggccattgccaagggtgtgggcatcatctcagaaggcactgagacggcagaggaagtcgctgcccggcttaagatccctatcagcaaggtcgatgccagtgctgccaaagccattgtggtgcatggtgcagaactgaaggacatacagtccaagcagcttgatcagatcctccagaaccaccctgagatcgtgtttgctcggacctcccctcagcagaagctcatcattgtcgagggatgtcagaggctgggagccgttgtggccgtgacaggtgacggggtgaacgactcccctgcgctgaagaaggctgacattggcattgccatgggcatctctggctctgacgtctctaagcaggcagccgacatgatcctgctggatgacaactttgcctccatcgtcacgggggtggaggagggccgcctgatctttgacaacctgaagaaatccatcatgtacaccctgaccagcaacatccccgagatcacgcccttcctgatgttcatcatcctcggtatacccctgcctctgggaaccataaccatcctctgcattgatctcggcactgacatggtccctgccatctccttggcttatgagtcagctgaaagcgacatcatgaagaggcttccaaggaacccaaagacggataatctggtgaaccaccgtctcattggcatggcctatggacagattgggatgatccaggctctggctggattctttacctactttgtaatcctggctgagaatggttttaggcctgttgatctgctgggcatccgcctccactgggaagataaatacttgaatgacctggaggacagctacggacagcagtggacctatgagcaacgaaaagttgtggagttcacatgccaaacggccttttttgtcaccatcgtggttgtgcagtgggcggatctcatcatctccaagactcgccgcaactcacttttccagcagggcatgagaaacaaagtcttaatatttgggatcctggaggagacactcttggctgcatttctgtcctacactccaggcatggacgtggccctgcgaatgtacccactcaagataacctggtggctctgtgccattccctacagtattctcatcttcgtctatgatgaaatcagaaaactcctcatccgtcagcacccggatggctgggtggaaagggagacgtactactaaactcagcagatgaagagcttcatgtgacacaggggtgttgtgagagctgggatggggccagagattataagtttgacacaacatctgagacactaggatgaattatcttggatgagaaagatgggcaatcctgggctggcttgagggaatcatgggcagaggatgaggtgggctgaagggaagcccagcctgcatctagctggagccccgcagggaggggcatggtcctgctgaatcccgtagccagtctagacagtaaatgtctggaaaagccaaaaaaaaaaaaaaaaaaaaaaaaaaaaaaaaaaaaaaaaa

SEQ ID NO: 12142 - DNA, 3713 bp, Homo sapiens
attttaggaagtgaggaggaggcgcgggctggagctgcggcggggtctggggcgcagagcagcggcgggaggaggcggacacgtggcaacagcggtagcagcccgggcggcggcagcaacagcggcggcggcatcggcccgagccgccggccgccctcccaccctcccgccccgcggcagccctagctccctccacttggctcccctggtcccgctcgctcggccgggagctgctctgtgcttttctctctgattctccagcgacaggacccggcgccgggcactgagcaccgccaccatggggaagggggttggacgtgataagtatgagcctgcagctgtttcagaacaaggtgataaaaagggcaaaaagggcaaaaaagacagggacatggatgaactgaagaaagaagtttctatggatgatcataaacttagccttgatgaacttcatcgtaaatatggaacagacttgagccggggattaacatctgctcgtgcagctgagatcctggcgcgagatggtcccaacgccctcactccccctcccactactcctgaatggatcaagttttgtcggcagctctttggggggttctcaatgttactgtggattggagcgattctttgtttcttggcttatagcatccaagctgctacagaagaggaacctcaaaacgataatctgtacctgggtgtggtgctatcagccgttgtaatcataactggttgcttctcctactatcaagaagctaaaagttcaaagatcatggaatccttcaaaaacatggtccctcagcaagcccttgtgattcgaaatggtgagaaaatgagcataaatgcggaggaagttgtggttggggatctggtggaagtaaaaggaggagaccgaattcctgctgacctcagaatcatatctgcaaatggctgcaaggtggataactcctcgctcactggtgaatcagaaccccagactaggtctccagatttcacaaatgaaaaccccctggagacgaggaacattgccttcttttcaaccaattgtgttgaaggcaccgcacgtggtattgttgtctacactggggatcgcactgtgatgggaagaattgccacacttgcttctgggctggaaggaggccagacccccattgctgcagaaattgaacattttatccacatcatcacgggtgtggctgtgttcctgggtgtgtctttcttcatcctttctctcatccttgagtacacctggcttgaggctgtcatcttcctcatcggtatcatcgtagccaatgtgccggaaggtttgctggccactgtcacggtctgtctgacacttactgccaaacgcatggcaaggaaaaactgcttagtgaagaacttagaagctgtggagaccttggggtccacgtccaccatctgctctgataaaactggaactctgactcagaaccggatgacagtggcccacatgtggtttgacaatcaaatccatgaagctgatacgacagagaatcagagtggtgtctcttttgacaagacttcagctacctggcttgctctgtccagaattgcaggtctttgtaacagggcagtgtttcaggctaaccaggaaaacctacctattcttaagcgggcagttgcaggagatgcctctgagtcagcactcttaaagtgcatagagctgtgctgtggttccgtgaaggagatgagagaaagatacgccaaaatcgtcgagatacccttcaactccaccaacaagtaccagttgtctattcataagaaccccaacacatcggagccccaacacctgttggtgatgaagggcgccccagaaaggatcctagaccgttgcagctctatcctcctccacggcaaggagcagcccctggatgaggagctgaaagacgcctttcagaacgcctatttggagctggggggcctcggagaacgagtcctaggtttctgccacctctttctgccagatgaacagtttcctgaagggttccagtttgacactgacgatgtgaatttccctatcgataatctgtgctttgttgggctcatctccatgattgaccctccacgggcggccgttcctgatgccgtgggcaaatgtcgaagtgctggaattaaggtcatcatggtcacaggagaccatccaatcacagctaaagctattgccaaaggtgtgggcatcatctcagaaggcaatgagaccgtggaagacattgctgcccgcctcaacatcccagtcagccaggtgaaccccagggatgccaaggcctgcgtagtacacggcagtgatctaaaggacatgacctccgagcagctggatgacattttgaagtaccacactgagatagtgtttgccaggacctcccctcagcagaagctcatcattgtggaaggctgccaaagacagggtgctatcgtggctgtgactggtgacggtgtgaatgactctccagctttgaagaaagcagacattggggttgctatggggattgctggctcagatgtgtccaagcaagctgctgacatgattcttctggatgacaactttgcctcaattgtgactggagtagaggaaggtcgtctgatctttgataacttgaagaaatccattgcttataccttaaccagtaacattcccgagatcaccccgttcctgatatttattattgcaaacattccactaccactggggactgtcaccatcctctgcattgacttgggcactgacatggttcctgccatctccctggcttatgagcaggctgagagtgacatcatgaagagacagcccagaaatcccaaaacagacaaacttgtgaatgagcggctgatcagcatggcctatgggcagattggaatgatccaggccctgggaggcttctttacttactttgtgattctggctgagaacggcttcctcccaattcacctgttgggcctccgagtggactgggatgaccgctggatcaacgatgtggaagacagctacgggcagcagtggacctatgagcagaggaaaatcgtggagttcacctgccacacagccttcttcgtcagtatcgtggtggtgcagtgggccgacttggtcatctgtaagaccaggaggaattcggtcttccagcaggggatgaagaacaagatcttgatatttggcctctttgaagagacagccctggctgctttcctttcctactgccctggaatgggtgttgctcttaggatgtatcccctcaaacctacctggtggttctgtgccttcccctactctcttctcatcttcgtatatgacgaagtcagaaaactcatcatcaggcgacgccctggcggctgggtggagaaggaaacctactattagccccccgtcctgcacgccgtggagcatcaggccacacactctgcatccgacacccaccccctctttgtgtacttcagtcttggagtttggaactctaccctggtaggaaagcaccgcagcatgtggggaagcaagacgtcctggaatgaagcatgtagctctatggggggaggggggagggctgcctgaaaaccatccatctgtggaaatgacagcggggaaggtttttatgtgcctttttgtttttgtaaaaaaggaacacccggaaagactgaaagaatacattttatatctggatttttacaaataaagatggctattataatggaaaaaaaaaaaaaaa

SEQ ID NO: 12143 - DNA, 5468 bp, Homo sapiens
tctctgtctgccagggtctccgactgtcccagacgggctggtgtgggcttgggatcctcctggtgacctctcccgctaaggtccctcagccactctgccccaagatgggccgtggggctggccgtgagtactcacctgccgccaccacggcagagaatgggggcggcaagaagaaacagaaggagaaggaactggatgagctgaagaaggaggtggcaatggatgaccacaagctgtccttggatgagctgggccgcaaataccaagtggacctgtccaagggcctcaccaaccagcgggctcaggacgttctggctcgagatgggcccaacgccctcacaccacctcccacaacccctgagtgggtcaagttctgccgtcagcttttcggggggttctccatcctgctgtggattggggctatcctctgcttcctggcctacggcatccaggctgccatggaggatgaaccatccaacgacaatctatatctgggtgtggtgctggcagctgtggtcattgtcactggctgcttctcctactaccaggaggccaagagctccaagatcatggattccttcaagaacatggtacctcagcaagcccttgtgatccgggagggagagaagatgcagatcaacgcagaggaagtggtggtgggagacctggtggaggtgaagggtggagaccgcgtccctgctgacctccggatcatctcttctcatggctgtaaggtggataactcatccttaacaggagagtcggagccccagacccgctcccccgagttcacccatgagaaccccctggagacccgcaatatctgtttcttctccaccaactgtgttgaaggcactgccaggggcattgtgattgccacaggagaccggacggtgatgggccgcatagctactctcgcctcaggcctggaggttgggcggacacccatagcaatggagattgaacacttcatccagctgatcacaggggtcgctgtattcctgggggtctccttcttcgtgctctccctcatcctgggctacagctggctggaggcagtcatcttcctcatcggcatcatagtggccaacgtgcctgaggggcttctggccactgtcactgtgtgcctgaccctgacagccaagcgcatggcacggaagaactgcctggtgaagaacctggaggcggtggagacgctgggctccacgtccaccatctgctcggacaagacgggcaccctcacccagaaccgcatgaccgtcgcccacatgtggttcgacaaccaaatccatgaggctgacaccaccgaagatcagtctggggccacttttgacaaacgatcccctacgtggacggccctgtctcgaattgctggtctctgcaaccgcgccgtcttcaaggcaggacaggagaacatctccgtgtctaagcgggacacagctggtgatgcctctgagtcagctctgctcaagtgcattgagctctcctgtggctcagtgaggaaaatgagagacagaaaccccaaggtggcagagattcctttcaactctaccaacaagtaccagctgtctatccacgagcgagaagacagcccccagagccacgtgctggtgatgaagggggccccagagcgcattctggaccggtgctccaccatcctggtgcagggcaaggagatcccgctcgacaaggagatgcaagatgcctttcaaaatgcctacatggagctggggggacttggggagcgtgtgctgggattctgtcaactgaatctgccatctggaaagtttcctcggggcttcaaattcgacacggatgagctgaactttcccacggagaagctttgctttgtggggctcatgtctatgattgaccctccccgggctgctgtgccagatgctgtgggcaagtgccgaagcgcaggcatcaaggtgatcatggtaaccggggatcaccctatcacagccaaggccattgccaaaggcgtgggcatcatatcagagggtaacgagactgtggaggacattgcagcccggctcaacattcccatgagtcaagtcaaccccagagaagccaaggcatgcgtggtgcacggctctgacctgaaggacatgacatcggagcagctcgatgagatcctcaagaaccacacagagatcgtctttgctcgaacgtctccccagcagaagctcatcattgtggagggatgtcagaggcagggagccattgtggccgtgacgggtgacggggtgaacgactcccctgcattgaagaaggctgacattggcattgccatgggcatctctggctctgacgtctctaagcaggcagccgacatgatcctgctggatgacaactttgcctccatcgtcacgggggtggaggagggccgcctgatctttgacaacttgaagaaatccatcgcctacaccctgaccagcaacatccccgagatcacccccttcctgctgttcatcattgccaacatccccctacctctgggcactgtgaccatcctttgcattgacctgggcacagatatggtccctgccatctccttggcctatgaggcagctgagagtgatatcatgaagcggcagccacgaaactcccagacggacaagctggtgaatgagaggctcatcagcatggcctacggacagatcgggatgatccaggcactgggtggcttcttcacctactttgtgatcctggcagagaacggtttcctgccatcacggctactgggaatccgcctcgactgggatgaccggaccatgaatgatctggaggacagctatggacaggagtggacctatgagcagcggaaggtggtggagttcacgtgccacacggcattctttgccagcatcgtggtggtgcagtgggctgacctcatcatctgcaagacccgccgcaactcagtcttccagcagggcatgaagaacaagatcctgatttttgggctcctggaggagacggcgttggctgcctttctctcttactgcccaggcatgggtgtagccctccgcatgtacccgctcaaagtcacctggtggttctgcgccttcccctacagcctcctcatcttcatctatgatgaggtccgaaagctcatcctgcggcggtatcctggtggctgggtggagaaggagacatactactgaccccattggaagaagaaccaggcatggaaagatggggagctctggaggtgttgtggggatggtgatggagagggatggaaataacgggtggcattgggtggcaacatttggggagagataatgaggcaactcagcaggctaagttgcggggtatataaattggggtgatgaccccatagacctaactgtgaacaatcagattagacactatgtgttagagtccccccgaccagatccttttccatcccactccactatgttgtctattttttctgaggaattaagggttaccccaccctgcccactcccatcccttcaaccccacttcctactgtaatagatcagcatccaaaagcaggaacccatctaaaccagaaggaagccctctcagatcaccccagcctcactccatttcccacttccacccccgttagcttcctgcaggactctatccctggcttccccttcagaccttgcaatcacaaaaggttcttctggtgagtgcaagagcctgagactggaaaaggtggacttgtctcccagtcgaggctggtaagggaccttcagggagagctgggcagacaggtgggagatggaggtagggctggctggaggaaggaaacaacaaaggaagtgaggtagtgccaatgacaggacatttgacatgagtctccagatagatgtcgtggactccagctctacgtcccacattttagaataccccaccagcagaacaaactcagatctcatcagggtagcagcagaggcaggaccagaaggcaatcaagagcttccagaaatgccacacttgtgtgccacagagttccccgctgacccttggttaggggtcctcttagtccacaaggtccggatgtcactcatgtacttaataacacttcaccttctgtaatactaagtcctcagagctccatgctgttctgaaagggatggccacaagttctttcccagcctcttccattccctttcttttcatgcccatcccgatgaacctgcatcattccccgacactgccaagccaaccctggaaaaggagttcgctggccattggctagaatcagggtggagaagttccctgaaccttcctgtctcccagggacatgtatgcttccagggacaagcttaggtcatgaacatggtcagaacctttggacaagaggaaaaatactaagagatttgctttttctgggtgcggtggctcatgcctgtaatcccagcactttgggaggccgaggcaggtggatcatgaggtcaggagttcgaggcgagcctggccaacatggtgaaaccctgtctctactaaaagtacaaaaaattagccagtcatggtggcacacgcctgtaatctcagctactcaggaggctgaggcaggagaattgcttgaacctgtgaggaagaggttgcagtgagctgagatcgtgccattacactccagcctgggcgaaagggtgagactccatctcaaaaaaaaaaaaaatgatttgcttttgacgtcttaggtggcagggctgttccctccaggcaaatgcccttcaaaccgacgatcattgtgcccacttaccctgggctggagagttggtttcaggttcctacaggagatagctttctttcccttactccctatctaacacttttgctctgcaggcagccttgcccattctctaagcctggcttagaaggcactgggaatgtcctgtagagagagacctagataggtcatgcaagtgagaaagacatctgaggaaaatggaagacctaaggcagacaggaaggaagcacaaaagacaagcattgggtcagacccataaaccacctcccaaaggctgtcatttcattgcactggaattttgctttatcagaagcaaggaagtaagggagtcattgccttgggcctgggaatctaagtgggagacaatattaatttggatccgattaattggagattactaactgtggacaaaagtttatctttgcacaatcaataaaaatggcatttttttagtaaattaagagcataaacaatattgctagaggtggcatgtttagtctaccaaaaacaatacttttcaggcactttagaaatatccttttagaagcagcgagtgcatgggctaattatcatcaatctttatgtatttgttaaagaaacatctacaggatctttattggtgaccttttgtaagacattagtttgaggtactacctatgtacttgaaaataataaagtggcatttctttatgaaaaaaaaaaaaaaaaaaaaaaaaaaaaaaaaaaaaaaaaa

SEQ ID NO: 12144 - DNA, 2900 bp, Homo sapiens
ccaggcagttctgtgcgtgttcactgtttagtagtactcaaaactgccagtgtgagaggatttggaaatcactggatctgctcaatacaaaaatgttttttcgagtctttctccattttatcaggagtcattctgccactgcagtggatttccttcctgtgatggtgcaccggctcccagttttcaaaaggtacatgggaaatactcctcagaaaaaagccgtctttgggcagtgtcggggtctgccatgtgttgcaccgctgctgaccacagtggaagaggctccacggggcatctctgctcgagtctggggacattttcctaagtggctcaatggctctctacttcgaattggacctgggaaattcgagtttgggaaggataagtacaatcattggtttgatgggatggcgctgcttcaccagttcagaatggcaaagggcacagtgacatacaggagcaagtttctacagagtgatacatataaggccaacagtgctaaaaaccgaattgtgatctcagaatttggcacactggctctcccggatccatgcaagaatgtttttgaacgtttcatgtccaggtttgagctgcctggtaaagctgcagccatgactgacaatactaatgtcaactatgtgcggtacaagggtgattactacctctgcactgagaccaactttatgaataaagtggacattgaaactctggaaaaaacagaaaaggtagattggagcaaatttattgctgtgaatggagcaactgcacatcctcattatgacctggatggaacagcatacaatatggggaactcctttgggccatatggtttctcctataaggttattcgggttcctccagagaaggtggaccttggggagacaatccatggagtccaggtgatatgttctattgcttctacagagaaagggaaaccttcttactaccatagctttggaatgacaaggaactatataattttcattgaacaacctctaaagatgaacctgtggaaaattgccacttctaaaattcggggaaaggccttttcagatgggataagctgggaaccccagtgtaatacgcggtttcatgtggtggaaaaacgcactggacagctccttccagggagatactacagcaaaccttttgttacatttcatcaaatcaatgcctttgaggaccagggctgtgttataattgatttgtgctgtcaagataatggaagaaccctagaagtttaccagttacagaatctcaggaaggctggggaagggcttgatcaggtccataattcagcagccaaatctttccctcgaaggtttgttttgcctttaaatgtcagtttgaatgcccctgagggagacaacctgagtccattgtcctatacttcagccagtgctgtgaaacaggctgatggaacgatctggtgctctcatgaaaatctacatcaggaggacctagaaaaggaaggaggcattgaatttcctcagatctactatgatcgattcagtggcaaaaagtatcatttcttttatggctgtggctttcggcatttagtgggggattctctgatcaaggttgatgtggtgaataagacactgaaggtttggagagaagatggcttttatccctcagaacctgtttttgttccagcaccaggaaccaatgaagaagatggtggggttattctttctgtggtgatcactcccaaccagaatgaaagcaattttatcctagttttggatgccaagaactttgaagagctgggccgagcagaggtacctgtgcagatgccttatgggttccatggtaccttcatacccatctgatgggacaaccacaaggtctggaaactaggtttaaaataagtgtgcacttggacataaagactggagaaataaacactgaggactccaaaaggggggcaaggaggaagaggggcaggggttaaaaagctacctattgaatactatgttccctatttgggtgatgggttcgttagaagtccaaacctcagcagcacacaatatactcatgtaacaagcctgcacatgtaccccagaatctaaaataaaaataaaaagaaaaacaaagaatgtactctatacaaaagacagagcataaagggcaccgtacctcccaaaccaatgtcccaaatagacatttagtttaaaaatttctgttaaaaacagaattcactatttccttgccactgccaagtcacgccatggcagaggctcgagtgcatacaagcttcggttttacccttaatacaccatcatgaccaatggaggcattgctgctggaggtgtcatggccattaacactactttataagaggtgcggaagactgccctcactcatcatggcctagcatgtgcaatttgtgaagctgccaaagcgttagacaagcaccaagcccacttttgtctgcctgcacccaactgcaatgagcctatgtatgtcaagttggtggagtcccatggtgctgaacaccaactcaccctaattaaggttgatgacaacaagaaaccagaggaatgggtaggcctctgtaaaactgagagggaaacccccgaaaagtggttggctgcagttgtgcagtagttaaggactaggtcaaagaatcttaagtcaaggatgtcatcgaagagtatttcaaatgtaagaaatgaacaaataaaactttggcactcatgtttcttaagaaaaaacaccacaaagcagaattcataatataactatggttatagatatttattttttagggctcttacttgaaataattaagaaagtattgatacaaccttttgaagagggttttaaatttcatttattggatatatcttcctctaggtaataataagaatacacgaaataaaaaaaaaaaaaaaaaa

SEQ ID NO: 12145 - DNA, 2979 bp, Homo sapiens
agcaaaccaatcgcaagcctcgttgagtggaaggggtgggatcttccccggaagttttggttaaagcccctccaatcagcggctcggtgcggcaagtttgaatttcgtggaggctcgggttgtgagggttcctgcttcggagtcggcggtggtcgtccagaccgagtgttctttactttttgtttggttgaggtttcacgctagaaggtggctcaggatgtcttcatcacattttgccagtcgacacaggaaggatataagtactgaaatgattagaactaaaattgctcataggaaatcactgtctcagaaagaaaatagacataaggaatacgaacgaaatagacactttggtttgaaagatgtaaacattccaaccttggaaggtagaattcttgttgaattagatgagacatctcaagagcttgttccagaaaagaccaatgttaagccaagggcaatgaaaactattctaggtgatcaacgaaaacagatgctccaaaaatacaaagaagaaaagcaacttcaaaaattgaaagagcagagagagaaagctaaacgaggaatatttaaagtgggtcgttatagacctgatatgccttgttttcttttatcaaaccagaatgctgtgaaagctgagccaaaaaaggctattccatcttctgtacggattacaaggtcaaaggccaaagaccaaatggagcagactaagattgataacgagagtgatgttcgagcaatccgacctggtccaagacaaacttctgaaaagaaagtgtcagacaaagagaaaaaagttgtgcagcctgtaatgcccacgtcgttgagaatgactcgatcagctactcaagcagcaaagcaggttcccagaacagtctcatctaccacagcaagaaagccagtcacaagagctgctaatgaaaacgaaccagaaggaaaggtgccaagtaaaggaagacctgccaaaaatgtagaaacaaaacccgacaagggtatttcttgtaaagtcgatagtgaagaaaatactttgaattcacaaactaatgcaacaagtggaatgaatccagatggagtcttatcaaaaatggaaaacttacctgagataaatactgcaaaaataaaagggaagaattccttcgcacctaaggattttatgtttcagccactggatggtctgaagacctatcaagtaacacctatgactcccagaagtgccaatgcttttttgacacccagttacacctggactcctttaaaaacagaagttgatgagtctcaagcaacaaaagaaattttggcacaaaaatgtaaaacttactctaccaagacaatacagcaagattcaaataaattgccatgtcctttgggtcctctaactgtttggcatgaagaacatgttttaaataaaaatgaagctactactaaaaatttaaatggccttccaataaaagaagtcccatcacttgaaagaaatgaaggtcgaattgctcagccccaccatggtgtgccatatttcagaaatatcctccagtcagaaactgagaaattaacttcacattgcttcgagtgggacaggaaacttgaattggacattccagatgatgctaaagatcttattcgcacagcagttggtcaaacaagactccttatgaaggaaaggtttaaacagtttgaaggactggttgatgattgtgaatataaacgaggtataaaggagactacctgtacagatctggatggattttgggatatggttagttttcagatagaagatgtaatccacaaattcaacaatctgatcaaacttgaggaatctgggtggcaagtcaataataatatgaatcataatatgaacaaaaatgtctttaggaaaaaagttgtctcaggtatagcaagtaaaccaaaacaggatgatgctggaagaattgcagcgagaaatcgcctagctgccataaaaaatgcaatgagagagagaattaggcaggaagaatgtgctgaaacagcagtttctgtgataccaaaggaagttgataaaatagtgttcgatgctggatttttcagagttgaaagtcctgttaaattattctcaggactttctgtctcttctgaaggcccttctcaaagacttggaacacctaagtctgtcaacaaagctgtatctcagagtagaaatgagatgggcattccacaacaaactacatcaccagaaaatgccggtcctcagaatacgaaaagtgaacatgtgaagaagactttgtttttgagtattcctgaaagcaggagcagcatagaagatgctcagtgtcctggattaccagatttaattgaagaaaaccatgttgtaaataagacagacttgaaggtggattgtttatccagtgagagaatgagtttgcctcttcttgctggtggagtagcagatgatattaatactaacaaaaaagaaggaatttcagatgttgtggaaggaatggaactgaattcttcaattacatcacaggatgttttgatgagtagccctgaaaaaaatacagcttcacaaaatagcatcttagaagaaggggaaactaaaatttctcagtcagaactatttgataataaaagtctcactactgaatgccaccttcttgattcaccaggtctaaactgcagtaatccatttactcagctggagaggagacatcaagaacatgccagacacatttcttttggtggtaacctgattactttttcacctctacaaccaggagaattttgaatttaaaaataaatccaaacattttccttcatattatcaatgcttatatattccttagactattgaaattttggagaaaatgtatttgtgttcacttctatagcatataatgttttaatattctgtgttcatcaaagtgtattttagatatactctttctcaagggaagtggggatattttgtacattttcaacacagaataaaaaatgtactgtgccttg

SEQ ID NO: 12146 - DNA, 3214 bp, Homo sapiens
gggtgggaggagccagcggccggggaggttctagtctgttctgtcttgcggcagccgcccccttctgcgcggtcacgccgagccagcgcctgggcctggaaccgggccgtagcccccccagtttcgcccaccacctccctaccatggacccccgcaaagtgaacgagcttcgggcctttgtgaaaatgtgtaagcaggatccgagcgttctgcacaccgaggaaatgcgcttcctgagggagtgggtggagagcatgggtggtaaagtaccacctgctactcagaaagctaaatcagaagaaaataccaaggaagaaaaacctgatagtaagaaggtggaggaagacttaaaggcagacgaaccatcaagtgaggaaagtgatctagaaattgataaagaaggtgtgattgaaccagacactgatgctcctcaagaaatgggagatgaaaatgcggagataacggaggagatgatggatcaggcaaatgataaaaaagtggctgctattgaagccctaaatgatggtgaactccagaaagccattgacttattcacagatgccatcaagctgaatcctcgcttggccattttgtatgccaagagggccagtgtcttcgtcaaattacagaagccaaatgctgccatccgagactgtgacagagccattgaaataaatcctgattcagctcagccttacaagtggcgggggaaagcacacagacttctaggccactgggaagaagcagcccatgatcttgcccttgcctgtaaattggattatgatgaagatgctagtgcaatgctgaaagaagttcaacctagggcacagaaaattgcagaacatcggagaaagtatgagcgaaaacgtgaagagcgagagatcaaagaaagaatagaacgagttaagaaggctcgagaagagcatgagagagcccagagggaggaagaagccagacgacagtcaggagctcagtatggctcttttccaggtggctttcctgggggaatgcctggtaattttcccggaggaatgcctggaatgggagggggcatgcctggaatggctggaatgcctggactcaatgaaattcttagtgatccagaggttcttgcagccatgcaggatccagaagttatggtggctttccaggatgtggctcagaacccagcaaatatgtcaaaataccagagcaacccaaaggttatgaatctcatcagtaaattgtcagccaaatttggaggtcaagcgtaatgtccttctgataaataaagcccttgctgaaggaaaagcaacctagatcaccttatggatgtcgcaataatacaaaccagtgtacctctgaccttctcatcaagagagctggggtgctttgaagataatccctacccctctcccccaaatgcagctgaagcattttacagtggtttgccattagggtattcattcagataatgttttcctactaggaattacaaactttaaacactttttaaatcttcaaaatatttaaaacaaatttaaagggcctgttaattcttatatttttctttactaatcattttggatttttttctttgaattattggcagggaatatacttatgtatggaagattactgctctgagtgaaataaaagttattagtgcgaggcaaacataactcatttgaggataaagtttgtgttggatatgtggttcctgatgcattttgacttgtctttttaaatgctttatctttttctttaaagatttatttcaataaaactaattgggaccacccgtatttcagtaggacctgggtagggattggaagtacttggcagggcagcagcaatcttgctgtgtttgatataacatgcatccttgggcaggttgcccttaaatcttacactgtggtgaagggatgttttttttgtaatgctgcagtagagttggagtacttagttctcttgttgtccagtatatctaataagtgtttttcatattatttccacgtaagggaaataaggtagtacttttctttttatatttctatgcttaaaattctctttcctagtcaaaaattgcccaaatctgtgtttgctttctgcttgctacatttgtctcccttacttttcttgagctaaagacaggctttttccaccggcatcatcactgctatcatcattaacagcgtaattatacaagcatatttaatgctgagtttaatttaatatgtaatacatatggtaattgtagggtaatacccacaacaactgtagtttcttacttggccaagagaatgcttatttaagtgttagacttccattctggcaaaatcttgccttatcagaagacattggaaagagggattccctttggtgtttggtcttctacttagaaaaacctattgcagttagtttatcttgtagtattcatctttgtattctgaagataaggtttgaattaaattgatacacacagaggggaaccgattttttttatccaatgtgaattataaatgagataatccacagttattcattgtggagttgttgagactatgaaagactcattgtctttgtattcagctcttaaatagtgtaactatatccccacctctgcttgctttctttccctcccctccaatgataaagaaaatgataaattttctgttgtgcattcaattcttattttaaataagactaagtataggcattgtacctgacattgctacgtttctaccagtgtttcaatttaaagtgctagtgtttaaaaacattttcaagggataaggccttctgtactttgcttatttgaagaatcagtggtaggagcagtgaagtaaattctatggagtacatttctaaaataccacatttctgaaatcataaataagtttattcaggttctaaccctttgctgtacacaagcagacagaaatgcatctgttacataaatgagaaaaagctattatgctgatggagcatgctttttaaatcctttaaaaacactcaccatataaacttgcatttgagcttgtgtgttcttttgttaatgtgtagagttctcctttctcgaaattgccagtgtgtacttggcttaactcaagaacagtttcttctggattccttatttgatttatttaacctaattatattctaatattgcaaatattaccataagtgggtaaaagtaaaattcctcttctgaaaaaaaaaaaaaaaaaaaaaa

SEQ ID NO: 12147 - DNA, 2063 bp, Homo sapiens
tgccgggatccaggtctccggggtccgctttggccagaggcgcggaaggaagcagtgcccggcgacactgcacccatcccggctgcttttgctgcgccctctcagcttcccaagaaaggcatcgtcatgtgatcatcacctaagaactagaacatcagcaggccctagaagcctcactcttgcccctccctttaatatctcaaaggatgacacttctgtggtgtgtagtgagtctctacttttatggaatcctgcaaagtgatgcctcagaacgctgcgatgactggggactagacaccatgaggcaaatccaagtgtttgaagatgagccagctcgcatcaagtgcccactctttgaacacttcttgaaattcaactacagcacagcccattcagctggccttactctgatctggtattggactaggcaggaccgggaccttgaggagccaattaacttccgcctccccgagaaccgcattagtaaggagaaagatgtgctgtggttccggcccactctcctcaatgacactggcaactatacctgcatgttaaggaacactacatattgcagcaaagttgcatttcccttggaagttgttcaaaaagacagctgtttcaattcccccatgaaactcccagtgcataaactgtatatagaatatggcattcagaggatcacttgtccaaatgtagatggatattttccttccagtgtcaaaccgactatcacttggtatatgggctgttataaaatacagaattttaataatgtaatacccgaaggtatgaacttgagtttcctcattgccttaatttcaaataatggaaattacacatgtgttgttacatatccagaaaatggacgtacgtttcatctcaccaggactctgactgtaaaggtagtaggctctccaaaaaatgcagtgccccctgtgatccattcacctaatgatcatgtggtctatgagaaagaaccaggagaggagctactcattccctgtacggtctattttagttttctgatggattctcgcaatgaggtttggtggaccattgatggaaaaaaacctgatgacatcactattgatgtcaccattaacgaaagtataagtcatagtagaacagaagatgaaacaagaactcagattttgagcatcaagaaagttacctctgaggatctcaagcgcagctatgtctgtcatgctagaagtgccaaaggcgaagttgccaaagcagccaaggtgaagcagaaaggtaatagatgcggtcagtgatgaatctctcagctccaaattaacattgtggtgaataaggacaaaaggagagattgagaacaagagagctccagcacctagcccgacggcatctaacccatagtaatgaatcaaacttaaatgaaaaatatgaaagttttcatctatgtaagatactcaaaatattgtttctgatattgttagtaccgtaatgcccaaatgtagctaaaaaaatcgacgtgagtacagtgagacacaattttgtgtctgtacaattatgaaaaattaaaaacaaagaaaatattcaaagctaccaaagatagaaaaaactggtagagccacatattgttggtgaattattaagacccttttaaaaatcattcatggtagagtttaagagtcataaaaaagattgcatcatctgacctaagactttcggaatttttcctgaacaaataacagaaagggaattatataccttttaatattattagaagcattatctgtagttgtaaaacattattaatagcagccatccaattgtatgcaactaattaaggtattgaatgtttattttccaaaaatgcataattataatattattttaaacactatgtatcaatatttaagcaggtttataatataccagcagccacaattgctaaaatgaaaatcatttaaattatgattttaaatggtataaacatgatttctatgttgatagtactatattattctacaataaatggaaattataaagccttcttgtcagaagtgctgctcctaaaaaaaaaaaaaaaaaaaaaa

SEQ ID NO: 12148 - DNA, 4726 bp, Homo sapiens
tgccgggatccaggtctccggggtccgctttggccagaggcgcggaaggaagcagtgcccggcgacactgcacccatcccggctgcttttgctgcgccctctcagcttcccaagaaaggcatcgtcatgtgatcatcacctaagaactagaacatcagcaggccctagaagcctcactcttgcccctccctttaatatctcaaaggatgacacttctgtggtgtgtagtgagtctctacttttatggaatcctgcaaagtgatgcctcagaacgctgcgatgactggggactagacaccatgaggcaaatccaagtgtttgaagatgagccagctcgcatcaagtgcccactctttgaacacttcttgaaattcaactacagcacagcccattcagctggccttactctgatctggtattggactaggcaggaccgggaccttgaggagccaattaacttccgcctccccgagaaccgcattagtaaggagaaagatgtgctgtggttccggcccactctcctcaatgacactggcaactatacctgcatgttaaggaacactacatattgcagcaaagttgcatttcccttggaagttgttcaaaaagacagctgtttcaattcccccatgaaactcccagtgcataaactgtatatagaatatggcattcagaggatcacttgtccaaatgtagatggatattttccttccagtgtcaaaccgactatcacttggtatatgggctgttataaaatacagaattttaataatgtaatacccgaaggtatgaacttgagtttcctcattgccttaatttcaaataatggaaattacacatgtgttgttacatatccagaaaatggacgtacgtttcatctcaccaggactctgactgtaaaggtagtaggctctccaaaaaatgcagtgccccctgtgatccattcacctaatgatcatgtggtctatgagaaagaaccaggagaggagctactcattccctgtacggtctattttagttttctgatggattctcgcaatgaggtttggtggaccattgatggaaaaaaacctgatgacatcactattgatgtcaccattaacgaaagtataagtcatagtagaacagaagatgaaacaagaactcagattttgagcatcaagaaagttacctctgaggatctcaagcgcagctatgtctgtcatgctagaagtgccaaaggcgaagttgccaaagcagccaaggtgaagcagaaagtgccagctccaagatacacagtggaactggcttgtggttttggagccacagtcctgctagtggtgattctcattgttgtttaccatgtttactggctagagatggtcctattttaccgggctcattttggaacagatgaaaccattttagatggaaaagagtatgatatttatgtatcctatgcaaggaatgcggaagaagaagaatttgtattactgaccctccgtggagttttggagaatgaatttggatacaagctgtgcatctttgaccgagacagtctgcctgggggaattgtcacagatgagactttgagcttcattcagaaaagcagacgcctcctggttgttctaagccccaactacgtgctccagggaacccaagccctcctggagctcaaggctggcctagaaaatatggcctctcggggcaacatcaacgtcattttagtacagtacaaagctgtgaaggaaacgaaggtgaaagagctgaagagggctaagacggtgctcacggtcattaaatggaaaggggaaaaatccaagtatccacagggcaggttctggaagcagctgcaggtggccatgccagtgaagaaaagtcccaggcggtctagcagtgatgagcagggcctctcgtattcatctttgaaaaatgtatgaaaggaataatgaaaagggtaaaaagaacaaggggtgctccaggaagaaagagtccccccagtcttcattcgcagtttatggtttcataggcaaaaataatggtctaagcctcccaatagggataaatttagggtgactgtgtggctgactattctgcttcctcaggcaacactaaagtttagaaagatatcatcaacgttctgtcaccagtctctgatgccactatgttctttgcaggcaaagacttgttcaatgcgaatttccccttctacattgtctatccctgtttttatatgtctccattctttttaaaatcttaacatatggagcagcctttcctatgaatttaaatatgcctttaaaataagtcactgttgacagggtcatgagtttccgagtatagttttctttttatcttatttttactcgtccgttgaaaagataatcaaggcctacattttagctgaggataatgaacttttttcctcattcggctgtataatacataaccacagcaagactgacatccacttaggatgatacaaagcagtgtaactgaaaatgtttcttttaattgatttaaaggacttgtcttctataccacccttgtcctcatctcaggtaatttatgaaatctatgtaaacttgaaaaatatttcttaatttttgtttttgctccagtcaattcctgattatccacaggtcaacccacattttttcattccttctccctatctgcttatatcgcattgctcatttagagtttgcaggaggctccatactaggttcagtctgaaagaaatctcctaatggtgctatagagagggaggtaacagaaagactcttttagggcatttttctgactcatgaaaagagcacagaaaaggatgtttggcaatttgtcttttaagtcttaaccttgctaatgtgaatactgggaaagtgattttttctcactcgtttttgttgctccattgtaaagggcggaggtcagtcttagtggccttgagagttgcttttggcattaatattctaagagaattaactgtatttcctgtcacctattcactagtgcaggaaatatacttgctccaaataagtcagtatgagaagtcactgtcaatgaaagttgttttgtttgttttcagtaatattttgctgtttttaagacttggaaaactaagtgcagagtttacagagtggtaaatatctatgttacatgtagattatacatatatatacacacgtgtatatgagatatatatcttatatctccacaaacacaaattatatatatacatatccacacacatacattacatatatctgtgtatataaatccacatgcacatgaaatatatatatatatataatttgtgtgtgtgtatgtgtatgtatatgactttaaatagctatgggtacaatattaaaaaccactggaactcttgtccagtttttaaattatgtttttactggaatgtttttgtgtcagtgttttctgtacatattatttgttaattcacagctcacagagtgatagttgtcatagttcttgccttccctaagtttatataaataacttaagtattgctacagtttatctaggttgcagtggcatctgctgtgcacagagcttccatggtcactgctaagcagtagccagccatcgggcattaattgatttcctactatattcccagcagacacatttagaaactaagctatgttaacctcagtgctcaactatttgaactgttgagtgataaaggaaacaaatataactgtaaatgaatcttggtatcctgtgaaacagaataattcgtaatttaagaaagcccttatcccggtaacatgaatgttgatgaacaaatgtaaaattatatcctatatttaagtacccataataaatcatttccctctataagtgttattgattattttaaattgaaaaaagtttcacttggatgaaaaaagtagaaaagtaggtcattcttggatctacttttttttagccttattaatatttttccctattagaaaccacaattactccctctattaacccttcacttactagaccagaaaagaacttattccagataagctttgaatatcaattcttacataaactttaggcaaacagggaatagtctagtcaccaaaggaccattctcttgccaatgctgcattccttttgcacttttggattccatatttatcccaaatgctgttgggcacccctagaaataccttgatgttttttctatttatatgcctgcctttggtacttaattttacaaatgctgtaatataaagcatatcaagtttatgtgatacgtatcattgcaagagaatttgtttcaagatttttttttaatgttccagaagatggccaatagagaacattcaagggaaatggggaaacataatttagagaacaagaacaaaccatgtctcaaatttttttaaaaaaaattaatggttttaaatatatgctatagggacgttccatgcccaggttaacaaagaactgtgatatatagagtgtctaattacaaaatcatatacgatttatttaattctcttctgtattgtaacttagatgattcccaaggactctaataaaaaatcacttcattgtatttggaaacaaaaacatcattcattaattacttattttctttccataggttttaatattttgagagtgtcttttttatttcattcatgaacttttgtatttttcatttttcatttgatttgtaaatttacttatgttaaaaataaaccatttattttcagctttg

SEQ ID NO: 12149 - DNA, 2939 bp, Homo sapiens
ggcgggtgagaggccgcggcggcaggtccacctgggcttgcgaaggcacagattccccgtccacagctcacgaccagatgcaccagcaggagtccacatcgaggacgtcctccgggcactcccacgaccagtgaccaggagttaaactttgggatgtgcccgtgatgttggaccacaaggacttagaggccgaaatccaccccttgaaaaatgaagaaagaaaatcgcaggaaaatctgggaaatccatcaaaaaatgaggataacgtgaaaagcgcgcctccacagtcccggctctcccggtgccgagcggcggcgttttttctttcattgtttctctgcctttttgtggtgttcgtcgtctcattcgtcatcccgtgtccagaccggccggcgtcacagcgaatgtggaggatagactacagtgccgctgttatctatgactttctggctgtggatgatataaacggggacaggatccaagatgttctttttctttataaaaacaccaacagcagcaacaatttcagccgatcctgtgtggacgaaggcttttcctctccctgcacctttgcagctgctgtgtcgggggccaacggcagcacgctctgggagagacctgtggcccaagacgtggccctcgtggagtgtgctgtgccccagccaagaggcagtgaggcaccttctgcctgcatcctggtgggcagacccagttctttcattgcagtcaacttgttcacaggggaaaccctgtggaaccacagcagcagcttcagcgggaatgcgtccatcctgagccctctgctgcaggtgcctgatgtggacggcgatggggccccagacctgctggttctcacccaggagcgggaggaggttagtggccacctctactccggcagcaccgggcaccagattggcctcagaggcagccttggtgtggacggggaaagtggcttcctccttcacgtcaccaggacaggtgcccactacatcctctttccctgcgcaagctccctctgcggctgctctgtgaagggtctctacgagaaggtgaccgggagcggcggcccgttcaagagtgacccgcactgggagagcatgctcaatgccaccacccgcaggatgctttcccacagctctggagcagtgcgctacctgatgcatgtcccagggaacgccggtgcagatgtgcttcttgtgggctcagaggccttcgtgctgctggacgggcaggagctgacgcctcgctggacacccaaggcagcccatgtcctgagaaaacccatcttcggccgctacaaaccagacaccttggctgtagccgttgaaaacggaactggcaccgacagacagatcctgtttctggaccttggcactggagccgtcctgtgtagcctagccctcccgagcctccctgggggtccactgtccgccagcctgccgaccgcagaccaccgctcagccttcttcttctggggcctccacgagctggggagcaccagcgagacggagaccggggaggcccggcacagcctgtacatgttccaccccaccctgccgcgcgtgctgctggagctggccaatgtctctacccacattgtcgcctttgacgccgtcctgtttgagccaagccgccacgccgcctacatccttctgacaggcccggcagactcagaggcacccggcctggtctctgtgatcaagcacaaggtgcgggaccttgtcccaagcagcagggtggtccgcctgggtgagggtgggccagacagtgaccaagccatcagggaccggttctcccggctgcggtaccagagtgaggcgtagaggcacgccagccagagcctgtggagagactccgcctgctgacactaaacgtcctgggaagtgggcccttccctgggtctctgcactgactcccccactcctgaccctggtgatggtcgccactgggcagcagcagccttaccagtcctccatgatcacacccagggacctgcatgggtgaggggacaccctgggcctctctcccgcccagcatcctccctgagtccccacacagggcctcactctgcaccccaccagggtcccgctcacaccaggcagccttcatagtggtctccctggccaccttgggcagagctgggtcatgcagcaccccatccttacccggtgccctctccttgccagcttctccccaggccagagcggccatcgcgtagaaagaaccagggtgtccccgggacaggccgtcccccaccccatcctgtagagtccattccccttttccctcctgtgctctgtcccccaaggagtcatggaactcagggtactgggcctcaacgggaacctgagacagcttccagcttcgcagcccttcccggagctacagggggatcctctagcatggggggtgtgacttggttcctttgaccaggtcctgtgaggaagcctggagcaagggtctcccccagcaggatgggtggggcctgctctggagctgagcccgtggccgctcacaggtgtccttagtggtgttgcagctgtctactggctgcatgtgctgtgaatatcccaaggaactggctgtggaatgcgtgtttgggtcagtctgtgccctctcagtagacactggagctgctctgtccctgaagaggccccgtgccccaggcatggcaagcgcctgcctctccccttccggtgctcacacgcccacgccgtgccacccgatgcaggactcacctctgtgccttgctgctcctgaggcccaagggcagccatggtgctctgtactgctcgggccgcccaggtcacagagcctgagcttcgtagccaaagcagcctgatgacccacccaccaaggaagaaagcagaataaacatttttgcactgcctgaaaaaccccggtggtcaggcgtgagcctaaaaaaaaaaaaaaaaaaa

SEQ ID NO: 12150 - DNA, 4746 bp, Homo sapiens
gttctccgctgaggaggagcggggcagaggagggaggcagcgggtgagagttcagagttcagcagcagcagcccgagcccatgattcccatatgccctgtagtttctttcacctatgtgcccagccggctgggggaagatgccaaaatggcgaccggcaactactttggattcacccacagcggggcggcggcggcggcggctgcggcccaatatagccagcagccagcttcgggtgtagcctattctcatccaactacagttgctagctacactgtccatcaggctccagtagctgctcacacagttactgctgcctatgcaccagcagccgccacagttgcagttgccaggcctgctccagtagctgttgcagctgctgcaacagctgctgcttatggaggctaccccactgcacacacagcaactgactatggttatactcagaggcaacaagaagcaccaccaccaccacccccagctactacacaaaactaccaggattcatactcatatgtaaggtccacagctcctgctgtagcttatgatagtaagcaatactaccaacaaccaacagcaactgctgctgctgtagctgccgctgcccaacctcagccttctgttgctgaaacttactatcagacagcccccaaagcaggttacagccaaggtgcaactcagtatactcaagcccagcaaactcgacaagtgacagccataaaaccagccacaccaagtccagctaccactactttctccatctatcctgtatcctccaccgtacagccagtagcagctgcggctactgtggtgccatcctatactcagagtgctacttacagtaccacagcagttacatattctggtacgtcttattcaggttatgaagcagcagtgtattcagctgcatcttcctactatcaacagcagcagcagcaacagaagcaggcagcagcagcagctgctgctgctgctgcaacagctgcctggacagggaccacctttactaaaaaagcaccattccaaaataaacaactgaaaccaaaacagcctcccaaaccaccacagattcactattgtgatgtttgtaagatcagctgtgctggaccacagacttataaagaacatttagaaggacagaaacataaaaaaaaagaagctgcattgaaagcctcacaaaataccagcagcagcaacagttctactcgtgggactcaaaatcagctacgttgtgagctctgcgatgtgtcttgtacaggagcagatgcgtatgctgcccacattcgtggtgctaagcatcagaaagtggttaagttacacacaaaacttggtaaacccattccatcaacagaaccaaatgttgttagccaagctacttcttcaacagctgtatctgcttcaaagccgactgcctctccttcaagcattgcagcaaacaattgtactgtgaatacgtcatcagttgcaacgtcttcaatgaagggtcttacgactacaggaaactcgtctcttaatagcacatctaacactaaagtatcagcagtgcctacaaatatggctgccaagaaaacatctacccccaaaataaattttgttggtggtaataagctgcagtcaacaggaaataaagcagaagacataaaaggaaccgaatgtgttaaaagtactcctgtcacttctgctgtgcagattcctgaagtaaagcaagacacagtgtcagaaccagtcacacctgcatctcttgctgctttacagagtgatgtgcagccagtgggccatgattatgtggaagaggtacgaaatgatgaaggaaaagtaattcggttccattgtaaattatgcgagtgcagctttaatgatcccaatgctaaggagatgcacttaaaagggcgaagacacagacttcaatataaaaaaaaagtaaatccagatttgcaagtagaagtaaagcctagtattcgagcaagaaagattcaagaagagaaaatgaggaagcaaatgcagaaggaggagtactggcgaagacgagaagaagaggagcgttggagaatggaaatgagacgttatgaagaggacatgtactggaggagaatggaggaagaacaacatcattgggatgatcgccgccgaatgccagatggaggttatcctcatggtcctccaggcccattaggccttctgggagtccgaccaggcatgcctcctcagcctcaggggcctgcacccttacgtcgtcctgactcatctgatgaccgttatgtaatgacaaaacatgccaccatttatccaactgaagaggagttacaggcagttcagaaaattgtttctattactgaacgtgctttaaaactcgtttcagacagtttgtctgaacatgagaagaacaagaacaaagagggagatgataagaaagagggaggtaaagacagagctttgaaaggagttttgcgagtgggagtattggcaaaaggattacttctccgaggagatagaaatgtcaaccttgttttgctgtgctcagagaaaccttcaaagacattattaagccgtattgcagaaaacctacccaaacagcttgctgttataagccctgagaagtatgacataaaatgtgctgtatctgaagcggcaataattttgaattcatgtgtggaacccaaaatgcaagtcactatcacactgacatctccaattattcgagaagagaacatgagggaaggagatgtaacctcgggtatggtgaaagacccaccggacgtcttggacaggcaaaaatgccttgacgctctggctgctctacgccacgctaagtggttccaggctagagctaatggtctgcagtcctgtgtgattatcatacgcattcttcgagacctctgtcagcgagttccaacttggtctgattttccaagctgggctatggagttactagtagagaaagcaatcagcagtgcttctagccctcagagccctggggatgcactgagaagagtttttgaatgcatttcttcagggattattcttaaaggtagtcctggacttctggatccttgtgaaaaggatccctttgataccttggcaacaatgactgaccagcagcgtgaagacatcacatccagtgcacagtttgcattgagactccttgcattccgccagatacacaaagttctaggcatggatccattaccgcaaatgagccaacgttttaacatccacaacaacaggaaacgaagaagagatagtgatggagttgatggatttgaagctgaggggaaaaaagacaaaaaagattatgataacttttaaaaagtgtctgtaaatcttcagtgttaaaaaaacagatgcccatttgttggctgtttttcattcataataatgtctacattgaaaaatttatcaagaatttaaaggatttcatggaagaaccaagtttttctatgatattaaaaaatgtacagtgttaggtattatttgaatggaaagacacccaaaaaaaaaaatgtgctccgactagggggaaaacagtagttccgattttttcccattatttttattttattttctggttgccctagcttccccccctatttttgtgtcttttattaactagtgcattgtcttattaaatcttcactgtatttaatgcaggatgtgtgcttcagttgctctgtgtattttgatattttaatttagaggttttgtttgctttttgacactagttgtaagttactttgttatagatggtatcctttaccccttcttaatattttacagcagtacgtttttttgtaacgtgagactgcagagtttgtttttctatatgtgaaggattacaacacaaaaagttatcctgccattcgagtgctcagaactgaatgtttctgcagatcttgtggcatttgtctctagtgtgatatataaaggtgtaattaagacagagttctgttaatctaatcaagtttgctgttagttgtgcattagcagtataaaagctaatatatactatatggtcttgcaacagttttaaagcctctgcataattgataataaaaatgcatgacattcttgtttttaatagacttttaaaatcataattttaggtttaacacgtagatctttgtacagttgactttttgacatagcaaggccaaaaataactttctgaatatttttttcttgtgtataagtggaaagggcatttttcacatataagtgggctaaccaatattttcaaaagaacttcatcattgtacaactaacaacagtaactagcccttaattatggtgacagttccttattggtgtgtgtgagattactctagcaactattacagtataacacagatgatcttctccacacaccccatcacccagataatttacagttctgttaacagtgaggttgataaagtattactgataaaaaattatctaaggaaaaaaacagaaaattatttggtgtggccatcttacctgcttatgtctcctacacaaagctaaatattctagcagtgatgtaatgaaaaattacatcttactgttgatatatgtatgctctggtacacagatgtcattttgttgtcacagcactacagtgaaatacacaaaaaatgaaattcatataatgacttaaatgtattatatgttagaattgacaacataaactacttttgctttgaaatgatgtatgcttcagtaaaatcatattcaaatttaaaaaaaaaaaaaaaaaaaaaaaaaaaaaaaa

SEQ ID NO: 12151 - DNA, 6683 bp, Homo sapiens
gcatttcttccttctgcgtatgggacaggaccctttctggaatgggggtcttatgacctacaatcaaacaagaacatggacttcccgtgcctctggctagggctgttgctgcctttggtagctgcgctggatttcaactaccaccgccaggaagggatggaagcgtttttgaagactgttgcccaaaactacagttctgtcactcacttacacagtattgggaaatctgtgaaaggtagaaacctgtgggttcttgttgtggggcggtttccaaaggaacacagaattgggattccagagttcaaatacgtggcaaatatgcatggagatgagactgttgggcgggagctgctgctccatctgattgactatctcgtaaccagtgatggcaaagaccctgaaatcacaaatctgatcaatagtacccggatacacatcatgccttccatgaacccagatggatttgaagccgtcaaaaagcctgactgttattacagcatcggaagggaaaattataaccagtatgacttgaatcgaaatttccccgatgcttttgaatataataatgtctcaaggcagcctgaaactgtggcagtcatgaagtggctgaaaacagagacgtttgtcctctctgcaaacctccatggtggtgccctcgtggccagttacccatttgataatggtgttcaagcaactggggcattatactcccgaagcttaacgcctgatgatgatgtttttcaatatcttgcacatacctatgcttcaagaaatcccaacatgaagaaaggagacgagtgtaaaaacaaaatgaactttcctaatggtgttacaaatggatactcttggtatccactccaaggtggaatgcaagattacaactacatctgggcccagtgttttgaaattacgttggagctgtcatgctgtaaatatcctcgtgaggagaagcttccatccttttggaataataacaaagcctcattaattgaatatataaagcaggtgcacctaggtgtaaagggtcaagtttttgatcagaatggaaatccattacccaatgtaattgtggaagtccaagacagaaaacatatctgcccctatagaaccaacaaatatggagagtattatctccttctcttgcctgggtcttatataataaatgttacagtccctggacatgatccacacatcacaaaggtgattattccggagaaatcccagaacttcagtgctcttaaaaaggatattctacttccattccaagggcaattggattctatcccagtatcaaatccttcatgcccaatgattcctctatacagaaatttgccagaccactcagctgcaacaaagcctagtttgttcttatttttagtgagtcttttgcacatattcttcaaataaagtaaaatgtgaaactcaacccacatcaccacctggaatcagggattgctcactccaggttactgcaaccctaactcactctagtgggaccttgactggagaaactccacgatcttcctgaagaagagaaatggatgtttccaaattccacaataagcaatatgtggtgataatgaaaagaatgattcagtcttgacggtgaatggaagacacttacctaacaagtactgctcatttacactcaaattaatcttgaagtagtcttaaaatgtgtaagaagttaaaacttgagaagcaaaaaaatgcctgcaaaaagaagatcattttgtatacagagaaccggatgaatataagcaatgaagatgaacatttattgatcttctacatacaagacttcaccataaggccaggagcagtggctcacaccttgtaatcccagcactttgggaggccaaggtgggcggatcaccctgaggtcaggagttcaaaaccagcctgaccaacatggtgaaaccctgtctctactaaatattagcggggtgtggtggcgggcacctgtaatcgcagcctttcaggaggctgagacaggagaatcgcttgaaccctagaggcggagtttgcagtgagccgagatagtgccattgtactccagcttgggcaacagagtaagactctgtctcaaaaaaaaaaaaacaaaaacaaacaaacaaaaaaaacacctcaccatgagtgctacatgtgaatagatattaagtgccatatataattagttctcagaagaagggagaaatgatcataggactgggaattgttttgcaaacgttctaggagatgtgagagaaaatatgtaaccacatcttagtggcccaagaaaatacaggcctgaagggataagattgtgtctctatagagcttcaaagcatacaggtcaattaagaaagcccctctctctccagagccgtttccctagcttttggcacctggatgccacagtcctccattaggctgatgactccaaagatgtaactctagcctcttgcctgagcttcagactcgcgtcccactgcccacaggacacatccacctggatgtgactcacaggtacctccaacccatcatgtggagatactcatcctgttccccctagagctgctcttcctgctgcattctctctctcaattactgggaccaccaagctaggaacctgggagtcatccttgatactttctcttcctccttaatcctgtgtattcagcaagtaactaaaggttggtgttggccaggcatggtggctcatgcctgtaatcccagcattttgggaggccaaggcgggcggatcacttgaggtcaggagctcaagaccagcctggccaacatggtgaaaccccatctctactaaaaaaaaaaaaaaaattagtcgggcgtggtggtgcatgcctgtaatcccagctactggggaggctgaggcaggagaatcgcttgaacctgggaggcagaggttgcagtgagccgggattgcgccattgtactccagcctgggtgaagaagtgagactctgtcttaaaaaaaaaaattggtgctgataaatattgatgaattctgctctctgctctctatggttgtcaacactgcagagttgaggcctcatatctcacctgcactgctgcaacagcttactggtcccttgctcccagccttctcctcttcagtccatcgtccacacagcactggggaaggggagccacttgaaacaaaagtcaacaactggttgtagttcataaacacagagctgtttgtgtcccctgtatctggaatgccattatgacccactacattttttctttcctacccctcttaaaactcagttcaggtagcagctccactaggaagccttggctgaccataatcccattcaattccatttcacctcttcgcaggcagtctggggttagggaccctttctctttgctccccaaaataaactggttatctctactattggatttacaacattgtattataatcttctccatgtgtgccttctctagtagaatgtgagctctttgaggccaaggtctatttaatttgtttgaaaaattcattgttatatcctcaaagcctagcacatagtaggtactgaatgaatgaatgaacaaggggtgccaggagactgctactcccagtccttcccagaaactgcctagggctttgagtcattttatgaagctaggtcttaatgcgtaggcaacctcccagctcactatgaacgctgacagaagagtgttttcatgtctataatcaagaattccagatacattccttttactgaaccttgaattgatcctaagattggtagtaaaggtattatgttactcctaacagcactacaaagtacctttttttatcagaaaaaaattttaccattaggactcaatttgaagtactaatgcttctcaagttctccactatgagagttaccctgtattagaccgttacctataagaattaaggggtaaagcactaaacagaaaagaaaaaaaaaatagcaactctggtgagcagatttctttcctttcttccttccttctcctcttcctaccttcctccctcctttccctctcctccccttctctccctttccctccccttcccttccttttcttctttcctccgctcccctccccttccctccccttcccatccttctttctcttttttttacttaatccccagtgtgacagtaatataggctgatttctagaagtgtggtgtattactcatggaaagtgagttgccttggttattactttcaattgaaagttctatgggatctagaaatgagacatactggcatggagagtgagaacgacaaaggaatgaagagctacaggagcatttaggccatttctatgccaagcttattctacatgcacaaaatcatacatgttaataaatataaacaaattggaggcttatttaaaccaattatgaaatctggtaatttgtgcagcagcaatagatgataaccaaaaaaaactcataataatctgaatatcttgatcatttgtatttaaagaagcagtaattatatacttgaaagtacataatatagtattgcaaaaatgactttggtatattacaaattaaaagtatataagatgaaacttgatttgctatcaagccccaagcaatttttcaactgggcattgaattctaacttttctaagatagcaatttttgaagagacacgaacaaaaatctgaattagttcatgagccttaatgtaaatctcttgctgaaatagtttttaaaatcagaatttagttatctatcagactcaaaatcatttaaagactaacaaaacacaatcatgatattctaactgtggtcaaaccaggtacccaagccacctccctgcccaacgcctttccggcttttcccctccctcttgggctggtggttatgctcctccagctctagttcagctataattccttttatagagaaaccaacctgatacacactttcatgatgggagaaaaatgtgggagtgaaatgatatttagaaagcagcagtcaggcacggtggctcatgcctgtaatcccagcactttgggaggctgaggcaggcggatcacttgaggtcaggagctcgagaccagcctggccaacacggtgaaaccccatctctactaaaaaaaaatacaaaaattagccgggcgtggtggcaggcacctgtaatcccagctacttgggaggctgaggcaggagaaatcgcctgaacccagaaggcagaggttgcagtgagccaagatcacatcactgcactgcactccagccggggtgacagagcgaacctctgtctcaaaaaaaaaaaaagaaaaaagaaagaaagaaaaaaggcagaagccctggattcaaatccgccacacattcagtttctttatctgtaaaatggagaccaccccccgccacgctgaacggtgattctgtgactggtaagagatgctacatttttggtgcttgttcaggtggaggaaagatgatagttaacactcaggtaataagtattttgaaggcagtataatataccttcttaaagagtatacctactcaaatgttggtaaatgttgacatgattgaatctaaatggcaaagagtattttagaaaaacattaagtccctgcagataaatgacagtgttgatttggatgcttaattacattcagacatgaactgttggatgtatccgaaatgttaaaagctttttctcaacatttccaaaagtctttccaagaaatcaatgttatgttttgttccagaagcaaatttgcatttgtgatctgtttctaaaaatggtacaagttagctctgtttagaaagtaaaaatatctgatgttagattggaagtatctcttcctggggaatccagaaagataagcatagcatattgtcttactgcaatagataagttgcttattgagaagtctggttgttattctatatggtaacaatacagttgatgtatattttatgatagatcctttatattttcctcatgactttagaagggggaagggggagaaaattatgatgaccagactagttaaagagcattgaaagtccacagtactgtagctaaagtagaagtttgggtttgttatagactttacattatatcaactaataagcagatactgtacagtattgctcaccattttatcatacttttgcatatgaactactccattgccttttatagatgttttatagctgatcttaccagttttcctggtaactttttttatttcttttttttttttttgagacggagtctcgccctaacacccaggttggagtgcagtgccgtgatctcggctcactgcaacctctgcctcccgggttcaagcaattctcctgtctcagcctcccgagtacctgggactaccggtgcctgtctccacgcccggctaattttttgtatttgtagtggagacggggtttcaccgtgttggccaggatggtctcgatctcctgacctcatgatctgcctgcctctgcctggacctcccaaagtgctgggattacaggcgtgagcccccgcgcccagccactttctttaatactataactaagaatttattaaaatgcacaaattgtctaagactgtaaagtttattggggagaggccatgactacctctgaatttagtaaatttaaaatatttctgattctcaataaagaactaatatccatataaaaaaaaaaaaaaaaaa

SEQ ID NO: 12152 - DNA, 6669 bp, Homo sapiens
ataacacccggccccgccgggcggccgcgggtgggtagaggtgcgcgcctgggacctgaacatggacttcccgtgcctctggctagggctgttgctgcctttggtagctgcgctggatttcaactaccaccgccaggaagggatggaagcgtttttgaagactgttgcccaaaactacagttctgtcactcacttacacagtattgggaaatctgtgaaaggtagaaacctgtgggttcttgttgtggggcggtttccaaaggaacacagaattgggattccagagttcaaatacgtggcaaatatgcatggagatgagactgttgggcgggagctgctgctccatctgattgactatctcgtaaccagtgatggcaaagaccctgaaatcacaaatctgatcaatagtacccggatacacatcatgccttccatgaacccagatggatttgaagccgtcaaaaagcctgactgttattacagcatcggaagggaaaattataaccagtatgacttgaatcgaaatttccccgatgcttttgaatataataatgtctcaaggcagcctgaaactgtggcagtcatgaagtggctgaaaacagagacgtttgtcctctctgcaaacctccatggtggtgccctcgtggccagttacccatttgataatggtgttcaagcaactggggcattatactcccgaagcttaacgcctgatgatgatgtttttcaatatcttgcacatacctatgcttcaagaaatcccaacatgaagaaaggagacgagtgtaaaaacaaaatgaactttcctaatggtgttacaaatggatactcttggtatccactccaaggtggaatgcaagattacaactacatctgggcccagtgttttgaaattacgttggagctgtcatgctgtaaatatcctcgtgaggagaagcttccatccttttggaataataacaaagcctcattaattgaatatataaagcaggtgcacctaggtgtaaagggtcaagtttttgatcagaatggaaatccattacccaatgtaattgtggaagtccaagacagaaaacatatctgcccctatagaaccaacaaatatggagagtattatctccttctcttgcctgggtcttatataataaatgttacagtccctggacatgatccacacatcacaaaggtgattattccggagaaatcccagaacttcagtgctcttaaaaaggatattctacttccattccaagggcaattggattctatcccagtatcaaatccttcatgcccaatgattcctctatacagaaatttgccagaccactcagctgcaacaaagcctagtttgttcttatttttagtgagtcttttgcacatattcttcaaataaagtaaaatgtgaaactcaacccacatcaccacctggaatcagggattgctcactccaggttactgcaaccctaactcactctagtgggaccttgactggagaaactccacgatcttcctgaagaagagaaatggatgtttccaaattccacaataagcaatatgtggtgataatgaaaagaatgattcagtcttgacggtgaatggaagacacttacctaacaagtactgctcatttacactcaaattaatcttgaagtagtcttaaaatgtgtaagaagttaaaacttgagaagcaaaaaaatgcctgcaaaaagaagatcattttgtatacagagaaccggatgaatataagcaatgaagatgaacatttattgatcttctacatacaagacttcaccataaggccaggagcagtggctcacaccttgtaatcccagcactttgggaggccaaggtgggcggatcaccctgaggtcaggagttcaaaaccagcctgaccaacatggtgaaaccctgtctctactaaatattagcggggtgtggtggcgggcacctgtaatcgcagcctttcaggaggctgagacaggagaatcgcttgaaccctagaggcggagtttgcagtgagccgagatagtgccattgtactccagcttgggcaacagagtaagactctgtctcaaaaaaaaaaaaacaaaaacaaacaaacaaaaaaaacacctcaccatgagtgctacatgtgaatagatattaagtgccatatataattagttctcagaagaagggagaaatgatcataggactgggaattgttttgcaaacgttctaggagatgtgagagaaaatatgtaaccacatcttagtggcccaagaaaatacaggcctgaagggataagattgtgtctctatagagcttcaaagcatacaggtcaattaagaaagcccctctctctccagagccgtttccctagcttttggcacctggatgccacagtcctccattaggctgatgactccaaagatgtaactctagcctcttgcctgagcttcagactcgcgtcccactgcccacaggacacatccacctggatgtgactcacaggtacctccaacccatcatgtggagatactcatcctgttccccctagagctgctcttcctgctgcattctctctctcaattactgggaccaccaagctaggaacctgggagtcatccttgatactttctcttcctccttaatcctgtgtattcagcaagtaactaaaggttggtgttggccaggcatggtggctcatgcctgtaatcccagcattttgggaggccaaggcgggcggatcacttgaggtcaggagctcaagaccagcctggccaacatggtgaaaccccatctctactaaaaaaaaaaaaaaaattagtcgggcgtggtggtgcatgcctgtaatcccagctactggggaggctgaggcaggagaatcgcttgaacctgggaggcagaggttgcagtgagccgggattgcgccattgtactccagcctgggtgaagaagtgagactctgtcttaaaaaaaaaaattggtgctgataaatattgatgaattctgctctctgctctctatggttgtcaacactgcagagttgaggcctcatatctcacctgcactgctgcaacagcttactggtcccttgctcccagccttctcctcttcagtccatcgtccacacagcactggggaaggggagccacttgaaacaaaagtcaacaactggttgtagttcataaacacagagctgtttgtgtcccctgtatctggaatgccattatgacccactacattttttctttcctacccctcttaaaactcagttcaggtagcagctccactaggaagccttggctgaccataatcccattcaattccatttcacctcttcgcaggcagtctggggttagggaccctttctctttgctccccaaaataaactggttatctctactattggatttacaacattgtattataatcttctccatgtgtgccttctctagtagaatgtgagctctttgaggccaaggtctatttaatttgtttgaaaaattcattgttatatcctcaaagcctagcacatagtaggtactgaatgaatgaatgaacaaggggtgccaggagactgctactcccagtccttcccagaaactgcctagggctttgagtcattttatgaagctaggtcttaatgcgtaggcaacctcccagctcactatgaacgctgacagaagagtgttttcatgtctataatcaagaattccagatacattccttttactgaaccttgaattgatcctaagattggtagtaaaggtattatgttactcctaacagcactacaaagtacctttttttatcagaaaaaaattttaccattaggactcaatttgaagtactaatgcttctcaagttctccactatgagagttaccctgtattagaccgttacctataagaattaaggggtaaagcactaaacagaaaagaaaaaaaaaatagcaactctggtgagcagatttctttcctttcttccttccttctcctcttcctaccttcctccctcctttccctctcctccccttctctccctttccctccccttcccttccttttcttctttcctccgctcccctccccttccctccccttcccatccttctttctcttttttttacttaatccccagtgtgacagtaatataggctgatttctagaagtgtggtgtattactcatggaaagtgagttgccttggttattactttcaattgaaagttctatgggatctagaaatgagacatactggcatggagagtgagaacgacaaaggaatgaagagctacaggagcatttaggccatttctatgccaagcttattctacatgcacaaaatcatacatgttaataaatataaacaaattggaggcttatttaaaccaattatgaaatctggtaatttgtgcagcagcaatagatgataaccaaaaaaaactcataataatctgaatatcttgatcatttgtatttaaagaagcagtaattatatacttgaaagtacataatatagtattgcaaaaatgactttggtatattacaaattaaaagtatataagatgaaacttgatttgctatcaagccccaagcaatttttcaactgggcattgaattctaacttttctaagatagcaatttttgaagagacacgaacaaaaatctgaattagttcatgagccttaatgtaaatctcttgctgaaatagtttttaaaatcagaatttagttatctatcagactcaaaatcatttaaagactaacaaaacacaatcatgatattctaactgtggtcaaaccaggtacccaagccacctccctgcccaacgcctttccggcttttcccctccctcttgggctggtggttatgctcctccagctctagttcagctataattccttttatagagaaaccaacctgatacacactttcatgatgggagaaaaatgtgggagtgaaatgatatttagaaagcagcagtcaggcacggtggctcatgcctgtaatcccagcactttgggaggctgaggcaggcggatcacttgaggtcaggagctcgagaccagcctggccaacacggtgaaaccccatctctactaaaaaaaaatacaaaaattagccgggcgtggtggcaggcacctgtaatcccagctacttgggaggctgaggcaggagaaatcgcctgaacccagaaggcagaggttgcagtgagccaagatcacatcactgcactgcactccagccggggtgacagagcgaacctctgtctcaaaaaaaaaaaaagaaaaaagaaagaaagaaaaaaggcagaagccctggattcaaatccgccacacattcagtttctttatctgtaaaatggagaccaccccccgccacgctgaacggtgattctgtgactggtaagagatgctacatttttggtgcttgttcaggtggaggaaagatgatagttaacactcaggtaataagtattttgaaggcagtataatataccttcttaaagagtatacctactcaaatgttggtaaatgttgacatgattgaatctaaatggcaaagagtattttagaaaaacattaagtccctgcagataaatgacagtgttgatttggatgcttaattacattcagacatgaactgttggatgtatccgaaatgttaaaagctttttctcaacatttccaaaagtctttccaagaaatcaatgttatgttttgttccagaagcaaatttgcatttgtgatctgtttctaaaaatggtacaagttagctctgtttagaaagtaaaaatatctgatgttagattggaagtatctcttcctggggaatccagaaagataagcatagcatattgtcttactgcaatagataagttgcttattgagaagtctggttgttattctatatggtaacaatacagttgatgtatattttatgatagatcctttatattttcctcatgactttagaagggggaagggggagaaaattatgatgaccagactagttaaagagcattgaaagtccacagtactgtagctaaagtagaagtttgggtttgttatagactttacattatatcaactaataagcagatactgtacagtattgctcaccattttatcatacttttgcatatgaactactccattgccttttatagatgttttatagctgatcttaccagttttcctggtaactttttttatttcttttttttttttttgagacggagtctcgccctaacacccaggttggagtgcagtgccgtgatctcggctcactgcaacctctgcctcccgggttcaagcaattctcctgtctcagcctcccgagtacctgggactaccggtgcctgtctccacgcccggctaattttttgtatttgtagtggagacggggtttcaccgtgttggccaggatggtctcgatctcctgacctcatgatctgcctgcctctgcctggacctcccaaagtgctgggattacaggcgtgagcccccgcgcccagccactttctttaatactataactaagaatttattaaaatgcacaaattgtctaagactgtaaagtttattggggagaggccatgactacctctgaatttagtaaatttaaaatatttctgattctcaataaagaactaatatccatataaaaaaaaaaaaaaaaaa

SEQ ID NO: 12153 - DNA, 6841 bp, Homo sapiens
ggggtgaggctgcagccaactccgctccccgcgcactcggctgcccaggcgctcggaacccagcagcggcgctcctccgcggtgccggtcgcccgcgatgcccgcttagcagcgtgtagcagcggccagcatcaccacacccgcggcaccgcgctgccggccgcagagccgggccagagccttgcacccctgcctcagcccccaccccgccccccgccctgaattgacttgttaatcggcgcagacaccaccaaggggactcaccggagtggaatccaagtggaatttggatttggagaagagtttcttgaacatttaccctcttccttgttggttttctttttctttttcttctttttttttttggcttcttttttcctctccccttctccgctcgtcattggagatgaacacatcgcgtttgcatcccagaaagtagtcgccgcgactatttcccccaaagagacaagcacacatgtaggaatgacaaaggcttgcgaaggagagagcgcagcccgcggcccggagagatcccctcgataatggattactaaatgggatacacgctgtaccagttcgctccgagccccggccgcctgtccgtcgatgcaccgaaaagggtgaagtagagaaataaagtctccccgctgaactactatgaggtcagaagccttgctgctatatttcacactgctacactttgctggggctggtttcccagaagattctgagccaatcagtatttcgcatggcaactatacaaaacagtatccggtgtttgtgggccacaagccaggacggaacaccacacagaggcacaggctggacatccagatgattatgatcatgaacggaaccctctacattgctgctagggaccatatttatactgttgatatagacacatcacacacggaagaaatttattgtagcaaaaaactgacatggaaatctagacaggccgatgtagacacatgcagaatgaagggaaaacataaggatgagtgccacaactttattaaagttcttctaaagaaaaacgatgatgcattgtttgtctgtggaactaatgccttcaacccttcctgcagaaactataagatggatacattggaaccattcggggatgaattcagcggaatggccagatgcccatatgatgccaaacatgccaacgttgcactgtttgcagatggaaaactatactcagccacagtgactgacttccttgccattgacgcagtcatttaccggagtcttggagaaagccctaccctgcggaccgtcaagcacgattcaaaatggttgaaagaaccatactttgttcaagccgtggattacggagattatatctacttcttcttcagggaaatagcagtggagtataacaccatgggaaaggtagttttcccaagagtggctcaggtttgtaagaatgatatgggaggatctcaaagagtcctggagaaacagtggacgtcgttcctgaaggcgcgcttgaactgctcagttcctggagactctcatttttatttcaacattctccaggcagttacagatgtgattcgtatcaacgggcgtgatgttgtcctggcaacgttttctacaccttataacagcatccctgggtctgcagtctgtgcctatgacatgcttgacattgccagtgtttttactgggagattcaaggaacagaagtctcctgattccacctggacaccagttcctgatgaacgagttcctaagcccaggccaggttgctgtgctggctcatcctccttagaaagatatgcaacctccaatgagttccctgatgataccctgaacttcatcaagacgcacccgctcatggatgaggcagtgccctccatcttcaacaggccatggttcctgagaacaatggtcagataccgccttaccaaaattgcagtggacacagctgctgggccatatcagaatcacactgtggtttttctgggatcagagaagggaatcatcttgaagtttttggccagaataggaaatagtggttttctaaatgacagccttttcctggaggagatgagtgtttacaactctgaaaaatgcagctatgatggagtcgaagacaaaaggatcatgggcatgcagctggacagagcaagcagctctctgtatgttgcgttctctacctgtgtgataaaggttccccttggccggtgtgaacgacatgggaagtgtaaaaaaacctgtattgcctccagagacccatattgtggatggataaaggaaggtggtgcctgcagccatttatcacccaacagcagactgacttttgagcaggacatagagcgtggcaatacagatggtctgggggactgtcacaattcctttgtggcactgaatgggcattccagttccctcttgcccagcacaaccacatcagattcgacggctcaagaggggtatgagtctaggggaggaatgctggactggaagcatctgcttgactcacctgacagcacagaccctttgggggcagtgtcttcccataatcaccaagacaagaagggagtgattcgggaaagttacctcaaaggccacgaccagctggttcccgtcaccctcttggccattgcagtcatcctggctttcgtcatgggggccgtcttctcgggcatcaccgtctactgcgtctgtgatcatcggcgcaaagacgtggctgtggtgcagcgcaaggagaaggagctcacccactcgcgccggggctccatgagcagcgtcaccaagctcagcggcctctttggggacactcaatccaaagacccaaagccggaggccatcctcacgccactcatgcacaacggcaagctcgccactcccggcaacacggccaagatgctcattaaagcagaccagcaccacctggacctgacggccctccccaccccagagtcaaccccaacgctgcagcagaagcggaagcccagccgcggcagccgcgagtgggagaggaaccagaacctcatcaatgcctgcacaaaggacatgccccccatgggctcccctgtgattcccacggacctgcccctgcgggcctcccccagccacatccccagcgtggtggtcctgcccatcacgcagcagggctaccagcatgagtacgtggaccagcccaaaatgagcgaggtggcccagatggcgctggaggaccaggccgccacactggagtataagaccatcaaggaacatctcagcagcaagagtcccaaccatggggtgaaccttgtggagaacctggacagcctgccccccaaagttccacagcgggaggcctccctgggtcccccgggagcctccctgtctcagaccggtctaagcaagcggctggaaatgcaccactcctcttcctacggggttgactataagaggagctaccccacgaactcgctcacgagaagccaccaggccaccactctcaaaagaaacaacactaactcctccaattcctctcacctctccagaaaccagagctttggcaggggagacaacccgccgcccgccccgcagagggtggactccatccaggtgcacagctcccagccatctggccaggccgtgactgtctcgaggcagcccagcctcaacgcctacaactcactgacaaggtcggggctgaagcgtacgccctcgctaaagccggacgtaccccccaaaccatcctttgctcccctttccacatccatgaagcccaatgatgcgtgtacataatcccagggggagggggtcaggtgtcgaaccagcaggcaaggcgaggtgcccgctcagctcagcaaggttctcaactgcctcgagtacccaccagaccaagaaggcctgcggcagagccgaggacgctgggtcctcctctctgggacacaggggtactcacgaaaactgggccgcgtggtttggtgaaggtttgcaacggcggggactcaccttcattctcttccttcactttcccccacaccctacaacaggtcggacccacaaaagacttcagttatcatcacaaacatgagccaaaagcacatacctaccccatcccccacccccacacacacacacacatgcacacaacacatacacacacacgcacagaggtgaacagaaactgaaacattttgtccacaacttcacgggacgtggccagactgggtttgcgttccaacctgcaaaacacaaatacattttttaaaatcaagaaaatttaaaaagacaaaaaaaaaagaattcattgataattctaactcagactttaacaatggcagaagtttactatgcgcaaatactgtgaaatgcccgccagtgttacagctttctgttgcagcagataaatgccatgttgggcaactatgtcatagatttctgctcctcctctcttttaatgaaataacgtgaccgttaacgcaagtaactctttatttattgttcaccctttttttccttaaggaaaggactcttccaaatatcatcctatgaacagctcttcagaaagcccattgaaagttaaactatttaacgtgaaatccattaactggaataattgagtttctttatttttacaataaattcactgagtaaataagttggagctggaattctgagctttgtgtttggactgtctggtctgtagctaaaggaaaaagttaggaggggaatatttatttaaatctatcagttcattgcctggtcaggtctctggcctataaacatgcaaaaaaactaattcatgttaaagtccttccagatcctaatttctaaagcaatcaggagagaaagcttttagaatggcacatcatatctcattgatgccaacatggttttgtccatggttctgactttctgtgaaggcaccagcttgcaatatgccatcccatttcaccttgcatgtgagacagcaaacaaaatccacaaatggtgtgaactaatatgctggctgctaccttgcataaattaatgatttgatcacacgggttcttcgtggggttacatctgtgaatagcctgttttccacatgtaaatttgtgccttacaccttgagttgtgtacacttgtaaactctttatgatcaactgttcccccttttgaaataagtgcagatatttatttaaccctcccttccccaccctctgccccacttccagccctctgaaagattggagtcaagcagatggaagaatgcagtggtgatagttgtcatgcgacagcctgagaacgctgggcagcaccacaccctccaattcacactgccttctagttgtgccaactggaaccaccctttggctgtgctgcgaagcatggaccccagtgttgttgtgggtgtgtcaaatcccctttcatcctcaagagctccctgcttcccttagattatttcaatacggtgatatccttatttgctagcagaaaagggactaacgtcccattcctcttttctgctgcgtccactggctagagagcaggcggtgcgcggttgggcagacacctgggaggagtctccaagccatgtgcacagcacacacgtgcagtgcacacaaagaaatgacatggaaatagatgcaggcaggctggtccctgctgtgattaacgagtaactccaagtacaaggccgaccacaatggatgctgcaaaaacgttgactggggcaaaggattttttattttattttttattttgttaattatgtttttaggggatgggaggtggtgtgtgtttttctcctcttggttttcatttgctcaagcacacaaaagggacttttgtttactctatcatgaacaaaggaactgtccacatactgtaaaccatgagcagtgttgttgttgtttttttaaacagtatatttggtggtctctttgtctgcttttatttccagttcgatcttctgggtttagttttgtctttaaaaagaattcaaaaaaagactgacaatgacagttttgagttggatagtgaaaaagtggagcctccataatcagtgtggttgccttcagacctgagtacttagctgagggtgggtgagagccctttgttccaaaagtccattagttttgctgttgtttaggagtaggtggttgttgttgtttttactttttttttttttggcttttgtaatggaatccatgttcacatcctgtgaactctgtctcctgaaaccctgaagtatttcctagaacctgaaatattgttttcttccttgaattttctctagaaatgcagaaattaggaaggtgatgggtctgtatccccctgcccccttctttcccatgcttgactcccgagagtactggcagtgcagcacccatcattgacgtaagcggctgtcttgtccagtgtttgtaggcatcactgcctcagctgttaaggagacctgtgtcaaaacttacatccacattcctacacccccacaacccatcacttctggtgttaaccctaaaatacccacatgtattgagctggtcttctgcatttaagtatttctccccagtttttttccccactgtgtgtggggggagggtccataaacccgagtgtgcctttgctttccacccttgctagacactggtagatgcaacaaactcagatttatatttgttgtaaagttgtaaaaatattgtgatgtcaccaattttccttccatctccacatcccctaacatctgattcacgacttaatgtatgttgtaagaaaagaaaaaagaaaagaaaaaaagggaaaaaagaaaagcaaggaaaaggctctttattacttaaaagtaataaaacctgactgttctatattaaaaaaaaaaaaaaaaaaaaaaaaaaaaaaaaaaaaaaaa

SEQ ID NO: 12154 - DNA, 7493 bp, Homo sapiens
aggcggtgtccaggcttccgggcgggtagtccttcggctccggagccgcgactgcgctcgcctaggtggtgggcggggagggaaggaagggagcgggcgcaaggcggcggcggcggctgcgggtgaggaacttgttgcgcccgcggctgcgcggtgcccctccctccgctccagttcgtcggggcgggcgcggcggcggcggcgaaggaggagcgcggccggggcgatgcggcgctacctgcgcgtcgtggtgctgtgtgtggcctgcggcttctgctcgctcctttacgctttcagccagctcgccgtgtccctggaagaaggaacgggcggcggtggcgggaagccgcaggccgcggtggcttcctggctcgcgggcggcggacgcggcgccgtgagaggcgccggcgtcgcgggccccgcagcgcatcccggcgtgtcggacaggtgtaaagatttctctctgtgttactggaatccctattggatgctgccctctgatgtttgtggaatgaactgcttttgggaagcggcttttaggtacagtctgaaaatacagcctgttgagaaaatgcatctagctgtagttgcctgtggtgaaagactggaagaaactatgaccatgttgaagtcagctatcattttcagcatcaaacctcttcaattccatatttttgctgaagatcagctacatcatagctttaaaggcagacttgacaactggtcatttctacaaacatttaattatacgttataccccataacctttccaagtgagaatgcagcagagtggaaaaaactctttaaaccatgtgcttcgcagagattgttcttgccgttaatcctgaaagaagttgactcactattgtatgtcgacactgatatcctttttttacgaccagttgatgatatttggtctttactaaagaaatttaattccacacaaattgctgcaatggcaccagaacatgaggaacctcgaataggatggtataatcgctttgctaggcatccatattatggaaaaactggagtaaactctggagttatgttgatgaacatgactcgaatgagaaggaagtatttcaagaatgatatgacaactgtacgactacaatggggagatatacttatgccattgcttaaaaaatacaaactaaacatcacatggggtgatcaagatctattgaatatcgtgttttttcataatccagaaagcctttttgtttttccgtgtcaatggaattatcgaccagatcattgtatatatggaagcaattgccaagaagcagaagaaggaggaatctttattcttcatgggaacagaggtgtttaccatgacgataagcaaccagcatttagagctgtttatgaagcactgagaaattgttcttttgaagatgacaacatccgttccttattaaaacctttagaactggaactacaaaaaacagtgcatacatactgtggaaaaatttacaaaatatttatcaaacaactagcaaaaagtgtaagagatcgttatgccagatcaccaaaggaaaagtgattcttggtgactgcttaatcaaatggatgaaaacaaagaatcagaagataagtgtgaaggaatcgtcttggatgaagtattcaggaaggaattactcatctccagaataattttttttttcctaaagaagttaagtaagcagtattttcaggtaatgaagaataagttaaaatcttgggcctcaacattgaacattttttatctctgatgttttgtaatgttacttgctatcattccagtattgatgaaaatactattgaatgggtttaacctgcagacttctgttgactcatactctcaagagtggtaggggtgtgtagatggagaaaatgtacctcaaacagtgccaacactcaagactgtgagtagagcaataattttatgtcagcactaacctcactttaaaagtgtgagaaaaaagtttgtttacaggagcagaaacaggtctgttgtttctgaagaaatgtgatgtaactgatgtaaccattgacaatctatgtgtgcctttatacatttcatctctgttttaaaatatttttatgacaatcatgtttaaaattatttttagattacaagtaagctgcatgttaaaaattgagctgtgtaaggtagaggaaaaatagtgaaaactttgggattttaatctgtgtgtgcgtgtttgtgtgtgagagagagtgagaaatgtagtgtttcattttgtatgcattaaactgtcttgccaaaactcagatctaagattgttaaatagatatttggggaatttttttttaatcactttaaatgaaaaacgtcagctttactgggcattctggaagcaaaatatattatgctgatggtaaagtgagaaccttaagagtatactcatgatggtggaaagtgtgatggaccaaaatgcataagctatatacttcctgtgagtagtaattttagttacaatggagtagaaaaatatggtccatttaaacttgtcttctacctcataacggccttgcaagatacttttgaagaagcaaatgtctagagccttactttaagtaagttaaacaacttaagtggatgatttggaataagattgttacatccagctgtagaaaatgtggttttaattgggttgatgtgcatttttgaatatcacctaagacagttaatttttttaaatcttgagaaattacttctttggcattcttgacctgttagctaatataactatagattctgaatacttagcatatactatgctggggcacatatcttattttaccaacaatatgattatctatatggttatcttctttttctccctgatattttaatgctcaagtagaaaatggaaaatcatgaaggaaaaatacaacctgtgaaaattgtggcagttagctttgtgaagacacagtgacctctgtggagacatggaatatgcagaaagagatggttagtacagttgttctgtcgtctgcagttcagtcagggacaaattgagagaggaaagtttaagcagggtgcattagaagttgataaccagtccagcattcttagaacagatgggtttagagaacacgagttgtagttccttggcagaatgccatggtgaatataagaaactgtgaaattgagcttactgagtagaaaatgagaatactaaaaatgtgaagtttggagggtatgtattagatcatttctaatggtcctcaaataatgatcattgcctgcctgactatgtaagattcttgttgggagcttaagaatagattcctgagctaggcctttggagactctggcatgctgtgtctaggagggagtctgtaaaacaatttttaatgaagaaatttaaaaattacacaaaactagaatagtgcattggtactcaacatccagatctgacacttatcactatcttaccatgtttgcttcatttgtcatttttttgtttgcttaagtatcttaaaatcccatacattgtgttatttcactgctgtgaacactttgggtagataccacgatatcacacctaacagaggcagcagcagtccttcggcttcatctcatagccagtccttaagcaaatttccctgattatctcaaaaatcatcttctagttggtttgttagaatcaacagaatataagtcacatgatgatttcgtttttaacaatcacctcagatgactttgatgttagctactttgagaaccactggaaattattttgccaacttgaaagttcaagttaggataccacaattcttggcacgtttggtggattataaatgtgattttgaaatattagaggaagcatttggggttaatgacaggatatgaatttatattagtaagtttgataagataaaatttcctcagtgaacggagaatctcagccccatgggctctaattgattgggacttgtgtagagcgtggtcacagtttaatccaactggactgtatgctgtggtctcactcatgttgtggcttatttacactgtcacacacactacattgtggatcagttggaaggttcttcatctggtttatttagacctgacctaattgatcattttaccataaattgaattatagtgaaaactgtcttttgggtactgtttctacctaaaattaaaggtatcacaaaatatgtataataatttttaaatgaattttctgaatttatctttagacaaggtaattcttttgaattctaaagaaatgcagttcttggagttgatgagaggttaaattatagatggacaacttagagaacgtattccatcttcatataaatggtctttcataaaacatagtgtatctatgcagtttatataaactacatgatttattatttgagtctatgtattctgacctcagaactatctctgggctacagtattaccaaagtgggatgcctttaaaatgcagtcaaacttcatttgtatgaagtagaaaagaacttgggaaacctttaaaaatatatattgtgatttatgctttaagaaaatgcatacttttttctaatgaagagtagttcataatatataagggttttaaggccctgaaataacattagtgcttactcattgctctctcatcttgcctccagtcagatgttattggtatagtgaaaagaagaccagattttgaactagatctggattctctttttagtaactcaggcatgttatttacccttctctgtgccttaggtttttaagtacaatcagtgtacccttcaaacctcacaagatgaaactcagaagagataatggatttggaagcattttgcgtggcttatattatgccacgccagtgttactgttgaagttctgttttgttcgttgttttctgtacagagcgttcagtttactcaggctgaatgttttctgacatatatctccagtatgaatttgtttatgtaaggaagagtttttcaggaagagaaagtagagaagaaaagaatgatgtaactaaatcaaaaaagaaggaaaagagaggaagtgagaaaaggggtgaggaaagagaaaggagtaagaatggggatggcaaagggcagagtaagagaaaagatggaatgagtgtatggaaaattgagaagtagagatggagagaaatggtgtggaaacatttactttttgagttgtagccctcacactacatcagtttgcttgcctgggctctctggggtcaggaaaggtgctgacttccatggaatggggcagcagggcctgctgtatttggtttgttagtactagagttgtttcccaatcaccctactcactgatcatttagtgccaattcaacattttatgtcttttttttttagtggatcccagtttgtgagctaggacctgtggaaatacaagtatcttcctttttaactttattgttttagccatcccaagtgttagactgcaagactaactacatattccccagtggaggttggaagtggaggggactgcttcattaggtctgaagggggccaaggaatgtgttgcagcagttttcgcagatgatactgacgagaggccaggtttgggaatcactgccctgccttggatggcaaattaagcaataaattacacctatttattcctcagttgggatactttcagttgaaccattctgagtagatttaagagaacaaaagacagcagaaataccttaaaagatattattggctgtcttatttttcagatatttgtatttaataaataccttagtagtagtcagaacctctttgagatgtttttagaaagaccactgatttgttttttaaaataatttttttggttccttagagtagagaagaaaagtaggggtgcaatatgtcaggtgtggggccagttatccatttattaaatgcaatttcaagtgtcttaaaaacaataattgccttattgcattttaatatttaataaagtagattaaataaagatttgtattataacagttattcttttatccattgccaaagcaacccttttttgcctattaaaatctggctaaactgttctgatgttgtttcttaattcattaaacatgaaactaggttttacaaactaaattatataaagacagaagtctaaaaatggtaccagaaaatttttttttaaaaaattaatgtgttattcaaatatccagcaattaaagactcatgagaaaaacagaatagcatattagatgtaacagtttaaaatggattgcaaatcaatgtcagacttaaatagaaaatatttattatcacctcatttctaccaataatttcagatgtttaatgggactttgaaaagataggaaaaaatagaaatgaaaatttatctcacctttaatactgtgaatactatttggagggtccctggtcagacatttaaatatcaaacttaagaactgacatggagcctttgattagtttatatacaggatctgaatatttacacacatagcacactatagcaacctcttgtaaaaaatcatgaagatagaattcaacagtgtatattctattaaaaagtaaattggctgggtgtggtggctcatgcatgtaatcccagcactttgggaggccgaggcaggaggatcgcttgagcccaagagtttgagaccagcctaggtgacaaagtgagaccccatctctacaaaaaaattaaaaaattatccagatgtggtggtgtttgcctgcggtcctagctacacaggaagttgaggcaggaggattgcttgagtgcaagagtttgaggctgcagagagccaagattgcaccattgcactccagcctgggtgacagagcgagaccctgtctcaaaaaataaaggaaattggctttgactatgaaaaacagccattttcaacctttttataaaacctcttcagggaatattggaatattatttttgtcaggcaaaaataatccagggcttgagcattgctgtagaatatgttatctgttcaaaacttagcagagcacgcatgcatcacatgcattgtcatcagtatttgagagctgaaccaatggtttttgatggttgccgtaacagaagatctgtgaagaggatggtggtttgcacctgttcctgaagtcaaactggaaaaggttgcaggtatttcaattttctcaatcattttgcataaatgtattaatattttgagtagtaatagttctaaacctgcaggaaggcatcattgtatactgtggtatgtagagaatactactcttacactgctctttatcttaaaatgttttggtatactgtgaatattttcctctaagtatttggtgtattttgacagttattaaaggagaatataaaattaaagattctggtctaaactaagaataatggaaagttgcttcgtcctgccttagaggagttttcagttcatcctcttcttgagaaactatgtgttgctgttactaaataaacatttactcaataaacgttttatttcctcaaatta

SEQ ID NO: 12155 - DNA, 3450 bp, Homo sapiens
ggcgccttcctggagcgcggggagatgtaaagatagacaaataattttcccaatgagactgtagaagagagagcaattggccaatgaggactgcggggcgggaccctgtgccgcggcggagtccaagatggcggcgtgcggttccgctgtgtgaaacgagcgcggggcggcgggttactcagctccgcggagacgacctccgacgacccgcaacaatgaagggaaaagagcgctcgccagtgaaggccaaacgctcccgtggtggtgaggactcgacttcccgcggtgagcggagcaagaagttagggggctctggtggcagcaatgggagcagcagcggaaagaccgatagcggcggtgggtcgcggcggagtctccacctggacaagtccagcagtcgaggtggcagccgcgagtatgataccggtgggggcagctccagtagccgcttgcatagttatagctccccgagcaccaaaaattcttcgggcgggggcgagtcgcgcagcagctcccggggtggaggcggggagtcacgttcctctggggccgcctcctcagctcccggcggcggggacggcgcggaatacaagactctgaagataagcgagttggggtcccagcttagtgacgaagcggtggaggacggcctgtttcatgagttcaaacgcttcggtgatgtaagtgtgaaaatcagtcatctgtcgggttctggcagcggggatgagcgggtagcctttgtgaacttccggcggccagaggacgcgcgggcggccaagcatgccagaggccgcctggtgctctatgaccggcctctgaagatagaagctgtgtatgtgagccggcgccgcagccgctcccctttagacaaagatacttatcctccatcagccagtgtggtcggggcctctgtaggtggtcaccggcacccccctggaggtggtggaggccagagatcactttcccctggtggcgctgctttgggatacagagactaccggctgcagcagttggctcttggccgcctgccccctccacctccgccaccattgcctcgagacctggagagagaaagagactacccgttctatgagagagtgcgccctgcatacagtcttgagccaagggtgggagctggagcaggtgctgctcctttcagagaagtggatgagatttcacccgaggatgatcagcgagctaaccggacgctcttcttgggcaacctagacatcactgtaacggagagtgatttaagaagggcgtttgatcgctttggagtcatcacagaagtagatatcaagaggccttctcgcggccagactagtacttacggctttctcaaatttgagaacttagatatgtctcaccgggccaaattagcaatgtctggcaaaattataattcggaatcctatcaaaattggttatggtaaagctacacccaccacccgcctctgggtgggaggcctgggaccttgggttcctcttgctgccctggcacgagaatttgatcgatttggcaccatacgcaccatagactaccgaaaaggtgatagttgggcatatatccagtatgaaagcctggatgcagcgcatgctgcctggacccatatgcggggcttcccacttggtggcccagatcgacgccttagagtagactttgccgacaccgaacatcgttaccagcagcagtatctgcagcctctgcccttgactcattatgagctggtgacagatgcttttggacatcgggcaccagaccctttgaggggtgctcgggataggacaccacccttactatacagagatcgtgatagggacctttatcctgactctgattgggtgccacccccacccccagtccgagaacgcagcactcggactgcagctacttctgtgcctgcttacgagccactggatagcctagatcgcaggcgggatggttggtccttggaccgggacagaggtgatcgagatctgcccagcagcagagaccagcctaggaagcgaaggctgcctgaggagagtggaggacgtcatctggataggtctcctgagagtgaccgcccacgaaaacgtcactgcgctccttctcctgaccgcagtccagaattgagcagtagccgggatcgttacaacagcgacaatgatcgatcttcccgtcttctcttggaaaggccctctccaatcagagacagacgaggtagtttggagaagagccagggtgacaagcgagaccgtaaaaactctgcatcagctgaacgagataggaagcaccggacaactgctcccactgagggaaaaagccctctgaaaaaagaagaccgctctgatgggagtgcacctagcaccagcactgcttcctccaagctgaagtccccgtcccagaaacaggatggggggacagcccctgtggcatcagcctctcccaaactctgtttggcctggcagggcatgcttctactgaagaacagcaactttccttccaacatgcatctgttgcagggtgacctccaagtggctagtagtcttcttgtggagggttcaactggaggcaaagtggcccagctcaagatcactcagcgtctccgtttggaccagcccaagttggatgaagtaactcgacgcatcaaagtagcagggcccaatggttatgccattcttttggctgtgcctggaagttctgacagccggtcctcctcttcctcagctgcatcagacactgccacttctactcagaggccacttaggaaccttgtgtcctatttaaagcaaaagcaggcagccggggtgatcagcctccctgtggggggcaacaaagacaaggaaaacaccggggtccttcatgccttcccaccttgtgagttctcccagcagttcctggattcccctgccaaggcactggccaaatctgaagaagattacctggtcatgatcattgtccgtgggtttggttttcagataggagttaggtatgagaacaagaagagagaaaacttggcgctgaccctgttatagtggttatagtggtgtccctaaagggaggaaatgatttcagcaaaactggttgaacagcggatgaagatatggaattcaaagctctaatggacctttttgaagagaagttgtggcttatgtggagtttacatgggcctctgatggaagaaagctaatctgtttagtatttgtgcattttactaaaatggcagcttaaagttgtgtatctgctattgtgatgccaatgccggtgttttaagtggaaaaaaaatgacctctttgatttgtgctgtgtacacaagatttctggaaaagtaaagaaaaaccctttttatggctcacacagcttaagagtagctgtctctcaaacgtgcgctcacagttgagctgcttttgttttattctaaataaattgtttcttttgaggaaaatgttaaaaaaaaaaaaaaaaaaa

SEQ ID NO: 12156 - DNA, 3942 bp, Homo sapiens
aattcgcctctgccacaggctgcaaaggacccgaggaaccgctctctctgaactgtgctgatgggcaggaggatgggagacaggaattgagagtcacagaggaaggacagtggagtctggcatcttattggtgtctttaaaggattgccatttaatgccattcaagatctactaagcatcatttttgcatgactactgcaaaaggattactttacagataccagttcctttgtcaagagcatactttggaccctgttttcagaaagcagggcactctttaatgaagaaacaccagagctgttaaacacattgagacacagaagattctagtgactgaggatggcttcctcttggaaactaatgctgtttctgtcagtcaccatgtgtctttcagaaagtgtggactatgggccagtttttgtgcaagaaccagatgatattatttttccaactgattctgatgaaaagaaggtagcattgaattgtgaagttcgtggcaatccagttcccagttacagatggcttcgaaatggaacagaaatagatctggaaagtgattatcgctacagtttgatagatggcaccttcattataagcaatccaagtgaagcaaaggattctggtcattatcagtgtttagcaaccaacactgtggggagtattcttagtagagaagctacactgcagtttgcctatctgggaaattttagtggccggacaagaagtgcagtctctgtgagggaaggccagggtgtcgttctgatgtgctctcctccgccacattcaccagagatcatctatagctgggtatttaatgagttcccttcctttgtggcggaagacagccggcggttcatctcccaggagacaggcaacctttatatttctaaagtccaaacatcagatgttggcagctatatttgtctggtgaaaaacacagtgacgaatgctagagtccttagtcctccaacgccactcactctgcgtaatgatggtgtgatgggagaatatgagccgaaaattgaggtccattttcctttcacggttacagctgctaaaggaacaactgttaagatggaatgctttgcacttggcaaccccgttccaacaatcacatggatgaaggttaatggttatattcctagtaaggcacgtctgcggaaatctcaggcggtgctggaaataccgaatgtacagctggatgatgcaggcatttatgagtgcagagctgaaaactcacgtggaaaaaattcctttcgtggacaattacaagtatacacctacccacactgggtagaaaaactgaatgatactcagttagacagtgggagccctctccgatgggaatgtaaggctactggaaaacccagacccacgtatcgttggctgaagaatggagtacccctctcacctcagagtagggttgagatggttaatggagtattgatgatccacaatgtgaatcaatcagatgctggaatgtatcagtgtttggctgaaaataagtatggagccatttacgctagtgctgagctgaagattctagcttcagctcccacttttgcactgaatcaactgaagaaaacaataattgttaccaaagaccaagaagttgtcatagagtgcaaaccccaaggctctccaaaaccaaccatctcttggaagaaaggagacagagcagttagagaaaacaaaagaatagctattcttccagacgggagtctacggatcctaaatgcttccaaatcagacgagggaaagtacgtttgccgaggggaaaacgtctttggttctgctgaaattatagcttcgctatctgtaaaagaacctacaaggatagaacttactcctaaaagaacagaattgacagtgggagaaagcattgtccttaattgcaaagcaattcacgatgctagtttggatgtcactttctactggactctgaaaggacagcctattgatttcgaggaagagggtggacattttgaaagcatcagggcccaagcatcctctgcagatttaatgatcaggaacatccttctgatgcatgctgggagatatggctgcagggtacagaccacagcagacagtgtgtcagatgaggcagaacttcttgttaggggacccccaggcccacctgggatagtaattgttgaggaaataaccgaaagtacggccacactgtcctggagcccagcagctgacaaccacagcccaatctcctcctacaaccttcaagctcgcagcccattttccctgggctggcaaacagtaaagacagtcccagaaatcataacaggggacatggagtcagccatggctgtggacctaaatccctgggtggaatatgaatttcgagtggtagccaccaaccctattgggacaggagatccaagcaccccatctcgaatgatccgcacaaatgaagcagttccgaagacagcacccaccaatgtaagcggaagaagtggaagaaggcatgagttagtcattgcctgggagccagtatctgaagagtttcagaatggggaaggcttcggctatattgtggctttcagacccaatggaacacgtggctggaaggaaaaaatggtgacatcctctgaagcttccaaattcatttatcgagatgaaagtgtccctcctcttactccctttgaagtgaaagttggcgtttataacaataaaggagatgggccttttagtcaaattgtggtcatctgttcagctgaaggagaacccagtgctgctcccacagatgtcaaggcgacaagtgtgtctgtgtcagagattcttgttgcatggaaacacattaaagagagtctaggaagaccacagggatttgaggttggttactggaaagacatggaacaggaagatacagcagaaacagtcaaaactagagggaatgagtctttcgtcatcctaacaggattagaaggaaatacgttatatcacttcacagtgagggcttacaatggagctggatatgggccacctagcagtgaagtgagtgcaaccaccaagaaatcccctcctagtcaagcacctagcaacctcaggtgggagcagcaaggctctcaggtttctctgggctgggaacccgtcataccattagccaacgaatctgaagttgtgggttacaaggttttttataggcaagagggtcacagcaacagccaagttattgaaacacagaaacttcaagcagtagtaccactcccagatgctggagtctatattattgaagttcgagcatatagtgaaggaggagatggaacagctagttctcaaattagggtaccatcatattcaggtggaaaaatcacaagtgcacagtcgacccttcactctctctccacatcttcgtcatcagtcaccttgctcttggcattgatgattccttcaacttcctggtgaaaactgctgacttaatttgcttttgtttgctttagcttggtaacagcggtgaatagagtgtagtgtaagtggagaaccaggatcctgagatgagcttgagctttaaaaacttgggactatacatggtgaacttacaggaggttaggggggaaatattacttatccatcaggtttctctttggtttttgtaaacggagaggacagttcttagtccagtaaaaatatgcagattgtatgtaatgaatttttgtaaacaaaggtaatttctgtcaaatgtattctttacttttttaatatgttgggattttattttatatctgatgactccgagtgtgtgccatccatttgttaagtaactggcctttagcagatctgtttcaaaaacaaatacaaaaatgagaatgaaaagtttgcttaagactaagtccagtgtttttcattttccctttggctgaatatttcaattgacaaaccagcaggacatatgaaaaatgcttcagtgatgtggtccattataagata

SEQ ID NO: 12157 - DNA, 4164 bp, Homo sapiens
aattcgcctctgccacaggctgcaaaggacccgaggaaccgctctctctgaactgtgctgatgggcaggaggatgggagacaggaattgagagtcacagaggaaggacagtggagtctggcatcttattggtgtctttaaaggattgccatttaatgccattcaagatctactaagcatcatttttgcatgactactgcaaaaggattactttacagataccagttcctttgtcaagagcatactttggaccctgttttcagaaagcagggcactctttaatgaagaaacaccagagctgttaaacacattgagacacagaagattctagtgactgaggatggcttcctcttggaaactaatgctgtttctgtcagtcaccatgtgtctttcagagtattcaaaatctcttcctggtctctccacttcatatgctgctttgttaagaattaagaagagttcatcttcatctctctttggttccaaaaccagaccacgatacagcagcccttcattaggaacactgagtgcttcttcacccagctggctaggggcagctcagaattattattcccccatcaatctttatcattcctcagatgccttcaaacaagatgaaagtgtggactatgggccagtttttgtgcaagaaccagatgatattatttttccaactgattctgatgaaaagaaggtagcattgaattgtgaagttcgtggcaatccagttcccagttacagatggcttcgaaatggaacagaaatagatctggaaagtgattatcgctacagtttgatagatggcaccttcattataagcaatccaagtgaagcaaaggattctggtcattatcagtgtttagcaaccaacactgtggggagtattcttagtagagaagctacactgcagtttgcctatctgggaaattttagtggccggacaagaagtgcagtctctgtgagggaaggccagggtgtcgttctgatgtgctctcctccgccacattcaccagagatcatctatagctgggtatttaatgagttcccttcctttgtggcggaagacagccggcggttcatctcccaggagacaggcaacctttatatttctaaagtccaaacatcagatgttggcagctatatttgtctggtgaaaaacacagtgacgaatgctagagtccttagtcctccaacgccactcactctgcgtaatgatggtgtgatgggagaatatgagccgaaaattgaggtccattttcctttcacggttacagctgctaaaggaacaactgttaagatggaatgctttgcacttggcaaccccgttccaacaatcacatggatgaaggttaatggttatattcctagtaaggcacgtctgcggaaatctcaggcggtgctggaaataccgaatgtacagctggatgatgcaggcatttatgagtgcagagctgaaaactcacgtggaaaaaattcctttcgtggacaattacaagtatacacctacccacactgggtagaaaaactgaatgatactcagttagacagtgggagccctctccgatgggaatgtaaggctactggaaaacccagacccacgtatcgttggctgaagaatggagtacccctctcacctcagagtagggttgagatggttaatggagtattgatgatccacaatgtgaatcaatcagatgctggaatgtatcagtgtttggctgaaaataagtatggagccatttacgctagtgctgagctgaagattctagcttcagctcccacttttgcactgaatcaactgaagaaaacaataattgttaccaaagaccaagaagttgtcatagagtgcaaaccccaaggctctccaaaaccaaccatctcttggaagaaaggagacagagcagttagagaaaacaaaagaatagctattcttccagacgggagtctacggatcctaaatgcttccaaatcagacgagggaaagtacgtttgccgaggggaaaacgtctttggttctgctgaaattatagcttcgctatctgtaaaagaacctacaaggatagaacttactcctaaaagaacagaattgacagtgggagaaagcattgtccttaattgcaaagcaattcacgatgctagtttggatgtcactttctactggactctgaaaggacagcctattgatttcgaggaagagggtggacattttgaaagcatcagggcccaagcatcctctgcagatttaatgatcaggaacatccttctgatgcatgctgggagatatggctgcagggtacagaccacagcagacagtgtgtcagatgaggcagaacttcttgttaggggacccccaggcccacctgggatagtaattgttgaggaaataaccgaaagtacggccacactgtcctggagcccagcagctgacaaccacagcccaatctcctcctacaaccttcaagctcgcagcccattttccctgggctggcaaacagtaaagacagtcccagaaatcataacaggggacatggagtcagccatggctgtggacctaaatccctgggtggaatatgaatttcgagtggtagccaccaaccctattgggacaggagatccaagcaccccatctcgaatgatccgcacaaatgaagcagttccgaagacagcacccaccaatgtaagcggaagaagtggaagaaggcatgagttagtcattgcctgggagccagtatctgaagagtttcagaatggggaaggcttcggctatattgtggctttcagacccaatggaacacgtggctggaaggaaaaaatggtgacatcctctgaagcttccaaattcatttatcgagatgaaagtgtccctcctcttactccctttgaagtgaaagttggcgtttataacaataaaggagatgggccttttagtcaaattgtggtcatctgttcagctgaaggagaacccagtgctgctcccacagatgtcaaggcgacaagtgtgtctgtgtcagagattcttgttgcatggaaacacattaaagagagtctaggaagaccacagggatttgaggttggttactggaaagacatggaacaggaagatacagcagaaacagtcaaaactagagggaatgagtctttcgtcatcctaacaggattagaaggaaatacgttatatcacttcacagtgagggcttacaatggagctggatatgggccacctagcagtgaagtgagtgcaaccaccaagaaatcccctcctagtcaagcacctagcaacctcaggtgggagcagcaaggctctcaggtttctctgggctgggaacccgtcataccattagccaacgaatctgaagttgtgggttacaaggttttttataggcaagagggtcacagcaacagccaagttattgaaacacagaaacttcaagcagtagtaccactcccagatgctggagtctatattattgaagttcgagcatatagtgaaggaggagatggaacagctagttctcaaattagggtaccatcatattcaggtggaaaaatcacaagtgcacagtcgacccttcactctctctccacatcttcgtcatcagtcaccttgctcttggcattgatgattccttcaacttcctggtgaaaactgctgacttaatttgcttttgtttgctttagcttggtaacagcggtgaatagagtgtagtgtaagtggagaaccaggatcctgagatgagcttgagctttaaaaacttgggactatacatggtgaacttacaggaggttaggggggaaatattacttatccatcaggtttctctttggtttttgtaaacggagaggacagttcttagtccagtaaaaatatgcagattgtatgtaatgaatttttgtaaacaaaggtaatttctgtcaaatgtattctttacttttttaatatgttgggattttattttatatctgatgactccgagtgtgtgccatccatttgttaagtaactggcctttagcagatctgtttcaaaaacaaatacaaaaatgagaatgaaaagtttgcttaagactaagtccagtgtttttcattttccctttggctgaatatttcaattgacaaaccagcaggacatatgaaaaatgcttcagtgatgtggtccattataagata

SEQ ID NO: 12158 - DNA, 3990 bp, Homo sapiens
cgccgcgtaagcggggccggctcagtgcggtgcggcaggcgcggctgtgcggcagcggaagtcctttgttgcagcacagtccctggcagagccagagcctctccgcgcagcccagcccgagcgccgagcgccgcgcgccgccgccactgcagctcgcggccccttcgccttcgcccgcctttcccgcggctgatttgccttaaactccctaaaatctccgcagctctggttcctgttgcggccggtctctaattaacagaagatggcaaagcccagccacagcagctatgtccttcagcagctaaacaaccaaagagaatggggttttctctgtgactgctgtattgcaattgatgacatttactttcaagcacacaaggcagttctagctgcctgtagctcctattttagaatgtttttcatgaaccatcagcatagtactgcacaactgaatctcagcaacatgaaaattagtgcagaatgttttgatctcattttgcagtttatgtatttaggaaaaattatgacagctccctccagttttgagcagtttaaagtggcaatgaactacctacagctatacaatgttcctgactgtttagaagacatccaggatgcagattgttctagttcaaaatgttcctcttctgcttccagcaaacagaacagcaaaatgatatttggggtaagaatgtatgaagatactgtggctcgaaatggcaatgaagccaacaggtggtgtgcagagccaagttcaacggtaaatacaccacataatagagaggctgatgaagagtctttacaattaggtaattttcctgagccactatttgatgtatgtaaaaaaagttccgtgtccaaattatctaatccaaaagaacgtgtgtcaagacgctttgggcggagttttacctgtgatagctgtggatttggctttagctgtgaaaaattattagatgagcatgtgctaacctgtactaacagacatttataccaaaacacaagatcttaccatagaatagtagatattagagatggaaaagacagtaacatcaaagctgaatttggtgaaaaagattcttccaaaacattttctgcacagacggacaaatacagaggagacacaagccaggctgctgatgattcagcttcaaccactggaagcagaaaaagtagcacagtggagtctgaaatagcaagcgaagagaaaagcagagctgctgagaggaaaaggattattattaagatggagccagaagatattcctacagatgaactgaaagactttaacattattaaagttactgataaagactgtaatgaatccactgacaatgatgaattagaagatgaacctgaagagccattttatagatactatgttgaagaagatgtcagcataaaaaaaagtggtaggaaaactctaaaacctcgaatgtcagtaagtgctgatgaaagaggtggtttagagaatatgaggccccctaacaacagcagtccagtacaagaggatgctgaaaatgcatcttgtgagctgtgtggacttacaataaccgaggaggacctgtcatctcattacttagccaaacacattgaaaatatctgtgcatgtggtaaatgtggacaaatacttgtaaagggtaggcagcttcaggaacatgctcaacgatgtggcgagccccaagatctgaccatgaatgggttaggaaatactgaggagaaaatggacttggaagagaatcctgatgagcagtccgaaataagagatatgtttgttgaaatgctggatgattttagggacaatcattaccagataaacagtatccaaaaaaagcagttatttaaacattctgcctgcccttttcgatgtcctaattgtggccagcgttttgaaactgaaaatctagtggttgaacatatgtctagctgcttagatcaagatatgtttaagagtgccatcatggaagaaaatgaaagagatcacagacgaaagcatttttgtaatctgtgtggaaaaggattttatcagcggtgtcacttaagagaacactatactgttcatactaaggaaaaacagtttgtttgtcaaacatgtggaaagcagtttttaagagagcgtcagttgcgactgcacaatgatatgcacaaaggcatggccagtggtgaaatagggccttctaaacctgtggagaagtgagagatctgaatttggagaggacatggggaagaatcaatcttcaacagataatctttaagtacagacccaggaatatcagatctgaagtggcaccatcttttctgtcttcctgacaaacttccatcaacccaaaaagttccagttgcaaagatccaagaaaactcagtaaagatcactttggaatcactttgttgtaacaaaattgattcatggtgactctaatatttgtgtaaatctgctgaagaaaagtaactagaaaattcatacaacatcagtggttacagctatactaaaataaaactttatatgctaattatcttcaagggtctttctaaaataaaaggggttgttaggctactgcaaatataaagagacataatcacaaatctatttatatagatataaataattctaaacttaaaatcactagaattatagcttaaatattatgaaatgtacttagtcaacttaaaaacttacaccaaaaatctgtagtttagagtgtaagaagtaatgggtacagagaaaaaaaatttaagaccaatattttaacaggataatttggttattactcactatagtaaaacacttgcccttcttccttttccactgtatatgccagtcacaatcttgatcatttatatgaatgaaactcccttttaaacctgttaacttgaaggagaacagaaatggtattacttcaatagtggtagatttccacaaatcagacacattattttcttctgaacttggcaatataacctaataaggcagaataagtttctgttaaaatacttattctcaatatttatgtataaaccatgcttctcagctttcaaatttcaagataaaatttaagtattcagtaaaatgatggttaacatgttttaaaaaatctttaatggagaagttaaatatttggtgagattttagtctggctataaatgctttgtttgatatatatatgtgcacatatatatattacttaaccatatgaattttatttccttattctgaatatacttgtagttttacttctttctgtttatgtacccaattccttatgattattttgtttcttctgcaatatcaagatgttatttattttgagaaatgcttatttttatgactatttattccaatgttttaacaagaagcacagagatttatagtattcttaatagtatgtgcagaagttacatcatttaaaaaacccttgctgtaaagtaggataacttgaatattcattctaataattagactaagtgaaaatctgagaaagagttaattgcaatgtgatagtgggtagaaaggagagaaaaacccactgaagggttcaaatacatgtgaattctactgctttaagagaaataaaacaaataagcctagggaaatattagagtctaaaaaaccctagagttactctcttttgggaacataaggaggtatacagaactgcagacctctaaacataagtaggaaaaagaaaaataaaagaatattaccaataattaaaggtgccagatcaaaatagtaataaatcaacaaataatttttgattgactggtggaattagatttactaaataaaaatggcttaaattttgactgtactaactataaatgtaatgaattataataattataaatggtataaatgcattctacaatgtgattattttctgtattttagtatatagtataaaatggaattattgggttaaagtacttttattacatttcttaatccattgtttttacctaataaaatttcctcctctatattccaaagtt

SEQ ID NO: 12159 - DNA, 7764 bp, Homo sapiens
ccctgggatggaggatctgtctctctctctctctctcctttttttttttttggtggagatgaaggggtgggtctatggtacatcacctgagttgtggggtaaatgtagagagtgtcaatcaaaggcagagctctcagagctgggaaggaggctctagatggcggctgtgccttagagagagcgcgctctgctccctgcctttgcctcactttacgcaactttccctaactttcgggcagcctcagggggcccccgtagccccctgcctttcctagggacttactggggtcgattcgaacctttttttgggagaaaagcagcttttaggagctttcttttcgtgccttgttggaaagaagcagccgtactgagagcccaggtcgttgttttttccagcttagaagccatggcgcacctccatttttgtgcgctctcctaatgaggttttttttctttcggacctgttttagtattaattattgctttatttttttgaccagttaacatatttgagggttattttatttatttttcgttttttaacggaggattttgcctttatttttaattatttgggatctgatatttttctactagtagataggactcttggtttggacatactacatggatcagtaaatacctgggcacaggacttcaaagcaaacacagattccccctcccccttaatatttaagaattaaaagatgatgagaaataaggacaaaagccaagaggaggacagttcgctacacagcaatgcatcgagtcactcagcctctgaagaagcttcgggttcagactcaggcagtcagtcggaaagtgagcagggaagtgatccaggaagtggacatggcagcgagtcgaacagcagctctgaatcttctgagagtcagtcggaatctgagagcgaatcagcaggttccaaatcccagccagtcctcccagaagccaaagagaagccagcctctaagaaggaacggatagctgatgtgaagaagatgtgggaagaatatcctgatgtttatggggtcaggcggtcaaaccgaagcagacaagaaccatcgcgatttaatattaaggaagaggcaagtagcgggtctgagagtgggagcccaaaaagaagaggccagaggcagctgaaaaaacaagaaaaatggaaacaggaaccctcagaagatgaacaggaacaaggcaccagtgcagagagtgagccagaacaaaaaaaagtaaaagccagaagacctgtccccagaagaacagtgcccaaacctcgtgttaaaaagcagccgaagactcagcgtggaaagagaaaaaagcaagattcttctgatgaggatgatgatgatgacgaagctcccaaaaggcagactcgtcgaagagcggctaaaaacgttagttacaaagaagatgatgactttgagactgactcagatgatctcattgaaatgactggagaaggagttgatgaacagcaagataatagtgaaactattgaaaaggtcttagattcaagactgggaaagaaaggagccactggagcatctactactgtatatgcgattgaagctaatggcgaccctagtggtgactttgacactgaaaaggatgaaggtgaaatccagtacctcatcaagtggaagggttggtcttacatccacagcacatgggagagtgaagaatccttacagcaacagaaagtgaagggcctaaaaaaactagagaacttcaagaaaaaagaggacgaaatcaaacaatggttagggaaagtttctcctgaagatgtagaatatttcaattgccaacaggagctggcttcagagttgaataaacagtatcagatagtagaaagagtaatagctgtgaagacaagtaaatctacattgggtcaaacagattttccagctcatagtcggaagccggcaccctcaaatgagcccgaatatctatgtaaatggatgggactcccctattcagagtgtagctgggaagatgaagccctcattggaaagaaattccagaattgcattgacagcttccacagtaggaacaactcaaaaaccatcccaacaagagaatgcaaggccctgaagcagagaccacgatttgtagctttaaagaaacaacctgcatatttaggaggggagaatctggaacttcgagattatcagctagaaggtctaaactggctagctcattcctggtgcaaaaataatagtgtaatccttgctgatgaaatgggcctaggaaagaccatccagaccatatcattcctctcctacctgttccaccaacaccagctgtatggcccctttcttatagtcgtccctttatccaccctcacctcatggcagagagagtttgaaatctgggcaccagagattaacgtagtggtttacataggtgacctgatgagcagaaatacgatacgggaatatgaatggattcattcccaaaccaaaagattgaagttcaacgcacttataacaacatatgagatcctcttgaaagataagactgtgctgggcagtattaactgggcctttctgggagtggatgaagcccatcggttgaagaatgatgactctttattgtataaaactctgattgatttcaagtccaaccataggctcctgattacggggacccctcttcagaattccctcaaagagctctggtccttgctgcactttattatgccggagaagtttgaattttgggaagattttgaagaagaccatgggaaggggagagagaatggctaccagagtcttcataaggtgctagagcctttccttctccggagagtcaaaaaagatgtggagaaatcccttcctgctaaagtggaacagattctcagggtggagatgtcagcccttcagaaacagtattacaagtggattctgaccaggaattacaaggctcttgccaaaggaacaagaggcagcacatctggttttcttaatattgtgatggaactgaaaaaatgttgcaaccactgctatctgattaaaccccctgaagaaaatgaaagggaaaatggacaggagattcttctgtccctcataaggagcagtgggaagttgattttattagacaaactgttgacaagacttcgagaaagggggaatcgagtgcttatcttctctcagatggtgagaatgttggatatcctggctgaatacctaactattaaacactatcctttccagcgtctggatggttccatcaagggagaaatccgaaaacaggcactggaccacttcaatgcagatgggtctgaggacttctgtttcctgctctcgacaagggctggtggcctgggaatcaatttggcttcagcggacacagtcgtcatctttgactctgactggaacccccagaatgacttgcaggcacaagcccgagcgcatagaattggtcagaagaagcaggtaaatatttaccgcttagttacaaaggggactgtggaggaggagatcatagaacgggccaaaaagaagatggtattagatcatctggtgattcagcgcatggacaccactggccggacgatcctggaaaacaactcaggaaggtccaactcaaatccttttaataaagaagagctgacagctattttgaaatttggagcagaggatctcttcaaagaactggaaggggaggaatcagaacctcaggaaatggatatagatgaaattttgcggttggctgaaacgagagagaatgaagtgtcaacaagtgcaacagatgaacttctatcacagtttaaggttgccaactttgcaacaatggaagatgaagaagagctagaagagcgtcctcacaaggactgggatgagatcattccagaggaacaaaggaaaaaagtagaggaggaagagcggcagaaggagctagaagaaatttatatgctgcctcgaattcggagttccactaaaaaggctcagacaaatgacagtgactctgacactgagtctaagaggcaggcccagagatcctctgcttctgagagtgaaacggaagactctgatgatgacaagaagccaaagcgcagagggcgtccgaggagtgtgcggaaggacctcgtggagggatttactgatgcagagatccgaaggttcatcaaggcttataagaagtttggtctccctcttgaacggctggagtgcttagcacgtgatgctgagctggtagataagtcggtggcagatctgaagcgcctgggtgaactgatccacaacagctgtgtgtcagcaatgcaggaatatgaagagcagctgaaagaaaatgccagcgagggaaaaggaccagggaaaaggagaggtccaacaatcaagatatccggagttcaggttaatgtgaaatccattatccaacatgaagaggagtttgagatgctgcataaatctatccctgtggaccctgaagaaaaaaaaaaatactgcttaacctgtcgtgtcaaagctgcacattttgatgtagagtggggggtggaagatgattctcgcctgttgctggggatttatgaacatggctatggaaactgggagttaattaaaacagacccagagcttaaattaactgacaaaattctgccggtggagacagataaaaagcctcaggggaagcagctacagacccgagcggattacttgttgaagctgctcagaaagggtctggagaagaagggggctgtgacaggtggggaggaggccaaattaaagaagcggaagcctcgggtaaagaaggaaaacaaagtgcccaggctgaaagaggagcatggaattgagctttcatctcctaggcattcagataatccatcagaagagggagaagtgaaagatgatggcttggaaaaaagtccaatgaaaaaaaaacagaagaagaaagagaacaaggagaacaaggagaaacaaatgagttctaggaaagacaaagaaggggacaaggaaagaaagaagtcaaaagataagaaagagaagcctaaaagtggtgatgccaaatcttcgagtaaatcaaagcgatctcagggtcctgtccatattacagcaggaagtgaacctgtccccattggagaggatgaggatgatgatctggaccaggagacattcagcatatgtaaggagaggatgaggcccgtgaaaaaggcactgaaacagctcgacaaacctgacaaggggctcaacgtgcaagaacagctggaacacacccggaactgcctgctgaaaatcggagaccggatagccgagtgccttaaagcctactcagatcaggagcacatcaaactctggaggaggaacctatggatttttgtttccaagtttacagaatttgatgctcgaaaactgcataagttatacaagatggctcataagaaaaggtctcaagaagaagaggagcaaaagaagaaagacgacgtgactgggggtaagaaaccatttcgtccagaggcctcaggctccagccgggactctctgatatctcagtcccatacctcacacaaccttcaccctcagaagcctcatttgcctgcctcccatggcccacagatgcatggacacccaagagataactacaatcaccccaacaagagacacttcagtaatgcagatcgaggagactggcagagggaaagaaagttcaactatggtggtggcaacaacaatccaccatggggaagcgacaggcaccatcagtatgagcagcactggtacaaggaccaccattatggggaccggcgacatatggatgcccaccgttccggaagctatcgacccaacaacatgtccagaaagaggccttatgaccagtacagcagtgaccgagaccaccggggacacagagattattatgacaggtatgcaaaaggctgtgagacaccaggtgccaacctttgccaggagctgtttctagggagaaagtgacgtatacatgaatgtatttatctatcaaattactgaagatctcatcatgcatgtgtcagccacagcgaatcccatgtcttggttataggttttatgttttgttttctgggtcatagggagcacatttcacctgtgcaggaaaagagttttctgccgtcttttgaggaaatctagtgaagaggtcgccataaaatattagagtcaacaaccaaaattattaagctctgtgcgaggctgtcagccacactaggtatcagggatcccgagatgggtaccagcccacagtccttacctgccacgagcccataattgaagagtcaaagtcttctgaagctgcaccctctttacttcagtacaatgccaccagtagtacgatgagccaaagctttacattgtgagagtagcaagtccagggagagctaaagaggttttatctgtatttcctaatttcaaatcttggataatttaacctcatagcagctttggttttccctgggctgatgatgtgcgtcatttgcactgtaccttgaatttacagtgggaaaatttcatataaacgtgtcaaagtcgtgctttgtttttggaagatctggtaacagcagcccgcattagcagagagctgtagctgagtagctgccacctcgttgggagactgcccctcgctcccacccttctctattgtctggacccagtgggcatcttgccctgcgttcttctagtaggtctgtatttctatttgatgtcactttccttttgcctgaaggactttttctgctggtgataaactctttcagtgtttgtatatatgcctgaaaaagtattttgccttcatttttgaaagtagtttttgctgagtgtatacatttttggctttacagtttctttcagtgctttaaagatgtacctctgctatttacttgcattgttttgtgatgaaaaatctgtcatccttatctttgttcctctttacataatgttccttttaaaaaaaatcactgattatgatgtgccttggtgtatttttccttggtttcttgtgcttggaaatttttgaacttcttggatctgtgggtttattgtttccataaaatttggaaatttttacaatcttcttcaaatattttttctgatcccccactctctcttcttctttggagattctcattacacctatattagcttgcttgaagttgtctcacagctcacttgtattctgttgacttttaaaaaattatgctttctgtttcactgtggatagtttctattgctacctcttcaagttcactaatactttccttttcaatgtcaagactgctgtgaggcccatccagtgtactttgcattttatacattgtagttctaaaagttcggaaagttgtttttgggtctttttatatatgttctgtgtctaaccttttaaaacctggaacacagatataacaatggttttgatgtccttgtctgcgaatcttatcacttgggtcagtttcagttgatacctcctcactgtgggtcttgctcccctggtgctttctgtgcctagtaatttttgtcagatgccagatgtaacatttaccttgttgggtgctggatatttctgtattcctgtaagtattctggagctttgttatgagttgcaggttatttggaagcagtttcctttttcaggtcttgctgttaagattcgttaggtagaaccagagcagtgctcagtcaagggctaatgattgcccacccccaaggtaaagagcctcattgcactctacccaattgcgttagtctgttttgcaggaatacctgaggctgggtaatttatagagaaaagagttttatttgg

SEQ ID NO: 12160 - DNA, 4999 bp, Homo sapiens
gaggaggattcgcagttcaacatcaaggtccctgtgcgttttattgcgacctgccggtgggaactttgtctccgagtcggagcagcatggagcggcggagcgagagcccgtgtctgcgggacagccccgaccggcggagcggcagcccggacgtcaaggggcctcccccagtgaaggtggcccggctggagcagaacggcagccccatgggagcccgcgggaggcccaacggcgccgtggccaaggccgtgggaggtttgatgattcctgtcttttgtgtcgtggagcagttggacggctctcttgaatatgacaacagagaagaacacgccgagtttgtcctggtgcggaaagatgtgctttttagccagctggtggagactgcgctcctggccctggggtattctcacagctctgcggcccaggcccaaggaataatcaagctgggaaggtggaaccctctccccctcagttatgtgacagatgcacccgacgcgacagtggccgacatgctacaagatgtctatcatgttgtgacgttgaaaatccaattacaaagttgttcaaagttggaagacttgcctgcggagcagtggaaccatgccacagtccgcaatgccttaaaggaactgctcaaagagatgaaccagagcacattagccaaagaatgccctctctcccagagtatgatttcatccattgtaaatagcacatattatgccaatgtgtcagcaaccaagtgccaggagtttgggagatggtataaaaagtacaagaagattaaagtggaaagagtggaacgagaaaacctttcagactattgtgttctgggccagcgtccaatgcatttaccaaatatgaaccagctggcatccctggggaaaaccaacgaacagtctcctcacagccaaattcaccacagtactccaatccgaaaccaagtgcccgcattacagcccatcatgagccctggtcttctttctccccagcttagtccacaacttgtaaggcaacaaatagccatggcccatctgataaaccaacagattgccgttagccggctcctggctcaccagcatcctcaagccatcaaccagcagttcctgaaccatccacccatccccagagcagttaagccagagccaaccaactcttccgtggaagtctctccagatatctaccagcaagtcagagatgagctgaagagggccagtgtgtcccaagctgtctttgcaagagtggcattcaaccgcacacagggattgttgtctgagattctgcgtaaggaagaagaccctcggacagcctctcagtctcttctagtaaacctgagggccatgcagaatttcctcaatctgccagaagtggagcgagatcgcatctaccaggatgagagggagcggagcatgaatcccaatgtgagcatggtctcctcggcctccagcagtcccagctcctcccgaacccctcaggccaaaacctcgacaccgacaacagacctccctattaaggtggacggcgccaacatcaacatcacagctgccatttatgacgagatccaacaggagatgaaaagggccaaggtgtctcaagccctgtttgccaaagtggctgcaaataaaagtcagggctggctgtgtgaactgctccgctggaaggagaacccaagcccagaaaaccgcaccctctgggaaaacctctgtaccatccgtcgcttcctgaaccttccccagcatgagagggatgtcatctatgaggaggagtcaaggcatcaccacagcgaacgcatgcaacacgtggtccagcttccccctgagccggtgcaggtacttcatagacagcagtctcagccagccaaggagagttcccctcccagagaagaagcgcctcccccacctcctccgactgaagacagttgtgccaaaaagccccggtctcgcacaaagatctccttagaagccctggggatcctccaaagctttattcatgatgtaggcctgtacccagaccaggaagccatccacactctttcggctcagctggatctccccaaacacaccatcatcaagttcttccagaaccagcggtaccacgtgaagcaccacgggaagctgaaagagcacctgggctccgcggtggacgtggctgaatataaggacgaggagctgctgaccgagtcagaggagaacgacagcgaggaaggctccgaggagatgtacaaagtggaggctgaggaggaaaatgctgacaaaagcaaggcagcacctgccgaaattgaccagagataatgtgaacttctactaggcaaagcaatacatcggtccaaggattttctgctttcatttctttaaaagttttttgttagtttgttttttgtttttgtttttgggtttttttggctttatttttgtctttttatgtctgttttgtttttcttacccttttggacatttctttgttgcacaggatacacctatagactgaataagttcagtatttccgaatcagacatcgccttggcaaagacactaaagcgttacactttatcccgtctctatgactggatcatagtcattataatcacaggagactctgccttcattatccttgcacttaacggaagttacatcaggcaagttccaggatgaaaagaactatgaaataaatgaaggaagctacaagtgtgtgtgtatatgtatatgtatatatctctatatttacatatatatattaaaattgcatgggacagagactttgcaatccgaaagaatagactgtgaaatgagttcttaaagaaaagacttgtttatgtattaaaaaaaccacttcacagtgagtcgctttggctttttgataaactgcggcctgctctcagggtggggtgactatttttgaattcctatttattttttgtgtttgtccctgatttttttttttaattctatggcttcctatctggcagcttaatgggtaatttttgaggtatgtatttaacaaaataaacgacactgccgaaaaaaaaaaaagtgaagtgaaaacaatcagggcacattaaaatgatacaagtcaaataaatcttaaagacacaatgcacacttaaaatgactcaataaaatgacttgctacgttccgttattcaatttgtcattactgtagtgaacagatgcatttctgtggaattccaaataagtaaaactgaaattcagtgcagagaaaactttgtccactagtgcaagtcttgatcaaatgacattttgacattggacatatggaattcatagtatgagccacattttgttgtgaaatttatttacctgcttgtggcttcaaatctgaaaattaataagcctgctcgtttaaaagttgtttgttgttgctgtttttttgtctttttgttttttactagaaaatagttcagtgtaatattaagttagaaaagaagttgctgcccagttaaaggggctccctctcaaataaatctccatccttccctctcccaaaagacatttctgatttctgcttcactttgggcttcctcttcttcgtacacattccatctacctaatcaaacattttcagtccctgatctctcctgtcccttttcctgggatgacagccctaacaagaactgtttttgaatcgttgtgcagctccaggcaatagagtatgtgaagcgatttcagtagaatcacttactcatcctaaaagaaaacattatcccagttacctacatcgcaattaccttatgtaaagcagaactaatgctgactggatgtttaatgggatgagcattaaagctgcaatctactatagtactccagatctctttcggcttcctatgagaaacaccagaagcattactttccacttctacttacagtaattgcaagaggagacctcacattcaggactggcctagtgaacgtaatccatgctttaaactggccattaaacagtcccacatggttggattttttttttttttttgagttgtgctttcacaaaaccttgtcaaagacctcatgcaatatcactttgaaagttattttctgtttactacacaaacattgtaatataactgttaatactatttatatatttgaaaggtataaaaggtaggagttaaaaaaaaaacctctatgtgtagatattaactcagaacttacaatatacagggagaagacatgttgcaatacaagctaattctagctgctcagtaacctctggagtttttaaagggacattttcctgtactttttcaaataatgatgtttaaaaattatcttgacataagcgtcatatacctttgcaaaaggatggttgtttgcagttagccctggccccatccttcctatttctgtagtatgctgcagctttaatcagaaagtccatggttgctgcttcctgatctccgagttactctttccaaattgtcttcttacactgttgctgaaggtcactctgtacacgtaatggaaactgattttgccaagctcttacaaggtggttcatctatcgatggcatccgcatttggtatcttttacacttcaaccaaaaatttattaggtatttttcaatgctaagtcttgccttttattttttaatttcactgccaagtttgcagtggttctaagtgaatctgtgggcattttagcctgtggtcttgccagatctttgcgaattacaatgcatatatgtctatttattcaatatctgtcatataatatctatttggaagaagaaactttctcttgtagtgcctcttgacaaagcacaatttcccgcctttttttttttttttgtgaaatgaaaaaaacaaattgtgttttattgcggtatcaacaatgtgaataaggattaacatattgtaaatgttcttttttccatgtaaatcaactatctttgttatcactaagtgataattaatttttaacttatgtgcattgttaggctgttagaattttttggttgttaaaataaacgcattcaataaatatg

SEQ ID NO: 12161 - DNA, 2884 bp, Homo sapiens
agcttcgacggccgccattttctttctttcttagctgttagctgagaggaagtctctgaacaggcggcagcggctcttatagtgcaaccatggcagactattcaacagtgcctcccccctcttctggctcagctggtggcggtggtggcggcggtggtggtggaggagttaacgacgctttcaaagatgcactgcagagagcccggcagattgcagcaaaaattggaggtgatgcagggacatcactgaattcaaatgactatggttatgggggacaaaaaagacctttagaagatggagatcaaccagatgctaagaaagttgctcctcaaaatgactcttttggaacacagttaccaccgatgcatcagcagcaaagcagatctgtaatgacagaagaatacaaagttccagatggaatggttggattcataattggcagaggaggtgaacagatctcacgcatacaacaggaatctggatgcaaaatacagatagctcctgacagtggtggccttccagaaaggtcctgtatgttaactggaacacctgaatctgtccagtcagcaaaacggttactggaccagattgttgaaaaaggaagaccagctcctggcttccatcatggcgatggaccgggaaatgcagttcaagaaatcatgattccagctagcaaggcaggattagtcattggaaaagggggagaaactattaaacagcttcaggaacgggctggagttaaaatggttatgattcaagacgggccgcagaacactggtgctgacaaacctcttaggattacaggagacccatataaagttcaacaagccaaggaaatggtgttagagttaattcgtgatcaaggcggtttcagagaagttcggaatgagtatgggtcaagaataggaggaaatgaagggatagatgtccccattccaagatttgctgttggcattgtaataggaagaaatggagagatgatcaaaaaaatacaaaatgatgctggtgttcgcattcagtttaagccagatgatgggacaacacccgaaaggatagcacaaataacaggacctccagaccgatgtcaacatgctgcagaaattattacagaccttcttcgaagtgttcaggctggtaatcctggtggacctggacctggtggtcgaggaagaggtagaggtcaaggcaactggaacatgggaccacctggtggactacaggaatttaattttattgtgccaactgggaaaactggattaataataggaaaaggaggtgaaaccataaaaagcataagccagcagtctggtgcaagaatagaacttcagagaaatcctccaccaaatgcagatcctaatatgaagttatttacaattcgtggcactccacaacagatagactatgctcggcaactcatagaagaaaagattggtggcccagtaaatcctttagggccacctgtaccccatgggccccatggtgtcccaggcccccatggacctcctgggcctccagggcctggaactccaatgggaccatacaaccctgcaccttataatcctggaccaccaggcccggctcctcatggtcctccagccccatatgctccccagggatggggaaatgcatatccacactggcagcagcaggctcctcctgatccagctaaggcaggaacggatccaaattcagcagcttgggctgcttattacgctcactattatcaacagcaagcacagccaccaccagcagcccctgcaggtgcaccaactacaactcaaactaatggacaaggagatcagcagaatccagccccagctggacaggttgattataccaaggcttgggaagagtactacaagaaaatgggtcaggcagttcctgctccgactggggctcctccaggtggtcagccagattatagtgcagcctgggctgagtattatagacaacaagcagcctattatgcccagacaagtccccagggaatgccacagcatcctccagcacctcagggccaataataagaagtggacaatacagtatttgcttcattgtgtgggggaaaaaaacctttgttaaatatatggatgcagacgacttgatgaagatcttaattttgtttttggtttaaaatagtgtttccttttttttttttttttttgaaaatgtacaaaatatctatcactactgataggaggttaatatttctgtgtagaaatgaaaattggtttgtttttagtatttagtgtagatgtacacattccagcaaatgtatttgcaattatgtggttgatgctttgtgatataaatgtactttttcaatgtatactttcacttttaaaatgcctgttttgtgctttacaataaatgatatgaaacctcctgtgtcggtaagttggatatgtgggtatttaaaggattcataatttcttagcaatgataaattaagatacatatacacaaatatataagctttccccatgaaatattgagtttttaaacactggcatgtttttccccccttgcagtatagtggtagattggaggatcttttccatttattgtattggctctttcagcacaagtaatcctgatatcttcattttttttccttctgtttgattaaaaactgcatgtgtgtacaatgatcttttggcatacttccattgcattaacagtgaaatttccttttatacatgaccactgtttcagacctgtactgctgctataacagttaacctttctgttcttaatttgataatacttgatttccaagactgtttcggcataactaattttaaacagttttcagatagtgaatatgagtagtctaataagaacagtttttttccatgtgaagcaactctttcaatgtatataa

SEQ ID NO: 12162 - DNA, 2732 bp, Homo sapiens
ctttcgcctcagtctcgagctctcgctggccttcgggtgtacgtgctccgggatcttcagcacccgcggccgccatcgccgtcgcttggcttcttctggactcatctgcgccacttgtccgcttcacactccgccgccatcatggtgaagctcgcgaaggcaggtaaaaatcaaggtgaccccaagaaaatggctcctcctccaaaggaggtagaagaagatagtgaagatgaggaaatgtcagaagatgaagaagatgatagcagtggagaagaggtcgtcatacctcagaagaaaggcaagaaggctgctgcaacctcagcaaagaaggtggtcgtttccccaacaaaaaaggttgcagttgccacaccagccaagaaagcagctgtcactccaggcaaaaaggcagcagcaacacctgccaagaagacagttacaccagccaaagcagttaccacacctggcaagaagggagccacaccaggcaaagcattggtagcaactcctggtaagaagggtgctgccatcccagccaagggggcaaagaatggcaagaatgccaagaaggaagacagtgatgaagaggaggatgatgacagtgaggaggatgaggaggatgacgaggacgaggatgaggatgaagatgaaattgaaccagcagcgatgaaagcagcagctgctgcccctgcctcagaggatgaggacgatgaggatgacgaagatgatgaggatgacgatgacgatgaggaagatgactctgaagaagaagctatggagactacaccagccaaaggaaagaaagctgcaaaagttgttcctgtgaaagccaagaacgtggctgaggatgaagatgaagaagaggatgatgaggacgaggatgacgacgacgacgaagatgatgaagatgatgatgatgaagatgatgaggaggaggaagaagaggaggaggaagagcctgtcaaagaagcacctggaaaacgaaagaaggaaatggccaaacagaaagcagctcctgaagccaagaaacagaaagtggaaggcacagaaccgactacggctttcaatctctttgttggaaacctaaactttaacaaatctgctcctgaattaaaaactggtatcagcgatgtttttgctaaaaatgatcttgctgttgtggatgtcagaattggtatgactaggaaatttggttatgtggattttgaatctgctgaagacctggagaaagcgttggaactcactggtttgaaagtctttggcaatgaaattaaactagagaaaccaaaaggaaaagacagtaagaaagagcgagatgcgagaacacttttggctaaaaatctcccttacaaagtcactcaggatgaattgaaagaagtgtttgaagatgctgcggagatcagattagtcagcaaggatgggaaaagtaaagggattgcttatattgaatttaagacagaagctgatgcagagaaaacctttgaagaaaagcagggaacagagatcgatgggcgatctatttccctgtactatactggagagaaaggtcaaaatcaagactatagaggtggaaagaatagcacttggagtggtgaatcaaaaactctggttttaagcaacctctcctacagtgcaacagaagaaactcttcaggaagtatttgagaaagcaacttttatcaaagtaccccagaaccaaaatggcaaatctaaagggtatgcatttatagagtttgcttcattcgaagacgctaaagaagctttaaattcctgtaataaaagggaaattgagggcagagcaatcaggctggagttgcaaggacccaggggatcacctaatgccagaagccagccatccaaaactctgtttgtcaaaggcctgtctgaggataccactgaagagacattaaaggagtcatttgacggctccgttcgggcaaggatagttactgaccgggaaactgggtcctccaaagggtttggttttgtagacttcaacagtgaggaggatgccaaagctgccaaggaggccatggaagacggtgaaattgatggaaataaagttaccttggactgggccaaacctaagggtgaaggtggcttcgggggtcgtggtggaggcagaggcggctttggaggacgaggtggtggtagaggaggccgaggaggatttggtggcagaggccggggaggctttggagggcgaggaggcttccgaggaggcagaggaggaggaggtgaccacaagccacaaggaaagaagacgaagtttgaatagcttctgtccctctgctttcccttttccatttgaaagaaaggactctggggtttttactgttacctgatcaatgacagagccttctgaggacattccaagacagtatacagtcctgtggtctccttggaaatccgtctagttaacatttcaagggcaataccgtgttggttttgactggatattcatataaactttttaaagagttgagtgatagagctaacccttatctgtaagttttgaatttatattgtttcatcccatgtacaaaaccattttttcctacaaatagtttgggttttgttgttgtttcttttttttgttttgtttttgttttttttttttttgcgttcgtggggttgtaaaagaaaagaaagcagaatgttttatcatggtttttgcttcagcggctttaggacaaattaaaagtcaactctggtgccagaaaaaaaaaaaaaaaa

SEQ ID NO: 12163 - DNA, 2143 bp, Homo sapiens
ggtaagagtcgcgtagcccgagccgggcggaaccactgttcgcgctgccgtgtttccgggcggggacactcagggcgcgacgcttttctgttacccacagaggcccgccgcggctgcgccatccgcggccatgaagtttcgggccaagatcgtggacggggcctgtctgaaccacttcacacgaatcagtaacatgatagccaagcttgccaaaacctgcaccctccgcatcagccctgataagcttaacttcatcctttgtgacaagctggctaatggaggagtgagcatgtggtgtgagctggaacaggagaacttcttcaacgaatttcaaatggagggtgtctctgcagaaaacaatgagatttatttagagctaacatcggaaaacttatctcgagccttgaagactgcccagaatgccagggctttgaaaatcaaactgactaataaacactttccctgcctcacggtctccgtggagctgttatctatgtcaagcagtagccgcattgtgacccatgacatccccataaaggtgattcctaggaaattgtggaaggacttacaagaaccggtggtcccagatcctgatgttagtatttatttaccagtcttgaagactatgaagagtgttgtggaaaaaatgaaaaacatcagcaatcaccttgttattgaagcaaacctagatggagaattgaatttgaaaatagaaactgaattagtatgtgttacaactcattttaaagatcttggaaatcctccattagcctctgaaagcacccatgaggacagaaacgtggaacacatggctgaagtgcacatagatattaggaagctcctacagtttcttgctggacaacaagtaaatcccacaaaggccttatgcaatattgtgaataacaagatggtgcattttgatctgcttcatgaagacgtgtcccttcagtatttcatccctgcgctgtcctagcaccctgtcgctggagttggcatgcagagactttgtcaggatgggagaggccgcaggtgttgtgttctgatcactggtctgtgccctcacagcaccgcacatcgacacactgtacttatttgtccctctctaacattttaactaaaagttgattcaacaacacacagttggataaacatatcacttcatgttgctcatgtctgttttgctttgtttttaagacactgaaaagaaaagctagaatttatttattcagactttaaagaacaatttctcattgatgttgtgaaaatcgtcatgtatttagacttggtgtagtagccagaattcgtaaagctgttgcctgggagcttggtactttccctccaggcagaggctctagctcagcacggcctgtagcgcacagtcagtcttgcatttcagtgtgttcaccccgctgctcctgccccttggagcccagtgacagaaagaacagcctctgtcaccccgccgccactgccttggttactcagagcactgtggggtgtcacagctgcagcatttggagtctctctcttgctgaggactcaagcccacctgagtccactcccctcttgatgcctagagagctggcccagccaacacagctcttagctgggagctccttctgccattccaactagtttcttcctggggccagttttgggtttaggttgtaattccttatatttctttcttccacagtgtatcggatctgtcgttctggaaagaagacccttctatttagagtagaaacaaacgaaacttctaaggtatcatctgtgttaagtgatgagaccatatttctttgatgtttctgaacatcaaagctgattcagtactggtagatgtgctcattctccctgaaacatacccatcatatttcctattataattacatctcattgtcctgtggaggtggacatgataaacattatcttttgttttcttgttttgttttgtttgagacggtctcattctgtcacccagactggagtgcagtgccacaatcatggctcaccgcattgacctccttggctcaaggcatcctcccacctcagcttcctgactagctgggactactggtgtgcaccaccacacccagctaattttcaatttttcatagagacagggtctcactgtgttgtccag

SEQ ID NO: 12164 - DNA, 3860 bp, Homo sapiens
cctgttcctcttaccctgcccggctccagctgaccagggaaggggtgggctgaactgaggcgggggcaagggagtgcccgacatcttgtccgactccgcgggtgacacgagccggttctctctggactggtggcagcgcgcggccccgaaccgcgccccaggccggcaggcggggaaggagccggtgggggtagggggtgcggtggggggtggggaccctccggctcttgggggtcccagtccccgccggctgctgagcgggtggggtggtggaggagctgcagagatgtccggccagagcctgacggaccgaatcactgccgcccagcacagtgtcaccggctctgccgtatccaagacagtatgcaaggccacgacccacgagatcatggggcccaagaaaaagcacctggactacttaattcagtgcacaaatgagatgaatgtgaacatcccacagttggcagacagtttatttgaaagaactactaatagtagttgggtggtggtcttcaaatctctcattacaactcatcatttgatggtgtatggaaatgagcgttttattcagtatttggcttcaagaaacacgttgtttaacttaagcaattttttggataaaagtggattgcaaggatatgacatgtctacatttattaggcggtatagtagatatttaaatgagaaagcagtttcatacagacaagttgcatttgatttcacaaaagtgaagagaggggctgatggagttatgagaacaatgaacacagaaaaactcctaaaaactgtaccaattattcagaatcagatggatgcacttcttgattttaatgttaatagcaatgaacttacaaatggggtaataaatgctgccttcatgctcctgttcaaagatgccattagactgtttgcagcatacaatgaaggaattattaatttgttggaaaaatattttgatatgaaaaagaaccaatgcaaagaaggtcttgacatctataagaagttcctaactaggatgacaagaatctcagagttcctcaaagttgcagagcaagttggaattgacagaggtgatataccagacctttcacaggcccctagcagtcttcttgatgctttggaacaacatttagcttccttggaaggaaagaaaatcaaagattctacagctgcaagcagggcaactacactttccaatgcagtgtcttccctggcaagcactggtctatctctgaccaaagtggatgaaagggaaaagcaggcagcattagaggaagaacaggcacgtttgaaagctttaaaggaacagcgcctaaaagaacttgcaaagaaacctcatacctctttaacaactgcagcctctcctgtatccacctcagcaggagggataatgactgcaccagccattgacatattttctacccctagttcttctaacagcacatcaaagctgcccaatgatctgcttgatttgcagcagccaacttttcacccatctgtacatcctatgtcaactgcttctcaggtagcaagtacatggggagatcctttctctgctactgtagatgctgttgatgatgccattccaagcttaaatcctttcctcacaaaaagtagtggtgatgttcacctttccatttcttcagatgtatctacttttactactaggacacctactcatgaaatgtttgttggattcactccttctccagttgcacagccacacccttcagctggccttaatgttgactttgaatctgtgtttggaaataaatctacaaatgttattgtagattctgggggctttgatgaactaggtggacttctcaaaccaacagtggcctctcagaaccagaaccttcctgttgccaaactcccacctagcaagttagtatctgatgacttggattcatctttagccaaccttgtgggcaatcttggcatcggaaatggaaccactaagaatgatgtaaattggagtcaaccaggtgaaaagaagttaactgggggatctaactggcaaccaaaggttgcaccaacaaccgcttggaatgctgcaacaatggcaccccctgtaatggcctatcctgctactacaccaacaggcatgataggatatggaattcctccacaaatgggaagtgttcctgtaatgacgcaaccaaccttaatatacagccagcctgtcatgagacctccaaacccctttggccctgtatcaggagcacagatacagtttatgtaacttgatggaagaaaatggaattactccaaaaagacaagtgctcaagcagcaaaatccttacttccagcaaaatccaaactgctgtctcttaaatctcttaaactctcttcttccattagaatgctacaagtaactcagtgaaggcccatgaaggaaattgggactagtttataggagaacgtatcaatacagtttataaagccaagaattgctatgatttaagactaagatctgtctttttggtgactaacccttcaattctttcaactcctgttaatacccataatcagtaacctatcaagaaaagcccttatttggaaagtgtgaaatttgtatttggaaaagctgcctggagagaagaactgtgtcctttactgtatttcaacaggactcttttgggggatcaaaattaaaattcctaattatgcattatctttcttttctccagtcctcacaaatacagaaacaataactgaaattaacttttctttttttaaaaaaaattatattcagtttgcagtagacattccttaagtatttgtatttatttatgattatcaattttacataacattaatattgtatcagacctccttatgaaaatgagtatggatgtgcacagtatgtttgatttttatccacaagaatgaatctgattcagaatgcttttctcagctgacatacagagcactaaatattttaaggcaagtccataggtctgaatctcttaagaattctcggcctctgtgggatttagggaagcattataaatgcattaatccttatagtcaattctgtgcctaggattttgccagggaacagttcactgactaggaaaagcactacattttaaattcagcattagtgcattgggaaggatctttactgctttgtgcttggcatgtcattattttccatttgacattagggcctttccaaaatgaatgtgaggaattgctttcacttcaagactttccttcttttcactaaaactctagaaggtgttacaagggggagggaaggggggcaaagtccttgaacattttctttggctcgtgccatgttatgatcatataccttttaaataaggggaaatagtatctttaaagttaatgtctagccaagagtttagtaaacgaagaattaaactgcactgttgatcggtgctttgtgtaaatacatctttaacatttgggtggagaggggccttaagaaggacagttcattgtaggaaagcaattctgtacatgagtttaagcattcttgttgcattgtctctgcagattctatttttgtttacaatattaaaatgtatgttagcaaaatgggtggattttcaaataaaatgcagcttccacaaaagttttgttatggtattctggtctgagatgcattttcatttttcctttctctttttattatcaatattgtcatttttccctaataaaatatacccaggtgattatatttgttgatctaataacatggaaggtttgttttatatgaattttcaaaaagatgtctctttacactttttgttaccttgtagactcttattgataaatgcaactacttattaaaattgttcactttttgtcttttgaaaaaaaaaaaa

SEQ ID NO: 12165 - DNA, 5410 bp, Homo sapiens
gcggcggcggcggcggcggcggcggcggcggccggggcgggagcggggcgcgctctggagacgagtcagcggcgccccgggtgggggaggcgggcgggcagctagagatcacctcagcagcccccaccacggccggaccgaaggtgcggcggcggaggggagccagggcgccccagcaggtttccaatacttatctacaggaatcgccatgaccccagctctgagggaggcaacagcaaagggtatcagcttttcatctttgccaagtaccatggagtctgacaagatgctctacatggaaagtcccagaactgtagatgaaaagctaaagggagacaccttttctcagatgcttggatttccaactcctgaacctactcttaatactaattttgtgaatttaaaacattttggctcccctcagtcttcaaaacattaccagactgtttttttaatgagatctaattctacattaaataaacacaatgagaattataaacaaaagaaattaggggagcccagttgcaataagctgaaaaacatactgtataatggcagcaacattcagctcagtaaaatctgtctttctcattctgaagagttcatcaaaaaggagcctctatcagataccacgagccagtgcatgaaagatgtacaaattattctggattcaaatataaccaaagacactaatgtagataaagtacaactacaaaactgtaaatggtatcaagagaatgcacttttggataaagttactgatgctgagattaaaaagggtttattgcactgtactcaaaagaaaattgtacctggccactcaaatgtgcctgttagttcttcagctgctgaaaaagaggaggaagtacatgctcgtttacttcattgtgtaagcaaacagaaaattttacttagccaggctagaagaactcagaaacatttgcagatgctcctggcaaagcatgttgttaagcactatggtcagcagatgaaattgtctatgaaacatcaactccccaaaatgaagacatttcatgaacctaccacaattttgggtaatagtttacctaaatgcactgaaattaagccagaagttaacacattgactgcagagaataaattgtgggatgatgcaaaaaatggctttgcacggtgtacagctgcggaaatccaaagatttgcattttctgctacagggctgttgtctcatgttgaagagggtttggattccgatgcaactgatagcagctctgatgacgatttggatgaatatacccttagaaaaaatgtggcagttaactgtagtactgaatggaagtggcttgtagacagagcacgagttggcagccgatggacttggcttcaagctcagatttcagacctagaatgcaaaatccaacaactaacagacattcacaggcaaattcgtgcctccaaggggatagtggtcctagaagaatgtcagcttccaaaagatattttgaaaaaacaaatgcaatttgcagaccaagcagcttcactaaacattctagggaatcctcaggttccccaggagtgtcaagatcctgtaccggaacaagattttgaaatgtcaccaagcagccctactttacttcttcgaaacatcgaaaaacagagtgcacagttgactgagatcatcaacagtttgattgcccctctcaacttgtccccaacttcatcacccctctcttccaaatcctgtagccataaatgtctggctaatggcatttacaggagtgcatcagagaatttagatgagctgtcttcctccagtagctggttacttaaccagaagcacagtaagaaaaagagaaaagacaggacaagactgaaatcttcatccttgactttcatgagtacatcagcccgaacaaggccacttcagagtttccacaaacgaaaactgtacagattgagccctactttttattggactccacagactttgccttcaaaagaaacagcatttttaaacactacacaaatgccttgcctgcaatcagcttcaacttggagtagctatgaacacaattcggagtcttacctattaagagaacatgtatcagagttagattcctctttccattctgttctatcattgccatcagatgtgcctcttcattttcactttgaaacactgttaaaaaagactgaaataaaaggcaatcttgctgaaaataaatttgtagatgaatatatcatatctccatcacctgtacatagtactctgaatcaatggagaaatggatattcacctatatgtaagcctcaaataaggtcagaatcttctgcacaactgttacagggaagaaagaaaagacatttgagtgaaacagcattaggagaaagaactaaacttgaagaatctgattttcaacacacagaatcaggatcccatagcaattttactgctgtttccaatgtcaacgttttatcaagaatccagaattcatcacgaaatactgcacgacggagattgagaagtgagagctcttatgacatagataacattgtgattcccatgtcattagtagccccagctaaattagagaaactccaatataaggaaatacttactccaagctggaggatggttgttcttcagcctttggatgaatataatttaggcaaagaagagatagaagatctttctgatgaagtcttctccctaaggcacaaaaaatatgaagagagagagcaagccaggtggtcactatgggagcaaagcaagtggcacagaagaaacagcagagcttacagtaaaaatgttgaaggacaggacttgcttttgaaagaataccctaataacttcagtagcagtcagcaatgtgctgctgcaagtcctcctgggcttccttcagagaaccaggatctgtgtgcatatggcttaccttctttaaatcaaagtcaagaaaccaagtctttgtggtgggaacgacgggcttttccactgaagggtgaagacatggcagccttattatgtcaagatgaaaaaaaggatcaggttgaaaggtcaagcacagctttccatggtgaaatcttcggtaccagtgtaccagagaatggccaccatccaaaaaagcagtcagatggaatggaagaatacaaaacctttggtctaggacttactaatgttaaaaaaaataggtgacagggaacaggttaagaaaactatgtaaatgtaggaaagatgggaggaaataaagccctgttctggatcccccatcccctccagaataagagcatgttctgcatgtattaatcttttatgctgtttatgaaacaggcaagataagtctgtttttccttctggaaccataagggtaaccagattttcatctacagacaagtggtagtcatttgtgtttatcatgcaacttacttacaaacaccaagatattaattgctgcaacttgatgtcaaatcacattactgggtaatttttaagactatgtacccacaccatacatacatacatatatatatacacatacatacaaacctgtgtgccaagtgacagctatttttttatatacatggtaattcattaaaattgccttagtaatatattagaatatacaaatatgtgtgtataaaataaacatacacacacacacacacccctatgtagtttttaaaacactggcaatgacccactccccttggaaatgcatgtatgaactaccctatgaaatgtaagctgcagaatagataaaacacaggtttccactaataaaagacatctgaacgtcctgaatatagagacagaagttttttgttgttgttgttgttgttttaacatgtttaaccaacagaagttatttacagaaattcatatatccaggcaacacaaaactcctttattcaaaatcactgctatctttgggactaaacacaggctactttctgtttactcctaacaaaataaagcaagcaaatttgagtcaaatattggtgcactttaatactatcacatctttgaaaactcaatttgagttttaccaattaatgtgtctcatgaagagaagacaccagttttaaaatgagccacaaacagtaaagccctatcagtataaaatttgaaaaaaaaaaaaaagatgattgtatttctagattagcaagaaattagttaattctggctgatttctatttctagctaatttggtcattctttgccatagcttactctattcaaataaacatatattcttgcttgcatcctagattggaaattaaaatttttcaaagaacaaagcttcaatattggatactgaagagtatacatgaaagaaaattccttttgaagctattaaaccatttttttcctatgtgaaagttgaggacaatttatataactcactttttgtcatgtaaaaaaggttactcaagttgtactacccacataactgaaaatattggccatttggccttatctgtgagatttgacactaagtttttgttagagattggaaattatactagtccttttaaggggtaaaaaattcaattcaatactgacaaacttttgcttgtagttttactgtacatttatttttaaagaaaaagaaaacaaaagccagacaaacccaagttgtccaggcaaataaactcaaatctttgtcacgtctgatattataatcttctatgtaagttttttaattaaagttatttctatatgccgtgtgttgcttgttattaaatgcgacgtattcatggcacaaagctttcccaagctgaataaaaacaaacattaacaaatttttaccttgtaatgcaggaagaaacccaagcaagctctagtctgtgcttaagtgttagcattcttattttttgaaccttatttctcaaaacttatagtagcctcaagaagtctattgatattggtcatgtttatttcttgccatatttataacacagcaagagtatttacaggaatgaagtagctgacacatatttttagactctgtataattcagaacagttataaatatttagtttatggattgactctgtatcctgtcatcttttcgcctacctgatctttcttggaataaaataatatatccttggggtcaagatccatagttccagaattttctcagccatctggttctgctacagcgtaaaattagactggaaataagacaacgttaagtaaaaagcttcttttacctaacccacctcccaagggctccatttgtaaaagtacagaccagaaattctaccacttcccagatcctttccagggtaccaccctattaagcattaatttcttcattttttaaatggggacaaaaatatctgctttattattaccacttacttatagaggtgatttacagatttaatgagaatatatcaaagtactttataactcacaaaaatataa

SEQ ID NO: 12166 - DNA, 4214 bp, Homo sapiens
ggcagcggcgcttcctgctaggaccggccggggccgtaccggaggctcgggctccaccgaccctcctcccaccccctcccactcaccctctgggccgcgactgcgcagggcggggccggccgaaccatgggccgcggtgtgggctaagctggtggccccggctttagactggaccccacaatgtttgcagagatgttcaggcacgcgggagctgattacacacaatgaatgggggcaatgagagcagtggagcagacagagctgggggccctgtggccacatctgtccccatcggctggcagcgctgtgtgcgagagggtgctgtgctctacatcagtccaagtggcacagagctgtcttccttggagcaaacccggagctacctcctcagcgatgggacctgcaagtgcggtctggagtgtccacttaatgtccccaaggttttcaactttgaccctttggccccggtgaccccgggtggggctggggtggggccagcatcagaggaggacatgaccaagctgtgcaaccaccggcggaaagctgttgctatggcaactctgtaccgcagcatggagaccacctgctcacactcttctcctggagagggagcgagcccccaaatgttccacactgtgtccccagggcccccctctgcccgccctccctgtcgagttcctcctacaactccacttaatgggggtcctggctcccttcccccagaaccaccctcagtttcccaggcctttcccactctagcaggccctggggggcttttccccccaaggcttgctgacccagtcccttctgggggcagtagcagcccccgtttcctcccaaggggcaatgccccctctccagccccacctcctccacctgctatcagcctcaatgctccctcatacaactggggagctgccctcagatccagcctggtgccctctgacctgggctctcctccggcccctcatgcctcctcctcaccaccttcagaccctcctctcttccactgtagtgatgccttaacaccccctcccctgcccccgagcaataatctccccgcccaccctggtcctgcctctcagccaccagtgtcttcagccactatgcacctgcccctggtcctggggcccctgggaggggcccccacggtggaggggcctggggcaccccccttccttgctagcagcctactctctgcagcggccaaggcacagcatcccccactaccccctcccagcactttacagggccgaaggccccgtgcccaggcaccctcagcttcccactcctcatcacttcgtccctctcagcgtcgtccccgcagaccccctactgtatttcgattgctagaagggagaggccctcaaacccctagacggagccgtcctcgggcccctgctcctgtcccccaacccttttctctcccggagccatcccaaccaattctcccttctgtgctgtccctgctgggactccccacccctggcccttcccactctgatggaagctttaaccttttggggtcagatgcacaccttcctcctcccccaaccctctcctcagggagccctccccagcccaggcaccccatccagccctccctgcctgggaccaccagtggcagcctcagcagtgtgccaggtgcccctgccccaccagctgcctccaaagccccagtagtccccagccctgtgcttcaaagcccatccgaaggactggggatgggggcaggcccggcctgccctctgcctcccctggctggtggagaggctttccctttccccagccctgagcagggcctggcactgagtggagctggcttccctgggatgcttggggccttgcctctccctctgagtctggggcagcctccaccttctccattgctcaaccacagtttatttggtgtgctgactgggggaggaggacaacctccccctgagcccctgctacccccaccaggaggacctggtcctcccctagccccaggagagcctgaagggccttcgcttttggtggcttccttgcttcctccaccaccctcagaccttcttccacctccttcagcacctcccagcaacctccttgcctctttcctgcccctgttggctctgggccccacagctggggatggggagggatctgcagagggagccgggggtccaagtggggagccattttcaggcttgggagacctgtcccccctacttttccccccactttcagccccccctaccctcatagctttaaattctgcgctgctggctgccaccctggatcccccctcggggacacccccccagccctgtgtcctgagtgccccccaacctggaccacctacctccagtgtcaccacggcaactactgacccgggggcctcctctctgggcaaggccccctccaactcagggagacccccccaactccttagccctctgctgggtgccagcctgctgggtgacctgtcttcactgaccagcagccctggagccctccccagcctgttgcagcctcctggccctcttctctctggccagttggggctgcagctcctccctggggggggagctcctccacccctctcagaggcttctagtcccctagcctgcctgctacagagtctccagatccctccagagcagccagaagccccctgtctaccccccgagagccctgcctcagccctcgaaccagagcctgccaggcctcccctcagtgccttagccccaccccatggttctcccgaccccccagtccctgagctgctcactgggagggggtcagggaaacggggccggaggggaggagggggacttaggggcattaatggtgaggccaggccagcccggggccgaaagcctggcagccggcgggagcctggccgactggccctcaaatgggggacacgtggtggcttcaatggacaaatggaaaggtccccaagaagaacccaccattggcagcataatggggagctggctgaagggggtgctgagcccaaggatccaccccctcccgggccccattctgaggaccttaaggtgcccccgggagtagtcagaaagtctcgtcgtggccgtaggagaaaatacaaccctacccggaacagcaatagctcccgccaggacattaccttggaacccagccctacagcccgagcagctgtccctctgcctccccgggcccgccctggccgtcctgccaaaaacaagaggaggaaactggccccatagcagccatacctggagctggatctgaccctgattggggagagctgagtgctgagccttgggagcccctgccagccacctgcacctgtggacagtgggtgggggcactactccccactcagagcacaaatgcaactccttcccctacaatcccatcctgagccattgcagggggcagggaagttcacccccccccaccacccccccgcccccccgaagccatgtcactgaaaaggcctgggggggatggtatatggccctttccccaccaggcgctaaggggaacacccccttccccaggtcttttatttgtttaagttatttttgcacaaatgactcttttatatttaattcgatttcattgcctcccttcttaaagccaacaggctcagtttacaaacctgtgagctactgttggctgctgccctccttcccagtgaaaggtacaaagcaataagcatcatgcatcctccccttacccctccaacacccctctgcctctggctcaggttgctcaaagcacagatcctctcttaccccgtccccaggtttgaaacacatagcctcatttcaaggtgtagccaggttcccccgactttcctctgggatataaaaaagggggtaagggggcaaagagagccctctgggcctctcctcccatacacactacactgccccttctccccccatcaaaacgctcagagacgttgtgatgatgcgactgaggattatgcaacgtggtccaaccggagcggccagcatgaccagctgtccaggggctgcctcctgccttttcttttgtaaagacaagacccttgggagttttaattctgttttgtacttgccctgtggggcctccactgcttttctatgggagacactcttaatttaacagatgagaatattttgaaactctgaaaaaaaaaaaaaaaaaaaaaaaaaaaaaaaaaaaaaaaaaaaaaaaaaaaaaaaaaaaaaaaa

SEQ ID NO: 12167 - DNA, 14536 bp, Homo sapiens
ggagttttccaccatgactattgccctgctgggttttgccatattcttgctccattgtgcgacctgtgagaagcctctagaagggattctctcctcctctgcttggcacttcacacactcccattacaatgccaccatctatgaaaattcttctcccaagacctatgtggagagcttcgagaaaatgggcatctacctcgcggagccacagtgggcagtgaggtaccggatcatctctggggatgtggccaatgtatttaaaactgaggagtatgtggtgggcaacttctgcttcctaagaataaggacaaagagcagcaacacagctcttctgaacagagaggtgcgagacagctacaccctcatcatccaagccacagagaagaccttggagttggaagctttgacccgtgtggtggtccacatcctggaccagaatgacctgaagcctctcttctctccaccttcgtacagagtcaccatctctgaggacatgcccctgaagagccccatctgcaaggtgactgccacagatgctgatctaggccagaatgctgagttctattatgcctttaacacaaggtcagagatgtttgccatccatcccaccagcggtgtggtcactgtggctgggaagcttaacgtcacctggcgaggaaagcatgagctccaggtgctagctgtggaccgcatgcggaaaatctctgagggcaatgggtttggcagcctggctgcacttgtggttcatgtggagcctgccctcaggaagcccccagccattgcttcggtggtggtgactccaccagacagcaatgatggtaccacctatgccactgtactggtcgatgcaaatagctcaggagctgaagtggagtcagtggaagttgttggtggtgaccctggaaagcacttcaaagccatcaagtcttatgcccggagcaatgagttcagtttggtgtctgtcaaagacatcaactggatggagtaccttcatgggttcaacctcagcctccaggccaggagtgggagcggcccttatttttattcccagatcaggggctttcacctaccaccttccaaactgtcttccctcaaattcgagaaggctgtttacagagtgcagcttagtgagttttcccctcctggcagccgcgtggtgatggtgagagtcaccccagccttccccaacctgcagtatgttctaaagccatcttcagagaatgtaggatttaaacttaatgctcgaactgggttgatcaccaccacaaagctcatggacttccacgacagagcccactatcagctacacatcagaacctcaccgggccaggcctccaccgtggtggtcattgacattgtggactgcaacaaccatgcccccctcttcaacaggtcttcctatgatggtaccttggatgagaacatccctccaggcaccagtgttttggctgtgactgccactgaccgggatcatggggaaaatggatatgtcacctattccattgctggaccaaaagctttgccattttctattgacccctacctggggatcatctccacctccaaacccatggactatgaactcatgaaaagaatttataccttccgggtaagagcatcagactggggatccccttttcgccgggagaaggaagtgtccatttttcttcagctcaggaacttgaatgacaaccagcctatgtttgaagaagtcaactgtacagggtctatccgccaagactggccagtagggaaatcgataatgactatgtcagccatagatgtggatgagcttcagaacctaaaatacgagattgtatcaggcaatgaactagagtattttgatctaaatcatttctccggagtgatatccctcaaacgcccttttatcaatcttactgctggtcaacccaccagttattccctgaagattacagcctcagatggcaaaaactatgcctcacccacaactttgaatattactgtggtgaaggaccctcattttgaagttcctgtaacatgtgataaaacaggggtattgacacaattcacaaagactatcctccactttattgggcttcagaaccaggagtccagtgatgaggaattcacttctttaagcacatatcagattaatcattacaccccacagtttgaggaccacttcccccaatccattgatgtccttgagagtgtccctatcaacacccccttggcccgcctagcagccactgaccctgatgctggttttaatggcaaactggtctatgtgattgcagatggcaatgaggagggctgctttgacatagagctggagacagggctgctcactgtagctgctcccttggactatgaagccaccaatttctacatcctcaatgtaacagtatatgacctgggcacaccccagaagtcctcctggaagctgctgacagtgaatgtgaaagactggaatgacaacgcacccagatttcctcccggtgggtaccagttaaccatctcggaggacacagaagttggaaccacaattgcagagctgacaaccaaagatgctgactcggaagacaatggcagggttcgctacaccctgctaagtcccacagagaagttctccctccaccctctcactggggaactggttgttacaggacacctggaccgcgaatcagagcctcggtacatactcaaggtggaggccagggatcagcccagcaaaggccaccagctcttctctgtcactgacctgataatcacattggaggatgtcaacgacaactctccccagtgcatcacagaacacaacaggctgaaggttccagaggacctgccccccgggactgtcttgacatttctggatgcctctgatcctgacctgggccccgcaggtgaagtgcgatatgttctgatggatggcgcccatgggaccttccgggtggacctgatgacaggggcgctcattctggagagagagctggactttgagaggcgagctgggtacaatctgagcctgtgggccagtgatggtgggaggcccctagcccgcaggactctctgccatgtggaggtgatcgtcctggatgtgaatgagaatctccaccctccccactttgcctccttcgtgcaccagggccaggtgcaggagaacagcccctcgggaactcaggtgattgtagtggctgcccaggacgatgacagtggcttggatggggagctccagtacttcctgcgtgctggcactggactcgcagccttcagcatcaaccaagatacaggaatgattcagactctggcacccctggaccgagaatttgcatcttactactggttgacggtattagcagtggacaggggttctgtgcccctctcttctgtaactgaagtctacatcgaggttacggatgccaatgacaacccaccccagatgtcccaagctgtgttctacccctccatccaggaggatgctcccgtgggcacctctgtgcttcaactggatgcctgggacccagactccagctccaaagggaagctgaccttcaacatcaccagtgggaactacatgggattctttatgattcaccctgttacaggtctcctatctacagcccagcagctggacagagagaacaaggatgaacacatcctggaggtgactgtgctggacaatggggaaccctcactgaagtccacctccagggtggtggtaggcatcttggacgtcaatgacaatccacctatattctcccacaagctcttcaatgtccgccttccagagaggctgagccctgtgtcccctgggcctgtgtacaggctggtggcttcagacctggatgagggtcttaatggcagagtcacctacagtatcgaggacagcgatgaggaggccttcagtatcgacctggtcacaggtgtggtttcatccagcagcacttttacagctggagagtacaacatcctaacgatcaaggcaacagacagtgggcagccaccactctcagccagtgtccggctacacattgagtggatcccttggccccggccgtcctccatccctctggcctttgatgagacctactacagctttacggtcatggagacggaccctgtgaaccacatggtgggggtcatcagcgtagagggcagacccggactcttctggttcaacatctcaggtggggataaggacatggactttgacattgagaagaccacaggcagcatcgtcattgccaggcctcttgataccaggagaaggtcgaactataacttgactgttgaggtgacagatgggtcccgcaccattgccacacaggtccacatcttcatgattgccaacattaaccaccatcggccccagtttctggaaactcgttatgaagtcagagttccccaggacaccgtgccaggggtagagctcctgcgagtccaggccatagatcaagacaagggcaaaagcctcatctataccatacatggcagccaagacccaggaagtgccagcctcttccagctggacccaagcagtggtgtcctggtaacggtgggaaaattggacctcggctcggggccctcccagcacacactgacagtcatggtccgagaccaggaaatacctatcaagaggaacttcgtgtgggtgaccattcatgtggaggatggaaacctccacccaccccgcttcactcagctccattatgaggcaagtgttcctgacaccatagcccccggcacagagctgctgcaggtccgagccatggatgctgaccggggagtcaatgctgaggtccactactccctcctgaaagggaacagcgaaggtttcttcaacatcaatgccctgctaggcatcattactctagctcaaaagcttgatcaggcaaatcatgccccacatactctgacagtgaaggcagaagatcaaggctccccacaatggcatgacctggctacagtgatcattcatgtctatccctcagataggagtgcccccatcttttcaaaatctgagtactttgtagagatccctgaatcaatccctgttggttccccaatcctccttgtctctgctatgagcccctctgaagttacctatgagttaagagagggaaataaggatggagtcttctctatgaactcatattctggccttatttccacccagaagaaattggaccatgagaaaatctcgtcttaccagctgaaaatccgaggcagcaatatggcaggtgcatttactgatgtcatggtggtggttgacataattgatgaaaatgacaatgctcctatgttcttaaagtcaacttttgtgggccaaattagtgaagcagctccactgtatagcatgatcatggataaaaacaacaacccctttgtgattcatgcctctgacagtgacaaagaagctaattccttgttggtctataaaattttggagccggaggccttgaagtttttcaaaattgatcccagcatgggaaccctaaccattgtatcagagatggattatgagagcatgccctctttccaattctgtgtctatgtccatgaccaaggaagccctgtattatttgcacccagacctgcccaagtcatcattcatgtcagagatgtgaatgattcccctcccagattctcagaacagatatatgaggtagcaatagtcgggcctatccatccaggcatggagcttctcatggtgcgggccagcgatgaagactcagaagtcaattatagcatcaaaactggcaatgctgatgaagctgttaccatccatcctgtcactggtagcatatctgtgctgaatcctgctttcctgggactctctcggaagctcaccatcagggcttctgatggcttgtatcaagacactgcgctggtaaaaatttctttgacccaagtgcttgacaaaagcttgcagtttgatcaggatgtctactgggcagctgtgaaggagaacttgcaggacagaaaggcactggtgattcttggtgcccagggcaatcatttgaatgacaccctttcctactttctcttgaatggcacagatatgtttcatatggtccagtcagcaggtgtgttgcagacaagaggtgtggcgtttgaccgggagcagcaggacactcatgagttggcagtggaagtgagggacaatcggacacctcagcgggtggctcagggtttggtcagagtctctattgaggatgtcaatgacaatccccccaaatttaagcatctgccctattacacaatcatccaagatggcacagagccaggggatgtcctctttcaggtatctgccactgatgaggacttggggacaaatggggctgttacatatgaatttgcagaagattacacatatttccgaattgacccctatcttggggacatatcactcaagaaaccctttgattatcaagctttaaataaatatcacctcaaagtcattgctcgggatggaggaacgccatccctccagagtgaggaagaggtacttgtcactgtgagaaataaatccaacccactgtttcagagtccttattacaaagtcagagtacctgaaaatatcaccctctataccccaattctccacacccaggcccggagtccagagggactccggctcatctacaacattgtggaggaagaacccttgatgctgttcaccactgacttcaagactggtgtcctaacagtaacagggcctttggactatgagtccaagaccaaacatgtgttcacagtcagagccacggatacagctctggggtcattttctgaagccacagtggaagtcctagtggaggatgtcaatgataaccctcccactttttcccaattggtctataccacttccatctcagaaggcttgcctgctcagacccctgtgatccaactgttggcttctgaccaggactcagggcggaaccgtgacgtctcttatcagattgtggaggatggctcagatgtttccaagttcttccagatcaatgggagcacaggggagatgtccacagttcaagaactggattatgaagcccaacaacactttcatgtgaaagtcagggccatggataaaggagatcccccactcactggtgaaacccttgtggttgtcaatgtgtctgatatcaatgacaaccccccagagttcagacaacctcaatatgaagccaatgtcagtgaactggcaacctgtggacacctggttcttaaagtccaggctattgaccctgacagcagagacacctcccgcctggagtacctgattctttctggcaatcaggacaggcacttcttcattaacagctcatcgggaataatttctatgttcaacctttgcaaaaagcacctggactcttcttacaatttgagggtaggtgcttctgatggagtcttccgagcaactgtgcctgtgtacatcaacactacaaatgccaacaagtacagcccagagttccagcagcacctttatgaggcagaattagcagagaatgcaatggttggaaccaaggtgattgatttgctagccatagacaaagatagtggtccctatggcactatagattatactatcatcaataaactagcaagtgagaagttctccataaaccccaatggccagattgccactctgcagaaactggatcgggaaaattcaacagagagagtcattgctattaaggtcatggctcgggatggaggaggaagagtagccttctgcacggtgaagatcatcctcacagatgaaaatgacaaccccccacagttcaaagcatctgagtacacagtatccattcaatccaatgtcagtaaagactctccggttatccaggtgttggcctatgatgcagatgaaggtcagaacgcagatgtcacctactcagtgaacccagaggacctagttaaagatgtcattgaaattaacccagtcactggtgtggtcaaggtgaaagacagcctggtgggattggaaaatcagacccttgacttcttcatcaaagcccaagatggaggccctcctcactggaactctctggtgccagtacgacttcaggtggttcctaaaaaagtatccttaccgaaattttctgaacctttgtatactttctctgcacctgaagaccttccagaggggtctgaaattgggattgttaaagcagtggcagctcaagatccagtcatctacagtctagtgcggggcactacacctgagagcaacaaggatggtgtcttctccctagacccagacacaggggtcataaaggtgaggaagcccatggaccacgaatccaccaaattgtaccagattgatgtgatggcacattgccttcagaacactgatgtggtgtccttggtctctgtcaacatccaagtgggagacgtcaatgacaataggcctgtatttgaggctgatccatataaggctgtcctcactgagaatatgccagtggggacctcagtcattcaagtgactgccattgacaaggacactgggagagatggccaggtgagctacaggctgtctgcagaccctggtagcaatgtccatgagctctttgccattgacagtgagagtggttggatcaccacactccaggaacttgactgtgagacctgccagacttatcattttcatgtggtggcctatgaccacggacagaccatccagctatcctctcaggccctggttcaggtctccattacagatgagaatgacaatgctccccgatttgcttctgaagagtacagaggatctgtggttgagaacagtgagcctggcgaactggtggcgactctaaagaccctggatgctgacatttctgagcagaacaggcaggtcacctgctacatcacagagggagaccccctgggccagtttggcatcagccaagttggagatgagtggaggatttcctcaaggaagaccctggaccgcgagcatacagccaagtacttgctcagagtcacagcatctgatggcaagttccaggcttcggtcactgtggagatctttgtcctggacgtcaatgataacagcccacagtgttcacagcttctctatactggcaaggttcatgaagatgtatttccaggacacttcattttgaaggtttctgccacagacttggacactgataccaatgctcagatcacatattctctgcatggccctggggcgcatgaattcaagctggatcctcatacaggggagctgaccacactcactgccctagaccgagaaaggaaggatgtgttcaaccttgttgccaaggcgacggatggaggtggccgatcgtgccaggcagacatcaccctccatgtggaggatgtgaatgacaatgccccgcggttcttccccagccactgtgctgtggctgtcttcgacaacaccacagtgaagacccctgtggctgtagtatttgcccgggatcccgaccaaggcgccaatgcccaggtggtttactctctgccggattcagccgaaggccacttttccatcgacgccaccacgggggtgatccgcctggaaaagccgctgcaggtcaggccccaggcaccactggagctcacggtccgtgcctctgacctgggcaccccaataccgctgtccacgctgggcaccgtcacagtctcggtggtgggcctagaagactacctgcccgtgttcctgaacaccgagcacagcgtgcaggtgcccgaggacgccccacctggcacggaggtgctgcagctggccaccctcactcgcccgggcgcagagaagaccggctaccgcgtggtcagcgggaacgagcaaggcaggttccgcctggatgctcgcacagggatcctgtatgtcaacgcaagcctggactttgagacaagccccaagtacttcctgtccattgagtgcagccggaagagctcctcttccctcagtgacgtgaccacagtcatggtcaacatcactgatgtcaatgaacaccggccccaattcccccaagatccatatagcacaagggtcttagagaatgcccttgtgggtgacgtcatcctcacggtatcagcgactgatgaagatggacccctaaatagtgacattacctatagcctcataggagggaaccagcttgggcacttcaccattcaccccaaaaagggggagctacaggtggccaaggccctggaccgggaacaggcctctagttattccctgaagctccgagccacagacagtgggcagcctccactgcatgaggacacagacatcgctatccaagtggctgatgtcaatgataacccaccgagattcttccagctcaactacagcaccactgtccaggagaactcccccattggcagcaaagtcctgcagctgatcctgagtgacccagattctccagagaatggccccccctactcgtttcgaatcaccaaggggaacaacggctctgccttccgagtgaccccggatggatggctggtgactgctgagggcctaagcaggagggctcaggaatggtatcagcttcagatccaggcgtcagacagtggcatccctcccctctcgtctttgacgtctgtccgtgtccatgtcacagagcagagccactatgcaccttctgctctcccactggagatcttcatcactgttggagaggatgagttccagggtggcatggtgggtaagatccatgccacagaccgagacccccaggacacgctgacctatagcctggcagaagaggagaccctgggcaggcacttctcagtgggtgcgcctgatggcaagattatcgccgcccagggcctgcctcgtggccactactcgttcaacgtcacggtcagcgatgggaccttcaccacgactgctggggtccatgtgtacgtgtggcatgtggggcaggaggctctgcagcaggccatgtggatgggcttctaccagctcacccccgaggagctggtgagtgaccactggcggaacctgcagaggttcctcagccataagctggacatcaaacgggctaacattcacttggccagcctccagcctgcagaggccgtggctggtgtggatgtgctcctggtctttgaggggcattctggaaccttctacgagtttcaggagctagcatccatcatcactcactcagccaaggagatggagcattcagtgggggttcagatgcggtcagctatgcccatggtgccctgccaggggccaacctgccagggtcaaatctgccataacacagtgcatctggaccccaaggttgggcccacgtacagcaccgccaggctcagcatcctaaccccgcggcaccacctgcagaggagctgctcctgcaatggtactgctacaaggttcagtggtcagagctatgtgcggtacagggccccagcggctcggaactggcacatccatttctatctgaaaacactccagccacaggccattcttctattcaccaatgaaacagcgtccgtctccctgaagctggccagtggagtgccccagctggaataccactgtctgggtggtttctatggaaacctttcctcccagcgccatgtgaatgaccacgagtggcactccatcctggtggaggagatggacgcttccattcgcctgatggttgacagcatgggcaacacctcccttgtggtcccagagaactgccgtggtctgaggcccgaaaggcacctcttgctgggcggcctcattctgttgcattcttcctcgaatgtctcccagggctttgaaggctgcctggatgctgtcgtggtcaacgaagaggctctagatctgctggcccctggcaagacggtggcaggcttgctggagacacaagccctcacccagtgctgcctccacagtgactactgcagccagaacacatgcctcaatggtgggaagtgctcatggacccatggggcaggctatgtctgcaaatgtcccccacagttctctgggaagcactgtgaacaaggaagggagaactgtacttttgcaccctgcctggaaggtggaacttgcatcctctcccccaaaggagcttcctgtaactgccctcatccttacacaggagacaggtgtgaaatggaggcgaggggttgttcagaaggacactgcctagtcactcccgagatccaaaggggggactgggggcagcaggagttactgatcatcacagtggccgtggcgttcattatcataagcactgtcgggcttctcttctactgccgccgttgcaagtctcacaagcctgtggccatggaggacccagacctcctggccaggagtgttggtgttgacacccaagccatgcctgccatcgagctcaacccattgagtgccagctcctgcaacaacctcaaccaaccggaacccagcaaggcctctgttccaaatgaactcgtcacatttggacccaattctaagcaacggccagtggtctgcagtgtgccccccagactcccgccagctgcggtcccttcccactctgacaatgagcctgtcattaagagaacctggtccagcgaggagatggtgtaccctggcggagccatggtctggccccctacttactccaggaacgaacgctgggaatacccccactccgaagtgactcagggccctctgccgccctcggctcaccgccactcaaccccagtcgtgatgccagagcctaatggcctctatgggggcttccccttccccctggagatggaaaacaagcgggcacctctcccaccccgttacagcaaccagaacctggaagatctgatgccctctcggccccctagtccccgggagcgcctggttgccccctgtctcaatgagtacacggccatcagctactaccactcgcagttccggcagggagggggagggccctgcctggcagacgggggctacaagggggtgggtatgcgcctcagccgagctgggccctcttatgctgtctgtgaggtggagggggcacctcttgcaggccagggccagccccgggtgccccccaactatgagggctctgacatggtggagagtgattatggcagctgtgaggaggtcatgttctagcttcccattcccagagcaaggcaggcgggaggccaaggactggacttggcttatttcttcctgtctcgtagggggtgagttgagtgtggctgggagagtgggagggaagccctcagcccaggctgttgtcccttgaaatgtgctcttccaatcccccacctagtccctgagggtggagggaagctgaggatagagctccagaaacagcactagggtcccaggagaggggcatttctagagcagtgaccctggaaaaccaggaacaattgactcctggggtgggcgacagacaggagggctccctgatctgccggctctcagtccccggggcaaagcctgattgactgtgctggctcaacttcaccaagatgcattctcatacctgcccacagctccattttggaggcaggcaggttggtgcctgacagacaaccactacgcgggccgtacagaggagctctagagggctgcgtggcatcctcctaggggctgagaggtgagcagcaggggagcgggcacagtcccctctgcccctgcctcagtcgagcactcactgtgtctttgtcaagtgtctgctccacgtcaggcactgtgctttgcaccggggagaaaatggtgatggagggcaacaaggactccgaggagcaccaccaggcctcgggccccagaggtcccgctcctcagcctacacgcagaggaacgggcccacctcagagtcacaccactggctgccagtcagggcctgccaggagtctacacagctctgaaccttctttgttaaagaattcagacctcatggaactctgggttcttcatcccaagtttcccaggcacttttggccaaaggaaggaaggaactaattcttcattttaaaaattcttaggcactttttgaccttgctgtctggatgagtttcctcaatgggatttttcttccctagacacaaggaagtctgaactcctatttagggccggttggaagcagggagctggaccgcagtgtccaggctggacacctgccattgcctcctctccactgcagacgcctgcccatcaagtattacctgcagcgactcaaccctatgcatggagggtcaatgtgggcacatgtctacacatgtgggtgcccatggatagtacgtgtgtacacatgtgtagagtgtatgtagccaggagtggtggggaccagaagcctctgtggcctttggtgacctcaccactccctcccacccagtccctccctctggtccactgccttttcatatgtgttgtttctggagacagaagtcaaaaggaagagcagtggagccttgcccacagggctgctgcttcatgcgagagggagatgtgtgggcgagagccaatttgtgtgagtggtttgtggctgtgtgtgtgactgtgagtgtgagtgacagatacatagtttcattggtcatttttttttttaacaataaagtatctttttttactgtt

SEQ ID NO: 12168 - DNA, 6906 bp, Homo sapiens
ggcgcgggcggcctggagccccgggagcggcgcgcgcggtcccggcccagccggctctcctggcctcgcgctgcacattctctcctggcggcggcgccacctgcagtagcgttcgcccgaacatggcgacacggagcagcaggagggagtcgcgactcccgttcctattcaccctggtcgcactgctgccgcccggagctctctgcgaagtctggacgcagaggctgcacggcggcagcgcgcccttgccccaggaccggggcttcctcgtggtgcagggcgacccgcgcgagctgcggctgtgggcgcgcggggatgccaggggggcgagccgcgcggacgagaagccgctccggaggaaacggagcgctgccctgcagcccgagcccatcaaggtgtacggacaggttagtctgaatgattcccacaatcagatggtggtgcactgggctggagagaaaagcaacgtgatcgtggccttggcccgagatagcctggcattggcgaggcccaagagcagtgatgtgtacgtgtcttacgactatggaaaatcattcaagaaaatttcagacaagttaaactttggcttgggaaataggagtgaagctgttatcgcccagttctaccacagccctgcggacaacaagcggtacatctttgcagacgcttatgcccagtacctctggatcacgtttgacttctgcaacactcttcaaggcttttccatcccatttcgggcagctgatctcctcctacacagtaaggcctccaaccttctcttgggctttgacaggtcccaccccaacaagcagctgtggaagtcagatgactttggccagacctggatcatgattcaggaacatgtcaagtccttttcttggggaattgatccctatgacaaaccaaataccatctacattgaacgacacgaaccctctggctactccactgtcttccgaagtacagatttcttccagtcccgggaaaaccaggaagtgatccttgaggaagtgagagattttcagcttcgggacaagtacatgtttgctacaaaggtggtgcatctcttgggcagtgaacagcagtcttctgtccagctctgggtctcctttggccggaagcccatgagagcagcccagtttgtcacaagacatcctattaatgaatattacatcgcagatgcctccgaggaccaggtgtttgtgtgtgtcagccacagtaacaaccgcaccaatttatacatctcagaggcagaggggctgaagttctccctgtccttggagaacgtgctctattacagcccaggaggggccggcagtgacaccttggtgaggtattttgcaaatgaaccatttgctgacttccaccgagtggaaggattgcaaggagtctacattgctactctgattaatggttctatgaatgaggagaacatgagatcggtcatcacctttgacaaagggggaacctgggagtttcttcaggctccagccttcacgggatatggagagaaaatcaattgtgagctttcccagggctgttcccttcatctggctcagcgcctcagtcagctcctcaacctccagctccggagaatgcccatcctgtccaaggagtcggctccaggcctcatcatcgccactggctcagtgggaaagaacttggctagcaagacaaacgtgtacatctctagcagtgctggagccaggtggcgagaggcacttcctggacctcactactacacatggggagaccacggcggaatcatcacggccattgcccagggcatggaaaccaacgagctaaaatacagtaccaatgaaggggagacctggaaaacattcatcttctctgagaagccagtgtttgtgtatggcctcctcacagaacctggggagaagagcactgtcttcaccatctttggctcgaacaaagagaatgtccacagctggctgatcctccaggtcaatgccacggatgccttgggagttccctgcacagagaatgactacaagctgtggtcaccatctgatgagcgggggaatgagtgtttgctgggacacaagactgttttcaaacggcggaccccccatgccacatgcttcaatggagaggactttgacaggccggtggtcgtgtccaactgctcctgcacccgggaggactatgagtgtgacttcggtttcaagatgagtgaagatttgtcattagaggtttgtgttccagatccggaattttctggaaagtcatactcccctcctgtgccttgccctgtgggttctacttacaggagaacgagaggctaccggaagatttctggggacacttgtagcggaggagatgttgaagcgcgactggaaggagagctggtcccctgtcccctggcagaagagaacgagttcattctgtatgctgtgaggaaatccatctaccgctatgacctggcctcgggagccaccgagcagttgcctctcaccgggctacgggcagcagtggccctggactttgactatgagcacaactgtttgtattggtccgacctggccttggacgtcatccagcgcctctgtttgaatggaagcacagggcaagaggtgatcatcaattctggcctggagacagtagaagctttggcttttgaacccctcagccagctgctttactgggtagatgcaggcttcaaaaagattgaggtagctaatccagatggcgacttccgactcacaatcgtcaattcctctgtgcttgatcgtcccagggctctggtcctcgtgccccaagagggggtgatgttctggacagactggggagacctgaagcctgggatttatcggagcaatatggatggttctgctgcctatcacctggtgtctgaggatgtgaagtggcccaatggcatctctgtggacgaccagtggatttactggacggatgcctacctggagtgcatagagcggatcacgttcagtggccagcagcgctctgtcattctggacaacctcccgcacccctatgccattgctgtctttaagaatgaaatctactgggatgactggtcacagctcagcatattccgagcttccaaatacagtgggtcccagatggagattctggcaaaccagctcacggggctcatggacatgaagattttctacaaggggaagaacactggaagcaatgcctgtgtgcccaggccatgcagcctgctgtgcctgcccaaggccaacaacagtagaagctgcaggtgtccagaggatgtgtccagcagtgtgcttccatcaggggacctgatgtgtgactgccctcagggctatcagctcaagaacaatacctgtgtcaaagaagagaacacctgtcttcgcaaccagtatcgctgcagcaacgggaactgtatcaacagcatttggtggtgtgactttgacaacgactgtggagacatgagcgatgagagaaactgccctaccaccatctgtgacctggacacccagtttcgttgccaggagtctgggacttgtatcccactgtcctataaatgtgaccttgaggatgactgtggagacaacagtgatgaaagtcattgtgaaatgcaccagtgccggagtgacgagtacaactgcagttccggcatgtgcatccgctcctcctgggtatgtgacggggacaacgactgcagggactggtctgatgaagccaactgtaccgccatctatcacacctgtgaggcctccaacttccagtgccgaaacgggcactgcatcccccagcggtgggcgtgtgacggggatacggactgccaggatggttccgatgaggatccagtcaactgtgagaagaagtgcaatggattccgctgcccaaacggcacttgcatcccatccagcaaacattgtgatggtctgcgtgattgctctgatggctccgatgaacagcactgcgagcccctctgtacgcacttcatggactttgtgtgtaagaaccgccagcagtgcctgttccactccatggtctgtgacggaatcatccagtgccgcgacgggtccgatgaggatgcggcgtttgcaggatgctcccaagatcctgagttccacaaggtatgtgatgagttcggtttccagtgtcagaatggagtgtgcatcagtttgatttggaagtgcgacgggatggatgattgcggcgattattctgatgaagccaactgcgaaaaccccacagaagccccaaactgctcccgctacttccagtttcggtgtgagaatggccactgcatccccaacagatggaaatgtgacagggagaacgactgtggggactggtctgatgagaaggattgtggagattcacatattcttcccttctcgactcctgggccctccacgtgtctgcccaattactaccgctgcagcagtgggacctgcgtgatggacacctgggtgtgcgacgggtaccgagattgtgcagatggctctgacgaggaagcctgccccttgcttgcaaacgtcactgctgcctccactcccacccaacttgggcgatgtgaccgatttgagttcgaatgccaccaaccgaagacgtgtattcccaactggaagcgctgtgacggccaccaagattgccaggatggccgggacgaggccaattgccccacacacagcaccttgacttgcatgagcagggagttccagtgcgaggacggggaggcctgcattgtgctctcggagcgctgcgacggcttcctggactgctcggacgagagcgatgaaaaggcctgcagtgatgagttgactgtgtacaaagtacagaatcttcagtggacagctgacttctctggggatgtgactttgacctggatgaggcccaaaaaaatgccctctgcttcttgtgtatataatgtctactacagggtggttggagagagcatatggaagactctggagacccacagcaataagacaaacactgtattaaaagtcttgaaaccagataccacgtatcaggttaaagtacaggttcagtgtctcagcaaggcacacaacaccaatgactttgtgaccctgaggaccccagagggattgccagatgcccctcgaaatctccagctgtcactccccagggaagcagaaggtgtgattgtaggccactgggctcctcccatccacacccatggcctcatccgtgagtacattgtagaatacagcaggagtggttccaagatgtgggcctcccagagggctgctagtaactttacagaaatcaagaacttattggtcaacactctatacaccgtcagagtggctgcggtgactagtcgtggaataggaaactggagcgattctaaatccattaccaccataaaaggaaaagtgatcccaccaccagatatccacattgacagctatggtgaaaattatctaagcttcaccctgaccatggagagtgatatcaaggtgaatggctatgtggtgaaccttttctgggcatttgacacccacaagcaagagaggagaactttgaacttccgaggaagcatattgtcacacaaagttggcaatctgacagctcatacatcctatgagatttctgcctgggccaagactgacttgggggatagccctctggcatttgagcatgttatgaccagaggggttcgcccacctgcacctagcctcaaggccaaagccatcaaccagactgcagtggaatgtacctggaccggcccccggaatgtggtttatggtattttctatgccacgtcctttcttgacctctatcgcaacccgaagagcttgactacttcactccacaacaagacggtcattgtcagtaaggatgagcagtatttgtttctggtccgtgtagtggtaccctaccaggggccatcctctgactacgttgtagtgaagatgatcccggacagcaggcttccaccccgtcacctgcatgtggttcatacgggcaaaacctccgtggtcatcaagtgggaatcaccgtatgactctcctgaccaggacttgttgtatgcaattgcagtcaaagatctcataagaaagactgacaggagctacaaagtaaaatcccgtaacagcactgtggaatacacccttaacaagttggagcctggcgggaaataccacatcattgtccaactggggaacatgagcaaagattccagcataaaaattaccacagtttcattatcagcacctgatgccttaaaaatcataacagaaaatgatcatgttcttctgttttggaaaagcctggctttaaaggaaaagcattttaatgaaagcaggggctatgagatacacatgtttgatagtgccatgaatatcacagcttaccttgggaatactactgacaatttctttaaaatttccaacctgaagatgggtcataattacacgttcaccgtccaagcaagatgcctttttggcaaccagatctgtggggagcctgccatcctgctgtacgatgagctggggtctggtgcagatgcatctgcaacgcaggctgccagatctacggatgttgctgctgtggtggtgcccatcttattcctgatactgctgagcctgggggtggggtttgccatcctgtacacgaagcaccggaggctgcagagcagcttcaccgccttcgccaacagccactacagctccaggctggggtccgcaatcttctcctctggggatgacctgggggaagatgatgaagatgcccctatgataactggattttcagatgacgtccccatggtgatagcctgaaagagctttcctcactagaaaccaaatggtgtaaatattttatttgataaagatagttgatggtttattttaaaagatgcactttgagttgcaatatgttatttttatatgggccaaaaacaaaaaacaaaaaaaaaaa

SEQ ID NO: 12169 - DNA, 1940 bp, Homo sapiens
ggggcggtgcagaggcggcaggaagatggagttggggagttgcctggagggcgggagggaggcggcggaggaagagggcgagcctgaggtgaaaaagcggcgacttctgtgtgtggagtttgcctcggtcgcaagctgcgatgccgcagtggctcagtgcttcctggccgagaacgactgggagatggaaagggctctgaactcctacttcgagcctccggtggaggagagcgccttggaacgccgacctgaaaccatctctgagcccaagacctatgttgacctaaccaatgaagaaacaactgattccaccacttctaaaatcagcccatctgaagatactcagcaagaaaatggcagcatgttctctctcattacctggaatattgatggattagatctaaacaatctgtcagagagggctcgaggggtgtgttcctacttagctttgtacagcccagatgtgatatttctacaggaagttattcccccatattatagctacctaaagaagagatcaagtaattatgagattattacaggtcatgaagaaggatatttcacagctataatgttgaagaaatcaagagtgaaattaaaaagccaagagattattccttttccaagtaccaaaatgatgagaaaccttttatgtgtgcatgtgaacgtgtcaggaaatgagctttgccttatgacatcccatttggagagcaccagagggcatgctgcggaacgaatgaatcagttaaaaatggttttaaagaaaatgcaagaggctccagagtcagctacagttatatttgcaggagatacaaatctaagggatcgagaggttaccagatgtggtggtttacccaacaacattgtggatgtctgggagtttttgggcaaacctaaacattgccagtatacatgggatacacaaatgaactctaatcttggaataactgctgcttgtaaacttcgttttgatcgaatatttttcagagcagcagcagaagagggacacattattccccgaagtttggaccttcttggattagaaaaactggactgtggtagatttcctagtgatcactggggtcttctgtgcaacttagatataatattgtaaaatgcttttcaagtgtgggttttgccctgattgttgcaaatacaatttccaccttctggaaaggtaggtttgctgtggaggaaataatgtactagatcattgtcacagaaaaaccaactatgatttatggttgtgttttcagaattcaacattaaagattaatgtttatttaaacgaacacattcctgcattcaggatgtgaggccatttaataaaaagggcacaaagcctgtcagagttttcaacggtgcttatagctgccagctggattccaaacaggtaccacattgtctctgagctaatgtttatatttttccattcaggcaccgaaatagttaatatttgaaataagtcttcaaaagaaaacataagagattattgagttcttgggactggatcctttatttcataagttcagatcatcttaaatgaaaatgccatgattatctgcagttaagtagatgacagctattctacatcagacttgatttttgtcagctaattacataattggtaagctataattgaaaccttatggcttaaaattccttaactcctttttgattcatgtttgtagtcatgttgtcaacagaggcaaagttaagcttgatgatggttaaaatcggtttgatagcaccatgggacatttttctaacaaaaataaatgcatgaagagacatagccttttagttttgctaattgtgaaatggaaatgctttacaggaagtaaatgcaaattacttttaagtgtgctttaaagaaaaatattttccccacaagagaaatttaaataaagaattttatttgtttaaaaaaaaaaaaaaaa

SEQ ID NO: 12170 - DNA, 4261 bp, Homo sapiens
gcggcgtgcagtgtgaggggcgggacccggctgccggcggtgggtctagctgggggaggtcgggccatgctggtgggccagggcgcggggccgctggggcccgcggtggtcaccgccgcggtggtgctgctgctgagcggcgtggggccggcgcacggctcggaggacatcgtggtgggctgcggtggcttcgtcaagtcggacgtggagatcaactactctctcatcgagataaagctgtacaccaagcatgggactttgaaataccagacagactgtgcccctaataatggttactttatgatccctttgtatgataagggggatttcattctgaagattgagcctcccctagggtggagttttgagccgacgaccgtggagctccatgtggatggagtcagtgacatctgcacaaagggtggggacatcaactttgtcttcactgggttctctgtgaatggcaaggtcctcagcaaagggcagcccctgggtcctgcgggagttcaggtgtctctgagaaacactgggaccgaagcaaagatccagtccacagttacacagcctggcggaaagtttgcattttttaaagttctgcctggagattatgaaatcctcgcaactcatccaacctgggcgttgaaagaggcaagcaccacagtgcgtgtaaccaactccaatgccaatgcggccagtcccctcatagttgctggctacaatgtgtctggctctgtccgaagtgatggggagcccatgaaaggcgtgaagtttcttctcttttcttctttagtaactaaagaggatgtcctgggctgcaatgtctcaccagtgcctgggttccagccccaagacgagagtctggtgtatttgtgctacacggtctccagagaagatggctcgttctctttctattccttgccaagtgggggctacactgtgattccgttctatcgaggggagaggattacctttgatgtggcgccttccagacttgacttcacagtggagcatgacagcttgaaaatcgagcccgtgttccacgtcatgggattctccgtcaccgggagggtcttgaacggacccgaaggagatggtgttccagaagcagtagtcaccctgaataaccaaatcaaagttaaaacaaaagctgatggctcattccgccttgagaacataaccacagggacatacaccatccatgctcagaaagagcacctctactttgaaacggtcaccatcaaaattgcaccgaacacacctcagctggctgacattattgcaacagggttcagtgtctgtggtcagatatcaatcattcgcttccccgacaccgtcaagcagatgaataaatacaaagttgtcctgtcatctcaagacaaggacaagtctttggtcaccgtggagacagatgctcatggatcattttgttttaaagcaaaaccagggacttacaaagtgcaggtgatggttcctgaggcagaaaccagagcagggctgacgttgaaaccccagacatttcctcttactgtgaccaacaggcccatgatggatgtggcctttgtacagttcttggcatcagtttctgggaaagtctcttgtttggacacctgtggtgacttgctggtgactctacagtccctgagccgccagggtgagaagcggagcctccagctctccggcaaggtcaacgccatgactttcacctttgacaacgtgctccctggaaaatacaaaataagcatcatgcatgaggattggtgctggaagaacaagagcctggaggtggaagtgctggaggatgacatgtctgcagttgagttcaggcagacgggctacatgctgagatgttccctgtctcacgccatcactctggaattttatcaggatggaaatgggcgtgagaatgtggggatttataacctctccaaaggagtcaaccgattctgcctgtccaagcctggtgtgtacaaagtgacccctcgctcctgccaccggtttgagcaagcgttctacacctatgacacgtcttcacctagtatcttgacattgacagccattcgccaccatgtccttggaactatcaccaccgacaaaatgatggatgtcactgtgactatcaagtcttccatcgacagtgaacccgccttggtcttaggccctctgaagtctgtgcaggagctgcggagggagcagcagctggctgagatcgaggcccgcaggcaggagagggagaaaaacggcaatgaggaaggcgaagaaagaatgaccaagcctcccgtgcaggagatggtagatgagttacaaggccccttctcgtatgatttctcttactgggcgcggtctggagagaaaatcactgttacaccgtcatctaaagagctgctcttttatcccccttcaatggaagccgttgtcagtggagaaagctgcccagggaagctgatcgagatccatgggaaggcaggcctgtttttagaaggccagatccaccccgagttggaaggagtcgagattgtcatcagtgaaaagggggcaagttcaccgctgatcacagtctttactgatgacaaaggtgcctacagtgttggccccctgcacagtgacctggagtacacggtgacctcacagaaggagggctatgttctgactgcggtggaaggaaccatcggagacttcaaggcctatgccctggcaggcgtaagctttgagataaaagctgaggatgaccagcccctcccgggagtcctcttatccctgagcggtggcctgtttcgttccaacctcttgacccaggacaacggcattctgacattctcaaacctgagccctggccagtattacttcaaacccatgatgaaggagttccggtttgagccatcctcacagatgatcgaggtgcaggaaggccagaacctgaagatcaccatcacggggtaccgaaccgcttacagttgctatggcacagtgtcttccttaaacggagagcccgaacaaggggttgccatggaagcggtgggccagaacgactgcagcatttacggagaagacaccgtgacagacgaagagggcaagttcagattacgtggattgctgccgggatgtgtgtaccacgttcagctcaaggcagaaggcaacgaccacattgagcgggcgctcccccaccatagggtgattgaggttgggaataatgacatcgatgatgtaaacatcatagttttccggcagattaatcaatttgatttaagtggaaatgtgatcacttcctctgaataccttcctacattatgggtcaagctttacaaaagcgaaaacctcgacaatccaatccagacagtttcccttggccagtccctgttcttccatttccccccactgctcagagacggcgagaactatgttgtgcttctggactccacactccccagatcccagtatgactacatcttgcctcaagtttctttcaccgcagtgggctaccataaacacatcaccttgatttttaatcccacgaggaagctgcctgaacaggacatcgcacaaggatcctacattgccctgccattgacgctgctggttctgctggccggttacaaccatgacaagctcattcctttgctgctgcagttgacaagccggctacagggagtccgcgcgctcggccaggcagcctctgacaatagcggcccagaagatgcaaagagacaagccaagaaacagaagacaaggcggacttgaggaggaaggggacagttgcagtctcacttgggacaggccacagccaggggtccggccactacccgcccgtgggataaaagccaaaagcatgcgtcagctaacttcagcctgtgctgctgggcccgcaccccatgtcccttgtcactgtggcatcctgcacccatcctcacccctccgtagagcccctcgtgcaatgcaatgaatggaccctcctgtcactctgctgaacagaatttattttctgagtcaaatataatttattattatttttgtcaaagaagtatttaagctgtgctgtggtgtgagaatgtcattcttgatcttcagccttcgtttgcaaggagagttccagttgacgtggtgtttggttccatggcggggtaccctagggattcatctgttttcttcacttccctttgcatctgagatcctgctggaaaccacagcaacctgtatccactattaggaggtaaaaatcaataaaatggcccattcatttgtgttgtagctcaaaaaaaaaaaaaaa

SEQ ID NO: 12171 - DNA, 1157 bp, Homo sapiens
gctcacagtcatcaattatagaccccacaacatgcgccctgaagacagaatgttccatatcagagctgtgatcttgagagccctctccttggctttcctgctgagtctccgaggagctggggccatcaaggcggaccatgtgtcaacttatgccgcgtttgtacagacgcatagaccaacaggggagtttatgtttgaatttgatgaagatgagatgttctatgtggatctggacaagaaggagaccgtctggcatctggaggagtttggccaagccttttcctttgaggctcagggcgggctggctaacattgctatattgaacaacaacttgaataccttgatccagcgttccaaccacactcaggccaccaacgatccccctgaggtgaccgtgtttcccaaggagcctgtggagctgggccagcccaacaccctcatctgccacattgacaagttcttcccaccagtgctcaacgtcacgtggctgtgcaacggggagctggtcactgagggtgtcgctgagagcctcttcctgcccagaacagattacagcttccacaagttccattacctgacctttgtgccctcagcagaggacttctatgactgcagggtggagcactggggcttggaccagccgctcctcaagcactgggaggcccaagagccaatccagatgcctgagacaacggagactgtgctctgtgccctgggcctggtgctgggcctagtcggcatcatcgtgggcaccgtcctcatcataaagtctctgcgttctggccatgacccccgggcccaggggaccctgtgaaatactgtaaaggtgacaaaatatctgaacagaagaggacttaggagagatctgaactccagctgccctacaaactccatctcagcttttcttctcacttcatgtgaaaactactccagtggctgactgaattgctgacccttcaagctctgtccttatccattacctcaaagcagtcattccttagtaaagtttccaacaaatagaaattaatgacactttggtagcactaatatggagattatcctttcattgagccttttatcctctgttctcctttgaagaacccctcactgtcaccttcccgagaataccctaagaccaataaatacttcagtatttc

SEQ ID NO: 12172 - DNA, 4568 bp, Homo sapiens
gtgagaactaggagcctgtcctccatgttttataagtattgacattacacagtgttaacaatgcatccacagagcttggctgaagaggaaataaaaacagaacaggaggtggtagagggcatggatatctctactcgctccaaagatcctggctctgcagagagaacagcccagaaaagaaagttccccagccctccacattcttccaatggccactcgccgcaggacacatcaacaagccccattaaaaagaaaaagaaacctggcttactgaacagtaacaataaggagcagtcagaactaagacatggtccgttttactatatgaagcagccactcaccacagaccctgttgatgttgtaccgcaggatggacggaatgatttctactgctgggtttgtcaccgggaaggccaagtcctttgctgtgagctctgtccccgggtttatcacgctaagtgtctgagactgacatcggaaccagagggggactggttttgtcctgaatgtgagaaaattacagtagcagaatgcatcgagacccagagtaaagccatgacaatgctcaccattgaacagttatcctacctgctcaagtttgccattcagaaaatgaaacagccagggacagatgcattccagaagcccgttccattggaacagcaccctgactatgcggaatacatcttccatccaatggacctttgtacattggaaaagaatgcgaaaaagaaaatgtatggctgcacagaagccttcctggctgatgcaaagtggattttgcacaactgcatcatttataatgggggaaatcacaaattgacgcaaatagcgaaagtagtcatcaaaatctgtgaacatgagatgaatgaaatcgaagtatgtccagaatgttatctagctgcttgccaaaaacgagataactggttttgtgagccttgtagcaatccacatcctttggtctgggccaaactgaaggggtttccattctggcctgcaaaagctctaagggataaagacgggcaggtcgatgcccgattctttggacaacatgacagggcctgggttccaataaataattgctacctcatgtctaaagaaattcctttttctgtgaaaaagactaagagcatcttcaacagtgccatgcaagagatggaggtttacgtggagaacatccgcaggaagtttggggtttttaattactctccatttaggacaccctacacacccaacagccagtatcaaatgctgctcgatcccaccaaccccagcgccggcactgccaagatagacaagcaggagaaggtcaagctcaactttgacatgacggcatcccccaagatcctgatgagcaagcctgtgctgagtgggggcacaggccgccggatttccttgtcggatatgccgcgctcccccatgagcacaaactcttctgtgcacacgggctccgacgtggagcaggatgctgagaagaaggccacgtcgagccacttcagtgcgagcgaggagtccatggacttcctggataagagcacagcttcaccagcctccaccaagacgggacaagcagggagtttatccggcagcccaaagcccttctctcctcaactgtcagctcctatcacgacgaaaacggacaaaacctccaccaccggcagcatcctgaatcttaacctggatcgaagcaaagctgagatggatttgaaggagctgagcgagtcggtccagcaacagtccacccctgttcctctcatctctcccaagcgccagattcgtagcaggttccagctgaatcttgacaagaccatagagagttgcaaagcacaattaggcataaatgaaatctcggaagatgtctatacggccgtagagcacagcgattcggaggattctgagaagtcagatagtagcgatagtgagtatatcagtgatgatgagcagaagtctaagaacgagccagaagacacagaggacaaagaaggttgtcagatggacaaagagccatctgctgttaaaaaaaagcccaagcctacaaacccagtggagattaaagaggagctgaaaagcacgtcaccagccagcgagaaggcagaccctggagcagtcaaggacaaggccagccctgagcctgagaaggacttttccgaaaaggcaaaaccttcacctcaccccataaaggataaactgaagggaaaagatgagacggattccccaacagtccatttgggcctggactctgattcagagagcgaacttgtcatagatttaggagaagaccattctgggcgggagggtcgaaaaaataagaaggaacccaaagaaccatctcccaaacaggatgttgtaggtaaaactccaccatccacgacggtgggcagccattctcccccggaaacaccggtgctcacccgctcttccgcccaaacttccgcggctggcgccacagccaccaccagcacgtcctccacggtcaccgtcacggccccggcccccgccgccacaggaagcccagtgaaaaagcagaggccgcttttaccgaaggagactgccccggccgtgcagcgggtcgtgtggaactcatcaactgtccagcagaaggagatcacacagagcccatccacgtccaccatcaccctggtgaccagcacacagtcatcgcccctggtcaccagctcggggtccatgagcacccttgtgtcctcagtcaacgctgacctgcccatcgccactgcctcagctgatgtcgccgctgatattgccaagtacactagcaaaatgatggatgcaataaaaggaacaatgacagaaatatacaacgatctttctaaaaacactactggaagcacaatagctgagattcgcaggctgaggatcgagatagagaagctccagtggctgcaccagcaagagctctccgaaatgaaacacaacttagagctgaccatggcggagatgcggcagagcctggagcaggagcgggaccggctcatcgccgaggtgaagaagcagctggagttggagaagcagcaggcggtggatgagaccaagaagaagcagtggtgcgccaactgcaagaaggaggccatcttttactgctgttggaacactagctactgtgactacccctgccagcaagcccactggcctgagcacatgaagtcctgcacccagtcagctactgctcctcagcaggaagcggatgctgaggtgaacacagaaacactaaataagtcctcccaggggagctcctcgagcacacaatcagcaccttcagaaacggccagcgcctccaaagagaaggagacgtcagctgagaaaagcaaggagagtggctcgacccttgacctttctggctccagagagacgccctcctccattctcttaggctccaaccaaggctctgaccattcccggagtaataaatccagttggagcagcagtgatgagaagaggggatcgacacgttccgatcacaacaccagtaccagcacgaagagcctcctcccgaaagagtctcggctggacaccttctgggactagcagtgaatcgggacacaaaccacccaccccattgggagaaaaacccagacgccaggaaaagaagaaacaacaaaggcaggagaacagccactttcagacttgaaaatgacaaaaccctcagttgagcctgagcccccggcgcgggggctgctacactacaggacacccagcatcggctttgactgcagactgttcacccacacgagccctgtgcttttggtgtaaataatgtacaatttgtggatgtcattgaatctagaggactttcccctttttatatttgtattaactttaacttattaaaaaaaaaaaaagaaaaagaaaaacgatttaaaaaaaaaaaaaaaagcaaccaaccccaacaacaaaaaagaatgttttggtattggagaagggatggtcagttagcctgtctgtcacacgacggaatggatactgggcccggggaccactttcatactcacgtcctcatccttggatacccaggggagggcgaaccgttttcgctcgtgtgtctgtacgcagcatgttgggatcgggagtttcggcacagactatcccatcaagccgttggctcctttcagctactacgttaccacgttcctaaaacgcaagctctccggaccagacggacacagggagaagctagtttctttcatgtgattgaaatgatgactctactcctaaaagggaaaaaacaatatccttgtttacagaagagaaacaaacaagccccactcagctcagtcacaggagagaacacagaaagtcttaggatcatgaactctgaaaaaaagagaaaccttatctttgctttgtggttcctttaaacacactcacacacacttggtcagagatgctgtgcttcttggaagcaaggactcaaaggcaaggtgcacgcagaggacgtttgagtctgggatgaagcatgtacgtattatttatatgatggaatttcacgtttttatgtaagcatgaaacacaggcagtatgagagaaagcaaggcccgtcatgctgtccgtac

SEQ ID NO: 12173 - DNA, 4652 bp, Homo sapiens
gtgagaactaggagcctgtcctccatgttttataagtattgacattacacagtgttaacaatgcatccacagagcttggctgaagaggaaataaaaacagaacaggaggtggtagagggcatggatatctctactcgctccaaagatcctggctctgcagagagaacagcccagaaaagaaagttccccagccctccacattcttccaatggccactcgccgcaggacacatcaacaagccccattaaaaagaaaaagaaacctggcttactgaacagtaacaataaggagcagtcagaactaagacatggtccgttttactatatgaagcagccactcaccacagaccctgttgatgttgtaccgcaggatggacggaatgatttctactgctgggtttgtcaccgggaaggccaagtcctttgctgtgagctctgtccccgggtttatcacgctaagtgtctgagactgacatcggaaccagagggggactggttttgtcctgaatgtgagaaaattacagtagcagaatgcatcgagacccagagtaaagccatgacaatgctcaccattgaacagttatcctacctgctcaagtttgccattcagaaaatgaaacagccagggacagatgcattccagaagcccgttccattggaacagcaccctgactatgcggaatacatcttccatccaatggacctttgtacattggaaaagaatgcgaaaaagaaaatgtatggctgcacagaagccttcctggctgatgcaaagtggattttgcacaactgcatcatttataatgggggaaatcacaaattgacgcaaatagcgaaagtagtcatcaaaatctgtgaacatgagatgaatgaaatcgaagtatgtccagaatgttatctagctgcttgccaaaaacgagataactggttttgtgagccttgtagcaatccacatcctttggtctgggccaaactgaaggggtttccattctggcctgcaaaagctctaagggataaagacgggcaggtcgatgcccgattctttggacaacatgacagggcctgggttccaataaataattgctacctcatgtctaaagaaattcctttttctgtgaaaaagactaagagcatcttcaacagtgccatgcaagagatggaggtttacgtggagaacatccgcaggaagtttggggtttttaattactctccatttaggacaccctacacacccaacagccagtatcaaatgctgctcgatcccaccaaccccagcgccggcactgccaagatagacaagcaggagaaggtcaagctcaactttgacatgacggcatcccccaagatcctgatgagcaagcctgtgctgagtgggggcacaggccgccggatttccttgtcggatatgccgcgctcccccatgagcacaaactcttctgtgcacacgggctccgacgtggagcaggatgctgagaagaaggccacgtcgagccacttcagtgcgagcgaggagtccatggacttcctggataagagcacagcttcaccagcctccaccaagacgggacaagcagggagtttatccggcagcccaaagcccttctctcctcaactgtcagctcctatcacgacgaaaacggacaaaacctccaccaccggcagcatcctgaatcttaacctggatcgaagcaaagctgagatggatttgaaggagctgagcgagtcggtccagcaacagtccacccctgttcctctcatctctcccaagcgccagattcgtagcaggttccagctgaatcttgacaagaccatagagagttgcaaagcacaattaggcataaatgaaatctcggaagatgtctatacggccgtagagcacagcgattcggaggattctgagaagtcagatagtagcgatagtgagtatatcagtgatgatgagcagaagtctaagaacgagccagaagacacagaggacaaagaaggttgtcagatggacaaagagccatctgctgttaaaaaaaagcccaagcctacaaacccagtggagattaaagaggagctgaaaagcacgtcaccagccagcgagaaggcagaccctggagcagtcaaggacaaggccagccctgagcctgagaaggacttttccgaaaaggcaaaaccttcacctcaccccataaaggataaactgaagggaaaagatgagacggattccccaacagtccatttgggcctggactctgattcagagagcgaacttgtcatagatttaggagaagaccattctgggcgggagggtcgaaaaaataagaaggaacccaaagaaccatctcccaaacaggatgttgtaggtaaaactccaccatccacgacggtgggcagccattctcccccggaaacaccggtgctcacccgctcttccgcccaaacttccgcggctggcgccacagccaccaccagcacgtcctccacggtcaccgtcacggccccggcccccgccgccacaggaagcccagtgaaaaagcagaggccgcttttaccgaaggagactgccccggccgtgcagcgggtcgtgtggaactcatcaactgtccagcagaaggagatcacacagagcccatccacgtccaccatcaccctggtgaccagcacacagtcatcgcccctggtcaccagctcggggtccatgagcacccttgtgtcctcagtcaacgctgacctgcccatcgccactgcctcagctgatgtcgccgctgatattgccaagtacactagcaaaatgatggatgcaataaaaggaacaatgacagaaatatacaacgatctttctaaaaacactactggaagcacaatagctgagattcgcaggctgaggatcgagatagagaagctccagtggctgcaccagcaagagctctccgaaatgaaacacaacttagagctgaccatggcggagatgcggcagagcctggagcaggagcgggaccggctcatcgccgaggtgaagaagcagctggagttggagaagcagcaggcggtggatgagaccaagaagaagcagtggtgcgccaactgcaagaaggaggccatcttttactgctgttggaacactagctactgtgactacccctgccagcaagcccactggcctgagcacatgaagtcctgcacccagtcagctactgctcctcagcaggaagcggatgctgaggtgaacacagaaacactaaataagtcctcccaggggagctcctcgagcacacaatcagcaccttcagaaacggccagcgcctccaaagagaaggagacgtcagctgagaaaagcaaggagagtggctcgacccttgacctttctggctccagagagacgccctcctccattctcttaggctccaaccaaggctctgttagcaaaaggtgtgacaagcaacctgcctatgccccaaccaccacagaccaccagccgcaccccaactaccccgcccagaagtaccattcccggagtaataaatccagttggagcagcagtgatgagaagaggggatcgacacgttccgatcacaacaccagtaccagcacgaagagcctcctcccgaaagagtctcggctggacaccttctgggactagcagtgaatcgggacacaaaccacccaccccattgggagaaaaacccagacgccaggaaaagaagaaacaacaaaggcaggagaacagccactttcagacttgaaaatgacaaaaccctcagttgagcctgagcccccggcgcgggggctgctacactacaggacacccagcatcggctttgactgcagactgttcacccacacgagccctgtgcttttggtgtaaataatgtacaatttgtggatgtcattgaatctagaggactttcccctttttatatttgtattaactttaacttattaaaaaaaaaaaaagaaaaagaaaaacgatttaaaaaaaaaaaaaaaagcaaccaaccccaacaacaaaaaagaatgttttggtattggagaagggatggtcagttagcctgtctgtcacacgacggaatggatactgggcccggggaccactttcatactcacgtcctcatccttggatacccaggggagggcgaaccgttttcgctcgtgtgtctgtacgcagcatgttgggatcgggagtttcggcacagactatcccatcaagccgttggctcctttcagctactacgttaccacgttcctaaaacgcaagctctccggaccagacggacacagggagaagctagtttctttcatgtgattgaaatgatgactctactcctaaaagggaaaaaacaatatccttgtttacagaagagaaacaaacaagccccactcagctcagtcacaggagagaacacagaaagtcttaggatcatgaactctgaaaaaaagagaaaccttatctttgctttgtggttcctttaaacacactcacacacacttggtcagagatgctgtgcttcttggaagcaaggactcaaaggcaaggtgcacgcagaggacgtttgagtctgggatgaagcatgtacgtattatttatatgatggaatttcacgtttttatgtaagcatgaaacacaggcagtatgagagaaagcaaggcccgtcatgctgtccgtac

SEQ ID NO: 12174 - DNA, 4493 bp, Homo sapiens
gtgagaactaggagcctgtcctccatgttttataagtattgacattacacagtgttaacaatgcatccacagagcttggctgaagaggaaataaaaacagaacaggaggtggtagagggcatggatatctctactcgctccaaagatcctggctctgcagagagaacagcccagaaaagaaagttccccagccctccacattcttccaatggccactcgccgcaggacacatcaacaagccccattaaaaagaaaaagaaacctggcttactgaacagtaacaataaggagcaggatggacggaatgatttctactgctgggtttgtcaccgggaaggccaagtcctttgctgtgagctctgtccccgggtttatcacgctaagtgtctgagactgacatcggaaccagagggggactggttttgtcctgaatgtgagaaaattacagtagcagaatgcatcgagacccagagtaaagccatgacaatgctcaccattgaacagttatcctacctgctcaagtttgccattcagaaaatgaaacagccagggacagatgcattccagaagcccgttccattggaacagcaccctgactatgcggaatacatcttccatccaatggacctttgtacattggaaaagaatgcgaaaaagaaaatgtatggctgcacagaagccttcctggctgatgcaaagtggattttgcacaactgcatcatttataatgggggaaatcacaaattgacgcaaatagcgaaagtagtcatcaaaatctgtgaacatgagatgaatgaaatcgaagtatgtccagaatgttatctagctgcttgccaaaaacgagataactggttttgtgagccttgtagcaatccacatcctttggtctgggccaaactgaaggggtttccattctggcctgcaaaagctctaagggataaagacgggcaggtcgatgcccgattctttggacaacatgacagggcctgggttccaataaataattgctacctcatgtctaaagaaattcctttttctgtgaaaaagactaagagcatcttcaacagtgccatgcaagagatggaggtttacgtggagaacatccgcaggaagtttggggtttttaattactctccatttaggacaccctacacacccaacagccagtatcaaatgctgctcgatcccaccaaccccagcgccggcactgccaagatagacaagcaggagaaggtcaagctcaactttgacatgacggcatcccccaagatcctgatgagcaagcctgtgctgagtgggggcacaggccgccggatttccttgtcggatatgccgcgctcccccatgagcacaaactcttctgtgcacacgggctccgacgtggagcaggatgctgagaagaaggccacgtcgagccacttcagtgcgagcgaggagtccatggacttcctggataagagcacagcttcaccagcctccaccaagacgggacaagcagggagtttatccggcagcccaaagcccttctctcctcaactgtcagctcctatcacgacgaaaacggacaaaacctccaccaccggcagcatcctgaatcttaacctggatcgaagcaaagctgagatggatttgaaggagctgagcgagtcggtccagcaacagtccacccctgttcctctcatctctcccaagcgccagattcgtagcaggttccagctgaatcttgacaagaccatagagagttgcaaagcacaattaggcataaatgaaatctcggaagatgtctatacggccgtagagcacagcgattcggaggattctgagaagtcagatagtagcgatagtgagtatatcagtgatgatgagcagaagtctaagaacgagccagaagacacagaggacaaagaaggttgtcagatggacaaagagccatctgctgttaaaaaaaagcccaagcctacaaacccagtggagattaaagaggagctgaaaagcacgtcaccagccagcgagaaggcagaccctggagcagtcaaggacaaggccagccctgagcctgagaaggacttttccgaaaaggcaaaaccttcacctcaccccataaaggataaactgaagggaaaagatgagacggattccccaacagtccatttgggcctggactctgattcagagagcgaacttgtcatagatttaggagaagaccattctgggcgggagggtcgaaaaaataagaaggaacccaaagaaccatctcccaaacaggatgttgtaggtaaaactccaccatccacgacggtgggcagccattctcccccggaaacaccggtgctcacccgctcttccgcccaaacttccgcggctggcgccacagccaccaccagcacgtcctccacggtcaccgtcacggccccggcccccgccgccacaggaagcccagtgaaaaagcagaggccgcttttaccgaaggagactgccccggccgtgcagcgggtcgtgtggaactcatcaactgtccagcagaaggagatcacacagagcccatccacgtccaccatcaccctggtgaccagcacacagtcatcgcccctggtcaccagctcggggtccatgagcacccttgtgtcctcagtcaacgctgacctgcccatcgccactgcctcagctgatgtcgccgctgatattgccaagtacactagcaaaatgatggatgcaataaaaggaacaatgacagaaatatacaacgatctttctaaaaacactactggaagcacaatagctgagattcgcaggctgaggatcgagatagagaagctccagtggctgcaccagcaagagctctccgaaatgaaacacaacttagagctgaccatggcggagatgcggcagagcctggagcaggagcgggaccggctcatcgccgaggtgaagaagcagctggagttggagaagcagcaggcggtggatgagaccaagaagaagcagtggtgcgccaactgcaagaaggaggccatcttttactgctgttggaacactagctactgtgactacccctgccagcaagcccactggcctgagcacatgaagtcctgcacccagtcagctactgctcctcagcaggaagcggatgctgaggtgaacacagaaacactaaataagtcctcccaggggagctcctcgagcacacaatcagcaccttcagaaacggccagcgcctccaaagagaaggagacgtcagctgagaaaagcaaggagagtggctcgacccttgacctttctggctccagagagacgccctcctccattctcttaggctccaaccaaggctctgaccattcccggagtaataaatccagttggagcagcagtgatgagaagaggggatcgacacgttccgatcacaacaccagtaccagcacgaagagcctcctcccgaaagagtctcggctggacaccttctgggactagcagtgaatcgggacacaaaccacccaccccattgggagaaaaacccagacgccaggaaaagaagaaacaacaaaggcaggagaacagccactttcagacttgaaaatgacaaaaccctcagttgagcctgagcccccggcgcgggggctgctacactacaggacacccagcatcggctttgactgcagactgttcacccacacgagccctgtgcttttggtgtaaataatgtacaatttgtggatgtcattgaatctagaggactttcccctttttatatttgtattaactttaacttattaaaaaaaaaaaaagaaaaagaaaaacgatttaaaaaaaaaaaaaaaagcaaccaaccccaacaacaaaaaagaatgttttggtattggagaagggatggtcagttagcctgtctgtcacacgacggaatggatactgggcccggggaccactttcatactcacgtcctcatccttggatacccaggggagggcgaaccgttttcgctcgtgtgtctgtacgcagcatgttgggatcgggagtttcggcacagactatcccatcaagccgttggctcctttcagctactacgttaccacgttcctaaaacgcaagctctccggaccagacggacacagggagaagctagtttctttcatgtgattgaaatgatgactctactcctaaaagggaaaaaacaatatccttgtttacagaagagaaacaaacaagccccactcagctcagtcacaggagagaacacagaaagtcttaggatcatgaactctgaaaaaaagagaaaccttatctttgctttgtggttcctttaaacacactcacacacacttggtcagagatgctgtgcttcttggaagcaaggactcaaaggcaaggtgcacgcagaggacgtttgagtctgggatgaagcatgtacgtattatttatatgatggaatttcacgtttttatgtaagcatgaaacacaggcagtatgagagaaagcaaggcccgtcatgctgtccgtac

SEQ ID NO: 12175 - DNA, 10383 bp, Homo sapiens
gccgccatcttgcttctttttctcgctcgctcgctccccctcggaaagctgcgaaagtgctttggcggtttgtccatccgcagcttcggcttttccagtctggtggcccttccggccacccctttaaccccagctttccctcccccttctttcgatcagagatcggcggagaccctcgaagtgcgcaaacttgacactcaccctgaccggactggggttttaaggggtgtggcaggaggttttggactcgatgagtttccaccgaaatgtcggagaagtcaggccagagcacaaaagcaaaggatgggaaaaagtatgcaacactcagtttatttaatacttacaaggggaaatcattagaaacacagaaaaccacagctcgacatggattacagagtcttggaaaagtcggtatttcacggcgtatgcctccacctgctaacctcccaagtcttaaagcagaaaacaaaggcaatgatcctaatgtaaacattgtacctaaagatggcacagggtgggcatcaaaacaagagcaacatgaagaagaaaaaacaccagaagtgccaccagcacagccaaaacctggggttgcagctcccccagaagtagcacctgctcccaaatcatgggccagtaacaagcaaggtgggcaaggagatggaatccaagtgaatagtcagtttcagcaagaatttcccagcctgcaggcagctggggatcaggaaaaaaaagaaaaggaaacaaatgatgacaactatggacctggacccagtttacgtccaccaaatgttgcttgttggagagatggtggtaaggctgctggctcaccttcgtcatctgatcaagatgaaaagctccctggccaggatgaaagcacagctggaacatcagagcaaaatgatatcctcaaagtggtggaaaagaggatagcttgtggtcctccacaggctaaactgaatggacagcaggctgctctcgcttcccagtatagagctatgatgcctccttatatgttccaacagtatccgaggatgacatatcctcctctacatggtcccatgagattcccaccttctttatctgaaacaaacaaaggccttcgaggaagaggcccacctccttcatgggcctctgagcctgaacgcccatccattcttagtgcatcagaactgaaggagcttgataaatttgataacctagatgctgaagctgatgaaggttgggcaggtgctcagatggaagtagattatacagagcaactgaatttcagtgatgatgatgaacaaggaagtaacagtcctaaagagaataacagtgaggatcaaggttcaaaagcctctgaaaacaacgaaaacaaaaaagaaacagatgaagtttccaacactaaatcatcttcccaaatacctgcccaaccatcagtagcaaaagttccctatgggaaaggaccttcatttaatcaggaacgtggaacatcttcacatctgccaccacctccaaagttgcttgcacagcagcatccacctccagatcgacaggcagtacctggaagaccaggcccctttccctccaagcagcaagtagctgatgaagatgaaatatggaagcaaagacgaagacaacaatcagaaatttctgcagcagtagaacgtgctcgtaaacggcgtgaagaggaagagcgaagaatggaagaacaaaggaaggcagcttgtgcggagaaactgaaacgattggatgagaagcttggcatcctggaaaaacaaccatctccagaggaaattagggaaagggagcgagaaaaagaacgggagcgtgagaaagaacttgaaaaagaacaagaacaggagcgagagaaggagagggaaaaagacagagagagacagcaggaaaaggagaaagagctggagaaggagcaggaaaaacaaagagaaatggagaaagaaagaaagcaagaaaaagaaaaagaactagaacggcagaaagaaaaggaaaaagaactacaaaagatgaaagaacaagaaaaggaatgtgagctggagaaggaaagggaaaaattagaggagaaaattgaacccagagaacctaatttagagcccatggtagaaaaacaagaaagtgaaaacagctgtaataaagaggaggaacccgttttcactagacaagacagcaatcgcagtgaaaaggaagccacaccagtggtgcatgaaacagaaccagaatcagggtctcaacctcggccggctgtattatctggctatttcaaacagtttcagaagtctttacctccacgattccagcggcagcaggaacagatgaaacagcagcagtggcagcagcagcaacagcaaggtgtacttccacagactgttccttcacaaccgtccagtagtactgtccctcctccaccacacagacctctttatcagcctatgcagcctcatcctcagcatttggcttctatgggttttgatccaaggtggctcatgatgcagtcctacatggatcctcgaatgatgtcaggaagacctgctatggatattccacccattcatcctggaatgattcctcctaaaccattaatgagaagagaccagatggaagggtcaccgaacagttctgagtcatttgagcatatagctcgatctgcaagagatcacgcaatttccctttctgagcctcgtatgctgtgggggtcagatccctatcctcatgctgagcctcaacaagcaactactcccaaagcaacagaagagcctgaggatgtaaggtctgaagctgcgttggaccaggaacagattactgctgcttattctgtagaacataatcaattagaggctcacccaaaggcagactttatcagagaatcaagtgaggcacaagtacaaaagtttttaagcagatctgtggaagatgttagacctcaccatactgatgcaaataatcagtctgcttgttttgaagcacctgatcaaaagaccttatccgctcctcaagaggagcggatttcagctgtagaaagtcagccttcccggaaaagaagtgtttcccatggatctaaccatacgcaaaaaccagacgagcagagaagtgaaccatctgcaggcattcctaaagtaaccagcagatgcattgattcaaaagaaccaatagaaaggccagaggagaaaccaaaaaaggaaggctttatacgatcttctgaaggaccaaaacctgaaaaagtatataaatctaaatcagaaactcgttggggcccacgaccaagctctaacagaagggaagaagttaatgatagacctgtgagaagatcaggtcccattaaaaaacctgtacttagagatatgaaagaggaacgggaacagaggaaggagaaagaaggagaaaaggccgaaaaggtcactgaaaaagtagttgtaaagcctgaaaagacggaaaagaaggatcttcctcctcccccaccaccacctcagccaccagcaccaattcagccacagtcagttccaccaccaattcaaccagaagcagagaaatttccttcaacagaaactgcaactttggctcaaaaaccatctcaggatactgagaagcctctggaacctgtgagtactgttcaggtagagcctgcagttaagactgtaaaccaacagactatggcagcaccagtagtcaaagaagaaaaacaacctgagaaagtcatcagcaaagaccttgttatagagaggcctcgaccagattcaagaccagcagttaaaaaagaatcaactttgcctcccaggacctattggaaagaagctagagagagagattggtttccagatcaaggatacagaggtcgaggccgaggtgaatattactccagaggtcgaagctatagaggttcttatggagggcgtggcaggggtggtaggggacacactcgagattatcctcagtatagagacaataagccaagagcagagcatataccctcagggcctctcagacagcgagaagaaagtgaaacacggagtgagagctctgattttgaagttgtccccaaaagaagacgacagcggggttcagagactgacacagacagtgaaattcatgaaagtgcaagtgacaaggacagtttaagtaaaggcaaacttcccaaaagagaggaacggcctgaaaacaaaaaacctgtaaagcctcattcttctttcaagcctgataatcatgttcgaatagataatagactgctagaaaagccttatgtaagggatgacgataaagctaaaccaggctttcttcctaaaggagagcctacaaggagaggcagagggggaacattcaggcgtggtggaagggatcctggaggccgtccatcacgcccttccactttacgaagaccagcttatcgggacaatcagtggaacccaaggcagtcagaagttcctaaaccagaagatggagagccgccaagaagacatgagcagtttattcctatagcagcagataaacgacctccaaaatttgagcgaaaatttgacccagctagagaaaggcctcgaaggcagcgtcctactcgaccaccaaggcaagacaagccacctcgatttagacggctaagagagagggaggctgcttcaaaatcaaatgaggtggtagcagtgcccacaaatggcacagttaataatgtggctcaagaaccagttaatactcttggggatatttccgggaataagacaccagatttatctaatcagaactcttcagatcaggcaaatgaagaatgggaaacagcttctgaaagcagtgatttcaatgagaggcgagagagggatgaaaaaaaaaatgctgacttgaatgcacaaacagttgtaaaggttggagagaatgttctacctccaaagagggaaattgcaaagagaagtttttctagtcagagaccagtagatcgtcagaatcgacgtggcaacaatggtccacccaaatcaggaaggaatttctcaggtcctagaaatgaaaggagaagtggcccaccatcaaaaagtgggaagagagggccatttgatgaccagcctgcaggcacaactggggttgacctcatcaatggcagctctgcacaccatcaggaaggagtacctaatggtacaggacaaaagaactccaaagattctactgggaaaaaaagagaagaccccaaaccaggccctaaaaaaccaaaagagaaagtggatgctctatcacagtttgatctcaacaattatgcaagtgttgttataattgatgatcatcctgaagtaacagtaattgaagatccccagtcaaatttgaatgatgatggttttactgaagtggtatccaaaaaacaacaaaaacgtttacaggatgaagaacgccgaaagaaggaagaacaagtcatacaggtctggaacaaaaagaatgcaaatgaaaaaggaagaagccagacttctaagcttcctccaagatttgccaaaaaacaggctacagggatccagcaagcacagtcttcagcctcagttccacctctagcttcggctccacttccaccttcaacctcagcttcagttccagcctcaacctcagctccacttccggcaaccttaactccagttccagcctcaacctcagctccggttccagcctcaactttagctccagttctggcctcaacctcagctccagttccagcctcacccttagctccagtttcagcctcagcctcagtctcagcttcagttccagcctctacttcagctgcagctataacctcttcttcagctccagcctcagccccagctccaacccccatccttgcctcagtttcaaccccagcttctgtcaccattcttgcctcagcctcaattcccattcttgcttcagccctagcatcaacttcagctccaacgccagccccagcagcctcttccccagctgccccagtcatcacagcaccaactatcccagcctcagccccaactgcctcagtcccacttgcccctgcctcagcttcagccccagccccagcccctaccccagtctcagccccaaatcctgccccacctgccccagcccagactcaggcacagacccacaaaccagtccagaatccactacagactacatctcagtcttcaaaacaaccaccaccatcaattaggctgccttcagctcaaacacctaatggcacagattatgtagcctcaggaaaatccatccagaccccacagtcacatggcactctgacagctgaattatgggataacaaggtggccccaccagctgtgctgaatgatatctctaagaaattaggtcccattagtccaccacagccaccttcagtcagtgcatggaataagcccttaacatcgtttggatcagctccttcatcagagggagcgaagaatggtcaagaaagtggactcgaaattggaactgacacaattcagtttggtgctccagcctcaaatggaaatgaaaatgaagttgttcctgtgctttcggaaaaatctgctgacaaaatacctgaacctaaagaacagcggcagaagcagccacgagcaggacctatcaaagcccagaagcttccagatttgagtccagtagaaaacaaagaacacaaacctggtcccattggaaaggaacgttcattaaaaaatagaaaagtaaaagatgcccaacaggtggagccagaaggacaagagaaaccaagcccagctacagtcagaagcacagatcctgtcacgacaaaggagactaaagcagtctcagaaatgtctactgaaataggaacaatgatctcggtatcatctgcagaatatggtactaatgcaaaggagtctgtaacagactatactacaccctcttcttctttgcctaacaccgtggctactaataatacaaagatggaggatactttggttaataatgtgcccctgcccaacacccttcccctccctaagagggagactatacaacagagctccagcctaacttcagttcctcccactactttcagcctcaccttcaagatggagtctgcacgcaaagcatgggagaattctccaaatgtaagggaaaaggggtctccagtaacttccacagcacctccaattgcaactggagtcagcagtagtgccagtggaccaagcactgctaattacaattcgttctcaagtgcatccatgccccagattcctgttgcttcagtcactcctacagcatcactatcaggagctggtacatacactacctcttctttgagcacaaaatctacaaccacatcggaccctccaaatatttgtaaagtgaaacctcagcagttacagacaagcagcctgccttctgcaagtcatttttcacagttaagctgtatgccttcccttattgcccagcagcaacagaatccgcaagtttatgtgtctcagtctgcagcagctcaaatcccagccttctatatggacacaagtcatttattcaatacccaacatgcacgattggctccgccatccttggctcaacaacagggtttccaaccaggtctctctcagccaacttcagttcagcagattccaatccctatttatgcaccactgcaagggcagcatcaagcccaactgagtttgggggctggccctgctgtttcccaggctcaggaattgttcagctcctcacttcaaccatatagatctcagccagcttttatgcaaagcagtttatcccagccatctgtggtcctttctggtactgctattcacaactttccaactgtccaacaccaagaacttgccaaggcacaatccggtcttgcctttcagcaaacatcaaatactcagcccattcctatattgtatgaacatcaactggggcaggcatcaggactaggaggttcccagctgattgacacacatcttctccaggccagagcaaatcttacccaggcctcaaatctttattctggacaagtacaacagcctggtcagacaaatttttataacactgcccagtcaccaagtgctctccagcaggttacagtacctttaccagcatcgcagctttccttgcctaattttggatctacagggcaacctctaattgctttgcctcagactcttcagcccccattacagcataccactccccaagcacaggctcagagtctgagtcgtcctgcacaagtaagccagcctttcagaggattaattcctgctggaacacagcatagcatgattgcaaccacaggaaaaatgtctgaaatggaactaaaagcctttggaagtggcattgatataaaaccaggcacacctccaatcgctggtagaagcaccacaccaacatctagtccttccgggctacttctacaagtccgaacagccagtccagcaaaatgaacagcattgtctaccagaagcagttccagtcagcccctgccactgtgagaatgacacaaccatttcctacacagtttgcaccccaggcaaagcagagagcagaggttcttcagtccacgcaacggttcttctctgaacagcaacagagcaaacagataggaggaggcaaagcccagaaagtggacagtgattcaagtaaacctcctgaaacactgaccgaccctcctggggtctgtcaggaaaaagtagaagaaaagccaccccctgcaccctccatagccaccaaacctgttagaactggaccaatcaaacctcaggcgatcaaaaccgaagaaacaaaatcttaaaggctatggtttattgcaggggattgggaggggggcgggaaaacatggagaattaagtcagataatgctggcagccaaaggggcaaaatggcctgtgacattatcctgttcagagcttggagatgtacaagggacataggagcaatttacactgacacacagctgctgtaccagtgaaaacgaggctttgcaagcttgtacctactatataacatgtgcttggttgatggccatgcatcttcagtcagaatttatatataaatgtatgcacccatttttttgagtgcatataatttagacctaaaaatccttatgattagatgaaacaccaaaaatataaggaaaataacacagcagaggaatagctcagcctgaacagtgtgatggtcccagctactacatcagatgcggtttttttgctcccttatgttcttcggatatggttatggcatttgtaggcttggaggtaaagaactgaagataactggtgctggatagaggagccttattttttattatggcagcttgctatttttataacatggtgattgagttgaacacaatcaaagtacagtagtaactgatgtccccttcttcctggatgaatgagcagataaatattgatgtcagcatccttgaaccatatcaaagtgagcagtgtttggctactgcttctatttgaaatggtgctgtgttttggttgtggtctgaagctttgaagcgctacttagcatctcctttcttccatggagctctcacgattcaaacatgacagatttggtaaaatgctggttaggttgagtcttccttgcccccactcagtcatctttgtatgaatcccatgatttgggggtttttttctttttttttttataccagtttttagctggtgtttatgaagaacagtgagtacctagaactgtgccactaattaaaggaaatcctaagaaggtgcatttctttacagagctgtgtcatgccatcctttgggccctctgctggaaaagtagaatcaagtctcaaataatgcctttttaattgtatcctctagtattatagatataggacagtactgtatcatacctctgtgaatgtaaaatatcttgtacctgctttatgatacgtagtagtgaccgtgctttatcagagctgtttttaatgatgttattctagaatgttttctttccagatgatgattcagaagctaattttaaaaaacggtgccaggtaccacaacagtaacagaactttgcaattttctggggttttgttttttacctttttccccccttttttttaaatggagtgtgctggatgtctctataattttattcagatgactgcagaacctggaaaagctgttgctgctattgatgcataacatactgctattggtctttttatataaatatatatatatatatacatatatatatataatttgaatttttggaaactttagctgtgctgtcaactttggaaaaagtatcccggtttactgtgttgagttggcattgtacagaaattaacagccatattggtctagaaacgttaaacttaatttttttccatttgtacaggggtaacgcactgtattaaatatgtaaggtcttatctacatgggtttgattacagaaactaataaagtattctctaaataatga

SEQ ID NO: 12176 - DNA, 1600 bp, Homo sapiens
acttcctgagccgggctggctgggtgggaacaggctccttgccgcctccccagcgctggccactaccacactgccgcccgcctgggcctcctttcaacctcgtggtggagccctgcggtttcccagcggagccgggcccggggctgctccctcgcgggcgaggctcacctgtcccggcccggccccctcccgcgccccaggtggttcagggcggggaggagccgcgccccgccccgcgcggtagcagccaacgccggccccaggcgggtgcgctgggagcctgggccgggagccgggtgagggcgccgagaggctcggtgggcgcgggcggcgagatatgccacacttctgcctgctgttggcaaccctcctggactaggctgctcttgttaatcacatggatgttgctgattactctgagtgcaaaccttttcactgttccagagaggagcctgacaaccacattctccttctcaagatataagagttcggaccgcccagcacacaaggtcagcatgctgctcctctgtcacgctctcgctatagctgttgtccagatcgttatcttctcagaaagctgggcatttgccaagaacatcaacttctataatgtgaggcctcctctcgaccctacaccatttccaaatagcttcaagtgctttacttgtgaaaacgcaggggataattataactgcaatcgatgggcagaagacaaatggtgtccacaaaatacacagtactgtttgacagttcatcacttcaccagccacggaagaagcacatccatcaccaaaaagtgtgcctccagaagtgaatgtcattttgtcggttgccaccacagccgagattctgaacatacggagtgtaggtcttgctgtgaaggaatgatctgcaatgtagaattacccaccaatcacactaatgcagtgtttgccgtaatgcacgctcagagaacatctggcagcagtgcccccacactctacctaccagtgcttgcctgggtctttgtgcttccattgctgtgatgccaccattcctaggagaggcagagaccagcctctaaagcacaagccaaaaactgtgtgaacggtgaactttggagtgaagatcaatcttgcacttggtgaagagtgcacattggacctcaaggcgaaagccagtggtttgcttggataaaatgttcccgcatgaggccacaggactgaggatgggaatttggcagggcctgagaagatggtctgacttccaggcttcctggtcaaagagagctacgtttgggcagttctgcagagaggatcctggcaactagtcccacctgactaggcctttagctgaaaggatttcttgacctccttgactgcctcagaggctgccaggtcaaaccctcttgtttatgtgattagctcagagcatctctatgaaatctaacccttcccctcatgagaaagcagttttccccaccaacagcatagtcaatgagaaaggcgactgtacgaagaaaacttccagtggaactaatatgaaatctatttgcaaattatggggggaaataaagcttttaaattatacaatgaaaaaaaaaaaaaaaaaaaaaaaaaaa

SEQ ID NO: 12177 - DNA, 1785 bp, Homo sapiens
gagagggcgaaggtaggctggcagatacgttcgtcagcttgctcctttctgcccgtggacgccgccgaagaagcatcgttaaagtctctcttcaccctgccgtcatgtctaagtcagagtctcctaaagagcccgaacagctgaggaagctcttcattggagggttgagctttgaaacaactgatgagagcctgaggagccattttgagcaatggggaacgctcacggactgtgtggtaatgagagatccaaacaccaagcgctccaggggctttgggtttgtcacatatgccactgtggaggaggtggatgcagctatgaatgcaaggccacacaaggtggatggaagagttgtggaaccaaagagagctgtctccagagaagattctcaaagaccaggtgcccacttaactgtgaaaaagatatttgttggtggcattaaagaagacactgaagaacatcacctaagagattattttgaacagtatggaaaaattgaagtgattgaaatcatgactgaccgaggcagtggcaagaaaaggggctttgcctttgtaacctttgacgaccatgactccgtggataagattgtcattcagaaataccatactgtgaatggccacaactgtgaagttagaaaagccctgtcaaagcaagagatggctagtgcttcatccagccaaagaggtcgaagtggttctggaaactttggtggtggtcgtggaggtggtttcggtgggaatgacaacttcggtcgtggaggaaacttcagtggtcgtggtggctttggtggcagccgtggtggtggtggatatggtggcagtggggatggctataatggatttggtaatgatggaagcaattttggaggtggtggaagctacaatgattttgggaattacaacaatcagtcttcaaattttggacccatgaagggaggaaattttggaggcagaagctctggcccctatggcggtggaggccaatactttgcaaaaccacgaaaccaaggtggctatggcggttccagcagcagcagtagctatggcagtggcagaagattttaattaggaaacaaagcttagcaggagaggagagccagagaagtgacagggaagctacaggttacaacagatttgtgaactcagccaagcacagtggtggcagggcctagctgctacaaagaagacatgttttagacaaatactcatgtgtatgggcaaaaaactcgaggactgtatttgtgactaattgtataacaggttattttagtttctgttctgtggaaagtgtaaagcattccaacaaagggttttaatgtagatttttttttttgcaccccatgctgttgattgctaaatgtaacagtctgatcgtgacgctgaataaatgtcttttttttaatgtgctgtgtaaagttagtctactcttaagccatcttggtaaatttccccaacagtgtgaagttagaattccttcagggtgatgccaggttctatttggaatttatatacaacctgcttgggtggagaagccattgtcttcggaaaccttggtgtagttgaactgatagttactgttgtgacctgaagttcaccattaaaagggattacccaagcaaaatcatggaatggttataaaagtgattgttggcacatcctatgcaatatatctaaattgaataatggtaccagataaaattatagatgggaatgaagcttgtgtatccattatcatgtgtaatcaataaacgatttaattctcttgaaaaaaaaaaaaaaaaaa

SEQ ID NO: 12178 - DNA, 1941 bp, Homo sapiens
gagagggcgaaggtaggctggcagatacgttcgtcagcttgctcctttctgcccgtggacgccgccgaagaagcatcgttaaagtctctcttcaccctgccgtcatgtctaagtcagagtctcctaaagagcccgaacagctgaggaagctcttcattggagggttgagctttgaaacaactgatgagagcctgaggagccattttgagcaatggggaacgctcacggactgtgtggtaatgagagatccaaacaccaagcgctccaggggctttgggtttgtcacatatgccactgtggaggaggtggatgcagctatgaatgcaaggccacacaaggtggatggaagagttgtggaaccaaagagagctgtctccagagaagattctcaaagaccaggtgcccacttaactgtgaaaaagatatttgttggtggcattaaagaagacactgaagaacatcacctaagagattattttgaacagtatggaaaaattgaagtgattgaaatcatgactgaccgaggcagtggcaagaaaaggggctttgcctttgtaacctttgacgaccatgactccgtggataagattgtcattcagaaataccatactgtgaatggccacaactgtgaagttagaaaagccctgtcaaagcaagagatggctagtgcttcatccagccaaagaggtcgaagtggttctggaaactttggtggtggtcgtggaggtggtttcggtgggaatgacaacttcggtcgtggaggaaacttcagtggtcgtggtggctttggtggcagccgtggtggtggtggatatggtggcagtggggatggctataatggatttggtaatgatggtggttatggaggaggcggccctggttactctggaggaagcagaggctatggaagtggtggacagggttatggaaaccagggcagtggctatggcgggagtggcagctatgacagctataacaacggaggcggaggcggctttggcggtggtagtggaagcaattttggaggtggtggaagctacaatgattttgggaattacaacaatcagtcttcaaattttggacccatgaagggaggaaattttggaggcagaagctctggcccctatggcggtggaggccaatactttgcaaaaccacgaaaccaaggtggctatggcggttccagcagcagcagtagctatggcagtggcagaagattttaattaggaaacaaagcttagcaggagaggagagccagagaagtgacagggaagctacaggttacaacagatttgtgaactcagccaagcacagtggtggcagggcctagctgctacaaagaagacatgttttagacaaatactcatgtgtatgggcaaaaaactcgaggactgtatttgtgactaattgtataacaggttattttagtttctgttctgtggaaagtgtaaagcattccaacaaagggttttaatgtagatttttttttttgcaccccatgctgttgattgctaaatgtaacagtctgatcgtgacgctgaataaatgtcttttttttaatgtgctgtgtaaagttagtctactcttaagccatcttggtaaatttccccaacagtgtgaagttagaattccttcagggtgatgccaggttctatttggaatttatatacaacctgcttgggtggagaagccattgtcttcggaaaccttggtgtagttgaactgatagttactgttgtgacctgaagttcaccattaaaagggattacccaagcaaaatcatggaatggttataaaagtgattgttggcacatcctatgcaatatatctaaattgaataatggtaccagataaaattatagatgggaatgaagcttgtgtatccattatcatgtgtaatcaataaacgatttaattctcttgaaaaaaaaaaaaaaaaaa

SEQ ID NO: 12179 - DNA, 4166 bp, Homo sapiens
cggcgcgggtgttgagagcggtgtggtaggtgttgtagccgctatggtgaagttcgctttgtagcggccccggctagagagttggcctgttccctgcctttgtgacccggaggagcttttgggggtgcgtcaagcccctggcctgaggcagcgaactggtttgtggcctgtttgattcctgtcagaggtttgctgacccaagacagtatcgaaaatgcatattaagtcaattattctagagggattcaagtcctatgctcagaggaccgaagtcaatggttttgaccccctcttcaatgctatcactggcttaaatggtagtgggaaatccaacatattggactccatctgctttttactgggcatctccaacctgtctcaggttcgggcttctaatttacaagatttagtttacaaaaatgggcaggctggtattaccaaagcctctgtgtcaatcacttttgataattctgacaaaaagcaaagtcctttaggatttgaggttcatgatgaaatcacagtaacaaggcaggtggttattggtggtagaaataaatatttaatcaatggagtcaatgccaacaacaccagagtacaggatctcttctgttctgttggccttaatgttaacaaccctcactttctcatcatgcagggccgaattacaaaagtattgaatatgaaaccaccagagattttatccatgatagaagaagcagctggaaccaggatgtatgaatacaaaaaaatagctgcacagaaaactatagaaaaaaaggaggctaagctgaaagaaattaagacgatacttgaagaagagattactccaaccattcaaaaattaaaagaggaaagatcgtcctacttggagtaccaaaaagtaatgagagaaatagaacatttgagtcgtttatatattgcttatcagtttttgctggctgaagataccaaagtacgctcagctgaggaattaaaagaaatgcaagataaagttataaagcttcaggaagaattgtctgagaatgataaaaaaataaaagcacttaatcatgaaatagaagaattggaaaaaagaaaagataaggaaactggagttatacttcgatctttagaagatgctcttgcagaggctcagcgagttaatactaaatctcaaagcgcatttgatctcaagaagaaaaatctggcatgtgaggaaagcaaacgcaaagagctggaaaaaaatatggttgaggactcaaaaactttagcagcaaaggaaaaagaggttaaaaagataacagatggactgcatgcccttcaagaagcaagtaataaagatgctgaagctctggcagctgcacagcagcacttcaatgctgtttccgctggcctgtccagtaatgaagatggagcagaagcaactcttgctggtcaaatgatggcctgtaaaaatgatataagtaaagctcagacagaagccaaacaggctcagatgaagttgaagcatgctcaacaggaattaaagaataaacaagctgaagttaagaagatggatagtggctacaggaaggatcaagaagctctagaagctgtaaaaagacttaaagaaaaacttgaagctgaaatgaaaaagctaaattatgaagaaaataaagaggaaagccttttggaaaagcgcaggcagctgtctcgtgatattggtagattgaaagaaacatatgaagctctattagccagatttcccaatcttcgatttgcatacaaggatccagagaagaactggaatagaaattgtgtgaaaggacttgtggcttctctgattagtgtgaaagacacttctgcaaccacagctttagaattagtggctggagaacgactctacaatgttgtagtagacacagaagttactggtaaaaagctactagaaaggggggaactgaaacgtcgatacactataattccactcaataaaatttcagccagatgtattgcaccagaaactctgagagttgctcagaatcttgttggccctgacaacgttcatgtggctctttccttggttgaatataaaccagaacttcagaaagcaatggagtttgtctttggaacaacatttgtttgtgacaatatggataatgccaaaaaagtggcctttgataagaggataatgactagaactgtaactctcggaggtgatgtgtttgatcctcatgggacattgagtggaggtgctcgatcccaggcagcttccattttaaccaagtttcaagaactcaaagatgttcaggatgaactgagaatcaaagagaatgagctgcgggctctagaagaggaattagcaggtcttaaaaacactgctgaaaagtatcgccaactaaaacagcagtgggagatgaaaactgaagaggcagatttattacaaaccaagctccagcaaagctcatatcacaagcaacaagaagaattagatgcccttaaaaaaaccattgaggaaagtgaggagactttgaaaaacactaaagaaatccaaagaaaagcagaagaaaaatatgaagtattggaaaataaaatgaaaaatgcagaagctgaaagagagcgagaactgaaagatgctcagaaaaaactggattgtgccaaaacaaaggcagatgcatctagcaagaagatgaaagaaaaacaacaggaagttgaagctatcactctggaactggaagagctcaagagagagcatacatcttacaaacaacagcttgaagctgtaaatgaagctatcaaatcctatgaaagtcagattgaagtaatggcagctgaggtggctaaaaataaggagtcagtaaataaagctcaagaagaggtgaccaagcaaaaagaggtgataacagcccaagacactgtaattaagctaaatatgcagaagtggcaaaacacaaggagcaaaacaatgattctcagccttaaaattaaggaattagaccaccacatcagcaaacataaacgggaggctgaagatggtgctgcaaaggtatccaaaatgttgaaagattatgactggattaatgcagagagacacctctttggccaacccaatagtgcctatgatttcaaaactaacaaccctaaagaagctggtcagagacttcagaagttgcaagaaatgaaggagaaactaggaagaaatgtcaatatgagagctatgaatgtattgacagaagctgaagagcgatgcaatgacttgatgaagaagaagagaattgtagaaaatgacaaatccaaaattcttacaactatagaagaccttgaccagaagaaaaaccaagccctaaatattgcatggcaaaaggtgaacaaggactttgggtctattttttctactcttttgcctggtgctaatgctatgcttgcaccaccagagggtcaaactgttttggatggtctggagttcaaggttgccttaggaaatacctggaaagaaaacctaactgaacttagtggtggtcagaggtctttagtggccttgtcattaatactgtccatgcttctcttcaaacctgctccaatttatatccttgatgaggtagatgcagccttggatctttctcatacccaaaacattggacagatgctgcgtactcatttcacacattctcagttcattgtggtgtcactaaaagaaggtatgttcaacaatgcaaacgttcttttcaaaaccaagtttgtggatggtgtttctacagtagccagatttactcaatgtcaaaatggaaagatttcaaaggaagcaaaatccaaggcaaaaccacccaaaggagcacatgtggaagtttaaactacaaagttatttcttcatcttgacctgtttttttaaatgtaaacttttaaggacttgagataactaatttgtttatatacaaaaattaatgttactgtgttacttaacccatgttttctctttatataatcacttatcgcttacaaatgagcatatattcctcatctcttaactagtctaattatggtccaattattgtggttgtgattttatgcatatccatcaaaatgttttttttcttatgcgggtcttttatatattagggatcctgagatacccgattctatatgtaaaagctaatatacaaaaaagcagattaaattacatgataaatgtagctgaaaaaaaaaaaaaa

SEQ ID NO: 12180 - DNA, 6916 bp, Homo sapiens
ttttgtttttttttttttcggcggagatcctcgttggggctgggaaactcctgcaaaactcgagaccaggaagccagcccgcaccccaacccccaccaaagccacctactcttcttctgtgggaggccagtccacatccgctctcacccgagagagatattcagctggatccaaagtgactgatgaagggaaggaaatcatgtcaagcgaagccttgaaaaagctgccctgagacggtgtcccgccgaaagaatgttggctcaattaagaaacatcagggagataaattcaacccagtgtgtctaaaaatgactacaaaacgaagtttgtttgtgcggttggtaccatgtcgctgtctacgaggggaagaggagactgtcactactcttgattattctcattgcagcttagaacaagttccgaaagagatttttacttttgaaaaaaccttggaggaactctatttagatgctaatcagattgaagagcttccaaagcaactttttaactgtcagtctttacacaaactgagtttgccagacaatgatttaacaacgttaccagcatccattgcaaaccttattaatctcagggaactggatgtcagcaagaatggaatacaggagtttccagaaaatataaaaaattgtaaagttttgacaattgtggaggccagtgtaaaccctatttccaagctccctgatggattttctcagctgttaaacctaacccagttgtatctgaatgatgcttttcttgagttcttgccagcaaattttggcagattaactaaactccaaatattagagcttagagaaaaccagttaaaaatgttgcctaaaactatgaatagactgacccagctggaaagattggatttgggaagtaacgaattcacggaagtgcctgaagtacttgagcaactaagtggattgaaagagttttggatggatgctaatagactgacttttattccagggtttattggtagtttgaaacagctcacatatttggatgtttctaaaaataatattgaaatggttgaagaaggaatttcaacatgtgaaaaccttcaagacctcctattatcaagcaattcacttcagcagcttcctgagactattggttcgttgaagaatataacaacgcttaaaatagatgaaaaccagttaatgtatctgccagactctataggagggttaatatcagtagaagaactggattgtagtttcaatgaagttgaagctttgccttcatctattgggcagcttactaacttaagaacttttgctgctgatcataattacttacagcagttgcccccagagattggaagctggaaaaatataactgtgctgtttctccattccaataaacttgagacacttccagaggaaatgggtgatatgcaaaaattaaaagtcattaatttaagtgataatagattaaagaatttaccctttagctttacaaagctacagcaattgacagctatgtggctctcagataatcagtccaaacccctgatacctcttcaaaaagaaactgattcagagacccagaaaatggtgcttaccaactacatgttccctcaacagccaaggactgaggatgttatgtttatatcagataatgaaagttttaacccttcattgtgggaggaacagaggaaacagcgggctcaagttgcatttgaatgtgatgaagacaaagatgaaagggaggcacctcccagggagggaaatttaaaaagatatccaacaccatacccagatgagcttaagaatatggtcaaaactgttcaaaccattgtacatagattaaaagatgaagagaccaatgaagactcaggaagagatttgaaaccacatgaagatcaacaagatataaataaagatgtgggtgtgaagacctcagaaagtactactacagtaaaaagcaaagttgatgaaagagaaaaatatatgataggaaactctgtacagaagatcagtgaacctgaagctgagattagtcctgggagtttaccagtgactgcaaatatgaaagcctctgagaacttgaagcatattgttaaccatgatgatgtttttgaggaatctgaagaactttcttctgatgaagagatgaaaatggcggagatgcgaccaccattaattgaaacctctattaaccagccaaaagtcgtagcacttagtaataacaaaaaagatgatacaaaggaaacagattctttatcagatgaagttacacacaatagcaatcagaataacagcaattgttcttctccatctcggatgtctgattcagtttctcttaatactgatagtagtcaagacacctcactctgctctccagtgaaacaaactcatattgatattaattccaaaatcaggcaagaagatgaaaattttaacagccttttacaaaatggagatattttaaacagttcaacagaggaaaagttcaaagctcatgataaaaaagattttaacttacctgaatatgatttgaatgttgaagagcgattagttctaattgagaaaagtgttgactcaacagccacagctgatgacactcacaaattagatcatatcaatatgaatcttaataaacttataactaatgatacatttcaaccagagatcatggaaagatcaaaaacacaggatattgtgcttggaacaagctttttaagcattaattctaaagaggaaactgagcacttggaaaatggaaacaagtatcctaatttggaatccgtaaataaggtaaatggacattctgaggaaacttcccagtctcctaataggactgaaccacatgacagtgattgttctgttgacttaggtatttccaaaagcactgaagatctctcccctcagaaaagtggtccagttggatctgttgtgaaatctcatagcataactaatatggagattggagggctaaaaatctatgatattcttagtgataatggacctcagcagccaagtacaaccgttaaaatcacatctgctgttgatggaaaaaatatagtcaggagcaagtctgccacactgttgtatgatcaaccattgcaggtatttactggttcttcctcatcttctgatttaatatcaggaacaaaggcaattttcaagtttgattcaaatcataatcccgaagagccaaatataataagaggccccacaagtggcccacaatctgcacctcaaatatatggtcctccacagtataatatccaatacagtagcagtgctgcagtcaaagacactttgtggcactccaaacaaaatccccaaatagaccatgccagttttcctcctcagctccttcctagatcagagagcacagaaaatcaaagttatgctaaacattctgccaatatgaatttctctaatcataacaatgttcgagctaatactgcataccatttacatcagagacttggcccagcaagacatggggaaatgtgggccatctcaccaaacgaccgacttattcctgcagtaactcgaagtacaatccagcgacaaagtagtgtgtcctccacagcctctgtaaatcttggtgatccaggctctacaaggcgggctcagattcctgaaggagattatttatcatacagagagttccactcagcgggaagaactcctccaatgatgccaggatcacagagacccctttctgcacgaacatacagcatagatggtccaaatgcatcaagacctcagagtgctcgaccctctattaatgaaataccagagagaactatgtcagttagtgatttcaattattcacggactagtccttcaaaaagaccaaatgcaagggttggttctgagcattctttattagatcctccaggaaaaagtaaagttcctcgtgactggagagaacaagtacttcgacatattgaagccaaaaagttagaaaagatgcctttgagtaatggacagatgggccagcctctcaggcctcaggcaaattatagtcaaatacatcacccccctcaggcatctgtggcaaggcatccctctagagaacaactaattgattacttgatgctgaaagtggcccaccagcctccatatacacagccccattgttctcctagacaaggccatgaactggcaaaacaagagattcgagtgagggttgaaaaggatccagaacttggatttagcatatcaggtggtgtcgggggtagaggaaacccattcagacctgatgatgatggtatatttgtaacaagggtacaacctgaaggaccagcatcaaaattactgcagccaggtgataaaattattcaggctaatggctacagttttataaatattgaacatggacaagcagtgtccttgctaaaaactttccagaatacagttgaactcatcattgtacgagaagtttcctcataagcactgtggacaaaaaaagcggggaagacagcaagatttattggaagatacttacaggggaaattaatattttgactatttttatatataaagaagaactcaaaaaattatgttcaaatttgtacattaatgaaataatggaacttgtggttagagggaaagaaccactgtacagaatataaaggagactgttgaattcataccatataaaacttgttaggtttttaaacatagcaatcaaggctacaaaaacaaacctgtgttgtttttgtatagattgtaggtttatttttggatttcatatacatgactgaactgtgtgcaaggcaatagttagccttgattttagcccagagacagatggcagagctatctctctcatagcttttatgcccttatttttattcaactggtattaatgtttttctcctgaaactactttttttgatgtgggcaagagatttgaagtgttggcttttgctatgtgcatattgaattgaagagtgagtaggtgaaggtggtgctggtgggttcactttccaaggccagactaaaacagttattttctataaaaatctggaagcaaagaatggggatggggagagctacgtggtagtatgtttttattaggagaataatgcaataaaatatgtaatgtcttttttataaagcaaaaaagacaataattgcatttatgagctcggcaggatctgttcttgtcatagccattgactatacatttgctactggtgattcagtttttaattttttagtcacaggaaatttttaactctactgtagatgcatgtccatgcattttctgtgttatggaaatccactgatttttttttttttttcaaatggtggtacttgcaatctgttttataattagtgctccatttaaatctaatttataatttttattttaagcagcaaatgaaacaaaaatggccagttttaagattgtgttgcctgtaacacaaaatgttacgaaggtttaggaaagcctctttgatttttgtttggccttgcattgccttggtaaagtaaaaggaaacagtacacttggagctaggaaaccaaagcaagctttgtgaaactggcacagtgatagagaattgctgtggagagttatagagcaaagggatgggtccttgaggcctgccagtgtgtaaaggtgttcaaataaagggctgtttctacaggtaacattaaatgtgaactcaacacttccagagtctttaaagggtttctatgtgtatcagtgtaatagtgttttaccaccaactgcctttctttgttcctagttactgtaacaaatatttgatgatagaggtttattaattttgtttatccagaccattaattttatttgtttttgttctatgtaatcaaataaaatttgagtaacatgtaatggtaaggattaatgcatggttatttggaccagaaaaaagtgccatagaagaccaataactgtttagttgaggctagtctggaacctttcattagagcaatatttggttattgcacttcatttttatttactaagaaatgcaatttgggaatttttaatctgttatgctttgtttatcaaccttgattttaattaagacttttataagactagcttaaaacaccaaccaacattatttttgcaaaagtgagttggactcactttccattcttgctagtcagagtaagtaggcagcacttttaaaaatatgtgaactcaaatattgcacttctttcaagatgttatcaattggttattgtactgtatagttttaataattttgattgaaaccctttaacaactctttgtaaattttaactcattttagttgattttcagtactatttacataggaattgatttttatggatatagtagaagaaatgtgctgtattttgataaaattcacttattgtatgtgtgttgtaatctaaaaaaaaaaagaatgacaaacagcttctttaagacaagtctcggtgttccctttattcttagtttgtttttaaatattaattttggcattctaaaatagctaacatttcttttattgatttcagattttcacaggcacattctacttttaatcagaaatatatttaataagtataattgtgaagttttcaactactttaccttgaaccacatataccaattataattttggaaaaggaattaagcctcacggaacaatggatcttcagcaaaccttaacttcattgtctgcacattacattgaagtattataaatgcaacagatgttatatgcactggcattttatcctactctagttagttaaaattttatagtattcttgcaacacataaagttgcgtaagaaactttaccaagaggagtattatagccaagttttctttgaaagtattggaaaactaaaattaaatgacaaggactttgaattagaattttgctgtaataaagtttcaaaatttgaataaaataattaaattttttgagg

SEQ ID NO: 12181 - DNA, 5318 bp, Homo sapiens
agcgaagccaactgcagctgggataaagtgataatagataggactgacaaggaggcgtggccttccatcacaggaacagagactgaatctgcctcagaatgtactacagacactgactctgcctccaactgtggctcagagaacagtagcatggctacagggagtgcccagggcaacttcactggacataccaagaagacaaatggcaataatggcaccaatggcgcactcgtccaaagcccttctaatcagagtgcccttggagcagggggagcgaacagtaatggaagtgcggccagagtgtggggtgtagccacaggctccagctctggcctggctcactgctctgtcagtggtggggatggaaaaatggacactatgattggagatgggagaagtcagaattgctggggtgcttccaactccaatgctggcattaatcttaaccttaatcctaatgccaacccagctgcctggcctgtacttggacatgaaggaaccgtggcgacaggcaacccttccagtatttgcagtccagtcagtgccataggtcaaaatatgggcaaccagaacgggaacccaacaggcactttaggtgcttggggaaacttgctgccacaagagagcacagaaccacaaacgtccacttctcagaatgtgtctttcagcgcacaacctcagaaccttaacactgatggaccaaataacactaaccccatgaactcttcacccaaccctatcaatgcaatgcagacaaatggactgccaaactggggcatggctgttggtatgggggccatcatcccgccccacctgcaaggccttcctggtgctaatggatcatcagtttctcaagtcagtgggggcagtgctgaaggaataagcaattctgtgtggggactgtccccaggtaaccctgccacaggaaatagcaattctgggttcagtcaggggaatggagacactgtgaactcagcattaagtgctaaacaaaatggatccagcagtgctgtgcaaaaggaaggaagtggaggaaatgcttgggattcaggacctcctgctggtcctggaatactcgcctggggaaggggcagtggcaacaatggcgttggtaatatccattcaggagcttggggccaccccagccgaagcacctctaacggtgtgaatggggaatggggaaagcccccaaaccagcattccaacagtgacatcaatgggaaaggatcaacagggtgggagagtcctagtgtcaccagccagaaccctaccgtacagcctggtggtgaacacatgaactcctgggccaaagcggcatcttctggaactacagcaagtgaaggaagtagtgatggttctggcaaccacaatgaaggaagcactgggagggaaggaacgggagaaggccgaaggcgagataaagggattatagaccaagggcacatccagttgccaaggaatgatcttgacccaagagttctgtctaatactggttggggacagactcctgtaaagcaaaacactgcctgggaatttgaagaatcccctaggtctgaaaggaaaaatgacaatgggacagaggcctggggttgtgcagctactcaggcttcaaactcaggggggaagaacgatgggtccatcatgaacagtacaaatacctcttcagtatctgggtgggtcaacgcgccacctgccgctgtgccagcaaacacaggttggggagacagcaacaacaaagcgccaagtggcccgggggtttggggggactcgataagctctactgctgttagtactgctgctgctgccaagagtggccatgcttggagtggggccgcaaatcaggaggacaagtcacccacctggggtgagcctccaaagcccaaatcccaacactggggagatggacaaagatcaaatccagcctggagtgcaggagggggagattgggcagattcatcgtctgtccttggacacttgggggatgggaaaaaaaatggatctggatgggatgctgacagtaataggtcagggtctggttggaatgacaccacgagatctgggaacagtggctggggcaacagcacaaatacaaaggccaatccaggtacaaactggggggagactttaaaacctggcccccaacagaactgggctagcaaaccccaagacaacaatgtgagtaactggggaggagctgcttctgtgaaacagacaggaacagggtggatcggggggccggtaccggtcaaacagaaggacagcagtgaagcaactggctgggaagaaccctctccaccgtccattcgccgcaaaatggaaattgatgatggtacctcagcttggggggacccaagcaactataacaataaaactgtaaacatgtgggatagaaacaacccggtcatccagagcagtaccacgaccaataccaccaccaccaccaccactaccacgagcaacaccacacacagggtcgagacgccgcccccgcaccaggctggtactcagctgaatcgatcaccgttgcttggtccaggtaggaaagtttcatcaggctggggagaaatgcctaatgttcactcaaagactgaaaactcttggggagaaccatcctccccttctaccctggtggataatggcacagcagcatgggggaagccacccagcagtggcagcgggtggggagatcaccctgccgagccgccggtggcatttggaagagctggcgcacctgttgctgcctcagccctgtgcaaaccagcttcaaaatctatgcaagaaggctggggcagtggtggggatgaaatgaacctcagtaccagccagtgggaggatgaagaaggggacgtgtggaataatgctgcttcccaagaaagcacctcctcctgcagctcctgggggaacgcccccaaaaaaggacttcaaaagggcatgaagacgtctggcaagcaggatgaggcctggatcatgagccggctgatcaaacaactcacagacatgggcttcccgagagagccagctgaggaggccttgaagagtaacaatatgaatcttgatcaggccatgagcgctctgctggaaaagaaggtggacgtggacaagcgtgggctgggagtgaccgaccataatggaatggccgccaagcccctcggctgccgcccgccaatctccaaagagtcttccgtggaccgccccacctttcttgacaaggatggcggcctcgtggaagagcccacgccttcaccgttcttgccttccccaagcctgaagctccccctttcacacagtgcactccccagtcaggccctgggtgggattgcctccgggctgggcatgcaaaacttgaattcttctagacagataccgagtggcaatctgggtatgtttggcaatagtggagcagcacaagccaggaccatgcagcagccgccacagccaccagtgcagcctcttaactcttcccagcccagtctccgtgctcaagtgcctcagtttctatcccctcaggttcaagcacagcttttgcagtttgcagcaaaaaacattggtctcaaccctgcactattaacctcgccaattaatcctcaacatatgacgatgttgaaccagctctatcagctgcagctggcataccaacgtttacaaatccagcagcagatgttacaggcccagcgtaatgtgtccggatccatgagacaacaggagcagcaagttgcgcgcacaatcactaatctgcagcagcagatccagcagcaccagcgccagctggcccaggccctgctcgtgaagcagccaccaccgccaccgcccccgccgcacctgtctctgcacccctctgcaggcaaatcggccatggacagcttcccctcgcacccacagactcccggcctacctgacctgcagaccaaagagcagcagtcttcacccaacacctttgctccttaccctctcgctggactgaacccaaacatgaatgtcaacagcatggacatgaccggtggcttgtcggtgaaggacccatcccagtcccagtcacgcctcccccagtggacgcaccccaactccatggataacttgcccagtgccgcttcccccctggagcagaaccctagcaagcatggtgctatccctggaggtctaagcattgggcctccaggtaagtcctccattgatgactcctatggccggtacgatttaatccagaacagtgagtcaccagccagtcctcccgtagctgttccccatagctggtcacgtgccaaatctgacagtgataaaatctcaaatggctctagcatcaactggcccccagaattccatccgggagttccatggaaaggactgcagaatattgaccctgagaatgaccctgacgtcactcctggcagtgtccccactgggcctaccatcaacaccaccatccaggatgtcaaccgctacctcctcaagagtggaggtaaactgtcagacatcaaatcgacgtggtcctctggccctacctcccacacgcaagcctctctgtctcatgaactatggaaggtgcccagaaacagtactgcacccacgaggccacctccagggttaaccaatcccaagccctcctccacctggggtgccagccccctcggctggaccagctcctactcctcgggttctgcctggagcaccgacacctcaggaagaaccagcagctggctcgttcttcgaaacctcactccccagattgatggttctacactgcggacattgtgtttgcaacatgggcctcttatcacattccacctgaatctgactcaaggcaatgctgtggtccggtacagctccaaggaggaggctgccaaggcccagaagtctctgcacatgtgcgtcctgggaaacactaccatcctggccgagttcgctggtgaagaagaagtgaatcgcttcttagcccaaggccaggcgctgccacccacttccagctggcagtccagcagcgcgtccagccagccgcggctcagcgcagcgggcagctcccatggcctggtacgcagcgacgctggccactggaacgccccgtgcctgggtggcaaggggagcagtgagctgctgtggggcggggtgccccagtactccagcagcctgtggggcccgcccagcgccgacgacagcagggtgataggcagccccacgccgctaaccaccctgctgcctggggacctgctcagcggggagtccctgtaggcgctgccatcatcagcaccaggagagccgacccctcccgggacccctcccggctgggcggccccacagacccgctggaacccagcagcggccgc

SEQ ID NO: 12182 - DNA, 3434 bp, Homo sapiens
attagttgtctctgccgctggggaaggtaaagcggcgacggcgtcctcaggagctgtggggtcccctgctagaagtgggggactcggcgggggagtcatttaatacttcatgattagaacaaatatgtgaaagttcccaccaaccagtgagaatttcttccttcagacggttttggatcttactgcacagctttctgagaagttcttttggtgccatgttttgtggcttgcatcaaaagaggagtttgtcttcatgaagattcctaacattggtaatgtgatgaataaatttgagatccttggggttgtaggtgaaggagcctatggagttgtacttaaatgcagacacaaggaaacacatgaaattgtggcgatcaagaaattcaaggacagtgaagaaaatgaagaagtcaaagaaacgactttacgagagcttaaaatgcttcggactctcaagcaggaaaacattgtggagttgaaggaagcatttcgtcggaggggaaagttgtacttggtgtttgagtatgttgaaaaaaatatgctcgaattgctggaagaaatgccaaatggagttccacctgagaaagtaaaaagctacatctatcagctaatcaaggctattcactggtgccataagaatgatattgtccatcgagatataaaaccagaaaatctcttaatcagccacaatgatgtcctaaaactgtgtgactttggttttgctcgtaatctgtcagaaggcaataatgctaattacacagagtacgttgccaccagatggtatcggtccccagaactcttacttggcgctccctatggaaagtccgtggacatgtggtcggtgggctgtattcttggggagcttagcgatggacagcctttatttcctggagaaagtgaaattgaccaactttttactattcagaaggtgctaggaccacttccatctgagcagatgaagcttttctacagtaatcctcgcttccatgggctccggtttccagctgttaaccatcctcagtccttggaaagaagataccttggaattttgaatagtgttctacttgacctaatgaagaatttactgaagttggacccagctgacagatacttgacagaacagtgtttgaatcaccctacatttcaaacccagagacttctggatcgttctccttcaaggtcagcaaaaagaaaaccttaccatgtggaaagcagcacattgtctaatagaaaccaagccggcaaaagtactgctttgcagtctcaccacagatctaacagcaaggacatccagaacctgagtgtaggcctgccccgggctgacgaaggtctccctgccaatgaaagcttcctaaatggaaaccttgctggagctagtcttagtccactgcacaccaaaacctaccaagcaagcagccagcctgggtctaccagcaaagatctcaccaacaacaacataccacaccttcttagcccaaaagaagccaagtcaaaaacagagtttgattttaatattgacccaaagccttcagaaggcccagggacaaagtacctcaagtcaaacagcagatctcagcagaaccgccactcattcatggaaagctctcaaagcaaagctgggacactgcagcccaatgaaaagcagagtcggcatagctatattgacacaattccccagtcctctaggagtccctcctacaggaccaaggccaaaagccatggggcactgagtgactccaagtctgtgagcaacctttctgaagccagggcccaaattgcggagcccagtaccagtaggtacttcccatctagctgcttagacttgaattctcccaccagcccaacccccaccagacacagtgacacgagaactttgctcagcccttctggaagaaataaccgaaatgagggaacgctggactcacgtcgaaccacaaccagacattctaagacgatggaggaattgaagctgccggagcacatggacagtagccattcccattcactgtctgcacctcacgaatctttttcttatggactgggctacaccagccccttttcttcccagcaacgtcctcataggcattctatgtatgtgacccgtgacaaagtgagagccaagggcttggatggaagcttgagcatagggcaagggatggcagctagagccaacagcctgcaactcttgtcaccccagcctggagaacagctccctccagagatgactgtggcaagatcttcggtcaaagagacctccagagaaggcacctcttccttccatacacgccagaagtctgagggtggagtgtatcatgacccacactctgatgatggcacagcccccaaagaaaatagacacctatacaatgatcctgtgccaaggagagttggtagcttttacagagtgccatctccacgtccagacaattctttccatgaaaataatgtgtcaactagagtttcttctctaccatcagagagcagttctggaaccaaccactcaaaaagacaaccagcattcgatccatggaaaagtcctgaaaatattagtcattcagagcaactcaaggaaaaagagaagcaaggatttttcaggtcaatgaaaaagaaaaagaagaaatctcaaacagtacccaattccgacagccctgatcttctgacgttgcagaaatccattcattctgctagcactccaagcagcagaccaaaggagtggcgccccgagaagatctcagatctgcagacccaaagccagccattaaaatcactgcgcaagttgttacatctctcttcggcctcaaatcacccggcttcctcagatccccgcttccagcccttaacagctcaacaaaccaaaaattccttctcagaaattcggattcaccccctgagccaggcctctggcgggagcagcaacatccggcaggaacccgcaccgaagggcaggccagccctccagctgccagacggtggatgtgatggcagaagacagagacaccattctggaccccaagatagacgcttcatgttaaggacgacagaacaacaaggagaatacttctgctgtggtgacccaaagaagcctcacactccgtgcgtcccaaaccgagcccttcatcgtccaatctccagtcctgctccctatccagtactccaggtccgaggcacttccatgtgcccgacactccaggtccgaggcactgatgctttcagctgcccaacccagcaatccgggttctctttcttcgtgagacacgttatgagggaagccctgattcacagggcccaggtaaaccaagctgcgctcctgacataccatgagaatgcggcactgacgggcaagtgacttctgcaagcctgcggctggtcccaatgccctgaatcacctctctcatggaagaaccaattaacaccaatgaatcaaccattaaaaa

SEQ ID NO: 12183 - DNA, 4877 bp, Homo sapiens
atggatggaggtgctttaactgatacaagtctcacagattcctattttagcaccagctttattggagtcaatggatttggaagccctgtagaaacaaaatatcccctgatgcagagaatgactaatagtagcagctccccaagccttctaaatgacagtgccaagccatattcagcccatgatcctctaacatcacctgcttcatccttgtttaatgactttggtgccctcaacatctctcagagacgaaagacaccaaatcctactgcaagcgagtttattcctaaaggaggatcaacctccaggctgagtaacgtgtcccagtcaaatatgtctgccttctctcaagttttctctcacccatccatgggaagccctgctactgctggattagcgccaggaatgtcgttgtctgctgggtcttcccctcttcattcccccaagattactccacatacttctcctgctcccagaagaagaagtcacactccaaatccagcaagttacatggtgccttctagtgcctctacatctgttaataatcctgtttctcagactccgtcttctggtcaggtgatccaaaaggaaactgttggtgggacgacttacttctatacagacacaactccagcacctttgactggaatggtgtttccaaactatcatatttatcctccaactgcacctcacgttgcttatatgcaaccgaaagcaaacgcaccttccttcttcatggctgatgaactccgacaggagctgatcaacagacatttaataacaatggctcaaattgatcaagcagatatgccagcagttcctacagaggttgacagctaccatagcctattccctctagaaccactgccacctcccaaccggatacagaaatcaagtaattttggatatattacatcttgctacaaagctgtaaacagcaaagatgatctgccatattgccttcggaggatacatggttttcgtcttgttaacacaaagtgcatggtgttggtcgacatgtggaagaaaattcaacactcaaatatcgtaactttgcgtgaagtatttaccactaaagcatttgctgagccctctcttgtgtttgcatatgatttccatgctggaggagaaactatgatgagcagacactttaatgaccctaatgctgatgcctacttcaccaagagaaagtggggtcagcacgagggaccattgcccaggcagcatgctggattattgccagaatctcttatttgggcatatattgtccaactaagttctgcattgcgtaccattcatacagcaggtttggcatgtcgagttatggatccaacaaagattctgataactggcaaaacaaggttgcgagtaaattgtgttggagtttttgatgttttaacatttgataacagtcaaaataataatccattggcattaatggcccagtaccagcaagcagatctgatatcattaggaaaagttgtgttggctttggcttgcaactctttggcaggaattcagcgagagaatttacagaaagccatggaactggtgacaatcaactattcctctgacctgaagaatctgattttgtatttgttgactgaccaaaacaggatgcgaagtgtaaatgacatcatgcccatgattggtgctcgattttatactcaattggatgctgctcaaatgagaaatgatgtcatagaggaagaccttgcaaaggaggttcaaaatggaagactgtttaggctcctagcaaaattgggaacaatcaatgagaggccggagtttcagaaggatcccacttggtcagagactggagaccgttatctgttgaaactctttagggatcatctttttcatcaggtgacagaagcaggtgctccctggattgacctcagtcatataatttcttgtcttaacaagctagatgctggtgtgccagaaaaaataagcctgatttccagagatgagaagagtgtacttgtggtgacctacagtgacttaaagcgctgctttgaaaatacttttcaagaactgattgcagctgcaaatggtcagttgtagtatttgctaaaaaagcacgcaggacatggctaaagaccttaaccaatagcaaattgcactacagctgaacttttcatcatctcattcacatttgggaaacgaacaggagatgagcaaagctgcttgcacttcagtcaggtacactgttacttgaaaggaagaatgtttcacttacccaagagctatggctgccattggaggctgttatctgtgaagaatttattttagatttaggagcaccatcaggtgaatgatgttcctgcttttgttttttccacttgtatatgcactaattttaattttttaaagactttttctgatctttgaacttttgccacattgtatacttataatgggaaactttgcaaggacatttttgggaagcaatgctgggcagcgtttttgccattgagggttgcagaatttgctctttttgggatgggttgccctgaataacattacggaccaggtaaataatttcatagaagttcagtatagtacgtaattcttgtaagagtatcgtatgcaagctctctgtatgccacccactgttagttcaaattgagatttttgttttgttttgttcttaagaacataccaagaaaataccagtgaattgttggatatgaattccctgttagttgatttaaatcctttctgaataaagatcagataaacagtaactgaaggagcatgtatagctctttccttcaaattcaactagagcctttttaaaaagacatttgcctgctagtcagatacatttacatttatgcaaattttttaaataggagaaaattaagaaattgtgttaaaggcctaaagttcaggagtgtattactttaggttctttccagtttgctggtttttttttttttttttttttttttttttgggcgggggggaggtttatgaagttttgctctttgaaccacagctttattatggtcctttacactggagacagacacagagacactgttcagaagatgaactaaactcagcagtggtctggtatcaagagctttctgatgttttacagcctgaatttggagggataacgatctgctgtgcctttgcagtcactgcttagcccaaagtaatagtacttttgataataactcactctgtgcgatattcctgaataagtccatctcaaaagtttgggattttcctcctcttaactttcttaatatttggacatgcagttgtcgccaaacttgggtattcatggaatttctagtaaatgaaatacctatactttgatactgaagactgccaaatacataggaattttctttcttaaaaaacagtaatgaagactatatctcctttcccagcactgaatgttttactagcactgggtgctcaccatgcaactgaagaaaatgtggaaactcaaaaggtcaggacagacttccaagcacttgcaactgatgttactgtcttcaattttaataattacacatatttgtatatttcagagaagtttttaatatttctctgtccactttttataagctttaaaatgattttctctgccttgagatttgcatcaagaaaaagcacctctcttcacctgaaagctttgaagactagagacacgctttacacgttttaacaagtatattgagtccacgtttggtagcatcagttgttgagttaaaaagaaaattattgcatttgatctggatggattttaaaagaatataatgttcaatattaaaaggataattcacatttgccaccataatgttcttttttatgtaaaaagaagaacttggagacattaacatgaaaaagtcttttatcattagctcatgtatttgaggaagagcagctgtctttttatatgttttttgacaaatcatattgtattcttttgtacaaaaaagaactacttgtattctagaagaaatatgaaatgcttaatttataagcgggctggagattttttccaatattgttttctttgaaaatgaaaggggatcatctattttagttttggggtctgggaactttttgaaaatttaatttgtggaccaatgttttgtgaaagctaaagagggcaggggttaaaatagggcttgaatttctcattctgtatagaccagcaaacttccctgtgcaaggcaagtttacatcacaaatccaagaatgtttgcatcctaaatgctagtttgcttcagcccctagttaacctcaggacttggtttgcatataaaaggtagacagctgatatgttttcatgaataaatattgtcagccagaaaaggttggtgtcaggtaatgcatatttttttaagctttgttttatatttatttttcatttagtttttattgggaatggttttcaaagaactctcagttctgcctaggtgtttttgggggagccctgttttccatagtgtaattccatttaagaggttgtctaaaagtctttttaattaatagaaagattttaatatccaagagtagtcaaattaaggatataaactttccacaccttcctgtcgtgacagataaaagcacagaaaggacaacccttgaaatcatgtaacgttggtcatttcaatattttgtacctgttttaaattctgttagtgtatttacttcattgtaaatatttttgagggtacctttgtattttgcttttgaccttggttctgtgatttggatgtcaacaacttccctaaaaagcaccagtgtgttaggttctaatgtcatgacccaatttgtgttattcatctttaatcctgttttcagtctctatgtgtacagcagtatttttaataaagaattacagagataaa

SEQ ID NO: 12184 - DNA, 7054 bp, Homo sapiens
ccgcggcctgggcctgcgccgctcagctctctggaaactagcgcctcagctgcgcggcgcgtaggtcgcggggagctccgaaccgccggcgcccggccatggcggtctccaggctagatcgcctttttattttactggatactggcactactcctgttacaagaaaagctgctgcacagcaacttggagaagtggtgaagcttcatccccatgaactaaataatctcctgtctaaagtgttgatatatttaaggagtgcaaattgggatacccggattgcagcaggacaagctgttgaagctatagtgaaaaatgtacctgagtggaatccagtgccgagaaccagacaagaacctacttccgaaagttctatggaagattcacctactacagagcgattgaattttgacagatttgatatatgtagattgttacaacatggtgcatcactcctgggatctgctggtgccgaatttgaagtccaagatgaaaaatcaggtgaagtggatcctaaagagaggatagcacgccaacgaaaattattacagaagaaacttggccttaatatgggagaagcaattggaatgagtactgaagaacttttcaatgatgaggatttggattataccccaacttcagcatcctttgttaacaaacaacctactcttcaggcagctgaattgattgactcagagtttcgagcaggaatgagcaatagacaaaagaacaaagctaaaagaatggccaagttatttgcaaaacagagatccagggatgcagtggaaactaatgagaagagcaatgatagcactgatggggagccagaagaaaagagacggaaaatagcaaatgttgttattaatcagtctgcaaatgattccaaagtcttgattgataatattccagacagctcttccttaattgaagagacaaatgaatggcctttggaaagcttttgtgaagaactttgcaatgacctttttaatccctcctgggaggttcgacatggtgcaggcactggacttagggaaattcttaaagctcatgggaaaagtggtggtaaaatgggtgacagcactttagaagagatgattcagcagcatcaagagtggttggaagacttggttattagactcctttgtgtttttgcattagacagatttggagactttgtttctgatgaagttgtggcaccagttcgtgaaacttgtgctcaaacattaggtgtggttttaaaacacatgaacgaaacaggagttcataagactgtggatgtgctgctaaaattacttacacaagaacaatgggaagttagacatggtggtctgctgggaataaaatatgctttggcagtccgtcaggatgtaattaatactttattgcctaaagttttaactagaataattgaaggactccaggatcttgatgatgatgtcagagctgttgctgcagcatcattagtgcctgtagtagaaagccttgtctatcttcagacacaaaaggtgcccttcattataaatacattgtgggatgctcttctggaattagatgatctaacagcttcaacaaatagtattatgactctcctttcatccttgttaacttaccctcaggtccaacaatgcagtattcagcagtcactgacagttttagttccacgtgtctggccttttttgcatcacactatatcatcagttcgaagagcagcattggaaactctgtttacgttattatcaacacaggaccagaactcttcatcttggcttatacctatactgcctgatatgctccgacacatttttcagttctgtgttttggaaagcagccaggaaattctggaccttattcacaaggtttggatggaactgttgagtaaggcttcagttcagtatgtggtagcagctgcttgcccatggatgggtgcttggctttgcttgatgatgcagccttctcatttacctatcgatttaaatatgttgctagaagtaaaagctagagccaaggaaaaaacaggtggtaaggtgcgccaaggccaaagccagaataaagaagtacttcaggagtatattgcaggtgccgacaccatcatggaagacccagccaccagggattttgtagttatgcgggccagaatgatggcagccaagttgttaggagcactttgttgctgtatttgtgatccaggtgtaaatgtggtaactcaagaaattaaaccagctgaatccctgggccagttactactcttccatttgaactccaagtctgctttacagaggattagtgtagctttggtaatctgtgaatgggctgctttacaaaaggagtgtaaagctgttaccttagctgtgcagccgcgtttacttgatatcctttcagaacatttatattatgacgaaattgccgttccattcacacgaatgcagaatgaatgtaaacaacttatatcatcattagctgatgtacatattgaagttggtaatcgagtaaacaacaatgttttaacaatagatcaagctagtgacttggtcactactgtttttaatgaagccacatcatctttcgatttaaatcctcaagtgttacaacagttagatagtaaacgacagcaggtccaaatgacagttacagagaccaaccaggagtggcaagtgttgcagttgagagtgcatacttttgctgcctgtgcagttgtgagcttgcagcagcttccggagaaattaaatcctatcataaaaccattaatggagacaattaaaaaagaagagaatacactagtgcaaaactatgcagctcagtgcatagctaaactccttcagcagtgcacaacaaggacgccctgtcccaattcaaaaattattaaaaacctctgtagctcactttgtgtggacccatatctaactccttgtgtcacatgtccagtaccaacacaaagtggccaggaaaattctaaaggatccacctcagaaaaagatggaatgcaccatactgtcaccaagcacagaggtataattacactctacaggcaccagaaagctgcctttgctatcacaagtaggcgaggtcctacccccaaagcagtaaaagctcaaatagcagatcttcctgcaggaagtagtggaaatattcttgttgaacttgatgaggcccagaagccttacctggtacaacggagaggagctgaatttgctttgacaactatagtaaagcattttggtggtgaaatggcagtgaagttgccacatctctgggatgctatggttggcccattgaggaatacaatcgacataaataattttgatggaaaatccctcctggataagggagatagccctgctcaagaattggtgaattctctgcaggtttttgaaacagcagcagcttcaatggattctgagcttcatcccttgttggtccagcatttgccacatctttatatgtgccttcaataccccagtactgcagtgaggcacatggctgctcgttgtgtaggtgtcatgagcaaaatagctaccatggaaacaatgaatatttttttggagaaggttcttccgtggctgggagcaattgatgacagtgtcaaacaagagggtgcaattgaagcacttgcctgtgtaatggaacaactagatgttggtattgttccatatattgtccttttagttgttcctgtattaggaagaatgagtgatcagacagacagtgtgagattcatggccacgcagtgctttgcaacgctaattagactcatgccacttgaggcaggcattccagaccctccaaacatgtcagcagaattaatccaattgaaagccaaggagcgacactttttggagcaattgttagatgggaaaaaattggaaaattataaaattccagtaccaatcaatgctgaactcagaaaatatcagcaggatggtgtgaactggttagcatttcttaataagtataaacttcatggaattctgtgtgatgacatgggtttaggaaaaactttacagtccatctgcattctagcaggagatcattgtcatagggcccaggaatatgcaagatcaaaattagcagaatgtatgccacttccttccttagtggtttgtccgccaacattaacaggccattgggtggatgaagtaggtaaattttgctctagagaatatctcaacccgttgcattacactggacctcccactgaaagaataaggttacagcaccaagtaaaaaggcacaatctaatagtggcttcatatgatgttgtgaggaatgacatagatttctttagaaatattaaatttaactactgcattcttgatgaaggccatgtcatcaaaaatggaaaaacaaagttgtcaaaagcagtaaaacaactgactgctaattataggattattctttctggaacaccaatccagaacaacgttttggagctgtggtcattatttgatttcctcatgccaggatttttgggtactgaacgccagtttgctgctcgatatggtaaacctatattagcaagtagggatgctcgaagctccagtcgagagcaagaagcaggtgttcttgctatggatgcgctgcaccgccaagtactaccgtttcttttgagaagaatgaaagaagatgttttgcaggatcttccacctaaaattattcaagactattattgtactcttagtcctctccaggttcagctctatgaagattttgctaagtctcgtgccaagtgtgatgttgatgaaacagtttcttcagctacactttctgaagaaactgaaaaaccaaagcttaaagctacaggccacgtattccaggcattacagtacttacgtaaactgtgcaaccatccagcattagtcttaacacctcaacatccagaattcaagaccactgccgaaaaactggcagttcagaattcttctctacatgatattcaacatgcccctaagctctcagctttgaaacaattgctgttggactgcggtttgggaaatggcagcacttccgagagtggcacagagtctgttgtggcccagcacaggatactgatattctgtcagctgaaaagcatgcttgatatagtagagcatgatctcctcaaacctcacttgccctctgtcacttatttgagattagatggcagcatacctcctggtcagaggcattccattgtttcccggtttaataatgatccatctatagacgttctgttacttaccactcacgttggtggcctgggacttaatttgacaggcgctgacacagtagtatttgtggagcatgactggaatcctatgcgagatctacaagccatggaccgggcccatcgcattgggcagaaacgtgtggttaacgtataccgattgataaccagaggaacattggaagaaaaaataatggggttgcagaaattcaagatgaacatagcgaatactgttattagccaagagaattctagtttgcagagcatggggactgatcagcttcttgatctgtttactcttgataaggatggcaaagcagaaaaagctgacacctctacttctgggaaagcaagtatgaaatcaattcttgaaaacctgagtgatctttgggatcaagagcagtatgattcagagtacagcctggaaaattttatgcattctctcaagtaactatcaaatattgtaaatgcaattgctgctagttcagttacatttctgctgatattcagcaaatttctaagtttatggtgaacttttaactcaatgtgtaaatagatctggagaatattcagcataatgctggctcttgtttcactgggggaaacaagttattctcaaatatttgcactgtattaaatttaaatgttaatgtgaaatggtttaaattttacatgctgaaaagctgcagagcagaggaaccaaaccaggtttatttgtgctaccaggaggtgttcttaatgggaacaggcctcctatctttagtcactttgtacaggatgatatccatgagtactttagtgtttgtatatgttttttcttttaaatagaacttgtttttataattgatttaaaatagggctttttttctataaaagccttaatgagccataattttaagaatataagaataatgactatgatattggtcagtcttagaacatgaaaatgtcagacaatgaatttaatcgggcccttggtggaaacatttatatatttaatgcagatgcatagtgtttttcaaatctttaacatcattttttcaacttttaagatataatatcaactattctaaatacaggtaatggtatatttaaggctaccataacatcctatttagagggtggttttttttaatttatctaatggctacgatatagccagattcaaataacatatgtactcaataggtttcaatcatatatataatatattttttgtaactatgaacatacacagttttccagaaatagattttacactgtttagaattccaacacctacagtggaaagactgtttattgtagtaatgcatggctgaagcataaaagggagagagaatttctttatatacacaaacatacatgaatatgcatatctatatgcatagatgtacctatcctgcacccaaaaaggtgcctggtattggcactaaaatcatgtagttatactgggcagcaataataattgggcatgaggctgattactcaatggtgagggtaggtatatgtagatagatgtgcatgtatgtgtttgtatatataattttataagtttcacgcataaattaatacatgcctgtgtgcatacatatgtatgggatatatttgtatatatatgtacaggtaataaacatccccaaggtttgtggctggccatacacataggcatcagtttaacaaccatcagacctcagctgtacaataacaggtgttttgtttaattaaaattatactgttctgcagcatttagacatttgtcacatttcattagctttgacaaccatactgtaacattaaacctagcattccacaagagaataaatataagattgaaactgtaaaaaaaaaaaaaaaaaa

SEQ ID NO: 12185 - DNA, 3413 bp, Homo sapiens
aaaaaggaactgggatcgcgccgcggcggttcctgtccttacagttgcgctgcccagggaccgatgttgcgcgaggaaaatgcgggacgcccaggtcggtgctcggcccagacttatgcccgtgttttcacagcccacactcgtgcccgaagccccttaccccgccccgggctgtggtctgtgggctgtgggacgagctgcggcgcgggccatttctgagcagtggaggtttcaagtaatccactaacaaccagttccaaattctgtcatcaaatcctgtgctgctgttcctcgtggtaatagatgcatattatttcttttatttaaaagaaatgaatgtgactagtattgcattaagagctggaacttggcttttagctgcatggcatgttaaagtacctccgatgtggctggaagcttgtattaactggattcaagaagaaaataataatgttaacttgagtcaggcccaaatgaataaacaagtgtttgagcagtggctccttactgatctgagggatttggagcatcctcttttacccgatggcattttagaaattccaaaaggagaattaaatggattttatgctctgcagattaattccttggttgatgtaagtcagcctgcatactcccagatacagaagttgagaggaaagaatacaacaaatgatctagttacagctgaagcacaagtaaccccaaaaccttgggaagcaaagccttcacgaatgttgatgctgcagctaactgatggaatcgtacaaatacagggaatggaatatcagcctattccaattcttcatagtgatcttcctccaggtacaaaaattttgatttatggaaatatatctttccgtcttggtgttctcttattgaaaccagaaaacgtgaaagtgttaggaggtgaagtagatgctcttttagaagaatatgcccaagaaaaagtacttgcaagattaataggggaacctgatcttgtagtttcagtcataccaaacaattctaacgaaaacattcccagagttacagatgttctagatcctgcattaggtccttctgatgaagaactcttggcaagtcttgatgaaaatgatgagcttacaacaaataatgacacttcctcagaacgatgtttcaccacaggtagttcctcaaataccattcccacaagacagtcaagttttgagccagaatttgttatttctccaagaccaaaagaggaaccatcaaacctatctatacatgtaatggatggagaattagatgacttttcactggaggaggccttgcttttagaagaaactgtccagaaagaacagatggaaactaaggaattgcaaccattgacttttaacagaaatgccgatcgaagtatagagagattttcacataatcctaatactacgaataacttttctttgacttgcaaaaatggaaacaataattggagtgaaaaaaatgtatctgaacaaatgactaatgaagacaaatcatttggttgtccatctgttagagaccaaaacaggagtattttttcagttcattgtaatgtacccttagcccatgattttacaaataaagaaaagaacttagagacagataataaaataaaacaaaccagcagttcagatagccattccttaaataataaaatattaaatagagaggtggtcaactatgtacagaaaaggagttcacaaatttctaatgaaaatgattgtaatttacagagttgttctttaagatcatcagagaatagcattaatctttctattgccatggatttgtattctccaccctttgtctatttgtctgttctaatggccagcaaaccaaaggaagttacaacagtgaaagtgaaagcatttattgtaaccttaactggaaatctctcaagttctggtggtatttggagtataactgcaaaggtgtctgatggtactgcatatctagatgtagactttgtggatgaaatacttactagcttgatagggttctcagtaccagaaatgaaacagtcaaaaaaggatcctcttcaataccaaaagttcctggaagggttgcagaaatgtcaaagagatctaatagatttgtgctgtctaatgactatttcatttaatccttccttgtctaaagcaatggtactggcattacaagatgttaatatggaacaccttgagaatctaaagaagcggttaaataaataattaaactaaaatagtattaggaacaattaaaaacaacaaggaaatatttagaatttgttcacaattttacttatgatactttgtgtaaaaaggaaaaatgaaatttcatagcttatttcagtttaattttaaagtgtttaatcatgtttgttatatgtggagcttttgaaaataagttaatctttttttttttttttaatgtcagggtattgctctgttgcccaggctagagtgcagtggcatgatcataggttattgcatcaacctcttgagctcaagcgatcctcctgccttagcctcttgagttgctgggactataggcatgtaccaccatgcccagctaatttataattactattattgttttgtagggacagagttttgctatgttgcccagattggtctcaaactcctggcctctcactcctgccgtcatggcctccaaagtttaatttttttaaaagtaactgttagatggaggaatatggtgacccactattgttgagaaatttgttttccacttgtcacgtcacataagatgattgctaaaatattgtactggtgttcggtggtgagtcatatttttgaaagttaataattataaataggtaatttccttctaatatgttggtactgtctatggccataccaccctgaacatgcctgagcttgtcataatatgttgagtacccaaaagatttgtttatattgttaatcttagggaaaaaaaattaaaatccagtagatcagaacatcaggctttcagatacaaattgatttactggtttttattttgctgattataatatttggtatatttaaggtaatctagttaactagatgctatttcatagattatattgaatgatttaaaactttattttcaaggatagtttattttaaatggcatattgaaaacatcattattaagatccagtaggtaggacatttattggattaaaatgaagcatttatctatgtctttaggtgtcattgttccctttctgaattagctgtacatataagccttcctttggttttaagtactgatttttttttaaaaaaagagggactgtttaccattcttccactgtgctgttataaagttgtatttgaaaggtaatgttgtttttattaatcttttgtcttaaaataatttaaagtgctttgaattttaaaacattaaacaaatccttaaataac

SEQ ID NO: 12186 - DNA, 6282 bp, Homo sapiens
tccgggcgcccagactctgagagagagcgacggccatcatagaacagcgaaggcagtcgatcggcctgcggtccgcttcggcattcgcaggccgcaggcgggaggctagagcccccaggcgcacctcgccccaaccgcccgcggctcgggcagctctgcagagacgtcgtggcggcagggccagcacccattggtccgccacagccctccgccctccccctcgccacgcttattggccggagcggcggcgctcgccgggtaggcggtggcggcgtccctcccttgcgccggccctcaagaggcgacgaggaagcggccgcctccctgcgccccgcccctccggctagctcgctggctcccggctcctcccgacgtctcctacctcctcacggctcttcccggcgctctcctggctcccttctgccccagctccgtctcggcggcggcggggcagttgcagtggtgcagaatggctgacctcagtcttgcagatgcattaacagaaccatctccagacattgagggagagataaagcgggacttcattgccacactagaggcagaggcctttgatgatgttgtgggagaaactgttggaaaaacagactatattcctctcctggatgttgatgagaaaaccgggaactcagagtcaaagaagaaaccgtgctcagaaactagccagattgaagatactccatcttctaaaccaacactcctagccaatggtggtcatggagtagaagggagcgatactacagggtctccaactgaattccttgaagagaaaatggcctaccaggaatacccaaatagccagaactggccagaagataccaacttttgtttccaacctgagcaagtggtcgatcctatccagactgatccctttaagatgtaccatgatgatgacctggcagatttggtctttccctccagtgcgacagctgatacttcaatatttgcaggacaaaatgatcccttgaaagacagttacggtatgtctccctgcaacacagctgttgtacctcaggggtggtctgtggaagccttaaactctccacactcagagtcctttgtttccccagaggctgttgcagaacctcctcagccaacggcagttcccttagagctagccaaggagatagaaatggcatcagaagagaggccaccagcacaagcattggaaataatgatgggactgaagactactgacatggcaccatctaaagaaacagagatggccctcgccaaggacatggcactagctacaaaaaccgaggtggcattggctaaagatatggaatcacccaccaaattagatgtgacactggccaaggacatgcagccatccatggaatcagatatggccctagtcaaggacatggaactacccacagaaaaagaagtggccctggttaaggatgtcagatggcccacagaaacagatgtatcttcagccaagaatgtggtactgcccacagaaacagaggtagccccagccaaggatgtgacactgttgaaagaaacagagagggcatctcctataaaaatggacttagccccttccaaggacatgggaccacccaaagaaaacaagaaagaaacagagagggcatctcctataaaaatggacttggctccttccaaggacatgggaccacccaaagaaaacaagatagtcccagccaaggatttggtattactctcagaaatagaggtggcacaggctaatgacattatatcatccacagaaatatcctctgctgagaaggtggctttgtcctcagaaacagaggtagccctggccagggacatgacactgcccccggaaaccaacgtgatcttgaccaaggataaagcactacctttagaagcagaggtggccccagtcaaggacatggctcaactcccagaaacagaaatagccccggccaaggatgtggctccgtccacagtaaaagaagtgggcttgttgaaggacatgtctccactatcagaaacagaaatggctctgggcaaggatgtgactccacctccagaaacagaagtagttctcatcaagaacgtatgtctgcctccagaaatggaggtggccctgactgaggatcaggtcccagccctcaaaacagaagcacccctggctaaggatggggttctgaccctggccaacaatgtgactccagccaaagatgttccaccactctcagaaacagaggcaacaccagttccaattaaagacatggaaattgcacaaacacaaaaaggaataagtgaggattcccatttagaatctctgcaggatgtggggcagtcagctgcacctactttcatgatttcaccagaaaccgtcacaggaacggggaaaaagtgcagcttgccggccgaggaggattctgtgttagaaaaactaggggaaaggaaaccatgcaacagtcaaccttctgagctttcttcagagacctcaggaatagccaggccagaagaaggaaggcctgtggtgagtgggacaggaaatgacatcaccaccccaccgaacaaggagctcccaccaagcccagagaagaaaacaaagcctttggccaccactcaacctgcaaagacttcaacatcgaaagccaaaacacagcccacttctctccctaagcagccagctcccaccaccattggtgggttgaataaaaaacccatgagccttgcttcaggcttagtgccagctgccccacccaaacgccctgccgtcgcctctgccaggccttccatcttaccttcaaaagacgtgaagccaaagcccattgcagatgcaaaggctcctgagaagcgggcctcaccatccaagccagcttctgccccagcctccagatctgggtccaagagcactcagactgttgcaaaaaccacaacagctgctgctgttgcctcaactggcccaagcagtaggagcccctccacgctcctgcccaagaagcccactgccattaagactgagggaaaacctgcagaagtcaagaagatgactgcaaagtctgtaccagctgacttgagtcgcccaaagagcacctccaccagttccatgaagaaaaccaccactctcagtgggacagcccccgctgcaggggtggttcccagccgagtcaaggccacacccatgccctcccggccctccacaactcctttcatagacaagaagcccacctcggccaaacccagctccaccaccccccggctcagccgcctggccaccaatacttctgctcctgatctgaagaatgtccgctccaaggttggctccacggaaaacatcaagcatcagcctggaggaggccgggccaaagtagagaaaaaaacagaggcagctgctacaacccgaaagcctgaatctaatgcagtcactaaaacagccggcccaattgcaagtgcacagaaacaacctgcggggaaagtccagatagtctccaaaaaagtgagctacagccatattcagtccaagtgtggttccaaggacaatattaagcatgtccctggaggtggtaatgttcagattcagaacaagaaagtggacatctctaaggtctcctccaagtgtgggtctaaggctaacatcaagcacaagcctggtggaggagatgtcaagattgaaagtcagaagttgaacttcaaggagaaggcccaggccaaggtgggatccctcgataatgtgggccacctacctgcaggaggtgctgtgaagactgagggcggtggcagcgaggctcctctgtgtccgggtccccctgctggggaggagccggccatctctgaggcagcgcctgaagctggcgcccccacttcagccagtggcctcaatggccaccccaccctgtcagggggtggtgaccaaagggaggcccagaccttggacagccagatccaggagacaagcatctaatgatgacattctggtctcgtcttccgtctcccccgtgttcccctcttgtctcccctgttcccctctcccttccctcctcccatgtcactgcagattgagacctacaggctgacgttccgggcaaatgccagggcccgcaccgaccacggggccgacattgtctcccgccccccacacttccctggcggccccaactcgggctcccgggtccttggccccctttcccgggctgtccactagaccagtgagcgcttgggcgccgtgctgggcagcccgctaggctcgccttccctcctgctttgcgtgcccggggcagcagcagccctgccccacacctcctctcactccccagcctgggcccatctccctgctttggtcttgccccatcactgcgccactgctccgtggaggaggttgggagggggttggggtggttgaggctaagttgggatctaggagaggagaaccagattctatcctcatctttttttggttctttggtccaaacccaaaagaaactgacatgccctcccttctccctggatctacctggagggaagagtggaggtggattccgagtggtgacaggacgctgaccgtggagcttaagccactgcctctccctctggtcccacaaatgggcgcccccccctccccatgcaggtggtgtcgggcccttcttgctgccctgccccaagttgggggtcagtgctgcctgtccccatgcttaacatacccgcctagctgctgtcacatttttcttgttttgtccttttatttttttctaataacctaaaaactggcaaaatagttctgcaggttgaagccatgtctacatgaaagtcctcagtaagtgttagagggaacagggcggagatatccttatgccacccccgctggaggatgtgggcagcttagggccctggaggcggtgcggcagggaagaggggtgcagaggctgtggctggtgagccggtcaggcacacaaggggcccttggagcgtggactggttggttttgccattttgttgtgtgtatgctgcttttcttttctaaccaagaggctggttttggcatctctgtcccattccctgggatctggtggtcagccctaggataaaaagccagggctggagaacaagaaagggccaggagatggaattccttcaggccggcacccacaccctaggacatgtaagccctcatgtccaagggagcctcatgcagatagtaggaaatcaggtctggaaatttaaaaataaaaggcatgagactaaggctatctgcttcccttatgccctgactggagaggggagggaggagaggcaaggcccacagagggcatcccagctaggccttgggatggctgcagtgaggagaaatcccgggaactgtattgacacaaagattcttattgcacttgtattttttgtattaaagtttgcatggtttctaataaaggattcaaacataagtttgtagtgaaatggcctgggagattccaagggcttctctggagggggattggctgcagtgtagatttgcctctgaggaggctgccccagacttggcctcctcatgccccctcctgacctctgcccttctctggtcctggcatccctggagaaggtaggggtcttgacctaagtttagatttgatctccatgtgcagggaggctgtcctgggcctgacaggtcctccccctttctgaggtagcagtgccttgtggaggtttgacaccatgtccctagctccccaagcacacaccaggaaactgcaggggctcacggaggaagtgctgcctgggccagggggaccagctttcctccgtagagaccatgtgcagaacacttctgctgtgccaagaacatgagggagccagtgttttgtcagcaggaagaaagggcctgctgggatgaaagtgggaaggaaacagggttgcgtagtcaggagacacctcaggggcaacagcacaggcccagagtacctgctgcctccactgcgtctgtcctggggtcatgaggatgctgaggttgacgacaggttccaggtcctttcactcctttggccaaaggttgggggtaggtggcccaagtggcgtgctctctaggtagacaacaggagtggtcagagttccctcaaaggatcctccactccagagcacctgagaaggccgggaccagaggccctgtgtgatgtgtactccgcagctgtttggggtgggacatttctgtacttctcgatttgcttatggctcagccattacctgtgtcagtccatgattctgttgtaacagttttaagagtaaataaataaagctgcctgatgtcccatcaaaaaaaaaaaaaaaaaa

SEQ ID NO: 12187 - DNA, 5090 bp, Homo sapiens
aaggttaaaaatagttctcctgagaagcacattctggagaataagatagatgcaacaaaaatacatgttcccatggaaaccacaggggaccagggaattgaaggaatggcctatatggacgaaaatagaaatattacatttacctgtcccagaacaccatcagagctgataaataaatcatctcctctagaggttctggaatcagcagcctgtgaaaaactgcccactcctactcctcaagtagtaaaggaaggtgattcctttccagataccttggcaaaaaatgggcaagagatagccccagcccagatttccaaatcattaatggtagataactacaccaaagatggagtcccaggtcaagaaagacccaagggtccctctgctgttgtgccctctacaagcacaggaggagttgctctacctattacaacagccatagaaacagttaacattcatggagatcactctcttaagaataaagctgagcttgctgattccatgaaaaatgaagcagggatcgatgaagggcatgtgataggagaatctgagtcagtgcacagtggtgcgtctaagcattcagtagagaaagtcacagagctagcaaaaggtcacctccttcctggagtgccagtagaagaccagagcctaccaggagaggccagagccctagaaggatatgcagatagaggtaatttcccagcacatccagtgaatgaagagaaagagactaaagaagggtctgttgcagttcagattcctgacttactggaagacaaagcacaaaagctcagtttttgtgaggaccaaaatgctcaagatagaaattccaaaggttcagatagtttgaataagaaggtagatctgactcttttgtctccaaaaagtgaaaatgataaattgaaagaaattagtctggcttgtaaaatcacggaattggaaagcgtttccttgccaacaccagaaatccagtcagatttcttacatagcaaagtcgaagctcctccttcagaggtggcggatacgttagtaataatgactgcttccaagggtgttcgactcccagaacccaaagataagattttggagacacctcagaaaatgacagaaaaatctgaatcaaagacaccaggagaagggaaaaaggaagataaaagcagaatggcagaaccaatgaaaggctacatgagacccaccaagtcccgaggacttactccacttttgccaaagtctacaatccaggaacaagagagacataagcaactgaagtccgctggaatagccaggccagaagaaggaaggcctgtggtgagtgggacaggaaatgacatcaccaccccaccgaacaaggagctcccaccaagcccagagaagaaaacaaagcctttggccaccactcaacctgcaaagacttcaacatcgaaagccaaaacacagcccacttctctccctaagcagccagctcccaccaccattggtgggttgaataaaaaacccatgagccttgcttcaggcttagtgccagctgccccacccaaacgccctgccgtcgcctctgccaggccttccatcttaccttcaaaagacgtgaagccaaagcccattgcagatgcaaaggctcctgagaagcgggcctcaccatccaagccagcttctgccccagcctccagatctgggtccaagagcactcagactgttgcaaaaaccacaacagctgctgctgttgcctcaactggcccaagcagtaggagcccctccacgctcctgcccaagaagcccactgccattaagactgagggaaaacctgcagaagtcaagaagatgactgcaaagtctgtaccagctgacttgagtcgcccaaagagcacctccaccagttccatgaagaaaaccaccactctcagtgggacagcccccgctgcaggggtggttcccagccgagtcaaggccacacccatgccctcccggccctccacaactcctttcatagacaagaagcccacctcggccaaacccagctccaccaccccccggctcagccgcctggccaccaatacttctgctcctgatctgaagaatgtccgctccaaggttggctccacggaaaacatcaagcatcagcctggaggaggccgggccaaagtagagaaaaaaacagaggcagctgctacaacccgaaagcctgaatctaatgcagtcactaaaacagccggcccaattgcaagtgcacagaaacaacctgcggggaaagtccagatagtctccaaaaaagtgagctacagccatattcagtccaagtgtggttccaaggacaatattaagcatgtccctggaggtggtaatgttcagattcagaacaagaaagtggacatctctaaggtctcctccaagtgtgggtctaaggctaacatcaagcacaagcctggtggaggagatgtcaagattgaaagtcagaagttgaacttcaaggagaaggcccaggccaaggtgggatccctcgataatgtgggccacctacctgcaggaggtgctgtgaagactgagggcggtggcagcgaggctcctctgtgtccgggtccccctgctggggaggagccggccatctctgaggcagcgcctgaagctggcgcccccacttcagccagtggcctcaatggccaccccaccctgtcagggggtggtgaccaaagggaggcccagaccttggacagccagatccaggagacaagcatctaatgatgacattctggtctcgtcttccgtctcccccgtgttcccctcttgtctcccctgttcccctctcccttccctcctcccatgtcactgcagattgagacctacaggctgacgttccgggcaaatgccagggcccgcaccgaccacggggccgacattgtctcccgccccccacacttccctggcggccccaactcgggctcccgggtccttggccccctttcccgggctgtccactagaccagtgagcgcttgggcgccgtgctgggcagcccgctaggctcgccttccctcctgctttgcgtgcccggggcagcagcagccctgccccacacctcctctcactccccagcctgggcccatctccctgctttggtcttgccccatcactgcgccactgctccgtggaggaggttgggagggggttggggtggttgaggctaagttgggatctaggagaggagaaccagattctatcctcatctttttttggttctttggtccaaacccaaaagaaactgacatgccctcccttctccctggatctacctggagggaagagtggaggtggattccgagtggtgacaggacgctgaccgtggagcttaagccactgcctctccctctggtcccacaaatgggcgcccccccctccccatgcaggtggtgtcgggcccttcttgctgccctgccccaagttgggggtcagtgctgcctgtccccatgcttaacatacccgcctagctgctgtcacatttttcttgttttgtccttttatttttttctaataacctaaaaactggcaaaatagttctgcaggttgaagccatgtctacatgaaagtcctcagtaagtgttagagggaacagggcggagatatccttatgccacccccgctggaggatgtgggcagcttagggccctggaggcggtgcggcagggaagaggggtgcagaggctgtggctggtgagccggtcaggcacacaaggggcccttggagcgtggactggttggttttgccattttgttgtgtgtatgctgcttttcttttctaaccaagaggctggttttggcatctctgtcccattccctgggatctggtggtcagccctaggataaaaagccagggctggagaacaagaaagggccaggagatggaattccttcaggccggcacccacaccctaggacatgtaagccctcatgtccaagggagcctcatgcagatagtaggaaatcaggtctggaaatttaaaaataaaaggcatgagactaaggctatctgcttcccttatgccctgactggagaggggagggaggagaggcaaggcccacagagggcatcccagctaggccttgggatggctgcagtgaggagaaatcccgggaactgtattgacacaaagattcttattgcacttgtattttttgtattaaagtttgcatggtttctaataaaggattcaaacataagtttgtagtgaaatggcctgggagattccaagggcttctctggagggggattggctgcagtgtagatttgcctctgaggaggctgccccagacttggcctcctcatgccccctcctgacctctgcccttctctggtcctggcatccctggagaaggtaggggtcttgacctaagtttagatttgatctccatgtgcagggaggctgtcctgggcctgacaggtcctccccctttctgaggtagcagtgccttgtggaggtttgacaccatgtccctagctccccaagcacacaccaggaaactgcaggggctcacggaggaagtgctgcctgggccagggggaccagctttcctccgtagagaccatgtgcagaacacttctgctgtgccaagaacatgagggagccagtgttttgtcagcaggaagaaagggcctgctgggatgaaagtgggaaggaaacagggttgcgtagtcaggagacacctcaggggcaacagcacaggcccagagtacctgctgcctccactgcgtctgtcctggggtcatgaggatgctgaggttgacgacaggttccaggtcctttcactcctttggccaaaggttgggggtaggtggcccaagtggcgtgctctctaggtagacaacaggagtggtcagagttccctcaaaggatcctccactccagagcacctgagaaggccgggaccagaggccctgtgtgatgtgtactccgcagctgtttggggtgggacatttctgtacttctcgatttgcttatggctcagccattacctgtgtcagtccatgattctgttgtaacagttttaagagtaaataaataaagctgcctgatgtcccatcaaaaaaaaaaaaaaaaaa

SEQ ID NO: 12188 - DNA, 3155 bp, Homo sapiens
ccgggcgcccagactctgagagagagcgacggccatcatagaacagcgaaggcagtcgatcggcctgcggtccgcttcggcattcgcaggccgcaggcgggaggctagagcccccaggcgcacctcgccccaaccgcccgcggctcgggcagctctgcagagacgtcgtggcggcagggccagcacccattggtccgccacagccctccgccctccccctcgccacgcttattggccggagcggcggcgctcgccgggtaggcggtggcggcgtccctcccttgcgccggccctcaagaggcgacgaggaagcggccgcctccctgcgccccgcccctccggctagctcgctggctcccggctcctcccgacgtctcctacctcctcacggctcttcccggcgctctcctggctcccttctgccccagctccgtctcggcggcggcggggcagttgcagtggtgcagaatggctgacctcagtcttgcagatgcattaacagaaccatctccagacattgagggagagataaagcgggacttcattgccacactagaggcagaggcctttgatgatgttgtgggagaaactgttggaaaaacagactatattcctctcctggatgttgatgagaaaaccgggaactcagagtcaaagaagaaaccgtgctcagaaactagccagattgaagatactccatcttctaaaccaacactcctagccaatggtggtcatggagtagaagggagcgatactacagaagcctagcgtgtctctcaacactggggctgctgcaacaccagaccagtgatctttcctaagcatcgttatacttctaaaaccttcagcattttgcagagctttgcttttcattcctggacatgatgtagaagaaactgagggtagttcttcggggcctatttctgctgatgcctgagcaaacaacctgcttcctcttgtgctctgcagggtttgatggagcctcatttccctttgtgaacacaaagtgcaaaatgaattctttttaattttagtaatttttacaaaggttatctaatgtcttttatttcttgttttctttatgattttatcatttgattcattctcacatttttttcctttaaatatttttagttgacctttttcctttggttttcaaatgttcaacatgaatcagaatagtgtaacaccaaatgagaacatgtgttttcataaaggggttgaggccaccagtactgcagcgaatttccttttcttctccctcctccttccttctctgagcttgcttttagggaaggttaatcttacaggctacctatgtttctctccaccttactaaaatctaaataatgatagatattttaagtttttaaattgagtagttctgagtaatcctagaatatttttccaaattaaataatcctttattatttgcaagttgggccaaatttttttttttttggagacggactcttaacaatctaagattgtttcaacaggactttcttattcccattcctaattttttcaaactaattgcttagatctagaaccagttgagattagtactgtacaatggtatgctttgattgtatttatagaaatataacataaaacatggaccatgttttgaaatcttagaggaattctggtttaaaatctgaaatactttaaagttttctatccttttactgattatgcagcttcttataacccccaaggtacagattatttcagcttaaaagaaataattggcaccatgttctgagaaagattttgagatatacattgttttttgtttttgagacagggtctcactcttgcctaggctggagtgcggtggcgcgatcttggcttactgcaccctctgcctcccaggttcaagtggttctcctgcctcagcctcccaagtagctgggattataggtgtgcgccaccacaccagctaatttttgtatttttagtagagacggggttttactttgttggccaggctggtctcgaactcctgatctcaagtgatccacccgccttggccacccaaagtgctgggattacaggtgtgagacactgtgcctggccagatatacattgttttagatcccctgatacagaactacttttgagatggtaagattagaatatcatgaaagtttaaactgaatccttgcagcgacttccggaatttaggaagcattccctcttctacaggggtctggtcacaagggctggattctctgacaaaaatttcttctatggattctggacagaagacacttgagggtgatatgttttaaaggaaagaggttatgcttatcttcttagcagttgataaaatattaaaactctcttgccatagagaatacaccatcaaagaaaacacaaccctttccctttggtgtacagttatttattaagttgattttggggtttctttcgccagggatcttttcaaaactggtagtagttatttttaaaaatcatgtttgacatctttctattgctcgtaaccagtccctgtagctgtctaagttatgggtggagaagcctgggtatgactttccgttgtgtacactcacacttcatgattgacatttatttattcttttatttccatttggttatgcttatttttgtttgaaatttgtttttttcaaatatgtttcctttttgaacttacagaattgttgaaattttctactaacagccagctaaaatttggtatatgttagctctatctgtttcacttggacgtttcattttgaaagaaagaaattttatgtttcacatatagttttatacaaagtagccagtcccataatgaaatgctgtattgccatagtggtcacacccaagtggtccagtatctcaatggtgaggcagccagactggtcagggctgctttgttgaaatgtgatgattttcatatgccttctttctctttctctctctctttttttttccttttttggcccaatgttgaagatgtagaactttgtttttaaataatgtttttataatttcattcgtatacctaagtttgtattttttgtgactttggacttcaacagtttgtatattgggacttctaatgtgattactgtactaaataaattccactaataaacatcttacattaacaccttaaaaaaaaa

SEQ ID NO: 12189 - DNA, 2248 bp, Homo sapiens
caaagaatcccttcaccccctccagggatggctctgagctctcgggcgcgtgccttctccgtggaagccttggtggggagacccagcaaaagaaaactccaagacccaatacaggcggagcagcctgagctgcgggagaaaaagggcggagaggaagaggaggagagaaggagcagcgctgcagggaagagcgagccgcttgaaaaacaacctaagacagagccctcaacatctgcttcctctggctgcggcagcgacagcggctacggcaacagctctgaaagtctggaagagaaagatattcaaatggagcttcaaggatctgaactgtggaaaagattccatgacatcgggactgagatgatcattactaaagcgggcaggcggatgttcccctctgttcgggtcaaggtgaaagggttggatccagggaagcagtaccatgtggccatcgatgtggtgccggtggattccaaacgctataggtacgtctatcacagctcacagtggatggtagctgggaatacagaccatttgtgcatcattcctagattctatgttcacccggactcaccctgctcgggagagacctggatgcggcagatcatcagctttgatcgcatgaaactcaccaacaatgagatggatgacaaaggccacatcattctgcaatccatgcataagtacaaaccccgagtgcacgtgatagagcaaggcagcagtgttgacctgtcccagattcagtccttgcccactgaaggtgttaaaacattctcctttaaagaaactgagttcaccacagtaacggcttaccaaaaccaacagattacgaaactaaaaatagaaagaaatccttttgctaaaggatttagagatactggaagaaacaggggtgtattggatgggcttttagagacctacccatggaggccttctttcactctcgattttaaaacctttggcgcagacacacaaagtggaagcagtggctcatctccagtgacctctagtggaggggccccctctcctttgaactccttactttctccactttgcttttcacctatgtttcatttacctacaagctcccttggaatgccctgtccagaggcatacctgcccaatgtcaacctgcctctatgctacaagatttgtccaactaatttttggcaacagcaacctcttgttttaccggctcctgaaagactagcaagcagcaacagttctcagtctttagccccactcatgatggaagtgcctatgttatcttccctgggggtcaccaattcaaaaagcggttcatctgaagactccagtgatcagtatctacaagcacctaattctaccaatcaaatgttatatggattacagtcacctggaaatatttttctgccaaactccatcaccccagaagcacttagttgctcctttcatccttcctatgacttttatagatacaatttctctatgccatctagactgataagtggttccaaccatcttaaagtgaatgacgacagtcaagtttcttttggagaaggcaaatgtaatcatgttcattggtatccagcaattaaccattacctttagtaagacaatagcatttctagaacaattacatgtaaacaaatattttctttatttgtagccaaagaaatttcaacagttattgggcttaaaaagcatcattacaatacagtatttctttgttatacatttaaagatttaaagtgccttatcaaataatattcatgaagagttgtttataatgtcaaatgaaacctacaggaatctctgattacagtggccttgagcttcaaaatgagatatgcaataaatattatttgatgatactccaccagtgaaaattgatgctaagtgatgggattttcaattatactgaagctagttcaccacgttaactgcattttacacattgacaatgacaaaaagaagatggatgtaattctcatgaaagcagtgaagcaatttcagttttaaaaatgaagatcggctttcatgtaattatctagtagttgtagaagaaaatttaattatttgtttgcctcatgcctttatactttgctgttgaagaaactactaatctcaatttaagatacaaataaggacacaaactttcaagtattatattttatttatctttgtagcctaaagaccatttaatcttgaaggaacacaaagatcaaatgaaaagtaaaacactctaaataaatttgcttttattttc

SEQ ID NO: 12190 - DNA, 1142 bp, Homo sapiens
cttttccaagcggctgccgaagatggcggaggtgcaggtcctggtgcttgatggtcgaggccatctcctgggccgcctggcggccatcgtggctaaacaggtactgctgggccggaaggtggtggtcgtacgctgtgaaggcatcaacatttctggcaatttctacagaaacaagttgaagtacctggctttcctccgcaagcggatgaacaccaacccttcccgaggcccctaccacttccgggcccccagccgcatcttctggcggaccgtgcgaggtatgctgccccacaaaaccaagcgaggccaggccgctctggaccgtctcaaggtgtttgacggcatcccaccgccctacgacaagaaaaagcggatggtggttcctgctgccctcaaggtcgtgcgtctgaagcctacaagaaagtttgcctatctggggcgcctggctcacgaggttggctggaagtaccaggcagtgacagccaccctggaggagaagaggaaagagaaagccaagatccactaccggaagaagaaacagctcatgaggctacggaaacaggccgagaagaacgtggagaagaaaattgacaaatacacagaggtcctcaagacccacggactcctggtctgagcccaataaagactgttaattcctcatgcgttgcctgcccttcctccattgttgccctggaatgtacgggacccaggggcagcagcagtccaggtgccacaggcagccctgggacataggaagctgggagcaaggaaagggtcttagtcactgcctcccgaagttgcttgaaagcactcggagaattgtgcaggtgtcatttatctatgaccaataggaagagcaaccagttactatgagtgaaagggagccagaagactgattggagggccctatcttgtgagtggggcatctgttggactttccacctggtcatatactctgcagctgttagaatgtgcaagcacttggggacagcatgagcttgctgttgtacacagggtatttctagaagcagaaatagactgggaagatgcacaaccaaggggttacaggcatcgcccatgctcctcacctgtattttgtaatcagaaataaattgcttttaaagaaaaaaaaaaaaaaaaaa

SEQ ID NO: 12191 - DNA, 2754 bp, Homo sapiens
atggaggtcagggggtcgttcctggcggcctgcaggagacgcatggctacctggaggaagaatcgtgacaaggatggcttctcaaatcccgggtaccgagtccggcagaaggatctgggcatgatccacaaagctgccatcgcaggtgatgtgaacaaggtgatggagagcatcttgctcaggctgaatgacttgaacgacagggacaagaagaacaggactgctctacttttggcgtgtgcccatggccgtccaggagtggtagctgacctggtggccagaaaatgccagcttaacctcactgacagtgaaaacaggacagctctgatcaaggctgtacaatgtcaagaagaagtttgtgcatccatcctgctggaacatggcgccaacccaaatgttagagatatgtatggcaacactgctctgcactatgccattgataatgagaatatatcaatggcaagaaaactgcttgcatatggtgcagatattgaagcaagaagccaggatggacatacatcacttttactcgctgtaaataggaaaaaagagcaaatggtggcatttttgttgaagaaaaaaccagatttaactgcaatagataattttggaagaacagccctgatacttgctgctcgtaatggatcaacaagtgtagtctaccagcttcttcagcacaatattgatgtcttttgccaagatatatctggatggactgcagaagactacgctgttgcttctaagtttcaagccattcgtggaatgatttctgaatataaagcaaacaagagatgtaaaagtcttcaaaatagcaattcagaacaagacttagaaatgacatcagagggagagcaagaaaggcttgaaggatgtgaaagtagccagccacaggttgaagaaaaaatgaagaaatgcagaaataagaaaatggaagtgtcaagaaacgtacatgctgatgacagtgacaattataatgatgatgttgatgaattaattcacaaaataaagaacagaaaacctgataatcatcaatctcctgggaaggagaatggcgagtttgataggcttgcaaggaaaacctctaatgaaaagagcaaggttaaaagccaaatatatttcacggatgaccttaatgacataagtgggtcatctgaaaaaacctcagaggatgatgagttgccttactctgatgatgagaattttatgttactcattgaacaaagtggaatggagtgtaaagattttgttagcctatcgaaaagcaagaatgcaacagctgcatgtggaagatcaatagaggatcaaaaatgttactgtgaacgacttaaagtaaaatttcaaaaaatgaaaaataatattagcgtactacaaaaggtactatctgaaacagacaaaaccaaatcacagtcagagcatcagaatcttcaagggaaaaaaaagctctgtaatttgagatttatcttacaacaacaagaagaagaaagaataaaggctgaagagttgtatgaaaaagatatagaagagttaaaaataatggaagagcaatataggacacaaactgaagtgaaaaaacaatctaaactgactctcaaatcattggaagtggaattgaagactgtaagaagtaactcaaatcagaattttcatactcatgaaagagaaagagacctgtggcaggaaaatcacttgatgcgggatgaaattgccagactcaggctggaaatagacacaataaaacatcagaaccaggaaactgaaaataaatatttcaaagatattgaaattataaaggaaaacaatgaagaccttgaaaagactctcaagcggaatgaggaagcattaacaaaaacaataacccggtatagtaaagagcttaatgttctgatggatgagaatacaatgctcaattctgagctacagaaggaaaaacaaagcatgtcaagactggaaacagaaatggaatcataccgttgtagactggctgctgccctatgtgatcatgatcaacgtcagtcatcaaaaagagacctacagcttgctttccagagcacagtgaatgaatggtgtcatttacaagaagacactaattctcacattcagattctttctcagcaactttctaaagctgagagtacatccagtggcctggaaactgagctccattatgaaagagaggctctcaaagaaaagacgttgcatatagaacacatgcaaggagtcctaagccgaacacagcgtcgattggaggacattgaacacatgtaccaaaatgaccaacctattttggaaaaatacgtgagaaagcagcaatctgtagaggatggactatttcaactacaaagccaaaatctgttgtatcaacagcagtgtaatgatgctcgcaagaaagctgacaatcaggagaaaacaataattaatatccaagtcaaatgtgaagatactgtagaaaaacttcaagctgagtgtagaaagctagaagagaacaataaggggttgatgaaggaatgcactcttttaaaagaaagacaatgccaatatgaaaaagagaaagaagaaagagaagtagtcaggagacagcttcaacgagaagtggatgatgccctgaacaaacaattgctgttagaagctatgctagagatttcatcagaacgtcgtattaatttagaagatgaggcacaaagtttaaaaaagaaattaggccagatgagaagtcaagtatgtatgaaacttagcatgtcaacagttactctgtag

SEQ ID NO: 12192 - DNA, 5497 bp, Homo sapiens
atacacaatcatcatcttactagttctctgtgttgctcgctaaccagtcccccagttcagtagactggagcccagagcctgcttacttgtcaggtgtttattttgtcttgctttttttttttttttaaatgaagtcaaaatgccaataagaccagatctccagcagttggaaaaatgcattgatgatgctttaagaaaaaatgatttcaaacctttgaaaacacttttgcaaattgatatttgtgaagatgtgaagattaaatgcagcaaacagtttttccacaaggtggacaaccttatatgcagggaacttaataaagaggatatccacaatgtttcagccattttggtttctgttggaagatgtggcaaaaatatcagtgtattggggcaagctggacttctaacgatgataaaacaaggactaatacaaaagatggttgcctggtttgaaaaatccaaggacattattcagagtcaaggaaattcaaaagatgaagctgttctaaatatgatagaagacttagttgatcttctgctggtcatacatgatgtcagtgatgaaggtaaaaaacaagtagtggaaagtttcgtacctcgcatttgttccctggttattgactcaagagtgaatatttgtattcagcaagagattataaaaaaaatgaatgctatgcttgacaaaatgcctcaagatgcccggaaaatactctctaaccaagaaatgttaattctcatgagtagtatgggagaaaggattttagatgctggagattatgacttacaggtaggcattgtagaagctttgtgtagaatgaccacagaaaaacaaagacaagaactggcacatcagtggttttcaatggattttattgctaaggcatttaaaagaattaaggactctgaatttgaaacagattgcaggatatttctcaaccttgtaaatggcatgcttggagacaaaagaagggtctttacatttccttgtttatcagcatttcttgataaatatgagctgcaaataccatcagatgaaaaacttgaggaattttggattgattttaatcttgggagtcagactctctcattctacattgctggagataatgatgatcatcaatgggaagcagttactgtgccagaggaaaaagtacaaatatacagcattgaagtgagagaatcaaagaagctactgacaataattctgaaaaatacagtaaaaattagcaaaagagaagggaaagaattgcttttgtattttgacgcatcactagaaatcactaatgtaactcaaaaaatttttggtgcaactaaacatagggaatctatcagaaaacaaggtatttcagttgccaaaacgtcgctgcatatactttttgacgcaagtggatcacagattctagtgccagaaagtcaaatctcaccagtcggagaagagctcgttagtttaaaggaaaaatcaaagtccccaaaggaatttgctaaaccttcaaaatatatcaaaaacagtgacaaagggaatagaaataatagtcagcttgagaaaactactcctagcaaaagaaaaatgtctgaagcatcaatgattgtttctggtgcagatagatacactatgagaagtccagtgcttttcagcaacacatcaataccaccacgaagaagaagaattaaaccaccactgcaaatgacgagctctgcagagaaacctagtgtttctcaaacatcagaaaatagagtggataatgctgcatcactgaaatctagatcatcagaaggaagacatagaagagataatatagacaaacatatcaaaactgctaagtgtgtagaaaacacagaaaataagaatgttgaattcccaaaccaaaattttagtgaactccaggatgttataccagattcacaggcagcggaaaaaagagatcatactatattacctggtgttttagacaacatctgtggaaataaaatacacagcaaatgggcatgttggacacctgtaacaaacattgaactatgtaataaccaaagagcaagtacttcgtcaggagacacattgaatcaagatattgttataaataaaaaacttactaaacaaaaatcatcctcttcaatatctgatcataattctgaaggaacaggaaaagtgaaatataagaaagaacaaaccgaccatatcaaaatagataaagcagaagtagaagtttgcaagaaacacaatcagcaacaaaatcatcctaaatattcagggcagaaaaatactgaaaatgccaagcagagtgattggcctgttgaatctgaaactacttttaaatcggttctcctaaataagacaattgaagaatcgctgatatataggaagaaatacatattgtcaaaagatgtgaatactgctacttgcgataaaaatccatctgctagcaaaaatgtgcaaagtcatagaaaagcagagaaagaattgacttctgagcttaattcctgggattcgaaacaaaaaaaaatgagagaaaagtcaaaagggaaagaatttaccaatgtagcagaatccttgataagccaaatcaataaaagatacaaaacaaaagatgacatcaagtctacaagaaaattaaaggagtctttgattaacagtggtttttcaaacaaacctgttgtacaactcagtaaggaaaaagttcagaaaaaaagctacagaaaactgaagactacctttgttaatgttacttctgaatgcccagtgaatgatgtttacaattttaatttgaatggagctgatgaccctatcataaaacttggaatccaagagtttcaagctacagctaaagaagcttgtgcggataggtcaattagattggtaggtccaaggaatcatgatgaacttaaatcttctgtcaaaacaaaagataaaaaaattataacaaatcatcaaaagaaaaatctgtttagtgatactgaaacagagtacagatgtgatgacagcaagactgatattagctggctaagagaaccgaaatcaaaaccacagctaatagactatagcagaaataaaaatgtgaagaatcataaaagtggaaaatcaagatcatccttggaaaagggacagccaagctctaaaatgacacccagtaaaaatatcacaaaaaagatggacaagacaattccggaaggaagaatcagacttccacgaaaagcaaccaaaacaaaaaaaaactataaagatctctcaaattcagaatcagagtgtgaacaagaattttcacattcatttaaagagaacataccagtaaaggaggagaatatccattccagaatgaaaacggtaaagctaccaaagaaacaacagaaagtcttctgtgctgaaacagaaaaggaactatcaaaacaatggaaaaactcatctctactaaaagatgctatacgagataattgccttgacttatctcccagatctttatctggcagtccatcatctatagaagtaacgagatgtatagagaaaataacagaaaaggattttactcaggattatgactgcataacaaaatctatatcaccttatccaaaaacttcatcacttgaatccttaaatagtaacagtggagttggaggtacaataaagtcacccaaaaacaatgagaaaaacttcctgtgtgcaagtgaaagttgttcaccaattccacgaccactgtttttgcccagacatactccaactaagagtaatactattgtaaatagaaaaaaaataagttctctggtacttacacaagaaacacaaaacagtaacagctattcagatgtaagcagttatagttcagaagaacggtttatggaaattgaatctccacatatcaatgaaaattatatacaaagcaaaagagaggaaagtcatttagcatcttcattatccaagtctagtgaaggaagagagaaaacgtggtttgacatgccctgtgatgctactcatgtatcaggccccacccaacatcttagtcgcaaaagaatatatatagaagataatctaagtaattccaatgaagtagaaatggaagagaaaggagaaaggagagcaaacttgcttcccaaaaaactgtgtaaaattgaagatgcagatcatcatatccacaaaatgtctgaaagtgtatcttcattatcaacaaatgacttttctattccttgggagacctggcaaaatgaatttgcagggatagagatgacttatgagacttacgagaggctcaattcagaatttaagagaaggaataatatccgacataaaatgttgagttattttactacgcagtcttggaaaacagctcagcaacatctgagaacaatgaatcatcaaagtcaggactctaggattaaaaaacttgataaattccaattcattatcatagaggagctggagaattttgaaaaagattcacagtctttaaaagatttggaaaaggaatttgtggacttttgggaaaagatatttcagaagttcagtgcatatcaaaaaagcgaacaacagaggcttcatcttttgaaaacttcattggctaaaagtgtcttctgtaatactgatagtgaagaaactgtttttacatccgagatgtgtttgatgaaagaagatatgaaagtgctgcaagacaggcttcttaaggacatgctagaagaggagcttcttaatgtacgcagagaactgatgtcagtattcatgtctcatgaaagaaatgctaatgtgtgaaatctagtttttatcaccatactttatctaattattattctctgtatataactgaggaaataagaatagtcctacaaagagaaaaatatacatgtcaccgaagcaagtgtaccctttataggaaccctcaaattaaaaaaaaatgtcttttaatggatgagagggaaccactataacatgagtccaagcccagaagacttctgtctatacaatatttttttttaattttggagataaaagctttaagaaactttttgagttaattatactcataaaatgagtttctttaataaattaaattttattgtgtaaaatgtattattacataaaatgtgtttttgaatcaatgcagtttggggatgaatataattaaaatatgtttaataacttagaattcaactaataaaaatttagccacacttacaagggggaggaagtccctagtttaaaatgtataactgagtggtagatcagtactttcagcacactgttggaaacatttattcagatatggctctaatgtattaggaagcactaaatggcctaaaaaagctactacattgcctaaatatgttaattcaatatagaagtcctatttcataaccaggctgtttgacaaatacttttaatctagtagtcattgtaatatcttgctagattaatttataaaaatgagtatacatttgatttgcttttaatgaagttgaaataaatgcttatgtcacttgaataaatataaatcattataaaaaaaaaaaaaaaaaa

SEQ ID NO: 12193 - DNA, 4011 bp, Homo sapiens
ggcgggcacccgcgcgcgcacactcgcacaccgcacctcagctcctgcccggcctcgcccccacccgcgagcgccgaacctcctggggccggatgccatgggtaacaacttctccagtatcccctcgctgccccgaggaaacccgagccgcgcgccgcggggccacccccagaacctcaaagactctatcgggggccccttccccgtcacttctcaccgatgccaccacaagcagaagcactgtccggcagtgctgcccagcggggggctcccagccgcgccgctgctcttccacccgcacaccaagggctcccagatcctcatggacctcagccacaaggctgtcaagaggcaggccagcttctgcaacgccatcaccttcagcaaccgcccggtcctcatctacgagcaagtcaggctgaagatcaccaagaagcagtgctgctggagcggggccctgcggctgggcttcaccagcaaggacccgtcccgcatccaccctgactcgctgcccaagtacgcctgccccgacctggtgtcccagagtggcttctgggccaaggcgctgcctgaggagtttgccaatgagggcaacatcatcgcattctgggtggacaagaagggccgtgtcttccaccgcatcaacgactcggctgttatgctgttcttcagcggggtccgcacggccgacccgctctgggccctggtggacgtctacggcctcacgcggggcgtccagctgcttgatagcgagctggtgctcccggactgtctgcggccgcgctccttcaccgccctgcggcggccgtcgctgcggcgcgaggcggacgacgcgcgcctctcggtgagcctatgcgacctcaacgtgccgggcgcggacggcgacgaggccgcgccggccgccagctgccccatcccgcagaactcactcaactcgcagcacagccgcgcgctgccggcgcagctcgacggcgacctgcgtttccacgccctgcgcgccggcgcgcacgtccgcatcctcgacgagcagacggtggcgcgcgtggagcacgggcgcgacgagcgcgcgctcgtcttcaccagccggcccgtgcgcgtggccgagaccatcttcgtcaaggtcacgcgctcgggtggcgcgcggcccggcgcgctgtcgttcggcgtcaccacgtgcgaccccggcacgctgcggccggccgacctgcccttcagccctgaggccctggtggaccgcaaggaattctgggccgtgtgccgcgtgcccgggcccctgcacagcggcgacatcctgggcctggtggtcaacgccgacggcgagctgcacctcagccacaatggcgcggccgccggcatgcagctgtgcgtggacgcctcgcagccgctttggatgctcttcggcctgcacgggaccatcacgcagatccgcatcctcggctccactatcctggccgagcggggtatcccatcactcccctgctcccctgcctccacgccaacctcgcccagtgccctgggcagcggcctgtctgaccccttgctcagcacgtgcagctctggccctctgggtagctctgctggtgggacagcccccaattcgccagtgagcctgcccgagtcgccagtgaccccaggtctgggccagtggagcgatgagtgcaccatttgctatgaacacgcggtggacacggtcatctacacatgtggccacatgtgcctctgctacgcctgtggcctgcgcctcaagaaggctctgcacgcctgctgccccatctgccgccgccccatcaagggcatcatcaagacctaccgcagctcctagcccgttgcggtggcccatcccgcatacccatcttctcgggcttcagcccagtcccagctgaggaacaagccagtggggccccttctcttcctcattttggaaacttttcctcctctattaaacatgggaaactgaagcccttgaaggtttggggagaggggggtatcaggcagggagggggcagaggcaaatcaccgggcagagggaggggaggagaggaggccgcactctccctgtctctcccgtctctgcacccagctcctctctgcatgctgagggctaaattgggatctcagcctgccctaatctttccccatttgaggcaggtttctaggaggtgtctgtagtccatgtggcacctttgtgagaattagaaaacatgtaccttcctctgggcagctgcagccctgagccaggacatgtggcctggctagtgcagcatggagtggattttaggctcatttgccctctcagccaactgcccttgtgcagtgtacagcctgctcaacaaccgccctgggcaggccgctcctgagctgctgtctccctctctgacctatgcctaccttctctttcttcgttccctgcccactgggcatggcagctgggggtgagaggctggtggttgcctcccgtcctgggcaggctgcagcctcatgccatgtctctctcccactacctgatgggcacatggacaggctgcagagggctccaggttctgggcccctggctgagaaggggaggatcctgtcctggctgtagccttcctgccccaatcatctcgctggatgccattgcccaggggtagcccttcggtatgggctggggagaagggttggtcttctgccagggtccctaagaacaggtttgcagctaccctctctgaccttttccccatatcttgtgctgtccagggcctaggctgatagtcagagcctgtggcacacctgggatgggccagggccctgggtggggaggtgtgggttccctgggccaagaccagcctttttactcagtttaattaatttatttatttggtttgtggttttgggttttttttgtttgtttgtttgtaggtgagttcccatcctctgggcccctagaaatgctgcctttgtgtgtggggtacctgggaaagggtgtggctgaggcagtcataatgcagtatcttcccctgactccagccacaaagctcatacccagccctaccaatcatgaattggaactccataaggaggggccaaattgggaggccttttggcaaacagtgtctattttacagagaggcaaaccaagcctccttagtgccctggggctgatggtcacccagagccatagagcacccttcctcctgggccagagctgggttatcatggttggcttaggtacctcaggtggcccaggaggtcccccctccataaggacgtcaaacttctaggagggccagtgttcctagtgtgggccaggaacaggacagggagaccttgtgatggcggggcagggagcctgttcgtagggaagatgaggaggcaagggctgcctctaacacctccaggttctctaagttctggggagggagcgccccacctgctgaggtcggtcctctcagccctgcctgccctggcctgggctctcccagcctcccagccctctgccccctcagatggctttttgtttttgtttttttttgcatccatcagagactgcacctctgtgtggcaggcagggcatgggttttagtcctggccactgaccagctgtgtggccctggccgagtcgtagccccctggagcccagcttccatttctataaaatggttgtttcgggagagaggggcaggctttctgtgtgactcgggagttcttccgtgagggctgccagggggtggtgtgccaggacctcaggctgggcctttgtgctggccttgcagtgggtgtgtggggaagtcactgtcccactatgggtctccactacccagtcactgaccctgggagaccccttctgtgtgggagggagcgggggctggctagcgggccccccagccagggatcccagaggctgagggttggggggaggaagccatcatctcattacctctgtcagtgcaggggtggctgctgcttcccttgtgcacttgggtcgctgtgattgtgaataaaagtgatttcgtaccaaaaaaaaaaaaaaaa

SEQ ID NO: 12194 - DNA, 1404 bp, Homo sapiens
gagctgctgtggcggcggcaacatggcggacgtgataaatgtcagtgtgaacctggaggccttttcccaggccattagtgccatccaggcgctgcgctccagcgtgagcagggtgttcgactgcctgaaggatgggatgcggaacaaggagacgctggagggccgggagaaggcctttattgcgcacttccaggacaacttacattcggtcaaccgggacctcaatgagctggaacgtctgagcaatctggtaggcaagccatctgagaaccatcctcttcataacagtgggctgttaagcctggatcctgtgcaggacaaaactcctctctatagtcaactccttcaagcatataagtggtcaaacaagttgcagtaccatgcaggactagcatctggccttttaaatcagcagtcattgaagcgttccgctaatcagatgggagtatctgccaaacgtagaccaaaggctcagcccacaactcttgtcctaccacctcaatatgttgatgatgtgatcagccgcattgacaggatgtttcctgaaatgtccatccacttatccagacccaatggaacatcagcaatgcttctggtgaccttgggaaaggtgttgaaagtgatcgtcgtcatgcggagcctgttcattgatcgaacaatagtaaagggatataacgagaatgtctacacagaagatggcaagcttgatatatggtccaaatccaactatcaagtattccagaaggtgacagaccatgccaccactgccctgctccactatcagctgccccagatgccggatgtcgtggtccgatccttcatgacctggttaagaagttacataaagctgttccaggccccgtgccagcgctgcgggaagtttctgcaggacggccttcccccgacatggagggatttccgaaccctcgaagccttccatgacacctgccggcagtagcccccacgctggccccagcctcagaccccacccagcaccttcccagacacgcaggaagcccacagaaggctcagctggttcctcactgcccagatgtgtacagctgctcctccctttcataaagcagcgccatgtgtgcagaggccactcttgaagagcagactccctctgtggctgatgggactaattattcccactagccagcggactgaaggcaaagaagacctttctagaacctggtagaaggaagctgtgcagcatgctcctcgtccatgtgtgtcggcagtgctggtgtctgtcgtctccgcgagctgttactggaatgagcccttgtgttcatgggtatcgtcatgcggggttcttgtgttttgtggggcttgggttttggtaacttatttttataagcaataaaccttttgtatcctgaaaaaaaaaaaaaaaaaaaa

SEQ ID NO: 12195 - DNA, 3140 bp, Homo sapiens
tcgggttctgcccggggacgcagcccagttggtagcgtcgctccctgagcgtttctaagggggccgcccggccttgtctttcggcagtggccgagccaccgccgcctgccgcgcgttccagagctgggcgctgcagctgcactgccgatcgccgtgtttggtcgatagaatccccagtgtgcccagagagtgcgacccctcgcccggcccggcgagccccgggcgtgaaccgagctgagggaggatggcagcctctggggtggagaagagcagcaagaagaagaccgagaagaaacttgctgctcgggaagaagctaaattgttggcgggtttcatgggcgtcatgaataacatgcggaaacagtgatttaaatctaccacccagctgtagttgaatctacaatctgctcagggatttatactcaatgccaatttgatatcatgctgggagggactgattgcagaaccttcttgacaagccacataaatctaaagaaaacgttgtgtgacgtgatcctcatggtccaggaaagaaagatacctgctcatcgtgttgttcttgctgcagccagtcatttttttaacttaatgttcacaactaacatgcttgaatcaaagtcctttgaagtagaactcaaagatgctgaacctgatattattgaacaactggtggaatttgcttatactgctagaatttccgtgaatagcaacaatgttcagtctttgttggatgcagcgaaccaatatcagattgaacctgtgaagaaaatgtgtgttgattttttgagagaacaagttgatgcttcaaattgtcttggtataagtgtgctagcggagtgtctagattgtcctgaattgaaagcaactgcagatgactttattcatcagcactttactgaagtttacaaaactgatgaatttcttcaacttgatgtcaagcgagtaacacatcttctcaaccaggacactctgactgtgagagcagaggatcaggtttatgatgctgcagtcaggtggttgaaatacgatgaacctaatcgccagccatttatggttgatatccttgctaaagtcaggtttcctcttatatcaaagaatttcttaagtaaaacggtacaagctgaaccacttattcaagacaatcctgaatgccttaagatggtgataagtggaatgaggtaccatctactgtctccagaggaccgagaagaacttgtagatggcacaagacctagaagaaagaaacatgactaccgcatagccctatttggaggctctcaaccacagtcttgtagatattttaacccaaaggattatagctggacagacatccgctgcccctttgaaaaacgaagagatgcagcatgcgtgttttgggacaatgtagtatacattttgggaggctctcagcttttcccaataaagcgaatggactgctataatgtagtgaaggatagctggtattcgaaactgggtcctccgacacctcgagacagccttgctgcatgtgctgcagaaggcaaaatttatacatctggaggttcagaagtaggaaactcagctctgtatttatttgagtgctatgatacgagaactgaaagctggcacacaaagcccagcatgctgacccagcgctgcagccatgggatggtggaagccaatggcctaatctatgtttgtggtggaagtttaggaaacaatgtttctgggagagtgcttaattcctgtgaagtttatgatcctgccacagaaacatggactgagctgtgtccaatgattgaagccaggaagaatcatgggctggtatttgtaaaagacaagatatttgctgtgggtggtcagaatggtttaggtggtctggacaatgtggaatattacgatattaagttgaacgaatggaagatggtctcaccaatgccatggaagggtgtaacagtgaaatgtgcagcagttggctctatagtttatgtcttggctggttttcagggtgttggtcgattaggacacattctcgaatataataccgaaacagacaaatgggttgccaactccaaagttcgtgcttttccagtcacaagttgtttaatttgtgttgtcgatacttgtggagcaaatgaagagacccttgaaacatgaaaaatgagtggacttcagactcatcagagactctaaaatatagccaccagtgctttgttccaggagtttggtgacaaagttttggtttggtgttttggtaaagaaagtttcaagtgaaatgaggttcctataaaatagatgtttcttttatatggatttccttaattcaaagatcatattttagctggccacaaaaccaagaacatatctagcaagaaaacttgaaaaagtataagcatttgttaaaaatgtgaatttcttgaatgaatttcacatttgtaactatgattttggcagaatagaagattggctcatcagtgaagcgcagtatcttagctctagattctattttcatgcatcacagaagtgctatacggttaggtctgtttgtgctcagtcaagaactaagaaatagtatgaattgtaagtcaagatgggcaactcagatggagcagcttagtctcacagtttgcttgtctatttattttatttagtgccaaatgtattccattttaaaagtaagccagagtgagtcaaggcatatacacactttctcacaaaacttcctaaacagatttgggggtttaatatgtccaactcctcatgaaatatattcaatccacttaaatatattccatctttttaacataaaatgtaaagcttagcacccatcattaatttatgtctctgttttatccagtggttaaaaaaggattctgcctctttagtcctcactgttaaataaaacccaatcatagtaagtgattaactagcaaaaagtaaagctatttatagcaaatttctagatcattagaaaagcactggtagttgtacaatatcagtgttgactttgaacttctttaacgagatcatgaattcttttcccttagccaaaacatgaaatatttaacctagttgtctctaaaagttttgtaatcatgagttagatatatgtcatctcctattcattgcttttatgtgatcaataaatcttttacaaaccc

SEQ ID NO: 12196 - DNA, 6190 bp, Homo sapiens
ctttgggcctcataaacaaccacagaaccacaagttgggtagcctggcagtgtcagaagtctgaacccagcatagtggtcagcaggcaggacgaatcacactgaatgcaaaccacagggtttcgcagcgtggtgagcatcaccaacccacagccaaggcggcgctggctttttttttttttttaatctttaacaatttgaatatttgtttttacaaaggtgcattttttaatagggcttggggagtcccagaggtatccagcagaggggagaagaaagagagatgtagggctagaggggtgaggctgaaacagtgacctgtcttggttttcgctccgaaggtaaaagaaatcattgagtcccccgccttcagaagagggtgcattttcaggaggaagcgatggcttcagacagcatatttgagtcatttccttcgtacccacagtgcttcatgagagaatgcatacttggaatgaatccttctagagacgtccacgatgccagcacgagccgccgcttcacgccgccttccaccgcgctgagcccaggcaagatgagcgaggcgttgccgctgggcgccccggacgccggcgctgccctggccggcaagctgaggagcggcgaccgcagcatggtggaggtgctggccgaccacccgggcgagctggtgcgcaccgacagccccaacttcctctgctccgtgctgcctacgcactggcgctgcaacaagaccctgcccatcgctttcaaggtggtggccctaggggatgttccagatggcactctggtcactgtgatggctggcaatgatgaaaactactcggctgagctgagaaatgctaccgcagccatgaagaaccaggttgcaagatttaatgacctcaggtttgtcggtcgaagtggaagagggaaaagcttcactctgaccatcactgtcttcacaaacccaccgcaagtcgccacctaccacagagccatcaaaatcacagtggatgggccccgagaacctcgaagacatcggcagaaactagatgatcagaccaagcccgggagcttgtccttttccgagcggctcagtgaactggagcagctgcggcgcacagccatgagggtcagcccacaccacccagcccccacgcccaaccctcgtgcctccctgaaccactccactgcctttaaccctcagcctcagagtcagatgcaggatacaaggcagatccaaccatccccaccgtggtcctacgatcagtcctaccaatacctgggatccattgcctctccttctgtgcacccagcaacgcccatttcacctggacgtgccagcggcatgacaaccctctctgcagaactttccagtcgactctcaacggcacccgacctgacagcgttcagcgacccgcgccagttccccgcgctgccctccatctccgacccccgcatgcactatccaggcgccttcacctactccccgacgccggtcacctcgggcatcggcatcggcatgtcggccatgggctcggccacgcgctaccacacctacctgccgccgccctaccccggctcgtcgcaagcgcagggaggcccgttccaagccagctcgccctcctaccacctgtactacggcgcctcggccggctcctaccagttctccatggtgggcggcgagcgctcgccgccgcgcatcctgccgccctgcaccaacgcctccaccggctccgcgctgctcaaccccagcctcccgaaccagagcgacgtggtggaggccgagggcagccacagcaactcccccaccaacatggcgccctccgcgcgcctggaggaggccgtgtggaggccctactgaggcgccaggcctggcccggctgggccccgcgggccgccgccttcgcctccgggcgcgcgggcctcctgttcgcgacaagcccgccgggatcccgggccctgggcccggccaccgtcctggggccgagggcgcccgacggccaggatctcgctgtaggtcaggcccgcgcagcctcctgcgcccagaagcccacgccgccgccgtctgctggcgccccggccctcgcggaggtgtccgaggcgacgcacctcgagggtgtccgccggccccagcacccaggggacgcgctggaaagcaaacaggaagattcccggagggaaactgtgaatgcttctgatttagcaatgctgtgaataaaaagaaagattttatacccttgacttaactttttaaccaagttgtttattccaaagagtgtggaattttggttggggtggggggagaggagggatgcaactcgccctgtttggcatctaattcttatttttaatttttccgcaccttatcaattgcaaaatgcgtatttgcatttgggtggtttttatttttatatacgtttatataaatatatataaattgagcttgcttctttcttgctttgaccatggaaagaaatatgattcccttttctttaagttttatttaacttttcttttggacttttgggtagttgtttttttttgttttgttttgtttttttgagaaacagctacagctttgggtcatttttaactactgtattcccacaaggaatccccagatatttatgtatcttgatgttcagacatttatgtgttgataattttttaattatttaaatgtacttatattaagaaaaatatcaagtactacattttcttttgttcttgatagtagccaaagttaaatgtatcacattgaagaaggctagaaaaaaagaatgagtaatgtgatcgcttggttatccagaagtattgtttacattaaactccctttcatgttaatcaaacaagtgagtagctcacgcagcaacgtttttaataggatttttagacactgagggtcactccaaggatcagaagtatggaattttctgccaggctcaacaagggtctcatatctaacttcctccttaaaacagagaaggtcaatctagttccagagggttgaggcaggtgccaataattacatctttggagaggatttgatttctgcccagggatttgctcaccccaaggtcatctgataatttcacagatgctgtgtaacagaacacagccaaagtaaactgtgtaggggagccacatttacataggaaccaaatcaatgaatttaggggttacgattatagcaatttaagggccaccagaagcaggcctcgaggagtcaatttgcctctgtgtgcctcagtggagacaagtgggaaaacatggtcccacctgtgcgagaccccctgtcctgtgctgctcactcaacaacatctttgtgttgctttcaccaggctgagaccctaccctatggggtatatgggcttttacctgtgcaccagtgtgacaggaaagattcatgtcactactgtccgtggctacaattcaaaggtatccaatgtcgctgtaaattttatggcactatttttattggaggatttggtcagaatgcagttgttgtacaactcataaatactaactgctgattttgacacatgtgtgctccaaatgatctggtggttatttaacgtacctcttaaaattcgttgaaacgatttcaggtcaactctgaagagtatttgaaagcaggacttcagaacagtgtttgatttttattttataaatttaagcattcaaattaggcaaatctttggctgcaggcagcaaaaacagctggacttatttaaaacaacttgtttttgagttttcttatatatatattgattatttgttttacacacatgcagtagcactttggtaagagttaaagagtaaagcagcttatgttgtcaggtcgttcttatctagagaagagctatagcagatctcggacaaactcagaatatattcactttcatttttgacaggattccctccacaactcagtttcatatattattccgtattacatttttgcagctaaattaccataaaatgtcagcaaatgtaaaaatttaatttctgaaaagcaccattagcccatttcccccaaattaaacgtaaatgttttttttcagcacatgttaccatgtctgacctgcaaaaatgctggagaaaaatgaaggaaaaaattatgtttttcagtttaattctgttaactgaagatattccaactcaaaaccagcctcatgctctgattagataatcttttacattgaacctttactctcaaagccatgtgtggagggggcttgtcactattgtaggctcactggattggtcatttagagtttcacagactcttaccagcatatatagtatttaattgtttcaaaaaaaatcaaactgtagttgttttggcgataggtctcacgcaacacatttttgtatgtgtgtgtgtgtgcgtgtgtgtgtgtgtgtgtgaaaaattgcattcattgacttcaggtagattaaggtatctttttattcattgccctcaggaaagttaaggtatcaatgagacccttaagccaatcatgtaataactgcatgtgtctggtccaggagaagtattgaataagccatttctactgcttactcatgtccctatttatgatttcaacatggatacatatttcagttctttctttttctcactatctgaaaatacatttccctccctctcttccccccaatatctccctttttttctctcttcctctatcttccaaaccccactttctccctcctccttttcctgtgttctcttaagcagatagcacatacccccacccagtaccaaatttcagaacacaagaaggtccagttcttcccccttcacataaaggaacatggtttgtcagcctttctcctgtttatgggtttcttccagcagaacagagacattgccaaccatattggatctgcttgctgtccaaaccagcaaactttcctgggcaaatcacaatcagtgagtaaatagacagcctttctgctgccttgggtttctgtgcagataaacagaaatgctctgattagaaaggaaatgaatggttccactcaaatgtcctgcaatttaggattgcagatttctgccttgaaatacctgtttctttgggacattccgtcctgatgatttttatttttgttggtttttatttttggggggaatgacatgtttgggtcttttatacatgaaaatttgtttgacaataatctcacaaaacatattttacatctgaacaaaatgcctttttgtttaccgtagcgtatacatttgttttgggatttttgtgtgtttgttgggaattttgtttttagccaggtcagtattgatgaggctgatcatttggctctttttttccttccagaagagttgcatcaacaaagttaattgtatttatgtatgtaaatagattttaagcttcattataaaatattgttaatgcctataactttttttcaatttttttgtgtgtgtttctaaggactttttcttaggtttgctaaatactgtagggaaaaaaatgcttctttctactttgtttattttagactttaaaatgagctacttcttattcacttttgtaaacagctaatagcatggttccaattttttttaagttcactttttttgttctaggggaaatgaatgtgcaaaaaaagaaaaagaactgttggttatttgtgttattctggatgtataaaaatcaatggaaaaaaataaactttcaaattgaaatgacggtataacacatctactgaaaaagcaacgggaaatgtggtcctatttaagccagcccccacctagggtctatttgtgtggcagttattgggtttggtcacaaaacatcctgaaaattcgtgcgtgggcttctttctccctggtacaaacgtatggaatgcttcttaaaggggaactgtcaagctggtgtcttcagccagatgacatgagagaatatcccagaaccctctctccaaggtgtttctagatagcacaggagagcaggcactgcactgtccacagtccacggtacacagtcgggtgggccgcctcccctctcctgggagcattcgtcgtgcccagcctgagcagggcagctggactgctgctgttcaggagccaccagagccttcctctctttgtaccacagtttcttctgtaaatccagtgttacaatcagtgtgaatggcaaataaacagtttgacaagtacatacaccataaaaaaaaaaaaaaaa

SEQ ID NO: 12197 - DNA, 5493 bp, Homo sapiens
gggttcggcctcaacatggcggttccggccgggcagtgaccaaggttttgccgtccgaaggactaagtggtgactgtcggcgtctccacctatcggggtggaatgcgagcacgcggggacgagcgctgagaagcggcggtgacgggaaggggggggtcagtggattgtgccccagaaaccgaagcggcggcgtctgttccttcttgtttctaggctccagtgcgttcggggccccgcccggccgggccaggccggcgggcggcggcggtagctgctgcagccgcaggataacctcgcagggtgggccggagggcgggcgccgccgctgcctgtgctgcggcgatggcccagtgtgtacaatcagtgcaggagctaatcccggactccttcgtcccctgtgtcgctgcgctgtgcagcgacgaagccgagcggctcactcgtctcaatcacctcagcttcgcggagctgcttaagcccttctcccgcctcacttccgaggttcacatgagagatcctaataatcaacttcacgtaattaaaaatttgaagatagcagtaagcaacattgtcacccagccacctcagcctggagccatccggaagcttttgaatgatgttgtttctggcagtcagcctgcagaaggattagtagctaatgtgattacagcaggagattatgaccttaacatcagtgccactactccatggtttgagtcttacagagaaacctttcttcagtcgatgccagcatcggatcatgaatttctgaaccactatttagcatgtatgttggtagcgtcatctagtgaagctgaacctgtggaacagttttcaaagttgtcacaagaacagcatcgaattcagcacaacagtgattattcctaccccaagtggtttataccaaatacacttaaatactatgtacttttacatgatgtaagtgcaggagatgaacagagagctgaatcaatttatgaagaaatgaaacagaaatatggaactcagggttgctatttacttaaaattaattctcgaacatctaatcgagcatcagatgaacagataccagatccttggagtcagtatctccagaaaaatagtattcaaaaccaggaatcatatgaagatggcccttgtactataacttcaaataagaattctgataataacttgctttcattggatggattagataacgaagtcaaagatggcttaccaaataactttagagctcacccacttcagttggagcaatccagtgacccttctaacagtattgatggcccagatcatctaagatctgcttcatcgttacatgaaacaaagaaaggaaatactggaataattcatggtgcatgtttaacacttactgatcatgatagaattcgacagtttatacaagagttcacatttcggggccttttgccacatatagagaaaacaattaggcaattaaacgatcagctaatatcaagaaaaggtttgagtcgatctctattttctgcaactaaaaaatggtttagtggcagtaaagttccagaaaagagcattaatgacctgaaaaatacatctggcttgctgtatccgccggaagcaccagaacttcaaatcaggaaaatggctgacttatgttttttggtgcagcattatgatttggcttacagttgctatcatactgcaaagaaagattttcttaatgatcaagcaatgctttatgcagctggtgccttggaaatggcagcagtgtctgcttttcttcaaccaggagcacctaggccatatcctgctcattacatggatacagcaattcagacatacagagatatctgcaagaatatggtgttggctgaaagatgtgtgttgcttagtgctgaacttttaaaaagccaaagcaaatattcagaggctgcagctctcctaatacggttgaccagtgaggattctgatcttcgaagtgcacttcttttggaacaggcagcacattgctttataaacatgaaaagtcccatggttagaaaatatgcatttcatatgatattggcaggccatcgatttagtaaagcagggcagaaaaagcatgctttacgctgttattgtcaagccatgcaagtttacaaaggaaaaggctggtctcttgcagaggatcacattaatttcactattgggcgccagtcctatactcttagacagctggataatgctgtgtctgcttttaggcatattctaattaatgaaagtaaacaatctgctgctcaacagggggctttcctcagagaatatctttatgtttacaagaatgtaagtcagctgtcaccagatggtcctttgccacagcttcctttaccgtatattaacagttcagcaacacgggttttttttggccatgacagacgaccagcggatggtgaaaaacaagcagctactcatgtaagtcttgatcaagaatatgattctgaatcctctcagcagtggcgagaacttgaggaacaagttgtttctgtggttaacaaaggagtaattccatccaattttcatcccacacaatactgtttgaacagttactcagataattcaagatttccacttgcagttgtagaagaaccaattacagtggaagtggcttttagaaaccctttgaaagttctacttttgttgactgatttgtcattgctttggaagtttcatcctaaagatttcagtggaaaggataatgaagaagttaaacaactagttacaagtgaacctgaaatgattggagctgaagttatttcagagttcttaattaatggcgaagaatcaaaagtggcaagactaaagctctttccccatcacataggggagctgcatattctgggagttgtttataatcttggcactattcagggctctatgacagtagatggcattggtgctcttcccggatgtcacacaggaaaatattccttgagtatgtcagtccgagggaagcaggatttagaaattcaaggtcctcgacttaacaacacaaaagaagagaaaacatctgttaaatatggccctgatcgacgtttagatcccataatcacagaagaaatgccactgttggaggtgttctttatacattttcctacagggcttctctgtggagaaatccgaaaagcatatgtagaatttgtcaatgtcagcaaatgtccacttactggattgaaggttgtttctaaacgtccagagttctttactttcggtggtaatactgctgttctaacaccactaagtccctcagcttctgagaattgtagtgcttacaagactgttgtgacagatgctacctctgtgtgtacagcactcatatcatcagcttcttctgtagactttggcattggcacaggaagtcaaccagaggtgattcctgttccccttcctgacactgttcttctacccggagcctcagtgcagctgccaatgtggttacgtgggcctgatgaagaaggtgtccatgaaattaactttttgttttactatgaaagtgtcaaaaagcagccaaaaatacggcacagaatattaagacacactgcaattatttgtaccagtcggtctttaaatgtacgggccactgtctgcagaagtaattctcttgaaaatgaagaaggcagaggaggcaatatgctagtctttgtggatgtggaaaataccaatactagtgaagcaggcgttaaggaattccacatagtgcaagtatcaagtagtagcaaacactggaagttacagaaatctgtaaatctttctgaaaacaaagataccaaacttgccagtagggagaagggaaagttttgctttaaggcaataagatgtgagaaagaagaagcggccacacagtcctctgaaaaatatacctttgcagatatcatctttggaaatgaacagataataagttcagcaagcccatgtgcagacttcttttatcgaagtttatcttctgaattgaaaaaaccacaagctcacttgcctgtgcatacagaaaaacagtcaacagaggatgctgtgagattgattcaaaaatgcagtgaggtagatttgaatattgtcatattatggaaggcatacgttgtggaagacagtaaacagcttattttggaaggtcaacatcatgttattcttcgcactataggaaaagaagccttttcatatcctcagaaacaggagccaccagaaatggaactattgaaatttttcaggccagaaaacattacagtttcctcaaggccatcagtagagcagctttctagtctcattaaaacgagtcttcactacccagaatcatttaatcatccatttcatcaaaaaagcctttgtttagtaccagtcactcttttactttccaattgttctaaggctgatgtagatgtcatagttgatcttcggcataaaacaacaagtccagaagcactggaaatccatggatcattcacatggcttggacaaacacagtataaacttcaacttaaaagccaggagattcacagtctgcagctgaaagcatgctttgttcatacaggtgtttataaccttggaactcctagggtatttgccaagttatcggaccaagttacagtgtttgaaacaagtcagcagaattccatgcctgccctgatcatcatcagtaatgtgtgacaacttggaaatttgtactgaaatccacaataatcagtttttgctggatgggttttacagcagtatttgatatacctaacttgttatggaggttgattgatatctgatccctgcaaaatactttgacttgtcattttgttgatgatgcaaagcacgttggactgagaatacttaacattctttttctgtatttctttaaaccctgagaataatttacatgctcataatacaggatatcagcatatttgtgcaccttattaagccccatcttaagaaaacacaaagtctaagtctgctgttacaacttgtcaatggtatacgaatattaggagatgattctgagaaaggaaaggccttgttggcagtactcctgttaagccattagtctctaaattccagctttactgtgaagttctatagagtgttaaatacaaattttcctgtcttgcttcacacagttccttaaaatcagttttgaactttggtcatagagtcttcatatttcagtatttggtggtccctatgacttatacataactttgtaaaaagaaaaaaaaattttttctgatgctttgaatatagttttgaaaggagttttgacttttttcccctcattcatctcagtatagagtgcgctatttcacaatacaatttttgtcattaaaattaccatattctttattatataacgttaactattgagttgatctgtttaaaatataaatctcaagttaattaaaaataagcttttcaaaaatgtattatatttataacaaatatactgtaaatagaataaagacatgctattcactgtaaaaaaaaaaaaaaaaaaaaaaaaaaaaa

SEQ ID NO: 12198 - DNA, 1937 bp, Homo sapiens
gtacctcacggaagccggctttggccctgcggctgctaccgtcgccgcggagaaattgttggatctggcagtctaggaatgaatctcctctcagcctttaagctcacctggtcagaatccttggatgagcctgtgggaccgttcctcctagcccggtggtttggaaccagtggctttgggactgtaagaggatggacaaagattctcaggggctgctagattcatccctgatggcatcaggcactgccagccgctcagaggatgaggagtcactggcagggcagaagcgagcctcctcccaggccttgggcaccatccctaaacggagaagctcctccaggttcatcaagaggaagaagttcgatgatgagctggtggagagcagcctggcaaaatcttctacccgggcaaagggggccagtggggtggaaccagggcgctgttcggggagtgaaccctcctccagtgagaagaagaaggtatccaaagcccccagcactcctgtgccacccagcccagccccagcccctggactcaccaagcgtgtgaagaagagtaaacagccacttcaggtgaccaaggatctgggccgctggaagcctgcagatgacctcctgctcataaatgctgtgttgcagaccaacgacctgacctccgtccacctgggcgtgaaattcagctgccgcttcacccttcgggaggtccaggagcgttggtacgccctgctctacgatcctgtcatctccaagttggcctgtcaggccatgaggcagctgcacccagaggctattgcagccatccagagcaaggccctgtttagcaaggctgaggagcagctgctgagcaaagtgggatcgaccagccagcccaccttggagaccttccaggacctgctgcacagacaccctgatgccttctacctggcccgtaccgcgaaggccctgcaggcccactggcagctcatgaagcagtattacctgctggaggaccagacagtgcagccgctgcccaaaggggaccaagtgctgaacttctctgatgcagaggacctgattgatgacagtaagctcaaggacatgcgagatgaggtcctggaacatgagctgatggtggctgaccggcgccagaagcgagagattcggcagctggaacaggaactgcataagtggcaggtgctagtggacagcatcacaggcatgagctctccggacttcgacaaccagacactggcagtgctgcggggccgcatggtgcggtacctgatgcgctcgcgtgagatcaccctgggcagagcaaccaaggataaccagattgatgtggacctgtctctggagggtccggcctggaagatatcccggaaacaaggtgtcatcaagctgaagaacaacggtgatttcttcattgccaatgagggtcgacggcccatctacatcgatggacggccggtgctctgtggctccaaatggcgcctcagcaacaactctgtggtggagatcgccagcctgcgattcgtcttccttatcaaccaggacctcattgccctcatcagggctgaggctgccaagatcacaccacagtgaggagtggtggcaggactcgtgggccctctccggcctgtttcccctgccactccagcccccttgagctgggaactcaggctcctggaaaaacctgggcagtgggaggctcagctgcgggccattgatttgagcctttgagggaggatagggctggcctttgtgaagccagcagaggctgagaacctcaggcttccctagatccagagcccctccccatcttcctctctctaaaaacaaccctaccccccattgccaccttcactcctgtgtctccagctgattagcctcagactcttcttttattgtttttcttttgtaaataaaaagcaccaggttccaaaaaaaaaaaaaaaaaaa

SEQ ID NO: 12199 - DNA, 10389 bp, Homo sapiens
atgaccaatgggtctgtgttttggaccggcgaagcccaatggcgcgacagggaaggcgggcccgagatgggttagggtgtccttgcagggtgtctgagctaaacttcaccaaataatagctgtttgtattttggctgctgcaggagccattttagaaataaatatcttccttcaatagatgaaaatgaaaatacagaaaaaagagaagcagttgtcaaatttaaaagttttgaatcactccccaatgtctgatgcctctgtcaattttgactacaaatctccatccccatttgactgcagcactgatcaagaagagaaaattgaagatgttgctagtcactgtctgcctcagaaggacctgtatactgctgaagaggaagctgctaccctttttcctaggaaaatgacatcccataatgggatggaggacagtggaggaggaggtactggagtgaagaagaaacggaagaaaaaggagccaggagaccaagagggtgcagcaaagggaagcaaggacagagagcccaagccaaagaggaaacgagaaccgaaagagccaaaggaacccagaaaggccaaggagccgaagaaggccaaggagcacaaggagccgaagcaaaaagatggggcaaagaaggcacggaagccccgggaggcctcgggcaccaaggaggccaaagagaagaggagctgcactgactctgcagccaggacgaagtccaggaaggccagcaaggagcaaggaccaaccccagtggagaaaaagaagaaaggaaaaaggaaaagtgaaactacagtggagagtttagagctggatcagggcctgacgaacccatctctgcggagtcctgaggagtccactgagtctacagacagccagaaacgacgctcgggaaggcaagtaaagcgcagaaaatacaatgaggacctggacttcaaagtggtggatgatgatggggaaacaattgctgttcttggagctggtcgaacatctgcactctcagcctctacactggcctggcaggcggaggagcctccagaagatgatgcaaacatcattgagaagatcctggcatctaagactgtccaggaggttcacccaggagaacctccgttcgacttggagctgttctacgttaagtatagaaatttttcctacttacattgtaaatgggccacaatggaagagctcgaaaaggatcctcgcatcgcacagaagatcaagcgatttaggaataaacaagcccagatgaagcacatttttacggagcctgatgaagacttgttcaatccagactatgtagaagttgatcgcatcttggaggtggcccacaccaaggatgcagaaacaggggaggaggtaacacattacctggtgaagtggtgctcactaccatatgaagaaagcacgtgggagctagaggaagatgtagatcctgcaaaagttaaagaatttgaatctcttcaagttctccctgaaattaagcatgtggagcggcctgcttcagactcctggcagaaacttgagaagtctcgcgagtataagaacagtaaccagctccgggagtaccagctggaagggatgaactggcttctttttaactggtataacagaaaaaactgtattttggctgatgagatgggcctagggaaaaccatccagtccatcacattcctttcagaaatatttctgagaggaatccacggcccttttctcattatcgcccctctctccaccatcactaactgggagcgggagttccggacatggacagagatgaatgccattgtgtaccacggcagccagatcagcaggcagatgatccagcagtatgaaatggtgtacagagacgcccagggaaaccccctttcaggagtcttcaagttccacgtcgtcatcacaacatttgaaatgatcctagcagactgcccagagttgaagaagattcactggagctgtgtgataattgatgaagcccacagactgaagaataggaactgcaaacttctggagggtctaaagcttatggccctggaacataaagtgcttctcactggaacacccttgcagaactctgtggaggagctcttcagtttgttaaattttctggagccatcacagtttccttcagagaccgctttcttggaggaatttggagatctgaaaacagaggagcaggtaaagaaactgcagtctatcctaaaaccaatgatgcttcggcggctgaaagatgatgtggaaaagaaccttgctcccaaacaagagacgatcattgaggtggaactgaccaatatccagaaaaagtactaccgtgccatcctcgagaagaacttttccttcctgaccaagggggcaaatcagcacaacatgcccaatctcatcaacaccatgatggagctgaggaagtgctgtaaccatccctacctgatcaatggagcagaggagaaaattctagaagatttccgaaaaacccacagccctgatgcccctgactttcagctgcaggccatgattcaggcagcaggaaagcttgtgttgattgataaactactccctaagctgattgcaggtggccacaaagtactcatcttctcccagatggtgcgctgcctcgacatcctagaagattacctcatccagagaagatacacctatgagcgaattgatgggcgagtacggggaaacctgcgccaggcagccatcgaccggttctgtaagccagattcagaccgctttgtctttcttctgtgcaccagagcgggaggcctggggatcaatctcacagctgctgatacctgcatcatatttgattctgactggaacccacaaaatgacttgcaggctcaggcccgatgtcaccgcataggccagagcaaagctgtgaaggtgtatcgcctcatcactcgaaattcctacgagcgcgagatgtttgacaaggccagcctaaagctggggctggacaaggctgttcttcaggacatcaaccgaaagggcggcaccaatggggtacagcagctctcaaaaatggaggtggaggacctactccggaaaggtgcttatggagccttaatggatgaagaagatgaaggctccaagttctgtgaagaagacatagaccagattctgcagaggcgaacgcacaccatcaccatccagtctgaggggaaagggtccacttttgccaaggctagctttgtggcttcaggaaacagaacagatatttccttagatgatcctaacttttggcagaaatgggctaaaatagctgaactagacactgaagcaaagaatgaaaaggaaagcttagtgatcgaccgacctcgcgtgagaaagcagaccaaacactacaactcgtttgaggaagacgagctcatggagttttcagagttagacagcgactcagacgaaaggcccacgagatccaggcgcctcaatgacaaagccaggcgctacctccgagcggagtgcttccgggtagagaagaacctgctcatctttggctggggccggtggaaggacatcctgactcatggccgattcaagtggcatctgaacgagaaggacatggagatgatttgccgtgccctcctggtgtactgtgtcaagcattataagggggacgagaagatcaagagtttcatttgggaactgatcacacctaccaaagatgggcaagcccagaccctccagaaccactcaggcttatctgccccagtccccagagggaggaaggggaagaagacgaagaaccagttgctaatcccagagctaaaggatgcagattggctagccacctgcaaccccgaggtggtcttgcatgatgatggctataagaaacacctcaaacagcactgcaacaaagtacttttgcgagtccggatgctgtactacctaaaagctgaaatactgggagaagcagctgagaaagcatttgaaggatctcctgccagggagctggatgtacctctgcctgacatcgactacatggagatcccagtggactggtgggatgctgaagccgataagtcacttctcattggcgtgttcaagcatggttatgaaaggtacaatgccatgcgagcagacccagcactttgcttcctggagaaagttgggatgcccgatgagaagtccctttctgcagaacagggtgttacagatgggacctcagacattcctgaaagaggcaacacagataaagaagacaatgctgaggacaaagtagatggcctccagaaacaaacggagagttccagtgatggaggtgatggcgtttttagcgaaaagaaggatgacagccgggcagcccaggatggctccgacccagacaaatcgccctggccagtttcctccgccctcacagctcgtctcagacgtctggtcactgtttaccagcgctgcaaccgcaaggaactgtgccggcctgaaattctgggaccaggtaaccaaggatattgggttcaggaagagatgttcaggagaacctcagaaatggacctcatcaacaaggaagcccaaaagaggtggactaggagagaacaagcagacttctatagaacagtgtcttcctttggtgttgtttacgatcaagaaaagaaaacctttgactggacacagttccgcatcatttcccgtttggacaagaagtcggatgagagcctggaacagtatttttatagttttgtggccatgtgccggaatgtctgtcgtctacccacatggaaagatggcggtcccccagataccaccatctacgttgaacccatcactgaggaacgtgctgcaagaactctgtaccgcattgaactgttacggaaagtccgagagcaagtgctcaagtgccctcagctgcatgaacgcctccagctgtgcaggcccagcctctacctcccagtctggtgggagtgtgggaagcatgatcgagacctgctcatcggcactgccaaacatgggctgaaccgcactgactgttacatcatgaacgacccccagctgtccttcctggatgcctatagaaactatgcccagcataaaagatctggcacccaggcaccaggaaatctctgttgcctttaccagaccaactccaagttatatgaatctcttacatattctcaaatgagtaggacttcagagtcccttgaaaatgaacctgaaaatctagtgagagtagaaagcagagatgatcatctcagcctgcctgatgtgacatgtgaaaactttatttctaaagttcaggatgtcatttccatcaaccatgatgaaagtctgctgcctgagtccttagagagcatgatgtatggtaagaaggtgctcagccaagaaccaagctcttttcaggagagcccaagtaccaatactgaatctagaaaagatgttattaccatctcaataagcaaagatgggaactgccagtctggtggccctgaggcagaaatagcttctggccctacttttatgggtagcttagaagcaggaggagtagctcaagcaaacatcaaaaatggaaaacatttgttgatgtctatttcaaaggaaggggagctctgctgcagtgaggcaggacagagacctgaaaacattggccagctggaagccaagtgtttagcttccccttccttgaatccaggaaatgaaagtgggtttgtagatatgtgcagtcttagtgtctgtgactccaaaagaaacctgtcatcagatcagcaattaattgatttattggaaaacaaaagcttagaaagtaaattgattttgagtcagaaccacagtgatgaggaggaagaagaggaggaaaacgaggaggaaaacttagccatggcagtaggcatgggggaaaggccagaggtattgcatctcacggagcccactactaacatctcaagggaaaagaaccaaggcttccaagatgaaaccaagaaaggaagcttagaggtggcaaaccagactcctgggctacagagggctttccccgctccagcagcctgtcagtgccactgcaaacacatggagaggtggatgcatggcctcgagaatgatgaatttgaaatcgagaaacccaaggcttatatcccagatctgttcaaaagtaaaaccaatactatcgccatggagggtgaacccactgctattccatcacagccgtttaaagtgaagcatgagcttttaaaagaaccttggaaagaaagtgcagaggggcaaaacgttttccccacatatcctcttgaaggaagtgagctcaaatcagaagacatggattttgagaataaagatgattatgatagagacggaaactgccatagtcaagattatccagggaagtactctgaagaggagagcaagagctcaacatcgggcatcacaggagacattggggatgagctacaggaggctcgagctcccactattgctcagctgctacaggagaaaactctctattccttctctgagtggccaaaggaccgcgtgataattaaccgcctagataatatctgccacgtggtgttaaaggggaagtggccctctagccagcagtatgagccctcaggcacactgcccaccccggtattaaccagcagtgctggttctcgaaccagcctctcagagccggaagcagcagaacacagcttcagcaacggcgcagcattggcggcccagatccacaaggagagcttcttagctccagtattcacaaaggatgaacaaaagcacaggcgtccctatgagtttgaggtggagagggatgcaaaggctcggggcctggagcagttctctgccacccacgggcacacccctatcatcctcaatggctggcatggggagtcagctatggacctctcctgctcatcagaggggtccccaggagccacatcccctttcccagtgagcgccagcacccctaagattggggctatcagttcacttcagggagcccttggcatggacttgtctgggattctgcaagctggcctgatccatcctgtgactggacagattgtcaatggaagcctcagaagagatgatgcagccacgaggaggcggagagggaggcggaaacatgttgaaggagggatggacctcatctttttgaaggagcagacacttcaggcgggaatcttggaagtccatgaagacccagggcaggccaccttgagcaccacacaccctgaggggccagggcctgccacctcggctcctgagccagctacggcagccagcagccaagccgagaaatccattcccagcaagagtctgcttgactggctaaggcagcaggctgactactccttagaagttcctggctttggggcaaatttttcagacaaaccaaagcagaggaggccacgctgtaaagaacctggaaaattagatgtcagctccctgagcggggaagagagagttcctgccatccccaaggagccaggactgagggggtttcttccagaaaacaagttcaatcacactctggctgagcctattcttcgagatacgggcccccgcaggagggggaggcggcctcggagcgaactcctgaaggctccttccattgtggcagactctccctctggaatggggccactgttcatgaatggactgattgctgggatggacctggtaggacttcagaacatgagaaatatgccaggcatccccctcaccgggctggtggggtttccagctggctttgccacgatgccaacaggtgaagaggtcaaaagtaccctgagcatgctgcccatgatgctgccaggcatggctgctgtgccccagatgtttggtgttgggggactcctcagtccacccatggcaaccacctgcacttccactgctccggcgtctctatcaagcacaacgaaaagtggtacggcagtgactgaaaagactgcggaagacaagccgagtagccatgatgtgaaaacagacactttagctgaggacaagcctggtccaggtccattttctgatcagtctgaacctgcaataactactagtagtcctgtggcttttaacccatttctcatcccaggagtatctcctggactcatttacccatccatgttcctctcccctggtatgggcatggctctgccagccatgcagcaggccagacactcggaaatagtaggtctggagagccagaagaggaagaagaagaagacaaagggggacaaccccaactcccacccagagcctgctcccagctgtgaaagggagcccagcggtgatgagaactgtgccgaacccagtgcccctttgcccgcagagagagaacatggggcacaggctggggagggggcactcaaagactccaacaacgacaccaattagaacttttttcatttaagaaattattgtgacttgtaagtttcttatcccataaaggtttgttacttccctcacttcacctccataagaacctgtgtttccataagtaagattacgtacctgatttcctgtctgagaactatggtaacagatgttaatagttgcagggtctcaccacttcattagataagtgttgtctacctagtctaggaggcacagaattctcattctgttatccagttcattccagcaatcatagttaatacagtacttggtgacacgccctacccccttctcttccaagtttcccactcacttgaggaggaaaaatggcaaaagaaagctgtctagggttttaccattgaagggtggaagaacagagacaaagaggagctctttttctgtgagctgggttgcacaggaagaatgtcacagggaaccaaaaagcacagaaaaaggaagtgctggtgcatatttttgagttaaaatatttccctattttatcatgattactaagtgagtagtatagacagaagtatataactaatggttgaaaatacatatattcatttctttataaaaaacaaaaaccttaccggtagtaatataatttcccccttggtggtttttcagacacctgcagcaagaagaaatactgactgactaggcattattttctatacatccctctcaccagtgaaaagattcctcttgctgcgagaaagctttacccaccatgagttattgctgtcgacgggggtggggcaaggacccgcgctccgtagagctacacgctgcttcacaagcacacggctagcgctctgctctcacctggttcgcttacagatttctctagccattaatttgcctctctgtgtttaaagagcaccaggaccgaatggattttcacttcaggctttccttcaccaagaataaggttctttctggagcctgcaagaagacagttgcccaacactttgacacttgctagtaggtcctttgatcaagagtgtctgaggctgtcaaatgtgtgccaccctttataatacagctatgaaaagttacttctccattaatttctccattctgtttatatcttacagttggacccaaattccaaattatcagttaatcgaaactacattgcaagtcaacattattttctcttcttcctcagcttctccatgtttaggaactgagaaagaacctgcctaagcagcacttccccatgtcctttcaccttcatgttaacgtcccttctgatggtctcactcttcacaggtagttcacactctgagacttgaagtaagctcatggttcagtactctgggggcgcagggctgcgcaggacccttggaaatgttgcaagtgttactagtaccagtttcactttttgttgtcacaatttactgtattttttactttttctgttacagttttgctaatttatcagaaggtccaaaagtctgacataactatttcattttgcattatttatttatgatgcttttttcattgtcttttatacatttgggattataaattatgtaaatgttaaaatgagcatctcaaagaagtctgttaaatcatgactgaaaaaaatcaatcagatgtatcttcaaaaagtggagtcccagttttatgaatcagagatataaaccagaaattctataactgatcatagaagaagaatccagtaattgaacaaatcctatttaatgacatccttgtagcatagatggtctataatgctgaccacagatttcttagaaatgctgctctctctatttaactaacattttgttcagttttgcctccagtggaagcagaaagggttttttcagctgttaaatcctaaaaatcaatataatttatttatgtaagaaaaataactcaatcaatatatttttgaaccttttaagtactaattttctttttatcaagtagaaaaaaaaatgtatttgccctaaatccttaaaatacaaatgctataaaaattcctgtatcttgaaagccttactgcaaatgagtattatagacatccagcagagtctggttttctttgt

SEQ ID NO: 12200 - DNA, 4612 bp, Homo sapiens
gcggcgggggcggccatcgtgctgcgcagcctgggcgcttggggagccgcccacttcgccgggtcgcgccccgacggccggagcgtggatgcggcggcgcccgccgagccggggcggacgcggggcggcccgggcccgggagacgcgccggcagccccggcaccgcagcggtcgcaggatggccgaggctatcagctgtactctgaactgtagttgccaaagtttcaaacccgggaaaataaaccaccgtcagtgtgaccaatgcaagcatggatgggtggcccacgctctaagtaagctaaggatcccccccatgtatccaacaagccaggtggagattgtccagtccaatgtagtgtttgatattagcagcctcatgctctatgggacccaggccatccccgttcgcctaaaaatcctactggaccggctcttcagtgtgttgaagcaagatgaggttctccagatcctccatgccttggactggacacttcaggattatatccgtggatacgtactgcaggatgcatcaggaaaggtgttggatcactggtgcatcatgaccagtgaggaagaagtggccaccttgcagcagttccttcgttttggagagaccaaatctatagttgaactcatggcaattcaagagaaagaagagcaatccatcatcataccaccttccacagcaaatgtagatatcagggctttcatcgagagctgcagtcacaggagttctagcctccccactcctgtggacaaaggaaaccccagcagtatacacccctttgagaacctcataagcaacatgactttcatgctgcctttccagttcttcaaccctctgcctcctgcactgatagggtcattgcccgaacaatatatgttggagcagggtcatgaccaaagtcaggaccccaaacaggaagtccatgggcccaaccctgacagcagcttcttaacttccagttccacaccatttcaggttgaaaaagatcagtgtttaaactgtccggatgctattactaaaaaagaagacagcacccatttaagtgactccagctcatacaacattgtcactaagtttgaaaggacacagttatcccctgaggccaaagtgaagcctgagaggaatagccttggtacaaagaagggccgggtgttctgcactgcatgtgagaagaccttctatgacaaaggcaccctcaaaatccactacaatgccgtccacttgaagatcaagcataagtgcaccatcgaagggtgtaacatggtgttcagctccctaaggacgcggaatcgccatagcgccaaccccaaccctcggctgcacatgccaatgaacagaaataaccgggacaaagacctcaggaacagcctgaacctggccagctctgagaactacaagtgcccaggtttcacagtgacgtccccagactgtaggcctcctcccagctaccctggttcaggagaggattccaaaggccaaccagccttcccaaacattgggcaaaatggtgtgctttttcccaacctaaagacagtccagccagtccttcctttctaccgcagtccagccacgcctgccgaggtagcaaacacgcctgggatactcccttccctcccgctgttgtcctcttcaatcccagaacagctcatttcaaacgaaatgccatttgatgcccttcccaagaagaaatccaggaagtccagtatgcctatcaaaatagagaaagaagctgtggaaatagctaatgagaaaagacacaacctcagctcagatgaagacatgcccctacaggtggtcagtgaagatgagcaggaggcctgcagtcctcagtcacacagagtatctgaggagcagcatgtacagtcaggaggcttagggaagcctttccctgaaggggagaggccctgccatcgtgaatcagtaattgagtccagtggagccatcagccaaacccctgagcaggccacacacaattcagagagggagactgagcatacaccagcattgatcatggtgccaagggaggtcgaggatggtggccatgaacactacttcacacctgggatggaaccccaagttcctttttctgactacatggaactgcagcagcgcctgctggctgggggactcttcagtgctttgtccaacaggggaatggcttttccttgtcttgaagattctaaagaactggagcacgtgggtcagcatgcattagcaaggcagatagaagaaaatcgcttccagtgtgacatctgcaagaagacctttaaaaatgcttgtagtgtgaaaattcatcacaagaatatgcatgtcaaagaaatgcacacatgcacagtggagggctgtaatgctacctttccctcccgcaggagcagagacagacacagctcaaacctaaacctccaccaaaaagcattgagccaggaagcattggagagtagtgaagatcatttccgtgcagcttaccttctgaaagatgtggctaaggaagcctatcaggatgtggcttttacacagcaagcctcccagacatctgtcatcttcaaaggaacaagtcgaatgggcagtctggtttacccaataacgcaagtccacagtgccagcctggagagctacaactctggccccttgagcgagggcaccatcctggatttgagcactacctcgagcatgaagtcagagagtagcagccattcttcctgggactctgacggggtgagtgaggaaggcactgtgcttatggaggacagtgatgggaactgtgaagggtcgagccttgtccctggggaagatgagtaccccatctgtgtcctgatggagaaggctgaccagagccttgctagcctgccttctgggttgcccataacctgtcatctctgccaaaagacatacagtaacaaagggacctttagggcccactacaaaactgtgcacctccggcagctccacaaatgcaaagtaccaggctgcaacaccatgttttcgtctgttcgcagtcgaaacagacacagccagaatcccaacctgcacaaaagcctggcctcatctccaagtcacctccagtaacaagatggcaaaccaagtatgctcagataagcttttttcataattcaggaataaagtagtccatagaaatgtttctgtttcatatcatttggggcgagtcaggcaaaagtatttgatttgactttatagttttccacagcacaatgagcaaaagacaaacctcgtgggaagatgacactggggcagcccttcctattatttttcttagcccaagaggtctttcactgatacaaggaaaacttgcagaaatgtgatttttcccagatttgtttacatgttccctgggacagatccaggtctgcagatcgacaccagtgggcccaggacctgggggtggctttaaatgaggcttgcagtgttaaaggtcttggataagaagggtcctggggaagaagactctgtggacaagataccagtccccaaaacagcattttcagttccttcttcaattagtttgaaatccagacctgagtttggaagactgattttttgagaccatccctgtgtttggagtggataattgtccctcccctcagccctgcaccagaggtctcatatgttaccccagggagttctcagaggattgggttggcctctaacatgttccttgttaattcttgttctgtaacatgcattcaagaagctaggggaaaaatatctcatgcacttaaataatggtcttcaatttaatttaaaaatattttgacaatatttaatttgtgcttatgtggtgtttggtgtgagtgcagatattgcactgtgtcacctctggatctctgctcagaagcagaacaagtgatgacctaaatgtcaaaatcactgctcgttttcatttggtgaacttcaaactctgttctttttggtcacctgtggaatgaatgcaagcatgattttggcaggaacatttgtacatattctgccgtagataatgtggttctgatggttgttgtgtattttcagtatcactggatccctcagtcttcaccgttttataaacgtataagattaggatgaacttttgaatttacttggtaggaaaaaaagtaggacattattgccatattgtatgtcttaatatttaacttattcggaaatatattccacactgttacatacattttccatggtagaaaggaagttcagtcagtcctgtggaatgaaaccatctcctaaaattcagcatttgcagcattctaaaagcctgtgtaggtacaaggacattgattttgtattcagaattcaagttaactatcttttaaattcgtggttgatgtaagtaataaaaaacattcttaaagttgagggttataagagagattatttctgtggtctaaaggttaaaaagccaacaacctgttaccaattatttcagctttttttgttttaataagtgtgacaacttaaaacttgtttctatttaaagtgaaatgtatctttcaactgtttagttacccagctgtttaatattccagtcttcccaaagtgaaaagatttgtatacaaatgttttctatgatttaataaaaatatatggcacacc

SEQ ID NO: 12201 - DNA, 2622 bp, Homo sapiens
aaccgtctcctggttggggggtgggggggaaagatggcggagctgatgctgctcagcgagattgctgacccgacgcgtttcttcaccgacaacctgcttagcccggaggactggggtctgcagaacagcaccttgtattctggcctagatgaagtggccgaggagcagacgcagctcttccgttgcccggagcaggatgtcccgtttgacggcagctccctggacgtggggatggatgtcagcccctctgagcccccatgggaactcctgccgatcttcccagatcttcaggtgaagtctgagccatcttccccctgctcttcctcctccctcagctccgagtcatcgcgtctctccacagagccatccagcgaggctcttggggtaggggaggtgctccatgtgaagacagagtccttggcacccccactgtgtctcctgggagatgacccaacatcctcatttgaaaccgtccagatcaatgttatccccacctctgatgattcctcagatgtccagaccaagatagaacctgtctctccatgttcttccgtcaactctgaggcctccctgctctcagccgactcctccagccaggcttttataggagaggaggtcctggaagtgaagacagagtccctgtccccttcaggatgcctcctgtgggatgtcccagccccctcacttggagctgtccagatcagcatgggcccatcccttgatggctcctcaggcaaagccctgcccacccggaagccgccactgcagcccaaacctgtagtgctaaccactgtcccaatgccatccagagctgtgcctcccagcaccacagtccttctgcagtccctcgtccagccacccccagtgtccccagttgtcctcatccagggtgctattcgagtccagcctgaagggccggctccctctctaccacggcctgagaggaagagcatcgttcccgctcctatgcctggaaactcctgcccgcctgaagtggatgcaaagctgctgaagcggcagcagcgaatgatcaagaaccgggagtcagcctgccagtcccggagaaagaagaaagagtatctgcagggactggaggctcggctgcaagcagtactggctgacaaccagcagctccgccgagagaatgctgccctccggcggcggctggaggccctgctggctgaaaacagcgagctcaagttagggtctggaaacaggaaggtggtctgcatcatggtcttccttctcttcattgccttcaactttggacctgtcagcatcagtgagcctccttcagctcccatctctcctcggatgaacaagggggagcctcaaccccggagacacttgctggggttctcagagcaagagccagttcagggagttgaacctctccaggggtcctcccagggccctaaggagccccagcccagccccacagaccagcccagtttcagcaacctgacagccttccctgggggcgccaaggagctactactaagagacctagaccagctcttcctctcctctgattgccggcacttcaaccgcactgagtccctgaggcttgctgacgagttgagtggctgggtccagcgccaccagagaggccggaggaagatccctcagagggcccaggagagacagaagtctcagccacggaagaagtcacctccagttaaggcagtccccatccaaccccctggacccccagaaagggattctgtgggccagctgcaactatatcgccacccagaccgttcgcagccagcattcttggatgcaattgaccgacgggaagacacattttatgttgtctctttccgaagggaccacctgctgctcccagccatcagccacaacaagacctcccggcccaagatgtccctggtgatgcctgccatggcccccaatgagaccctgtcaggccgtggggccccgggggactatgaggagatgatgcagatcgagtgtgaggtcatggacaccagggtgattcacatcaagacctccacagtgcccccctcgctccgaaaacagccatccccaaccccaggcaatgccacaggtggccccttgccagtctctgcagccagccaggcccaccaggcctcccaccagcccctctacctcaatcatccctgacctctgccattcacactgacttagaacggggggagggggtaccaggtggccaggtgggactgtttcaaatttccctgatccccaggcttggggcaattggtaaaggaaagagcaggtgtgggggttaagcacttatttgaggtgggggtgttcacctctcttctcatcccttttcagaatatagggctcctctcattcctgtgaacccccagtcctggcttctttgtttgaggggattgtgtgaggttcagttgtggggtgggtggtgagctgctgcatattttttattttgtttctctagtgttatggcagtggaggtgggaatttagtccccaggtgggacaagggaagttttttcattttggagctagttactgggagtaagggagggtggggtgggggggagttcaggtttatgtgtgtgcatttcttttttattattattaaataaacaacttggagggagttgaaaaaaaa

SEQ ID NO: 12202 - DNA, 1949 bp, Homo sapiens
gcggcgcgctcctggcgaggacggagcgagcagatctcgcgtgcgctcgccgcccggcgcagcccagcccggcccccgcctggcgccgcgagccgaggtgtctcccgcgcccgcgcccgtgtcgccgccgtgcccgcgagcgggagccggagtcgccgccgcccgagcgcagccgagcgcacgccgagcccgtccgccgccgccatggccaccacggtgacctgcacccgcttcaccgacgagtaccagctctacgaggatattggcaagggggctttctctgtggtccgacgctgtgtcaagctctgcaccggccatgagtatgcagccaagatcatcaacaccaagaagctgtcagccagagatcaccagaagctggagagagaggctcggatctgccgccttctgaagcattccaacatcgtgcgtctccacgacagcatctccgaggagggcttccactacctggtcttcgatctggtcactggtggggagctctttgaagacattgtggcgagagagtactacagcgaggctgatgccagtcactgtatccagcagatcctggaggccgttctccattgtcaccaaatgggggtcgtccacagagacctcaagccggagaacctgcttctggccagcaagtgcaaaggggctgcagtgaagctggcagacttcggcctagctatcgaggtgcagggggaccagcaggcatggtttggtttcgctggcacaccaggctacctgtcccctgaggtccttcgcaaagaggcgtatggcaagcctgtggacatctgggcatgtggggtgatcctgtacatcctgctcgtgggctacccacccttctgggacgaggaccagcacaagctgtaccagcagatcaaggctggtgcctatgacttcccgtcccctgagtgggacaccgtcactcctgaagccaaaaacctcatcaaccagatgctgaccatcaaccctgccaagcgcatcacagcccatgaggccctgaagcacccgtgggtctgccaacgctccacggtagcatccatgatgcacagacaggagactgtggagtgtctgaaaaagttcaatgccaggagaaagctcaagggagccatcctcaccaccatgctggccacacggaatttctcagcagccaagagtttactcaacaagaaagcagatggagtcaagccccagacgaatagcaccaaaaacagtgcagccgccaccagccccaaagggacgcttcctcctgccgccctggagtcttctgacagtgccaataccaccatagaggatgaagacgctaaagcccggaagcaggagatcattaagaccacggagcagctcatcgaggccgtcaacaacggtgactttgaggcctacgcgaaaatctgtgacccagggctgacctcgtttgagcctgaagcactgggcaacctggttgaagggatggacttccacagattctacttcgagaacctgctggccaagaacagcaagccgatccacacgaccatcctgaacccacacgtgcacgtcattggagaggatgccgcctgcatcgcttacatccggctcacgcagtacattgacgggcagggccggccccgcaccagccagtctgaggagacccgcgtgtggcaccgccgcgacggcaagtggcagaacgtgcacttccactgctcgggcgcgcctgtggccccgctgcagtgaagagctgcgccctggtttcgccggacagagttggtgtttggagcccgactgccctcgggcacacggcctgcctgtcgcatgtttgtgtctgcctcgttccctcccctggtgcctgtgtctgcagaaaaacaagaccagatgtgatttgttaaaaaaaaacaaaaaaaaaaaaaaaaaaaacaagatgacgacgacaaccacaaaaaaaattgacatcagatgaaatgaaaaaa

SEQ ID NO: 12203 - DNA, 2140 bp, Homo sapiens
gcggccgctgggctcaggctgtccgctctgggctccgcggcctcggccccgctgcactccacctccgccccctcggactccctcccctctgcttctactcctcctgctccagtgcggatcgtttcgcaactgcttgccactcgtcccgtgcctggctgtttttccatttcccggccccctcttcttgagtactttaccccctgcatttggggacagggactggaaaaggggcgggtggagcgtccagtggagaagaaggaagcgaggcccgcaggaggaggaggatcggcggactgtggggaggagaccccacgccaccctttctggtcatctcccctcccgccccgcccctgcgcacactccctcgcgggcgagctactttcggaccaggaaagtaagagcggccctgggtgacagcgccgcggggccagtcccggggttagccgcgcgtctgctcgcttctggtccgtcgcgctcccagccagggcacagcccggaccgaggatggcttcgaccacaacctgcaccaggttcacggacgagtatcagcttttcgaggagcttggaaagggggcattctcagtggtgagaagatgtatgaaaattcctactggacaagaatatgctgccaaaattatcaacaccaaaaagctttctgctagggatcatcagaaactagaaagagaagctagaatctgccgtcttttgaagcaccctaatattgtgcgacttcatgatagcatatcagaagagggctttcactacttggtgtttgatttagttactggaggtgaactgtttgaagacatagtggcaagagaatactacagtgaagctgatgccagtcattgtatacagcagattctagaaagtgttaatcattgtcacctaaatggcatagttcacagggacctgaagcctgagaatttgcttttagctagcaaatccaagggagcagctgtgaaattggcagactttggcttagccatagaagttcaaggggaccagcaggcgtggtttggttttgctggcacacctggatatctttctccagaagttttacgtaaagatccttatggaaagccagtggatatgtgggcatgtggtgtcattctctatattctacttgtggggtatccacccttctgggatgaagaccaacacagactctatcagcagatcaaggctggagcttatgattttccatcaccagaatgggacacggtgactcctgaagccaaagacctcatcaataaaatgcttactatcaaccctgccaaacgcatcacagcctcagaggcactgaagcacccatggatctgtcaacgttctactgttgcttccatgatgcacagacaggagactgtagactgcttgaagaaatttaatgctagaagaaaactaaagggtgccatcttgacaactatgctggctacaaggaatttctcagcagccaagagtttgttgaagaaaccagatggagtaaaggagtcaactgagagttcaaatacaacaattgaggatgaagatgtgaaagcacgaaagcaagagattatcaaagtcactgaacaactgatcgaagctatcaacaatggggactttgaagcctacacaaaaatctgtgacccaggccttactgcttttgaacctgaagctttgggtaatttagtggaagggatggattttcaccgattctactttgaaaatgctttgtccaaaagcaataaaccaatccacactattattctaaaccctcatgtacatctggtaggggatgatgccgcctgcatagcatatattaggctcacacagtacatggatggcagtggaatgccaaagacaatgcagtcagaagagactcgtgtgtggcaccgccgggatggaaagtggcagaatgttcattttcatcgctcggggtcaccaacagtacccatcaagccaccctgtattccaaatgggaaagaaaacttctcaggaggcacctctttgtggcaaaacatctaaggcctgaaaaccattcacatatgggtcttctaaatttcaacagtgccacttctgcattctctgttctcaaggcacctggatggtgaccctgggccgtcctctcctcctcttcatgcatgtttctgagtgcatgaag

SEQ ID NO: 12204 - DNA, 4054 bp, Homo sapiens
gcggccgctgggctcaggctgtccgctctgggctccgcggcctcggccccgctgcactccacctccgccccctcggactccctcccctctgcttctactcctcctgctccagtgcggatcgtttcgcaactgcttgccactcgtcccgtgcctggctgtttttccatttcccggccccctcttcttgagtactttaccccctgcatttggggacagggactggaaaaggggcgggtggagcgtccagtggagaagaaggaagcgaggcccgcaggaggaggaggatcggcggactgtggggaggagaccccacgccaccctttctggtcatctcccctcccgccccgcccctgcgcacactccctcgcgggcgagctactttcggaccaggaaagtaagagcggccctgggtgacagcgccgcggggccagtcccggggttagccgcgcgtctgctcgcttctggtccgtcgcgctcccagccagggcacagcccggaccgaggatggcttcgaccacaacctgcaccaggttcacggacgagtatcagcttttcgaggagcttggaaagggggcattctcagtggtgagaagatgtatgaaaattcctactggacaagaatatgctgccaaaattatcaacaccaaaaagctttctgctagggatcatcagaaactagaaagagaagctagaatctgccgtcttttgaagcaccctaatattgtgcgacttcatgatagcatatcagaagagggctttcactacttggtgtttgatttagttactggaggtgaactgtttgaagacatagtggcaagagaatactacagtgaagctgatgccagtcattgtatacagcagattctagaaagtgttaatcattgtcacctaaatggcatagttcacagggacctgaagcctgagaatttgcttttagctagcaaatccaagggagcagctgtgaaattggcagactttggcttagccatagaagttcaaggggaccagcaggcgtggtttggttttgctggcacacctggatatctttctccagaagttttacgtaaagatccttatggaaagccagtggatatgtgggcatgtggtgtcattctctatattctacttgtggggtatccacccttctgggatgaagaccaacacagactctatcagcagatcaaggctggagcttatgattttccatcaccagaatgggacacggtgactcctgaagccaaagacctcatcaataaaatgcttactatcaaccctgccaaacgcatcacagcctcagaggcactgaagcacccatggatctgtcaacgttctactgttgcttccatgatgcacagacaggagactgtagactgcttgaagaaatttaatgctagaagaaaactaaagggtgccatcttgacaactatgctggctacaaggaatttctcagcagccaagagtttgttgaagaaaccagatggagtaaaggagtcaactgagagttcaaatacaacaattgaggatgaagatgtgaaagcacgaaagcaagagattatcaaagtcactgaacaactgatcgaagctatcaacaatggggactttgaagcctacacaaaaatctgtgacccaggccttactgcttttgaacctgaagctttgggtaatttagtggaagggatggattttcaccgattctactttgaaaatgctttgtccaaaagcaataaaccaatccacactattattctaaaccctcatgtacatctggtaggggatgatgccgcctgcatagcatatattaggctcacacagtacatggatggcagtggaatgccaaagacaatgcagtcagaagagactcgtgtgtggcaccgccgggatggaaagtggcagaatgttcattttcatcgctcggggtcaccaacagtacccatcaactaaatttcaacagtgccacttctgcattctctgttctcaaggcacctggatggtgaccctgggccgtcctctcctcctcttcatgcatgtttctgagtgcatgaagttgtgaaggtcctacatgtaatgcatatgtgatgcatcatcttatcatatattccttcctatacattgtttacacttcaactacggggatgttccacacaaacttaaattactgttggcaaaacaatagggggagattagacaaaaaaaaaaatccacaatattccaagtacaactcttcatcaagtttctctgttaatgccaagatttaacagacttaagaactattgttctctgaatgacagttgtaagagaaatgtaaattttttagaactctttgctgttaatctgttttggtttgtttggtttttttttttttttttaaggtaaaaaaaaaatacaccttcagtttcctggtgtgatcctggttaaaatggatgatttttcattgaaagttttgctgattaacaattaaagtgggatgatatgtgggcaaaatcacttatgaaagtagaagcaagaatcagttggtttgctaccacataaagccatgctgtttttggtcaaactgtgtaaactggaaaaattcacatcatttctgagtttaatcactttaggatatattcacattgttttggtgaatttgctgaattgaattgtttttctttctcaaatctgtgatctcttttctttatcctgtttctttgttcctttcgtttgctttcttatttttcttttgttccattcttttcttacttttttcccttttccttttttggggaggctggctagtagtgtgtgagaaaagaatagaagtgaaatttgcataatgaatgtaaaagggaaataaaagtcttttgaaggtagctatactagcacttttgatcatcttcagggcccacaaaaatgttgtcaagattttaaaggtttataattctgcttaagctctagtttggacttaggtatcctaactatgttggaggtatttgcattgtttaaagttaggataaaagcaagttcctcctgtgactgcaacgtcttactgattgggacagttgccaggaggataccaacttgatagcagagggggttttatgcaaacgcactcacctccgccttggggaatgaaagggtcacttctgcatcatcactagctagttttctagtgttagagaggcttacaaatgtttgccattctcataagtgttttgaacttgatctttgtgacttgtgcttttttagcttctctcttgaatcagagtatcattgtcttcctccaaggagttagaatttcccagtttaaaacaaaaagggaaatgtcctaggttttctttgtgcttctcatttttcctttgttgattcaattcctgtgatttttgttctcttccctgaagtgctttacagtgcatggaatctccatcattgttattttaacgatagtaattcacagtcctcagaagcctatttttaaagcagaagcaaaaaagaaaaacaaaataacaaaaacaacccttcctcttttctctcatctcacctctctgtgttgattactaatcatcttagatattattgctagtggatgtatggtagatgggttgaagcttttctgataattattacacaatttaaaacaacatatatatttaaaataaatatatacagtaaatatattgagccatgttaacctgccaatgagatctgtgaaaaaataatggcctcatttttctctttttaatttcttttacccttttgtgaagcagctatacgtggcatacatgtatttaaagaaaaaaaaatagatgtagagtgttttttttacacttttaacttagcatgtggtgttgaagtattactgtagatcaagtttgtcttccgcactaagatgtgaggaaattgtgatttgttctctccaccacaaatgaattacacatttattatcttctatcattttgaaacactgcagtttaccatgggacactgtatatatttcttgccataatggtaaaggactgattgatatatttaagagttaataaatttgtgatttctgctgaaaaaaaaaaaaaaaaaa

SEQ ID NO: 12205 - DNA, 1994 bp, Homo sapiens
gcggcgcgctcctggcgaggacggagcgagcagatctcgcgtgcgctcgccgcccggcgcagcccagcccggcccccgcctggcgccgcgagccgaggtgtctcccgcgcccgcgcccgtgtcgccgccgtgcccgcgagcgggagccggagtcgccgccgcccgagcgcagccgagcgcacgccgagcccgtccgccgccgccatggccaccacggtgacctgcacccgcttcaccgacgagtaccagctctacgaggatattggcaagggggctttctctgtggtccgacgctgtgtcaagctctgcaccggccatgagtatgcagccaagatcatcaacaccaagaagctgtcagccagagatcaccagaagctggagagagaggctcggatctgccgccttctgaagcattccaacatcgtgcgtctccacgacagcatctccgaggagggcttccactacctggtcttcgatctggtcactggtggggagctctttgaagacattgtggcgagagagtactacagcgaggctgatgccagtcactgtatccagcagatcctggaggccgttctccattgtcaccaaatgggggtcgtccacagagacctcaagccggagaacctgcttctggccagcaagtgcaaaggggctgcagtgaagctggcagacttcggcctagctatcgaggtgcagggggaccagcaggcatggtttggtttcgctggcacaccaggctacctgtcccctgaggtccttcgcaaagaggcgtatggcaagcctgtggacatctgggcatgtggggtgatcctgtacatcctgctcgtgggctacccacccttctgggacgaggaccagcacaagctgtaccagcagatcaaggctggtgcctatgacttcccgtcccctgagtgggacaccgtcactcctgaagccaaaaacctcatcaaccagatgctgaccatcaaccctgccaagcgcatcacagcccatgaggccctgaagcacccgtgggtctgccaacgctccacggtagcatccatgatgcacagacaggagactgtggagtgtctgaaaaagttcaatgccaggagaaagctcaagggagccatcctcaccaccatgctggccacacggaatttctcagcagccaagagtttactcaacaagaaagcagatggagtcaagccccagacgaatagcaccaaaaacagtgcagccgccaccagccccaaagggacgcttcctcctgccgccctggagcctcaaaccaccgtcatccataacccagtggacgggattaaggagtcttctgacagtgccaataccaccatagaggatgaagacgctaaagcccggaagcaggagatcattaagaccacggagcagctcatcgaggccgtcaacaacggtgactttgaggcctacgcgaaaatctgtgacccagggctgacctcgtttgagcctgaagcactgggcaacctggttgaagggatggacttccacagattctacttcgagaacctgctggccaagaacagcaagccgatccacacgaccatcctgaacccacacgtgcacgtcattggagaggatgccgcctgcatcgcttacatccggctcacgcagtacattgacgggcagggccggccccgcaccagccagtctgaggagacccgcgtgtggcaccgccgcgacggcaagtggcagaacgtgcacttccactgctcgggcgcgcctgtggccccgctgcagtgaagagctgcgccctggtttcgccggacagagttggtgtttggagcccgactgccctcgggcacacggcctgcctgtcgcatgtttgtgtctgcctcgttccctcccctggtgcctgtgtctgcagaaaaacaagaccagatgtgatttgttaaaaaaaaacaaaaaaaaaaaaaaaaaaaacaagatgacgacgacaaccacaaaaaaaattgacatcagatgaaatgaaaaaa

SEQ ID NO: 12206 - DNA, 2151 bp, Homo sapiens
gcggccgctgggctcaggctgtccgctctgggctccgcggcctcggccccgctgcactccacctccgccccctcggactccctcccctctgcttctactcctcctgctccagtgcggatcgtttcgcaactgcttgccactcgtcccgtgcctggctgtttttccatttcccggccccctcttcttgagtactttaccccctgcatttggggacagggactggaaaaggggcgggtggagcgtccagtggagaagaaggaagcgaggcccgcaggaggaggaggatcggcggactgtggggaggagaccccacgccaccctttctggtcatctcccctcccgccccgcccctgcgcacactccctcgcgggcgagctactttcggaccaggaaagtaagagcggccctgggtgacagcgccgcggggccagtcccggggttagccgcgcgtctgctcgcttctggtccgtcgcgctcccagccagggcacagcccggaccgaggatggcttcgaccacaacctgcaccaggttcacggacgagtatcagcttttcgaggagcttggaaagggggcattctcagtggtgagaagatgtatgaaaattcctactggacaagaatatgctgccaaaattatcaacaccaaaaagctttctgctagggatcatcagaaactagaaagagaagctagaatctgccgtcttttgaagcaccctaatattgtgcgacttcatgatagcatatcagaagagggctttcactacttggtgtttgatttagttactggaggtgaactgtttgaagacatagtggcaagagaatactacagtgaagctgatgccagtcattgtatacagcagattctagaaagtgttaatcattgtcacctaaatggcatagttcacagggacctgaagcctgagaatttgcttttagctagcaaatccaagggagcagctgtgaaattggcagactttggcttagccatagaagttcaaggggaccagcaggcgtggtttggttttgctggcacacctggatatctttctccagaagttttacgtaaagatccttatggaaagccagtggatatgtgggcatgtggtgtcattctctatattctacttgtggggtatccacccttctgggatgaagaccaacacagactctatcagcagatcaaggctggagcttatgattttccatcaccagaatgggacacggtgactcctgaagccaaagacctcatcaataaaatgcttactatcaaccctgccaaacgcatcacagcctcagaggcactgaagcacccatggatctgtcaacgttctactgttgcttccatgatgcacagacaggagactgtagactgcttgaagaaatttaatgctagaagaaaactaaagggtgccatcttgacaactatgctggctacaaggaatttctcagcagccaagagtttgttgaagaaaccagatggagtaaaggagtcaactgagagttcaaatacaacaattgaggatgaagatgtgaaagcacgaaagcaagagattatcaaagtcactgaacaactgatcgaagctatcaacaatggggactttgaagcctacacaaaaatctgtgacccaggccttactgcttttgaacctgaagctttgggtaatttagtggaagggatggattttcaccgattctactttgaaaatgctttgtccaaaagcaataaaccaatccacactattattctaaaccctcatgtacatctggtaggggatgatgccgcctgcatagcatatattaggctcacacagtacatggatggcagtggaatgccaaagacaatgcagtcagaagagactcgtgtgtggcaccgccgggatggaaagtggcagaatgttcattttcatcgctcggggtcaccaacagtacccatcaagtaaatatttccaggctgtcagcttctttgttaatacacccatggtcagctccttctacttattccattgttaatagcatggtatatgttatttaacgctagtagttggttacactgatgaaaataaatgccttcacgggaaaggttaaaaaaaaaaaaaaaaaaaaaaaaaaaaaaaaaaaaaaaaaaaaaaaaaaaaaaaaaaaaaaaaaaa

SEQ ID NO: 12207 - DNA, 4098 bp, Homo sapiens
gcggccgctgggctcaggctgtccgctctgggctccgcggcctcggccccgctgcactccacctccgccccctcggactccctcccctctgcttctactcctcctgctccagtgcggatcgtttcgcaactgcttgccactcgtcccgtgcctggctgtttttccatttcccggccccctcttcttgagtactttaccccctgcatttggggacagggactggaaaaggggcgggtggagcgtccagtggagaagaaggaagcgaggcccgcaggaggaggaggatcggcggactgtggggaggagaccccacgccaccctttctggtcatctcccctcccgccccgcccctgcgcacactccctcgcgggcgagctactttcggaccaggaaagtaagagcggccctgggtgacagcgccgcggggccagtcccggggttagccgcgcgtctgctcgcttctggtccgtcgcgctcccagccagggcacagcccggaccgaggatggcttcgaccacaacctgcaccaggttcacggacgagtatcagcttttcgaggagcttggaaagggggcattctcagtggtgagaagatgtatgaaaattcctactggacaagaatatgctgccaaaattatcaacaccaaaaagctttctgctagggatcatcagaaactagaaagagaagctagaatctgccgtcttttgaagcaccctaatattgtgcgacttcatgatagcatatcagaagagggctttcactacttggtgtttgatttagttactggaggtgaactgtttgaagacatagtggcaagagaatactacagtgaagctgatgccagtcattgtatacagcagattctagaaagtgttaatcattgtcacctaaatggcatagttcacagggacctgaagcctgagaatttgcttttagctagcaaatccaagggagcagctgtgaaattggcagactttggcttagccatagaagttcaaggggaccagcaggcgtggtttggttttgctggcacacctggatatctttctccagaagttttacgtaaagatccttatggaaagccagtggatatgtgggcatgtggtgtcattctctatattctacttgtggggtatccacccttctgggatgaagaccaacacagactctatcagcagatcaaggctggagcttatgattttccatcaccagaatgggacacggtgactcctgaagccaaagacctcatcaataaaatgcttactatcaaccctgccaaacgcatcacagcctcagaggcactgaagcacccatggatctgtcaacgttctactgttgcttccatgatgcacagacaggagactgtagactgcttgaagaaatttaatgctagaagaaaactaaagggtgccatcttgacaactatgctggctacaaggaatttctcagcagccaagagtttgttgaagaaaccagatggagtaaaggagtcaactgagagttcaaatacaacaattgaggatgaagatgtgaaagcacgaaagcaagagattatcaaagtcactgaacaactgatcgaagctatcaacaatggggactttgaagcctacacaaaaatctgtgacccaggccttactgcttttgaacctgaagctttgggtaatttagtggaagggatggattttcaccgattctactttgaaaatgctttgtccaaaagcaataaaccaatccacactattattctaaaccctcatgtacatctggtaggggatgatgccgcctgcatagcatatattaggctcacacagtacatggatggcagtggaatgccaaagacaatgcagtcagaagagactcgtgtgtggcaccgccgggatggaaagtggcagaatgttcattttcatcgctcggggtcaccaacagtacccatcaagtaaatatttccaggctgtcagcttctttgttaatacacccatgctaaatttcaacagtgccacttctgcattctctgttctcaaggcacctggatggtgaccctgggccgtcctctcctcctcttcatgcatgtttctgagtgcatgaagttgtgaaggtcctacatgtaatgcatatgtgatgcatcatcttatcatatattccttcctatacattgtttacacttcaactacggggatgttccacacaaacttaaattactgttggcaaaacaatagggggagattagacaaaaaaaaaaatccacaatattccaagtacaactcttcatcaagtttctctgttaatgccaagatttaacagacttaagaactattgttctctgaatgacagttgtaagagaaatgtaaattttttagaactctttgctgttaatctgttttggtttgtttggtttttttttttttttttaaggtaaaaaaaaaatacaccttcagtttcctggtgtgatcctggttaaaatggatgatttttcattgaaagttttgctgattaacaattaaagtgggatgatatgtgggcaaaatcacttatgaaagtagaagcaagaatcagttggtttgctaccacataaagccatgctgtttttggtcaaactgtgtaaactggaaaaattcacatcatttctgagtttaatcactttaggatatattcacattgttttggtgaatttgctgaattgaattgtttttctttctcaaatctgtgatctcttttctttatcctgtttctttgttcctttcgtttgctttcttatttttcttttgttccattcttttcttacttttttcccttttccttttttggggaggctggctagtagtgtgtgagaaaagaatagaagtgaaatttgcataatgaatgtaaaagggaaataaaagtcttttgaaggtagctatactagcacttttgatcatcttcagggcccacaaaaatgttgtcaagattttaaaggtttataattctgcttaagctctagtttggacttaggtatcctaactatgttggaggtatttgcattgtttaaagttaggataaaagcaagttcctcctgtgactgcaacgtcttactgattgggacagttgccaggaggataccaacttgatagcagagggggttttatgcaaacgcactcacctccgccttggggaatgaaagggtcacttctgcatcatcactagctagttttctagtgttagagaggcttacaaatgtttgccattctcataagtgttttgaacttgatctttgtgacttgtgcttttttagcttctctcttgaatcagagtatcattgtcttcctccaaggagttagaatttcccagtttaaaacaaaaagggaaatgtcctaggttttctttgtgcttctcatttttcctttgttgattcaattcctgtgatttttgttctcttccctgaagtgctttacagtgcatggaatctccatcattgttattttaacgatagtaattcacagtcctcagaagcctatttttaaagcagaagcaaaaaagaaaaacaaaataacaaaaacaacccttcctcttttctctcatctcacctctctgtgttgattactaatcatcttagatattattgctagtggatgtatggtagatgggttgaagcttttctgataattattacacaatttaaaacaacatatatatttaaaataaatatatacagtaaatatattgagccatgttaacctgccaatgagatctgtgaaaaaataatggcctcatttttctctttttaatttcttttacccttttgtgaagcagctatacgtggcatacatgtatttaaagaaaaaaaaatagatgtagagtgttttttttacacttttaacttagcatgtggtgttgaagtattactgtagatcaagtttgtcttccgcactaagatgtgaggaaattgtgatttgttctctccaccacaaatgaattacacatttattatcttctatcattttgaaacactgcagtttaccatgggacactgtatatatttcttgccataatggtaaaggactgattgatatatttaagagttaataaatttgtgatttctgctgaaaaaaaaaaaaaaaaaa

SEQ ID NO: 12208 - DNA, 1877 bp, Homo sapiens
gcggcgcgctcctggcgaggacggagcgagcagatctcgcgtgcgctcgccgcccggcgcagcccagcccggcccccgcctggcgccgcgagccgaggtgtctcccgcgcccgcgcccgtgtcgccgccgtgcccgcgagcgggagccggagtcgccgccgcccgagcgcagccgagcgcacgccgagcccgtccgccgccgccatggccaccacggtgacctgcacccgcttcaccgacgagtaccagctctacgaggatattggcaagggggctttctctgtggtccgacgctgtgtcaagctctgcaccggccatgagtatgcagccaagatcatcaacaccaagaagctgtcagccagagatcaccagaagctggagagagaggctcggatctgccgccttctgaagcattccaacatcgtgcgtctccacgacagcatctccgaggagggcttccactacctggtcttcgatctggtcactggtggggagctctttgaagacattgtggcgagagagtactacagcgaggctgatgccagtcactgtatccagcagatcctggaggccgttctccattgtcaccaaatgggggtcgtccacagagacctcaagccggagaacctgcttctggccagcaagtgcaaaggggctgcagtgaagctggcagacttcggcctagctatcgaggtgcagggggaccagcaggcatggtttggtttcgctggcacaccaggctacctgtcccctgaggtccttcgcaaagaggcgtatggcaagcctgtggacatctgggcatgtggggtgatcctgtacatcctgctcgtgggctacccacccttctgggacgaggaccagcacaagctgtaccagcagatcaaggctggtgcctatgacttcccgtcccctgagtgggacaccgtcactcctgaagccaaaaacctcatcaaccagatgctgaccatcaaccctgccaagcgcatcacagcccatgaggccctgaagcacccgtgggtctgccaacgctccacggtagcatccatgatgcacagacaggagactgtggagtgtctgaaaaagttcaatgccaggagaaagctcaagggagccatcctcaccaccatgctggccacacggaatttctcagcagccaagagtttactcaacaagaaagcagatggagtcaaggagtcttctgacagtgccaataccaccatagaggatgaagacgctaaagcccggaagcaggagatcattaagaccacggagcagctcatcgaggccgtcaacaacggtgactttgaggcctacgcgaaaatctgtgacccagggctgacctcgtttgagcctgaagcactgggcaacctggttgaagggatggacttccacagattctacttcgagaacctgctggccaagaacagcaagccgatccacacgaccatcctgaacccacacgtgcacgtcattggagaggatgccgcctgcatcgcttacatccggctcacgcagtacattgacgggcagggccggccccgcaccagccagtctgaggagacccgcgtgtggcaccgccgcgacggcaagtggcagaacgtgcacttccactgctcgggcgcgcctgtggccccgctgcagtgaagagctgcgccctggtttcgccggacagagttggtgtttggagcccgactgccctcgggcacacggcctgcctgtcgcatgtttgtgtctgcctcgttccctcccctggtgcctgtgtctgcagaaaaacaagaccagatgtgatttgttaaaaaaaaacaaaaaaaaaaaaaaaaaaaacaagatgacgacgacaaccacaaaaaaaattgacatcagatgaaatgaaaaaa

SEQ ID NO: 12209 - DNA, 2456 bp, Homo sapiens
cgccgccgttggggctggaagttcccgccaggtccgtgccgggcgagagagatgctgcccggcccgcctcggctttgaggcgagagaagtgtcccagacccatttcgccttgctgacggcgtcgagccctggccagacatgtccacagggttctccttcgggtccgggactctgggctccaccaccgtggccgccggcgggaccagcacaggcggcgttttctccttcggaacgggaacgtctagcaacccttctgtggggctcaattttggaaatcttggaagtacttcaactccagcaactacatctgctccttcaagtggttttggaaccgggctctttggatctaaacctgccactgggttcactctaggaggaacaaatacaggtgccttgcacaccaagaggcctcaagtggtcaccaaatatggaaccctgcaaggaaaacagatgcatgtggggaagacacccatccaagtctttttaggagtccccttctccagacctcctctaggtatcctcaggtttgcacctccagaacccccggagccctggaaaggaatcagagatgctaccacctacccgcctggatggagtctcgctctgtcgccaggctggagtgcagtggcacgatctcggctcactgcaacctccgcctcccgggttcaagcgagtctcctgcctcagcctctgagtgtctggggctacaggtgcctgcaggagtcctggggccagctggcctcgatgtacgtcagcacgcgggaacggtacaagtggctgcgcttcagcgaggactgtctgtacctgaacgtgtacgcgccggcgcgcgcgcccggggatccccagctgccagtgatggtctggttcccgggaggcgccttcatcgtgggcgctgcttcttcgtacgagggctctgacttggccgcccgcgagaaagtggtgctggtgtttctgcagcacaggctcggcatcttcggcttcctgagcacggacgacagccacgcgcgcgggaactgggggctgctggaccagatggcggctctgcgctgggtgcaggagaacatcgcagccttcgggggagacccaggaaatgtgaccctgttcggccagtcggcgggggccatgagcatctcaggactgatgatgtcacccctagcctcgggtctcttccatcgggccatttcccagagtggcaccgcgttattcagacttttcatcactagtaacccactgaaagtggccaagaaggttgcccacctggctggatgcaaccacaacagcacacagatcctggtaaactgcctgagggcactatcagggaccaaggtgatgcgtgtgtccaacaagatgagattcctccaactgaacttccagagagacccggaagagattatctggtccatgagccctgtggtggatggtgtggtgatcccagatgaccctttggtgctcctgacccaggggaaggtttcatctgtgccctaccttctaggtgtcaacaacctggaattcaattggctcttgccttataatatcaccaaggagcaggtaccacttgtggtggaggagtacctggacaatgtcaatgagcatgactggaagatgctacgaaaccgtatgatggacatagttcaagatgccactttcgtgtatgccacactgcagactgctcactaccaccgagaaaccccaatgatgggaatctgccctgctggccacgctacaacaaggatgaaaagtacctgcagctggattttaccacaagagtgggcatgaagctcaaggagaagaagatggctttttggatgagtctgtaccagtctcaaagacctgagaagcagaggcaattctaagggtggctatgcaggaaggagccaaagaggggtttgcccccaccatccaggccctggggagactagccatggacatacctggggacaagagttctacccaccccagtttagaactgcaggagctccctgctgcctccaggccaaagctagagcttttgcctgttgtgtgggacctgcactgccctttccagcctgacatcccatgatgcccctctacttcactgttgacatccagttaggccaggccctgtcaacaccacactgtgctcagctctccagcctcaggacaacctctttttttcccttcttcaaatcctcccacccttcaatgtctccttgtgactccttcttatgggaggtcgacccagactgccactgcccctgtcactgcacccagcttggcatttaccatccatcctgctcaaccttgttcctgtctgttcacattggcctggaggcctagggcaggttgtgacatggagcaaacttttggtagtttgggatcttctctcccacccacacttatctcccccagggccactccaaagtctatacacaggggtggtctcttcaataaagaagtgttgattagaaaaaaaaaaa

SEQ ID NO: 12210 - DNA, 5362 bp, Homo sapiens
ttttatgcaaaacatcccttttccttcaccacaaagaccgagaatccttgtccagctgtcagtccatgatgcattaatattatcacagccagtttctacacctttaccactaagtggagccaactttagcaccttgctaatgaatctgggtcctgagaattgtgcaacactgctgctctttgttttacttgagagtaaaattctgctgcattctcttaggccagctgtcttgactggggtagctgaagctgttgtagctatgatctttccatttcagtggcaatgcccatatattcccctttgtcctctttcactggctgcagtgcttagtgcacctttaccatttatagttggagttgactcaaggtattttgatcttcatgacccaccacaagatgttgtttgcattgacttggatacgaacatgttatatgtatcagatgaaaagaagaacatgaactggaagcaacttcccaaaaagccgtgcaaaaatctacttagcaccttaaagaaattgtatccccagctgtcttcagttcaccaaaaaactcaagaaggctcagcgattgacatgactccaattgaagcagatttctcctggcaaaagaagatgacacagcttgagatggaaattcaagaggcatttttgcgctttatggcgtctattttaaaaggatatagaacatatctcagaccaatcacagaggctccttcaaataaagccacagctgctgattcattgtttgaccgacagggatttttaaaaagtcgagatcgtgcctatgcaaaattctatacccttttatccaaaacacagatttttattcgtttcattgaagaatgcagttttgtaagtgataaagatactggattagcattttttgatgactgcatagaaaagttgtttcctgataaaggcacagagaaaacagataaggttgattttgattcagcagaagataccagattgatagaactagatgattcacagaaaggtgagcatactgtatttataatgccgccagagccacctcctgatgatggaaaggacctgtcaccaaagtacagttacaaatactttccaagactggaccttaagctttttgacagaccgcaggagttgaaactttgttttagtagacaccctactgggaatagcattacaaagagtccacctctcatggctaagagaactaaacaggaaataaaaacagctcataaattggcgaagagatgttatacaaatccaccacagtgggccaagtgtctgtttagtcattgttacagtttatggtttatttgtcttccggcctatgttagagtttctcatcctaaagtcagagcacttcagcaggcatatgatgtacttattaagatgaggaaaacagatgtggatcccttagatgaggtgtgctatcgagtagtgatgcagctttgtggactttggggtcatcctgttttagcagtgagagtcttatttgaaatgaaaactgctaggataaagcctaatgctattacttatggttattataataaggtagtcttggagagcccgtggcctagcagtacccgcagtggtattttcttatggacgaaggtacggaatgtggtacgtggcttggcacagtttaggcagccgcttaaaaagactgtgcaaaggtcacaggtctcctcaatatcaggtggtcagtctgaccaaggatacgggtctaaggatgaacttataaaggatgatgcagaaattcatgtgcctgaagaacaggcagcaagagaattgataactaaaacaaaaatgcaaacagaagaggtgtgtgatgcctctgctattgtggcaaaacattcacaacctagtccagagcctcacagtcctactgaacctcctgcatggggcagcagtattgtgaaagttccgtctggtatatttgatgtcaacagcaggaaaagtagcactggtagtatatcaaatgtgctgttttctactcaagatccagttgaagatgcagtctttggcgaagctactaatctcaagaagaatggtgatagaggagaaaaaagacaaaagcattttcctgagaggagttgtagttttagttctgaaagtcgagcaggaatgttgcttaagaagagtagtttggattcgaattcaagtgaaatggctatcatgatgggagcagatgccaagattctcacagcagcattgacatgtcctaagacttctctacttcatattgcaagaacccatagctttgagaatgttagctgtcacctacctgatagtaggacttgtatgtctgaaagcacttggaatcctgagcacagatcatctccggtgccagagatgcttgaggaaagccaagaactccttgagcctgtggttgatgacgtacctaaaactactgcaacagtagatacatatgagagtctactaagtgatagtaacagtaatcagtccagagacttgaaaacagtatccaaagatctgaggaataagagaagtagtttatatggtattgctaaggtggttcagagggaagatgttgaaactggactagatcctttgtctcttttagccactgaatgtacaggaggaaaaactcctgattctgaagataagttgttttctccagttattgcacgtaatctggctgatgaaatagaaagctatatgaacctaaaaagtcccctaggtagtaaatcttctagtatggaattacacagagaggaaaacagagagtctggcatgactactgcatttattcatgctctagagaggagatcaagcctacctttagatcatggttcaccagcacaggaaaatcctgaaagtgaaaagagctcacctgcagtgtccaggtctaaaacttttactgggcgtttcaagcagcaaaccccctctcgaactcataaagaacgttcaacttctttgtcagcactggtgcgttcttcgccacatggctcgttgggttctgtagtaaattctttgtcagggctaaagctggataatatactctcagggcccaagatagatgtcctgaaatctggtatgaaacaagcagcgacagtagccagtaagatgtgggtagctgttgcgtctgcctacagctactcagatgatgaggaagaaactaatagagactacagcttcccagctggcctagaagaccatattttgggggagaatatatcgcctaacacaagtatctcagggttggtccccagtgaacttacccagagcaacacaagtcttggcagtagcagcagtagtggagatgtaggaaaactgcattatccaacaggtgaagttccatttccaagaggcatgaaagggcaagactttgaaaaatcagatcatggttcttctcaaaataccagcatgtctagcatctatcagaattgtgcaatggaggttttgatgtccagttgttcacagtgtagagcttgtggagctttagtttatgatgaagaaattatggctggatggacagcagatgactcaaatttgaatacagcttgtccattctgtaaaagcaacttcttgcctcttctcaatatagaattcaaagatttgagaggttctgcaagctttttcctgaaaccaagtacctctggtgacagtttacaaagtggaagcattccattggcaaatgaatccttggagcacaaacctgtatccagtttagcagaacctgacttgatcaactttatggacttcccaaaacataaccagatcataactgaagaaacaggctctgcagttgaaccaagtgatgaaataaagagagccagtggagatgtccaaactatgaaaatttcatctgtgcctaatagtttatcaaagcgaaatgtgtctttgactcgaagtcacagtgttggaggcccattgcagaatattgactttacccagcgaccgtttcatggcatctcaacagttagtcttccaaatagtctgcaggaagttgtggatcctttaggaaaaagacccaatcctccccctgtttctgtgccctacttgagtcctctagtactccgtaaagaacttgaatctttgctagaaaatgaaggtgatcaggtgattcatacatcttctttcatcaatcaacatccaatcattttctggaacctcgtttggtatttcagacgtttggaccttcctagtaacttgccaggacttatcctcacatctgaacattgtaatgaaggtgtacagcttcctctgtcatctctgtcccaggatagcaaacttgtgtatattcagctgttatgggataatatcaaccttcatcaggaaccaagagaacctctgtatgtctcatggaggaattttaattctgaaaagaaatcatctctcctgtcagaggaacaacaagaaacaagcactttagtagaaaccatcaggcagagtattcagcacaataatgttcttaaacccatcaacctactttcacagcaaatgaagccaggcatgaaaagacaaaggagtttatacagagaaatcctcttcttatcattagtgtctctaggaagagagaatattgatattgaggcatttgacaatgaatatggaattgcatacaatagtctgtcttcagagattcttgaaaggttgcagaaaattgatgctccaccaagtgccagtgtcgagtggtgcaggaagtgttttggagcgcctctcatttaaatagagattcactagaatgttgacacacaaggcttggggattagatttcatctggaaacattcaagttttttttccaaatcgtaagaactggtgaatacggaattgaagtaactcttggggacaatatataatgaattatgattcatattgcattaccttgaaatatgaagtgccatttgaatgtcccagggcttattaatattgaagattttcaacccctgaactgcttttctgcctctgtggaaaactactttgggattcttcagtatttgtagtagtttgatagaaataatgaggaaccatattcattctaggcattgtttatatttgaagttactgagtttgaggaatggcaaattaaatttgcctaacccccaaaacaaatgaaatatctcaattataaaagcaacatggccgggcacggtggctcaggcctgtaatcccagcactttgggaggctgagcaaggtgggtggatcacttgaggccaggagttcgagaccagcctggccaacacggtgagaccctgtctttactaaaaatacaaaaattagccaggcgcaccactgtagtcccagctactcaggctgaggcaggagaatcgcttgaactgaggcagaggctacagtgagtggagatcacgccactgcaactccagcttgggtgacagagtgagaccgtctc

SEQ ID NO: 12211 - DNA, 3019 bp, Homo sapiens
gcgccaccagggcagcagccgccgcagccgccgccgctgggcagaggagccggagacgcgagcgggcgaggtggcggcggcggcggagcgggagcgggtaccgggcgcgggcagagcgcggcggcgcggagacggggttttgccatgttgacctggctggtctcgaactcctgaacgcaagtgatccgcctgcctcagcctcccaaggtgctgggattacaggcacgagccactgtgcctggcctcaactgttgcttcttataaaggtgtgttccagagaacaagccttcagacatttgctatattgacgctgagctgtcaggggactcaggcttatgaggaggtattgttacacaaaacagtgtctagtgaagacgacaagaaagaggggaaaggatcggaaaaagaagctaaaatactatagaaaaccatgagatctattcgatcttttgctaatgatgatcgccatgttatggtgaaacattcaacaatctatccatctccggaggaacttgaagctgttcagaatatggtatctactgttgaatgtgctcttaaacatgtctcagattggttggatgaaacaaataaaggcacaaaaacagagggtgagacagaagtgaagaaagatgaggccggagaaaactattccaaggatcaaggtggtcggacattgtgtggtgtaatgaggattggcctggttgcaaaaggcttgctgattaaagatgatatggacttggagctggttttaatgtgcaaagacaaacccacagagaccctgttaaatacagtcaaagataatcttcctattcagattcagaaactcacagaagagaaatatcaagtggaacaatgtgtaaatgaggcatctattataattcggaatacaaaagagcccacgctaactttgaaggtgatacttacctcacctctaattagggacgaattggagaagaaggatggagaaaatgtttcgatgaaagatcctccggacttattggacaggcagaaatgcctgaacgccttggcgtctcttcgacatgccaaatggtttcaggcaagggcaaatggattaaaatcatgtgtaattgtcctccgcattctgcgtgatttgtgcaacagagtccccacatgggcaccattgaaaggatggccactagaacttatatgtgaaaagtctataggtacttgtaatagacctttgggcgctggggaggccttgagacgagtaatggagtgtttggcatctggaatactacttcctgggggtcctggtcttcatgatccttgtgagcgagacccaacagatgctctgagctatatgaccatccagcaaaaagaagatattacccacagtgcacagcatgcactcagactatcagcctttggtcagatttacaaagtgctggagatggacccccttccatctagtaagccttttcagaagtattcctggtcagttactgataaagaaggtgctgggtcttcagctctaaagaggccatttgaagatggattaggggatgataaagaccccaacaagaagatgaaacgaaacttaaggaaaattctggatagtaaagcaatagaccttatgaatgcactaatgaggctaaatcagatcaggcctgggcttcagtataagctcctatctcagtctggccccgttcatgccccagtcttcacaatgtctgtagatgtggatggcacaacatatgaagcctcaggaccatccaagaaaacagcaaaacttcacgtagcggtgaaggtattgcaggcaatgggatatccaacaggctttgatgcagatattgaatgtatgagttccgatgaaaaatcagataatgaaagtaaaaatgaaacagtgtcttcaaactcaagcaataatactggaaattctacaactgaaacctccagtaccttagaggtaagaactcagggccctatcctcacagcaagtggcaaaaaccctgtaatggagctcaatgaaaaaagaagaggtctcaagtatgaactcatctcagagactggtggaagccatgacaagcgctttgtaatggaggtagaagtagatggacagaaattcagaggcgcaggtccaaataagaaagtggcaaaggcgagtgcagctttagctgccttggagaaactgttttctggacccaatgcggcaaataataagaaaaagaagattatccctcaggcaaagggcgttgtgaatacagctgtgtctgcagcagtccaagctgttcggggcagaggaagaggaactctaacaaggggagcttttgttggggcgacagctgctcctggctacatagctccaggctatggaacaccatatggttacagcacagctgcccctgcctatggtttacccaagagaatggttctgttacccgttatgaaatttccaacatatcctgttccccactactcattcttttagcaaatgacagaagctaattcctattgaacaacaatacagtacaacacagaatgttagagaaaaagcctttttatcctgctttctttgaacacatacttgatcaaaattatttgtaaagaacatctttcctactttttgattttaacaaatgcaaatttagttctctaaaacttgaaaaaaaaaagaaaccagttctgtgaaaacggtacctcatttctggaaaataacttataccagcccttctgttctagggaaataaaagtctagcagttcaaagtttaagttttaagagacgtatcagattatgtaaaattaaatttgtgaaggatgtatagagtctcaaacactgatcacaaataaactgctttgttgtaacacagagtactgcctggttcctgatgcagtcactgattcttagttgattgatatgtatttgccccagggcactttaatttgggctgtagttattttttttaatacaatagagacttttcatttaactttaactttgtaaatattgaagtgtgtaataaagccaataaaatatgggtttgaaaaaaaaaaaaaaaa

SEQ ID NO: 12212 - DNA, 4422 bp, Homo sapiens
aggaggaggagggtgagagagaagctgggagagcagagaaaaggggccaccggtcgcccccccgcttccccgcacgcgctctccagccgcggccgcccgcctgccgcggtcaccccggcctctgcctctgtcccccagtgatcggatcaaggcgctgagcgaggccctgcctgcggggcggccatgcggcggtgacaggagcgcgaccgacacgcacgggcccctcgccccctctcgcctcccgtccgctcgccagctcccctcagccgaggctgctccgcggcggccgcagcccgcgcgcggcccacactcgcctcccctcggcacccccggccccggagctgcctggaggcggccgcactcggggatcatggcccaagttgcaatgtccaccctccccgttgaagatgaggagtcctcggagagcaggatggtggtgacattcctcatgtcagctctcgagtccatgtgtaaagaactggccaagtccaaagccgaagtggcctgcattgcagtgtatgaaacagacgtgtttgtcgtcggaactgaaagaggacgtgcttttgtcaataccagaaaggattttcaaaaagattttgtaaaatattgtgttgaagaagaagaaaaagctgcagagatgcataaaatgaaatctacaacccaggcaaatcggatgagtgtagatgctgtagaaattgaaacactcagaaaaacagttgaggactatttctgcttttgctatgggaaagctttaggcaaatccacagtggtacctgtaccatatgagaagatgctgcgagaccagtcggctgtggtagtgcaggggcttccggaaggtgttgcctttaaacaccccgagaactatgatcttgcaaccctgaaatggattttggagaacaaagcagggatttcattcatcattaagagaccttttttagagccaaagaagcatgtaggtggtcgtgtgatggtaacagatgctgacaggtcaatactatctccaggtggaagttgtggccccatcaaagtgaaaactgaacccacagaagattctggcatttccctggaaatggcagctgtgacagtaaaggaagaatcagaagatcctgattattatcaatataacattcaaggaagccaccattcttcagagggcaatgaaggcacagaaatggaagtaccagcagaagatgatgattattctccaccgtctaagagaccaaaggccaatgagctaccgcagccaccagtcccggaacccgccaatgctgggaagcggaaagtgagggagttcaacttcgagaaatggaatgctcgcatcactgatctacgtaaacaagttgaagaattgtttgaaaggaaatatgctcaagccataaaagccaaaggtccggtgacgatcccgtaccctcttttccagtctcatgttgaagatctttatgtagaaggacttcctgaaggaattccttttagaaggccatctacttacggaattcctcgcctggagaggatattacttgcaaaggaaaggattcgttttgtgattaagaaacatgagcttctgaattcaacacgtgaagatttacagcttgataaaccagcttcaggagtaaaggaagaatggtatgccagaatcactaaattaagaaagatggtggatcagcttttctgcaaaaaatttgcggaacgcttggggagcactgaagccaaggctgtaccgtaccaaaaatttgaggcacacccgaatgatctgtacgtggaaggactgccagaaaacattcctttccgaagtccctcatggtatggaatcccaaggctggaaaaaatcattcaagtgggcaatcgaattaaatttgttattaaaagaccagaacttctgactcacagtaccactgaagttactcagccaagaacgaatacaccagtcaaagaagattggaatgtcagaattaccaagctacggaagcaagtggaagagatttttaatttgaaatttgctcaagctcttggactcaccgaggcagtaaaagtaccatatcctgtgtttgaatcaaacccggagttcttgtatgtggaaggcttgccagaggggattcccttccgaagccctacctggtttggaattccacgacttgaaaggatcgtccgcgggagtaataaaatcaagttcgttgttaaaaaacctgaactagttatttcctacttgcctcctgggatggctagtaaaataaacactaaagctttgcagtcccccaaaagaccacgaagtcctgggagtaattcaaaggttcctgaaattgaggtcaccgtggaaggccctaataacaacaatcctcaaacctcagctgttcgaaccccgacccagactaacggttctaacgttcccttcaagccacgagggagagagttttcctttgaggcctggaatgccaaaatcacggacctaaaacagaaagttgaaaatctcttcaatgagaaatgtggggaagctcttggccttaaacaagctgtgaaggtgccgttcgcgttatttgagtctttcccggaagacttttatgtggaaggcttacctgagggtgtgccattccgaagaccatcgacttttggcattccgagactggagaagatactcagaaacaaagccaaaattaagttcatcattaaaaagcccgaaatgtttgagacggcgattaaggagagcacctcctctaagagccctcccagaaaaataaattcatcacccaatgttaatactactgcatcaggtgttgaagaccttaacatcattcaggtgacaattccagatgatgataatgaaagactctcgaaagttgaaaaagctagacagctaagagaacaagtgaatgacctctttagtcggaaatttggtgaagctattggtatgggttttcctgtgaaagttccctacaggaaaatcacaattaaccctggctgtgtggtggttgatggcatgcccccgggggtgtccttcaaagcccccagctacctggaaatcagctccatgagaaggatcttagactctgccgagtttatcaaattcacggtcattagaccatttccaggacttgtgattaataaccagctggttgatcagagtgagtcagaaggccccgtgatacaagaatcagctgaaccaagccagttggaagttccagccacagaagaaataaaagagactgatggaagctctcagatcaagcaagaaccagaccccacgtggtagacctcttccctcctaggcttaaagtatcagtggttgagaagagcttttcggacctgttactaccccaagctgtgtaatataccttggtataacagaaataccttctatacaaacctttttttctacttttagatagaaatgtctactttttcagcagttctgtgaattaaagagcagagtgactgtgggtctggaatggctggtgtacttgggaatgtactatcaggattttacagcaatgctgggaaatgacagggaaaatgacaggaatgaatctcaccagattttttatgtactcagcagagccttgagttacggtgtttattttccaatcaagtgaagatatctcctacttctcctactggaacatctcagcttctgcagtgaagaaaaattcctgtgatagttcagttctttagtttttctatttgaaaaaaaaaaaatcatttaaatgatcctttgttcacggctctccttaatgactgagtgaacagttcctatctgtatatttgactaaaccttttcctaagctatctctcatggttcctatgtttttttatcataattaaaagcaaaaccatctggatcacctaacagtcagaggtcagtatctcagcgtgtgaattatagaggaatacagagagaacctctcccactttttacttttcgtccaaataaaatgcatggtgtaccagaagttgaagatcgggttgaggattggggctagctcgatgacactaaggccccaacatcgcgggacctgctgtggcgcggattcttaggaacgctgttctagccggccccctctccaggggtcgccgtggccggcattatttcctagttcttcttgtaaccctgaggtgccagcgcggggagtgaggaggggtcagggggctaaggatgcaacctctgacgttctgcgccttcctaggagagtcttacatgtgttgagatttcacaagcaatgcgagttgtaaaataccagctctacaagaaactaggctctgtgacggcatagttttcagtagctttatcacaatattcacaatggagaattatatgacatggtagcagaaataggcccttttatgtgttgcttctattttacctcaaattgtagatatagggtaatcaataaaatccatccatgcctttcacacactaaaaaaaaaaaaaaa

SEQ ID NO: 12213 - DNA, 4537 bp, Homo sapiens
aggaggaggagggtgagagagaagctgggagagcagagaaaaggggccaccggtcgcccccccgcttccccgcacgcgctctccagccgcggccgcccgcctgccgcggtcaccccggcctctgcctctgtcccccagtgatcggatcaaggcgctgagcgaggccctgcctgcggggcggccatgcggcggtgacaggagcgcgaccgacacgcacgggcccctcgccccctctcgcctcccgtccgctcgccagctcccctcagccgaggctgctccgcggcggccgcagcccgcgcgcggcccacactcgcctcccctcggcacccccggccccggagctgcctggaggcggccgcactcggggatcatggcccaagttgcaatgtccaccctccccgttgaagatgaggagtcctcggagagcaggatggtggtgacattcctcatgtcagctctcgagtccatgtgtaaagaactggccaagtccaaagccgaagtggcctgcattgcagtgtatgaaacagacgtgtttgtcgtcggaactgaaagaggacgtgcttttgtcaataccagaaaggattttcaaaaagattttgtaaaatattgtgttgaagaagaagaaaaagctgcagagatgcataaaatgaaatctacaacccaggcaaatcggatgagtgtagatgctgtagaaattgaaacactcagaaaaacagttgaggactatttctgcttttgctatgggaaagctttaggcaaatccacagtggtacctgtaccatatgagaagatgctgcgagaccagtcggctgtggtagtgcaggggcttccggaaggtgttgcctttaaacaccccgagaactatgatcttgcaaccctgaaatggattttggagaacaaagcagggatttcattcatcattaagagaccttttttagagccaaagaagcatgtaggtggtcgtgtgatggtaacagatgctgacaggtcaatactatctccaggtggaagttgtggccccatcaaagtgaaaactgaacccacagaagattctggcatttccctggaaatggcagctgtgacagtaaaggaagaatcagaagatcctgattattatcaatataacattcaagcaggcccttctgaaactgatgatgttgatgaaaaacagcccctatcgaagcctttgcaaggaagccaccattcttcagagggcaatgaaggcacagaaatggaagtaccagcagaagattctactcaacatgtcccttcagaaacaagtgaggaccctgaagttgaggtgactattgaagatgatgattattctccaccgtctaagagaccaaaggccaatgagctaccgcagccaccagtcccggaacccgccaatgctgggaagcggaaagtgagggagttcaacttcgagaaatggaatgctcgcatcactgatctacgtaaacaagttgaagaattgtttgaaaggaaatatgctcaagccataaaagccaaaggtccggtgacgatcccgtaccctcttttccagtctcatgttgaagatctttatgtagaaggacttcctgaaggaattccttttagaaggccatctacttacggaattcctcgcctggagaggatattacttgcaaaggaaaggattcgttttgtgattaagaaacatgagcttctgaattcaacacgtgaagatttacagcttgataagccagcttcaggagtaaaggaagaatggtatgccagaatcactaaattaagaaagatggtggatcagcttttctgcaaaaaatttgcggaagccttggggagcactgaagccaaggctgtaccgtaccaaaaatttgaggcacacccgaatgatctgtacgtggaaggactgccagaaaacattcctttccgaagtccctcatggtatggaatcccaaggctggaaaaaatcattcaagtgggcaatcgaattaaatttgttattaaaagaccagaacttctgactcacagtaccactgaagttactcagccaagaacgaatacaccagtcaaggaagattggaatgtcagaattaccaagctacggaagcaagtggaagagatttttaatttgaaatttgctcaagctcttggactcaccgaggcagtaaaagtaccatatcctgtgtttgaatcaaacccggagttcttgtatgtggaaggcttgccagaggggattcccttccgaagccctacctggtttggaattccacgacttgaaaggatcgtccgcgggagtaataaaatcaagttcgttgttaaaaaacctgaactagttatttcctacttgcctcctgggatggctagtaaaataaacactaaagctttgcagtcccccaaaagaccacgaagtcctgggagtaattcaaaggttcctgaaattgaggtcaccgtggaaggccctaataacaacaatcctcaaacctcagctgttcgaaccccgacccagactaacggttctaacgttcccttcaagccacgagggagagagttttcctttgaggcctggaatgccaaaatcacggacctaaaacagaaagttgaaaatctcttcaatgagaaatgtggggaagctcttggccttaaacaagctgtgaaggtgccgttcgcgttatttgagtctttcccggaagacttttatgtggaaggcttacctgagggtgtgccattccgaagaccatcgacttttggcattccgaggctggagaagatactcagaaacaaagccaaaattaagttcatcattaaaaagcccgaaatgtttgagacggcgattaaggagagcacctcctctaagagccctcccagaaaaataaattcatcacccaatgttaatactactgcatcaggtgttgaagaccttaacatcattcaggtgacaattccagatgatgataatgaaagactctcgaaagttgaaaaagctagacagctaagagaacaagtgaatgacctctttagtcggaaatttggtgaagctattggtatgggttttcctgtgaaagttccctacaggaaaatcacaattaaccctggctgtgtggtggttgatggcatgcccccgggggtgtccttcaaagcccccagctacctggaaatcagctccatgagaaggatcttagactctgccgagtttatcaaattcacggtcattagaccatttccaggacttgtgattaataaccagctggttgatcagagtgagtcagaaggccccgtgatacaagaatcagctgaaccaagccagttggaagttccagccacagaagaaataaaagagactgatggaagctctcagatcaagcaagaaccagaccccacgtggtagacctcttccctcctaggcttaaagtatcagtggttgagaagagcttttcggacctgttactaccccaagctgtgtaatatacttgtataacagaaataccttctatacaaacctttttttctacttttagatagaaatgtctactttttcagcagttctgtgaattaaagagcagagtgactgtgggtctggaatggctggtgtacttgggaatgtactatcaggattttacagcaatgctgggaaatgacagggaaaatgacaggaatgaatctcaccagattttttatgtactcagcagagccttgagttacggtgtttattttccaatcaagtgaagatatctcctacttctcctactggaacatctcagcttctgcagtgaagaaaaattcctgtgatagttcagttctttagtttttctatttgaaaaaaaaaaatcatttaaatgatcctttgttcacggctctccttaatgactgagtgaacagttcctatctgtatatttgactaaaccttttcctaagctatctctcatggttcctatgtttttttatcataattaaaagcaaaaccatctggatcacctaacagtcagaggtcagtatctcagcgtgtgaattatagaggaaatacagagagaacctcttccacttttacttttcgtccaaataaaatgcatggtgtaccagaagttgaagatcgggttgaggattggggctagctcgatgacactaaggccccaacatcgcgggacctgctgtggcgcggattcttaggaacgctgttctagccggccccctctccaggggtcgcgtggccggcattatttcctagttcttcttgtaaccctgaggtgccagcgcggggagtgaggaggggtcagggggctaaggatgcaacctctgacgttctgcgccttcctaggagagtcttacatgtgttgagatttcacaagcaatgcgagttgtaaaataccagctctacaagaagctaggctctgtgacggcatagttttcagtagctttatcacaatattcacaatggagaattatatgacatggtagcagaaataggcccttttatgtgttgcttctattttacctcaaattgtagatatagggtaatcaataaaatccatccatgcctttcacacactaaaaagtcgga

SEQ ID NO: 12214 - DNA, 4474 bp, Homo sapiens
aggaggaggagggtgagagagaagctgggagagcagagaaaaggggccaccggtcgcccccccgcttccccgcacgcgctctccagccgcggccgcccgcctgccgcggtcaccccggcctctgcctctgtcccccagtgatcggatcaaggcgctgagcgaggccctgcctgcggggcggccatgcggcggtgacaggagcgcgaccgacacgcacgggcccctcgccccctctcgcctcccgtccgctcgccagctcccctcagccgaggctgctccgcggcggccgcagcccgcgcgcggcccacactcgcctcccctcggcacccccggccccggagctgcctggaggcggccgcactcggggatcatggcccaagttgcaatgtccaccctccccgttgaagatgaggagtcctcggagagcaggatggtggtgacattcctcatgtcagctctcgagtccatgtgtaaagaactggccaagtccaaagccgaagtggcctgcattgcagtgtatgaaacagacgtgtttgtcgtcggaactgaaagaggacgtgcttttgtcaataccagaaaggattttcaaaaagattttgtaaaatattgtgttgaagaagaagaaaaagctgcagagatgcataaaatgaaatctacaacccaggcaaatcggatgagtgtagatgctgtagaaattgaaacactcagaaaaacagttgaggactatttctgcttttgctatgggaaagctttaggcaaatccacagtggtacctgtaccatatgagaagatgctgcgagaccagtcggctgtggtagtgcaggggcttccggaaggtgttgcctttaaacaccccgagaactatgatcttgcaaccctgaaatggattttggagaacaaagcagggatttcattcatcattaagagaccttttttagagccaaagaagcatgtaggtggtcgtgtgatggtaacagatgctgacaggtcaatactatctccaggtggaagttgtggccccatcaaagtgaaaactgaacccacagaagattctggcatttccctggaaatggcagctgtgacagtaaaggaagaatcagaagatcctgattattatcaatataacattcaagcaggcccttctgaaactgatgatgttgatgaaaaacagcccctatcgaagcctttgcaaggaagccaccattcttcagagggcaatgaaggcacagaaatggaagtaccagcagaagatgatgattattctccaccgtctaagagaccaaaggccaatgagctaccgcagccaccagtcccggaacccgccaatgctgggaagcggaaagtgagggagttcaacttcgagaaatggaatgctcgcatcactgatctacgtaaacaagttgaagaattgtttgaaaggaaatatgctcaagccataaaagccaaaggtccggtgacgatcccgtaccctcttttccagtctcatgttgaagatctttatgtagaaggacttcctgaaggaattccttttagaaggccatctacttacggaattcctcgcctggagaggatattacttgcaaaggaaaggattcgttttgtgattaagaaacatgagcttctgaattcaacacgtgaagatttacagcttgataagccagcttcaggagtaaaggaagaatggtatgccagaatcactaaattaagaaagatggtggatcagcttttctgcaaaaaatttgcggaagccttggggagcactgaagccaaggctgtaccgtaccaaaaatttgaggcacacccgaatgatctgtacgtggaaggactgccagaaaacattcctttccgaagtccctcatggtatggaatcccaaggctggaaaaaatcattcaagtgggcaatcgaattaaatttgttattaaaagaccagaacttctgactcacagtaccactgaagttactcagccaagaacgaatacaccagtcaaggaagattggaatgtcagaattaccaagctacggaagcaagtggaagagatttttaatttgaaatttgctcaagctcttggactcaccgaggcagtaaaagtaccatatcctgtgtttgaatcaaacccggagttcttgtatgtggaaggcttgccagaggggattcccttccgaagccctacctggtttggaattccacgacttgaaaggatcgtccgcgggagtaataaaatcaagttcgttgttaaaaaacctgaactagttatttcctacttgcctcctgggatggctagtaaaataaacactaaagctttgcagtcccccaaaagaccacgaagtcctgggagtaattcaaaggttcctgaaattgaggtcaccgtggaaggccctaataacaacaatcctcaaacctcagctgttcgaaccccgacccagactaacggttctaacgttcccttcaagccacgagggagagagttttcctttgaggcctggaatgccaaaatcacggacctaaaacagaaagttgaaaatctcttcaatgagaaatgtggggaagctcttggccttaaacaagctgtgaaggtgccgttcgcgttatttgagtctttcccggaagacttttatgtggaaggcttacctgagggtgtgccattccgaagaccatcgacttttggcattccgaggctggagaagatactcagaaacaaagccaaaattaagttcatcattaaaaagcccgaaatgtttgagacggcgattaaggagagcacctcctctaagagccctcccagaaaaataaattcatcacccaatgttaatactactgcatcaggtgttgaagaccttaacatcattcaggtgacaattccagatgatgataatgaaagactctcgaaagttgaaaaagctagacagctaagagaacaagtgaatgacctctttagtcggaaatttggtgaagctattggtatgggttttcctgtgaaagttccctacaggaaaatcacaattaaccctggctgtgtggtggttgatggcatgcccccgggggtgtccttcaaagcccccagctacctggaaatcagctccatgagaaggatcttagactctgccgagtttatcaaattcacggtcattagaccatttccaggacttgtgattaataaccagctggttgatcagagtgagtcagaaggccccgtgatacaagaatcagctgaaccaagccagttggaagttccagccacagaagaaataaaagagactgatggaagctctcagatcaagcaagaaccagaccccacgtggtagacctcttccctcctaggcttaaagtatcagtggttgagaagagcttttcggacctgttactaccccaagctgtgtaatatacttgtataacagaaataccttctatacaaacctttttttctacttttagatagaaatgtctactttttcagcagttctgtgaattaaagagcagagtgactgtgggtctggaatggctggtgtacttgggaatgtactatcaggattttacagcaatgctgggaaatgacagggaaaatgacaggaatgaatctcaccagattttttatgtactcagcagagccttgagttacggtgtttattttccaatcaagtgaagatatctcctacttctcctactggaacatctcagcttctgcagtgaagaaaaattcctgtgatagttcagttctttagtttttctatttgaaaaaaaaaaatcatttaaatgatcctttgttcacggctctccttaatgactgagtgaacagttcctatctgtatatttgactaaaccttttcctaagctatctctcatggttcctatgtttttttatcataattaaaagcaaaaccatctggatcacctaacagtcagaggtcagtatctcagcgtgtgaattatagaggaaatacagagagaacctcttccacttttacttttcgtccaaataaaatgcatggtgtaccagaagttgaagatcgggttgaggattggggctagctcgatgacactaaggccccaacatcgcgggacctgctgtggcgcggattcttaggaacgctgttctagccggccccctctccaggggtcgcgtggccggcattatttcctagttcttcttgtaaccctgaggtgccagcgcggggagtgaggaggggtcagggggctaaggatgcaacctctgacgttctgcgccttcctaggagagtcttacatgtgttgagatttcacaagcaatgcgagttgtaaaataccagctctacaagaagctaggctctgtgacggcatagttttcagtagctttatcacaatattcacaatggagaattatatgacatggtagcagaaataggcccttttatgtgttgcttctattttacctcaaattgtagatatagggtaatcaataaaatccatccatgcctttcacacactaaaaagtcgga

SEQ ID NO: 12215 - DNA, 4477 bp, Homo sapiens
aggaggaggagggtgagagagaagctgggagagcagagaaaaggggccaccggtcgcccccccgcttccccgcacgcgctctccagccgcggccgcccgcctgccgcggtcaccccggcctctgcctctgtcccccagtgatcggatcaaggcgctgagcgaggccctgcctgcggggcggccatgcggcggtgacaggagcgcgaccgacacgcacgggcccctcgccccctctcgcctcccgtccgctcgccagctcccctcagccgaggctgctccgcggcggccgcagcccgcgcgcggcccacactcgcctcccctcggcacccccggccccggagctgcctggaggcggccgcactcggggatcatggcccaagttgcaatgtccaccctccccgttgaagatgaggagtcctcggagagcaggatggtggtgacattcctcatgtcagctctcgagtccatgtgtaaagaactggccaagtccaaagccgaagtggcctgcattgcagtgtatgaaacagacgtgtttgtcgtcggaactgaaagaggacgtgcttttgtcaataccagaaaggattttcaaaaagattttgtaaaatattgtgttgaagaagaagaaaaagctgcagagatgcataaaatgaaatctacaacccaggcaaatcggatgagtgtagatgctgtagaaattgaaacactcagaaaaacagttgaggactatttctgcttttgctatgggaaagctttaggcaaatccacagtggtacctgtaccatatgagaagatgctgcgagaccagtcggctgtggtagtgcaggggcttccggaaggtgttgcctttaaacaccccgagaactatgatcttgcaaccctgaaatggattttggagaacaaagcagggatttcattcatcattaagagaccttttttagagccaaagaagcatgtaggtggtcgtgtgatggtaacagatgctgacaggtcaatactatctccaggtggaagttgtggccccatcaaagtgaaaactgaacccacagaagattctggcatttccctggaaatggcagctgtgacagtaaaggaagaatcagaagatcctgattattatcaatataacattcaaggaagccaccattcttcagagggcaatgaaggcacagaaatggaagtaccagcagaagattctactcaacatgtcccttcagaaacaagtgaggaccctgaagttgaggtgactattgaagatgatgattattctccaccgtctaagagaccaaaggccaatgagctaccgcagccaccagtcccggaacccgccaatgctgggaagcggaaagtgagggagttcaacttcgagaaatggaatgctcgcatcactgatctacgtaaacaagttgaagaattgtttgaaaggaaatatgctcaagccataaaagccaaaggtccggtgacgatcccgtaccctcttttccagtctcatgttgaagatctttatgtagaaggacttcctgaaggaattccttttagaaggccatctacttacggaattcctcgcctggagaggatattacttgcaaaggaaaggattcgttttgtgattaagaaacatgagcttctgaattcaacacgtgaagatttacagcttgataagccagcttcaggagtaaaggaagaatggtatgccagaatcactaaattaagaaagatggtggatcagcttttctgcaaaaaatttgcggaagccttggggagcactgaagccaaggctgtaccgtaccaaaaatttgaggcacacccgaatgatctgtacgtggaaggactgccagaaaacattcctttccgaagtccctcatggtatggaatcccaaggctggaaaaaatcattcaagtgggcaatcgaattaaatttgttattaaaagaccagaacttctgactcacagtaccactgaagttactcagccaagaacgaatacaccagtcaaggaagattggaatgtcagaattaccaagctacggaagcaagtggaagagatttttaatttgaaatttgctcaagctcttggactcaccgaggcagtaaaagtaccatatcctgtgtttgaatcaaacccggagttcttgtatgtggaaggcttgccagaggggattcccttccgaagccctacctggtttggaattccacgacttgaaaggatcgtccgcgggagtaataaaatcaagttcgttgttaaaaaacctgaactagttatttcctacttgcctcctgggatggctagtaaaataaacactaaagctttgcagtcccccaaaagaccacgaagtcctgggagtaattcaaaggttcctgaaattgaggtcaccgtggaaggccctaataacaacaatcctcaaacctcagctgttcgaaccccgacccagactaacggttctaacgttcccttcaagccacgagggagagagttttcctttgaggcctggaatgccaaaatcacggacctaaaacagaaagttgaaaatctcttcaatgagaaatgtggggaagctcttggccttaaacaagctgtgaaggtgccgttcgcgttatttgagtctttcccggaagacttttatgtggaaggcttacctgagggtgtgccattccgaagaccatcgacttttggcattccgaggctggagaagatactcagaaacaaagccaaaattaagttcatcattaaaaagcccgaaatgtttgagacggcgattaaggagagcacctcctctaagagccctcccagaaaaataaattcatcacccaatgttaatactactgcatcaggtgttgaagaccttaacatcattcaggtgacaattccagatgatgataatgaaagactctcgaaagttgaaaaagctagacagctaagagaacaagtgaatgacctctttagtcggaaatttggtgaagctattggtatgggttttcctgtgaaagttccctacaggaaaatcacaattaaccctggctgtgtggtggttgatggcatgcccccgggggtgtccttcaaagcccccagctacctggaaatcagctccatgagaaggatcttagactctgccgagtttatcaaattcacggtcattagaccatttccaggacttgtgattaataaccagctggttgatcagagtgagtcagaaggccccgtgatacaagaatcagctgaaccaagccagttggaagttccagccacagaagaaataaaagagactgatggaagctctcagatcaagcaagaaccagaccccacgtggtagacctcttccctcctaggcttaaagtatcagtggttgagaagagcttttcggacctgttactaccccaagctgtgtaatatacttgtataacagaaataccttctatacaaacctttttttctacttttagatagaaatgtctactttttcagcagttctgtgaattaaagagcagagtgactgtgggtctggaatggctggtgtacttgggaatgtactatcaggattttacagcaatgctgggaaatgacagggaaaatgacaggaatgaatctcaccagattttttatgtactcagcagagccttgagttacggtgtttattttccaatcaagtgaagatatctcctacttctcctactggaacatctcagcttctgcagtgaagaaaaattcctgtgatagttcagttctttagtttttctatttgaaaaaaaaaaatcatttaaatgatcctttgttcacggctctccttaatgactgagtgaacagttcctatctgtatatttgactaaaccttttcctaagctatctctcatggttcctatgtttttttatcataattaaaagcaaaaccatctggatcacctaacagtcagaggtcagtatctcagcgtgtgaattatagaggaaatacagagagaacctcttccacttttacttttcgtccaaataaaatgcatggtgtaccagaagttgaagatcgggttgaggattggggctagctcgatgacactaaggccccaacatcgcgggacctgctgtggcgcggattcttaggaacgctgttctagccggccccctctccaggggtcgcgtggccggcattatttcctagttcttcttgtaaccctgaggtgccagcgcggggagtgaggaggggtcagggggctaaggatgcaacctctgacgttctgcgccttcctaggagagtcttacatgtgttgagatttcacaagcaatgcgagttgtaaaataccagctctacaagaagctaggctctgtgacggcatagttttcagtagctttatcacaatattcacaatggagaattatatgacatggtagcagaaataggcccttttatgtgttgcttctattttacctcaaattgtagatatagggtaatcaataaaatccatccatgcctttcacacactaaaaagtcgga

SEQ ID NO: 12216 - DNA, 4146 bp, Homo sapiens
gaccactgagacgagcgggagcgcggagcagcagcctctgctgccctgactttttaagaaatctcaatgaactatttgtagagaatcactgatccggcctgcaagcattttgcacggcaaaaatatcgatcagtgttaagtgaagatcacattttatatgcgatcttgacttttttgtcttacattatatttttatagattttgttataaacatggtgctgggaaaggtgaagagtttgacaataagctttgactgtcttaatgacagcaatgtccctgtgtattctagtggggataccgtctcaggaagggtaaatttagaagttactggggaaatcagagtaaaatctcttaaaattcatgcaagaggacatgcgaaagtacgctggactgaatctagaaacgccggctccaatactgcctatacacagaattacactgaagaagtagagtatttcaaccataaagacatcttaattgggcacgaaagagatgatgataattccgaagaaggcttccacactattcattcaggaaggcatgaatatgcattcagcttcgagcttccacagacaccactcgctacctcattcgaaggccgacatggcagtgtgcgctattgggtgaaagccgaattgcacaggccttggctactaccagtaaaattaaagaaggaatttacagtctttgagcatatagatatcaacactccttcattactgtcaccccaagcaggcacaaaagaaaagacactctgttgctggttctgtacctcaggcccaatatccttaagtgccaaaattgaaaggaagggctataccccaggtgaatcaattcagatatttgctgagattgagaactgctcttcccgaatggtggtgccaaaggcagccatttaccaaacacaggccttctatgccaaagggaaaatgaaggaagtaaaacagcttgtggctaacttgcgtggggaatccttatcatctggaaagacagagacgtggaatggcaagttgctgaaaattccaccagtttctccctctatcctcgactgtagtataatccgcgtggaatattcactaatggtatatgtggatattcctggagctatggatttatttcttaatttgccacttgtcatcggtaccattcctctacatccatttggtagcagaacctcaagtgtaagcagtcagtgtagcatgaatatgaactggctcagtttatcacttcctgaaagacctgaagcaccacccagctatgcagaagtggtaacagaggaacaaaggcggaacaatcttgcaccagtgagtgcttgtgatgactttgagagagcccttcaaggaccactgtttgcatatatccaggagtttcgattcttgcctccacctctttattcagagattgatccaaatcctgatcagtcagcagatgatagaccatcctgcccctctcgttgaaggaacacttggttgaatcaagttgatgtgggttccgaactgtatctcttccggctgaggacagagaagtatcttggagacacgtttcagaggaagtggaattacttttgcccagaaaaatggcgaatacatgaaacaaccagtgatcatgctttagaagcctacagcaacattctgagactgctccaacatgcttgaagatctaagcttttctcttttaaaactggcacatactcagagcagtcttcttagcctatggtcgtacgtgtcaagacatcacgttgtaaagagggatgatttccttcttttgatttgaaaatttgcacatgctcaatgcttacattgtgcggttcgacgtcactacagcttctttttttttttttttttctatttttgccagactcttgatactcttaaaacttgtttgtggtcagcacaacaaggaacaaaacaaagctttgaaaaaactttaacatgaaaaaacgcactgacatttttttttatttaatatagcctggactttacctgcgtatgcacatgctcagaattgtctactaggctgactatgtatcacctcttcagcttggatccaattgtggatttatttacaaacatcaaatgccttcaagccaatcctttttgctgtatgttttgcagcctactgtagtagatacgcaacagataatgtgggaaaaaaagagataagaggaggaagctaataagagactgtcaagattgtataccttcttggtttcttttaagaatttgttgcctttctactattacagcaaagcagcattttgttactgactgcctaaaatcacttaatctcaggtgaacgcatcacttgccaaactgttggaatgctatttgtgttttgttgcactgtttttttcgtttgtttgtttgtttatttggttggctttttggagagggaaatttggaaacgggacatacacaaaagttacacacccacattccctttttatcatgacatacaagaagaaactagcagagctaagaatggagtgaagaaaggcagtatggcaggcaccagcaaagagttgagggctgttgctcttaaaaattattttttttattattattttgaaagtatggaagttttccattcactggggaaaggagggaaaagtgcatttatttttatacagagttacttaattacctccaaaacacatatgttggaaatcgcttttgctggtgcaaagtatattaatgagcaggaatacatacattgaggttatgaatagagagctcaatttgtacctttgctgtcttgctcaagcttggtatggcatgaaaactcgactttattccaaaagtaacttcaaaatttaaaatactagaacgtttgctgcgataaatcttttggatttttgtgtttttctaatgagaatactgtttttcattacctaaagaacaatttgctaaacatgagaaatcactcactttgattatgtatagattacataggaagaacaatcacatcagtaagttatagtttatattaaaggtaattttctgttggctcataacaaatataccagcattcatgatagcatttcagcattttccaaggtaccaagtgtacttattttgttgttgttgttgttgttgtattttagaaggaattcagctctgatgtttttaaagaaaaccagcatctctgatgttgcaacatacgtgtaaaatgggtgttacatctatcctgccatttaaccccacagttaataaagtggctgaaaataatagtagctctggcttggtgcttgacctggttaaatactgtcttaaagctcatacaaaacaaataggcttttccataagtggcctttaagaaaacatggaagacaattcatgtttgacaaatgctgacagggtgaagaaagcccagtgtaaaaatgaatcgcgttttaagtgattcggttaaagagtttgggctcccgtagcaaactaatactagataataaggaaatgggggtgaaatatttttttattgttgaatcattttgtgaatgtccccctcaaaaaaagctaatggaatatttggcataaagggcatttggtggttttatttttgtttgagggggattgtcagaaaatcccttttctctcttacgtctaactgactagggaacaattgttgatatgcatagcattggaatacttgtcattatatactcttacaaataacacatgaagcaagaatgaccaatattctgataattggcactggatcacaaaatgtgataaaactttaaatgtataaaactttatcaaataaagttttattttcccctttaaaatgtatttctttagaggcattacttttttaaaaatattggtcaattcctgacataagatgtgaggttcacagttgtattccagtattcaagatagattcctgatttttcaattaggaaaagtaaaatccaaaatgttagcaaaacaaagtgcaatattaaatgtttgctttatagattatattctatggctgtttgtaatttctctttttttccttttttatttggtgctgaatatgtccttgtaggctctgttttaagaaaacaatatgtgggaaatgatttaatttttcctattgctcttccttgtggaaaataaagtgttttgtttttttctgttttgtataaaaaaaaaaaaaaaaaaa

SEQ ID NO: 12217 - DNA, 3171 bp, Homo sapiens
gttgccagctgcggcggccgccacagccacagccgccgccgccgccgccgccgcccctgcccctgccgcccctgcccctgccgttaggtggtggggtttctcagcccggcggcgggaggcgggccggcctcggcttcctgtcggaggacgcgcaaggatccgggcgtcggagtgtgtgcgagtgcgtgagtgtgtgtcggtcgcacggcgtgtgtctccggccgcgggttccgcctcctcccctgccgccgctgctcacggtgtaagtcaatgtgaagcagcagctccagccccgggataaacatggcgacgtctctgcatgagggacccacgaaccagctggatctgctcatccgggccgtggaagcatcagttcacagcagtaatgcacactgtacagataagacaattgaagctgctgaagccctgcttcatatggaatctcctacctgcttgagggattcaagaagtcctgtggaagtgtttgttcctccttgtgtatcaactccagaattcatccatgctgctatgaggccagatgtcattacagaaactgtagtggaggtgtcaactgaagagtctgaacccatggatacctctcctattccaacatcaccagatagccatgaaccaatgaaaaagaaaaaagttggccgtaaaccaaagacccagcaatcaccaatttccaatgggtctcctgagttaggtataaagaagaaaccaagagaaggaaaaggaaacacaacctatttgtgggagtttcttttagatctacttcaagataaaaatacttgtcccaggtatattaaatggactcagagagaaaaaggcatattcaagctggtggattcaaaggctgtctctaagctttggggaaagcataagaacaaaccagacatgaactatgaaaccatgggacgagctttgagatactactaccaaaggggaattcttgcaaaggttgaaggacagaggcttgtatatcagttcaaggatatgccgaaaaacatagtggtcatagatgatgacaaaagtgaaacctgtaatgaagatttagcaggaactactgatgaaaaatcattagaacgagtgtcactgtctgcagaaagtctcctgaaagcagcatcctctgttcgcagtggaaaaaattcatcccctataaactgctccagagcagagaagggtgtagctagagttgtgaatatcacttcccctgggcacgatgcttcatccaggtctcctactaccactgcatctgtgtcagcaacagcagctccaaggacagttcgtgtggcaatgcaggtacctgttgtaatgacatcattgggtcagaaaatttcaactgtggcagttcagtcagttaatgcaggtgcaccattaataaccagcactagtccaacaacagcgacctctccaaaggtagtcattcagacaatccctactgtgatgccagcttctactgaaaatggagacaaaatcaccatgcagcctgccaaaattattaccatcccagctacacagcttgcacagtgtcaactgcagacaaagtcaaatctgactggatcaggaagcattaacattgttggaaccccattggctgtgagagcacttacccctgtttcaatagcccatggtacacctgtaatgagactatcaatgcctactcagcaggcatctggccagactcctcctcgagttatcagtgcagtcataaaggggccagaggttaaatcggaagcagtggcaaaaaagcaagaacatgatgtgaaaactttgcagctagtagaagaaaaaccagcagatggaaataagacagtgacccacgtagtggttgtcagtgcgccttcagctattgcccttcctgtaactatgaaaacagaaggactagtgacatgtgagaaataaaatagcagctccaccatggacttcaggctgttagtggcagtactgacataaacatttgcaagggaagtcatcaagaaaagtcaaagaagactttaaaacatttttaatgcatatacaaaaacaatcagacttactggaaataaattacctatcccatgtttcagtgggaaatgaactacatattgagatgctgacagaaaactgcctcttacagtaggaaacaactgaacccatcaataagaaaaaggatcgaaagggaccaagcagctcactacgatatcaagttacactaagacttggaacactaacattctgtaagaggttatatagttttcagtgggaggggttgggatgggtaatctcattgttacatatagcaatttttgatgcattttatatgcataccagcaattattactgtgttcgcacagttctcacttaactggtgctatgtgaagactctgctaatataggtattttagaatgtgaattgaagaatggatcccaaaaacttcagaaagaggatagcaaaaaaagatctagtgcgattttatatatatatatatatatatatacatacatatatatatatcatatagcttaagctgatttaaaacaaaggccttagactaattttcgattttctttcttgaaataagctaatggcttgtttgtgtaaagcttttttattaaaagaaaaattttaaaaatcttgtacctagcacagtattgttatagaatatacatgtaacattttatatggtagtttaagtctgtcagtttcttaattgtggacaaattaacagttggctctggccttttgctgtaacatgcctgtgtcactcacttagccttggcatttgtgcagacataccattttcagttctgctgtcacttggaagttcaggctcagcatgaatttttggcaggtagctctaatacctggagttttctttgtttttttttcttttttttagttgaagtttatgagggaaataccagtgttcagttttgaactataatagtttgtatattcaacatttgaagtatattctattttgttgtactcttgtttcaaagtgtattcaagtaggttttctgaaatatagaaatgaaatttatcttctgttttggtctctggtgatattttaaacaatatttaaaagtcagtatagaagtgttttagttaggaagtgataaaacatctctcttctccttcccaactactgcatgaagaaattctacttccattatattaatatttgg

SEQ ID NO: 12218 - DNA, 8019 bp, Homo sapiens
atggacgtccttcccaccggcgggggccgcccggggctccggacggagctggaattccgcggcggcggtggcgaggcgaggctggagagtcaggaggaagaaacgattcctgcagctcccccagccccgcgcctccggggagcggcggagcggccgcggcgctcccgggacacgtgggacggcgatgaggacacggagcccggcgaggcgtgcggcggccgcacaagccgcacggcgtccctggtgagcgggctgctcaacgagctgtacagctgcacagaggaggaggaggcggcgggcgggggccgcggggccgagggccgccggcggcgccgcgacagcctcgacagctccaccgaggcctcgggctccgacgtggtcctgggcggccgcagcggtgccggcgactcccgcgtgctgcaggagctgcaggagcgaccgagccagcggcatcagatgctgtacctgcggcagaaagacgctaatgaactgaagacgatccttcgagagctaaagtacagaattggcatccagtcggccaagttacttcggcatctgaagcagaaagataggcttctgcataaagtgcagaggaactgtgatattgtgactgcctgcttgcaggctgtgtcacagaagagaagagttgataccaagttgaaattcactcttgagccatctttaggtcaaaatggttttcagcagtggtacgatgctctcaaggcagttgccaggctatccacaggaataccaaaggaatggaggagaaaggtttggttgaccttggcagatcattatttgcacagtatagccattgactgggacaaaaccatgcgcttcactttcaatgaaaggagtaatcctgatgatgactccatgggaattcagatagtcaaggaccttcaccgcacaggctgtagttcttactgtggccaggaggctgagcaggacagggttgtgttgaagcgggtgctgctggcctatgcccgatggaacaaaactgttgggtactgccaaggctttaacatcctggctgcactaattctggaagtgatggaaggcaatgaaggggatgccctgaaaattatgatttaccttattgataaggtacttcccgaaagctatttcgtcaataatctccgggcattgtctgtggatatggctgtcttcagagaccttttaagaatgaagctgccggaattatctcagcacctggatactcttcagagaactgcaaacaaagaaagtggaggtggatatgagcccccacttacaaatgtcttcacgatgcagtggtttctgactctctttgccacatgcctccctaatcagaccgttttaaagatctgggattcagtcttctttgaaggttcagaaatcatcctaagggtgtcgctggctatctgggcaaaattaggagagcagatagaatgttgtgaaacagcagatgaattctacagcaccatggggcgccttacccaggagatgctagagaatgatcttctgcaaagccatgaactcatgcagactgtttattccatggctccgttccctttcccacaattggcagagttgagggaaaaatacacctacaacattacaccgttcccagccacagttaaacccacctcagtttctggacgacatagtaaggccagagacagtgatgaagagaatgacccagacgatgaggatgctgtcgttaatgcagtggggtgtcttggaccttttagtgggttcctggctcctgaactgcagaagtaccaaaaacaaattaaagagccaaatgaggagcagagtctgagatctaataacattgcagagctgagtccaggagcaatcaattcctgtcgaagtgaataccatgcagcttttaacagtatgatgatggaacgcatgaccacagatatcaatgcactgaagcggcagtactctcgaattaaaaagaagcaacagcagcaggttcatcaggtgtacatcagggcagacaaagggccagtgaccagcattctcccgtctcaggtaaacagttctccagttataaaccaccttcttttaggaaagaagatgaaaatgactaacagagctgccaagaatgctgtcatccacatccctggtcacacaggagggaaaatatctcctgtcccctacgaagaccttaagacgaagctcaactccccgtggcgaactcacatccgagtccacaaaaagaacatgccaaggaccaagagtcatccgggctgtggggacaccgtagggctgatagatgagcagaacgaggccagcaagaccaatgggctgggggcagcagaggcattcccctctggttgtacagcgacagctgggagagaaggcagcagccctgaaggcagtaccaggaggacgatcgaggggcagtctccggagccggtgttcggagatgctgatgtggatgtgtctgcagttcaggcgaagttgggagccctggaactgaaccagagggatgctgcagctgaaactgagctcagggtgcacccaccctgccagcggcactgcccagagccgccgagtgcacccgaagaaaacaaagccaccagcaaagctccccaaggcagcaactcaaaaacccccatctttagcccttttcccagcgtcaagcccctgcggaaatctgctactgccaggaacttgggattatatggccctacagaaagaaccccaactgtgcactttcctcaaatgagtaggagcttcagcaaacccggcggtggaaacagtggcactaaaaaacgatgatgtctccccgaaactttgtatctggactcaccttttcacagtagtataagggttgcagctgaatggctctaaaagagttttatttgtccagtgaaaatgaataggttcagggatgagcaacagcccataaaaaatgggaactggaagttttataataggagttagaacagggctgttttcccagctacttgctaactgacgaagtggattcttgtggcaaaataaatattgtggttttatagtgtgaagttttcccaatttttcattgtgagctgtttaaaaaagactatatctagattgttaactctcgtccatccttctgttctgggggccttcagagtccctgtgacagcacccccaaaccttccagttctctgggtgttactaatactcaagcatgcacataccagcttgctaggacagaaactgtaaaaagaaagtaagtttcttcgttacaaaaaacttcctgattttccttttcatgctttacggaggggattgtgtcgtgtgagatttcccacagtaccagtttcaaattttttttttattcttatgctaaatcataggagaaaaatctagatagcctttctttaactgtctatttctacctgcaaaatgaagaaaacctttcatctgttgaaatttcaatcgataacccagctgaagatcttatgcacaggacacacttggcatatgctttacgcagttgctccggacagcttgctcgcgccactgagcttttcctgaggtttgtgttcgcctctcaaggagagctttgatcctcagtggtacggatgacttgatgggctccatgcggagcctggcctgcatcccccaccacacagctcactcacccaccagctctagactgcagacgcacaaggcctctgctcagaagccagaacacagcacctgtgactctgttacttgaattttgtgctttttgattggagtcctttgttgagtactttgttaattgaacactgcctttctctggagaaggccccagtgctttctagctccctctcactcctgccctttctagctctctctcacccagcgggtcagggatagcacctcttgtctccactatgcagatgggaactctgagccacacagaggtgaagtagcacttcagttactcaaggtcagtactctcggtattccaagtgacttagccacatttccttcagtgcaataggtgggtttaatgctctttgtacacagatgtattggctacatagcgtgtaaaaaccaagactgggaagccattcactaaaatccctcctgactcaaaggacctgtctccagatggtacagagtcccttgatggcattttacaaaaccagctctgacttccttatcctgaacagggagtttattttaaaaatgcttcatgcacctgttatttggctgaacagaaggctcactcctcaatccccttctcctcgccatcattagaggaatagactcagccttcatgtttgtctctggaagacgattggcgatacttgcaggaatattgttgatgcagccaatattaatttgagctaatggattgttaattctgaaacgaaaactgtaactgtagagcaggcttttactatgagaggtactactttttataatagagaatgtggttgtgtgggctttttttgaacagaaaacacaacaatgacctataccgtgagaaaagccattttatcttcttcgtggtatttttacccccaaaggaactgaagatggaaaatatgactaataagttattgcagttttggtcttgaattctgtgccatctgaagttagcatccagcttcttaaaaagcagccacgcctacagcctgttttttgggaaggctgtaggtggagagatgggcttattttgcataccaccctcagggcccagagacccactgcattttccaaagttaagcaaatgacaccattttcttccatcagctaaactttacagataatagtgtttccacctcatatccttttctttgccccttctcaaatgagtcagaatagtcatgttccccttgagggatgtctgacttgaatggagaattgttctttcctctcttgaatcagctcactagctccctgatggtctgggttcaaggaaatggttaatgaggtagaggccacttatacaagtccttgggattgtaccattgctgtccacaaacttagtatcaacaacacatgctgtgccctgtgaacactctcctctcacctatttccagggttggtcttcctgagaaggggatggatgaggtaacacacagtttgggatacgtatctgttgaatgaatgaataagtgaaaggataatagtcctctgaggtaaaaatggccttgtcagaattttgaaaatccaacagattcctattaaagcactctgtgtaccaataacatgcatgcattgtaccaagtaatcacaatgtgaattggtcaatttatgagccttgcctactttagaaaataaagaaacctgcagtagcctctaccacacagcatgtacaaagaccagtatggacttgctatcttccctatgtattggacactgtatgcaaacaccagaagtacttaacaagtagtggtttcttgatttttagatatgtctgtagcctcttagcccttttgccgggaatcaactcattctgatgcctctgcacctcagttcctcttacaaaagcctccagatgatctaaatctagttagcaatgtcagcctgtggactgcagctgtttgggacattgtattcctttgtttgtctcttgttgttctgaaggattgtattgatcacaaagctatatgcataaagattctcattgttgtaactgttctgccattttctgagtgcaagcatggaacactgttgtgacagtcccttctcccttcttccttcttccttcacccccaaccccagaccccccttggtcacatgaaccagggaaacagcccaataagctctatctcccccagtctaatcgctgggttgcagggtggcctgtgacctgcccagcatttgcagactcgctggttcctgaatatgagtaagcacagagtttacctagagagtttacctaaaattaacctttagatctactatttatttttgtcttaataaaatgaacaataaatatagtttagctgcatggcattaaggattctgtatgaatagatgtatagttgctgccatctccccatataaaaactctctttacatcgtttctgagccactttctttgctgtctgcagcatttaaaatatattatttttcctaattagaaaagtcacaggttttagaaaattgggaaaacaaaaagagcataaagaatcatcaatactctgatatagatatagatctttccagtacgtttgtgtatgtgtgtacacgccattatctacaaaaaagttatgttgaacatggtagtttaagctgtctttctggtaaatgctcttatacaatatgatttttagtgactaatattccctaatgtgttcatgccagaattcacataaccagtaccttgtcaaataggaggtttctgattagatagtagtagagacagtatcctgttacatgtatgtacatagcccgaattattttcttaggatatgcgtatagaagtggagttgaagggtcaggaaatatgtccatttttaagatacatatatctccaaattgccattcttaaaggttggagttatacaagtagtgaatgagaatgcctgcttctctacatcctggaagaggcagcagtctctttccttttttttcctttctatgacttctagtgtggaagtgccaacagaagtgttttagaagcagtgataatgaacactcataacacccatacctcattcctgacttttaaaagaagcattaagtaagatgttgaggtttctggtaggtgcctattattaggttaagaaaattcccttttattctttgcttgctaagagttttcttcatcaacaggtattgaatttcataaaaagaactttaattgtatcttttgagaagggaatagtacttgagacttggtatcctgaactcaaagaaatagccattactaggttttgtcaaagaataccagatattttagagttggaagttatgcagtaaaagctttatgtgcaaatgttcattgaagtattaaatgtactaatggaaacctgaaaacaatataaacatctgggaataggggagatgtttggatgaattatgattcatccccaggatggaaatgtgaaggccggtgagtatttggaccattgaagtgggagttatctgttatccacatcaggcagctcagagtaaagtcagcaagtctacagtcatagagccaccaggatacagtgatggatgggaggcctttgctggacagtggctgaaggcagaactgttggagtggttcttccacaaaggcagccagtgctcacctgaatggggactggtactgtaggtattgggtcagctttcatgccgttccctgctggccatctcccaatgctgaatgtctgactcagttcaggctgctgtaacaaagtaccatagactgaggtggcttaaacacagacatttctttctcacagttctggaggctgagaagtcaaagatcaacgtgtctgcaaatttggtatctggtgaggaagggccctcttcctggtttgcagatggctaccttctcactgtgtcctcacacaatggagaaagggagtatgttttggtctcttcctcttctgataagggcactaacctcatcatgagggtcccatcctcctggtgtcatctaaacctaattacctcccaatggccccgccttcaaataccatcacgttgaaggttgcttccttcctggtcgtttgctctggtgagaccaaatgacctgcaaagtgtcacttgattccattctctccatcccttccatcccaggcaatctttatctagctacaccaacctgtgccccaggggcttcaagagttgttgttgttttaacattaaaaaaccagaaagttcacttgtttcttagtgtttacatccttgctataacaattctagttttcctttaggcaatgctgatcactgggaaggaggtggatcaattctcctatgggaccaacagttttctgggaagaaacttcctgatacctcagcctaggaatctccctatccctggagagtccaggaatctatattaaaacatgaaacaaagcaaaaaataaaaaaaaa

SEQ ID NO: 12219 - DNA, 5668 bp, Homo sapiens
ctgctcctaggggcctagcctgtgtggccctctgacctgcagatattgggagatccacagctaagacgccaggaccccctagaagcctagaaatggatgacccgaggtatggaatgtgtcctctcaagggagcaagtggatgccctggggctgagaggagtcttctggtgcagtcttattttgaaaaggggccattgacgtttagggatgtggccatagaattctctctggaggagtggcaatgcctggacagtgctcagcagggtttgtataggaaagtgatgttagagaactacagaaacctggtcttcttggcaggtattgctctcactaagccagacctgatcacctgtctggagcaaggaaaagagccctggaatataaagagacatgagatggtagccaaacccccagttatatgttctcattttccccaagacctttgggcagagcaggacattaaagattcttttcaagaagcgattctgaaaaaatatggaaaatatggacatgacaatttacagttacaaaaaggctgtaaaagtgtggatgagtgtaaagtgcacaaagaacatgataacaaattaaaccagtgtttgataactacccagagcaacatatttcaatgtgatccatctgcaaaagtctttcatacattttcaaattcaaacagacataagataagacatactagaaagaaacctttcaaatgtaaaaaatgtgaaaaatcattttgcatgcttttacacctaactcaacataaaagatttcatattacagagaattcctaccaatgtaaagattgtggcaaagccttcaactggttctcaacccttactacacacaggagaattcatactggagagaaaccctacaaatgtgaagaatgtgggaaagcatttaaccggtcctcacaccttactacacataagataattcatactggagagaaaccatacagatgtgaagaatgtgggaaagcttttaaccggtcttcacaccttactacacataaaagaattcatactggagtgaaaccctacaaatgtacagaatgtggcaaagcttttaaccggtcctcacaccttactacacacaggataattcatactggagagaaaccctacaaatgtgaagaatgtggcaaagcctttaaccagtcctcaacccttactacacataagataactcatgctggagagaaaccttacaaatgtgaagaatgtggcaaagctttttaccgattctcataccttattaaacataagacaagtcatactggagagaaattctacaaatgtgaagaatgcggcaaaggctttaactggtcctcagccctcactaaacataagagaattcatactggagagaaaccctacaaatgtgaagaatgtggcaaagcttttaatgagtcctcaaaccttactacccataagatgattcatactggagagaaaccctacaaatgtgacgaatgtggcaaagcctttaaccggtcctcacaactaactgcacataagatgattcatactggagagaaaccctacaaatgtgaggaatgtggcaaagcttttaaccgatcctcaacccttactaaacataagataactcatactggagagaaatcttacaaatgggaagaatgtggtaaagactttaaccagtccctaagccttattaaacaaaataactcatactggagagaaaccctacaaatgtgaaaaatgtggcaaagccttttaccagtcctcaactcttactaaacataaaaaaattcatactggagggaactcctgtgactgtgaagaatatggcaaagcctttaataaattctcaattcctaacagacataattcatactagagagaaattctacaaaccagaaagatgtgacagtgctttgaaaacacctcaaacttttcaaaacataaatcatagtgttgagaaatcctagaaatgtgaagaatgtgataaagttttaaatggttgtcacacttgattgtaggtaaggtaagttatactggagaaaacttctacatgtgtgaacagtgtgacaaaacttttaactaatgctcacaccttcacaggaaagcatttatacttgagaaatattgtacaaatataaagactgtgaaaaagccattaatacatgctcacatcttactcaacatcagagagttcatactcaataaaaacataagtgcaactactgtcaaaatatctttaagaaaatataagcttttaaagtgaagagtattttgaagaagaacattgtagtagaattgtaatatgtttacttgtatcacagatcttactgtacacgttttgtattagaggaaacctctgaagcagttgctcaaactttgttcaatatcagggaatttatattgaaaaaaactgcgaatgtaataaagttggaaaaatactttttcaaaaactacagcttagaaaacaccagagagttcatactaaaacatatttttgcagatacaggaaaaattttttaaaaattttaatcattaagtctgtaaatatcagagaatttacagtagaaatatgtaaggcactgatgcttcaggtattttactaaatcagagtgctgagtatagaaaataatctaaaactaaaattggtaaaatatttgtatataactttaaaagtagaaattttttgcagttattgcattcaaagtatgcttaactttttgaaaaaattagattttttgaaaagtgagtaataatgtaattcaactcttaaattatttcctgccttttcttcactcctatttacatgtgaaagcatgtgatcaattgttgctgcatcagatatgagagattcttttttattaggtgagcattatttataaactttgctatgaaaaagacattaaaatatgagatgtatgatgaaaatctaagtgaagagacttttatggttaacttataatattaagcaatgtgtgcgttaggcattcagagtaatattctgcattatgagaaaacttaatttcatttataagtaaattaaaattagtatattttactaatacttttatataaaatgcagtatattttttaaatttcagattatatgtgatgttaatatattcaacctttttaacatgttaaatactattgtgcattcagtgaagtgttattatgccacagacattaacctattccaccttactcaagggtgtacgtaaaacatggtaacagtatactatttggtaacataatggattaacatctctagtaatctcttttgctagtggctttgactgcaaataagttaaagaatattatttctgtaggttaaatttttgtttttattttattttatttttgagaggtagtcttgctctgtcacccaggctggagtgcagtggcacgatctcggctcactgtaacctccacctcctgggttcacgcaattctcctgcctcagcctcctaagtagctgggattacaggcacccaccaccatgcccagctaatttttgtattttagtagagacagggtttcataatgtaagtcaagctggtctcgaactcctgaccttaaatgatttgcctgcctcggcttcccaaagttctgggattacaggcatgagccaccgtgcccagccaaatgtttattttatttaaatttatttttcttaattatttggggtacataatatgagtatatattcatgcaatatatggcatattttgatacaagaatacagtatataataatcacatcagggtaaatgaggtatccatcacctctagtatttatcctttgtattacaagcaacccagttttatacttttagttattttaaaatgtaaaattaaattgttattgattacagtgttatttttatggtcataataaaagttatgtagaagtataataaaatccctacatttctgaggcctgaataagtatttttaaagttttctaatatttattttttgagcatgtttcctgtctgcctgcaaacacatgcagacatttagttttgatttacatatagttaaatatatgttagtctaaagataaaccttaagtgtaagaaaattatagagtgagtttgtgtgtatgaatttgtacctgttttccgaagaaaaaagcaatactgaacaaaacaaatcattttaacaagatgactactagaaaactaaaagcctcaaaaatgctaaaagaaaatgtattctctgctttgtattgaatttattactgtacattctgtggcttatagttctgaatctccccatgaaaattctgtttatacttgcctggtactcatgatagacccctaattattttgtatcttttttcatataaatattttacagattatgaagtattcattatgtgagctggtctgtgattataagaataatttttacaaaatttagtgcatacaaaatttttaaatgtaattccacaattagtgtattaagttacattttatttagttagaacacttcattttgtttttagttggagaactctatagccctttagttatttttcttttcactttttatagttgacataagtaaatttatttattgagtcaatttgttcaggtaagtactagggaagctttataagtcgtgaggatgtttttatatttaaatgtagcaaacatacatgacagttcttgctgtgtaacagatgctccatagtaagccataagtattcctgctaaagttagcttgtaacttcagttcagagatggaaaacatcagtggtgaagaaataaaattgattcttcatgtggagaggacatagtttccaggctgcaatgctgaatcttgctgaatttaaagagaagttctgcatcttttatttcttaattatcttcagatttctctgtatttattatgtgtatccccagctatgtatgcagcacagcccatctcctttttctgtgttatggcttcagttttctcactgttgtcttaatgccatttcatttcacatggtactttgtaaattttgacgagaaagttggttgttttttttttttttttttttttgagacagagtctcactcttgttgcccaagctggagtgcagtggtgcaatgtgggctcactgcaacctctgccttccaggttcaagcaattatcctgcctcagcctcccaagtagctgggattacaggcacctgccaccacatctggctgaattttttttttttttttaattttttgtagagacgaagtttcaccatgttggccaggctggtttcaaactcctgacctcatatgatccacctgcctcagcctcccaaagtgcttggattacaggcataagccactgcacccagctgaaagttggtattttttaatgcactgaataattgtttttaactggagagtttggttatcaatataactttcggattagttaagataaaagcatacattgtccacaggtgagaagattaaatcagaatagttgttctttgttaaaaaaaaaattagattcttaaagtgtggcaaacataaaatttgcaagaaaatgtagaaattaaatttttaagagttaatggtaagtgaacaattttaaatttattttttattatgtaacatacttttattaaaatatatacttatataataaaagtataacaattaaaaaaaaaaaaaaaaaaaaaaaaaaaaaaaa

SEQ ID NO: 12220 - DNA, 2487 bp, Homo sapiens
cctttcccctcccgccggacctgccaggaggtgggctggcgcggagggagggccctgtcccctgtccctttaaggaggagggccaaacgccggcctagagtgcggcgtagcccccacccgccgtgccctcaccccagagcagctgcagcctcagccggccgcccctccgccagccaagtccgccgctctgacccccggcagcaagtcgccaccatggtgaagatcgtgacagttaagacccaggcgtaccaggaccagaagccgggcacgagcgggctgcggaagcgggtgaaggtgttccagagcagcgccaactacgcggagaacttcatccagagtatcatctccaccgtggagccggcgcagcggcaggaggccacgctggtggtgggcggggacggccggttctacatgaaggaggccatccagctcatcgctcgcatcgctgccgccaacgggatcggtcgcttggttatcggacagaatggaatcctctccacccctgctgtatcctgcatcattagaaaaatcaaagccattggtgggatcattctgacagccagtcacaacccagggggccccaatggagattttggaatcaaattcaatatttctaatggaggtcctgctccagaagcaataactgataaaattttccaaatcagcaagacaattgaagaatatgcagtttgccctgacctgaaagtagaccttggtgttctgggaaagcagcagtttgacttggaaaataagttcaaacccttcacagtggaaattgtggattcggtagaagcttatgctacaatgctgagaagcatctttgatttcagtgcactgaaagaactactttctgggccaaaccgactgaagatccgtattgatgctatgcatggagttgtgggaccgtatgtaaagaagatcctctgtgaagaactcggtgcccctgcgaactcggcagttaactgcgttcctctggaggactttggaggccaccaccctgaccccaacctcacctatgcagctgacctggtggagaccatgaagtcaggagagcatgattttggggctgcctttgatggagatggggatcgaaacatgattctgggcaagcatgggttctttgtgaacccttcagactctgtggctgtcattgctgccaacatcttcagcattccgtatttccagcagactggggtccgcggctttgcacggagcatgcccacgagtggtgctctggaccgggtggctagtgctacaaagattgctttgtatgagaccccaactggctggaagttttttgggaatttgatggacgcgagcaaactgtccctttgtggggaggagagcttcgggaccggttctgaccacatccgtgagaaagatggactgtgggctgtccttgcctggctctccatcctagccacccgcaagcagagtgtggaggacattctcaaagatcattggcaaaagtatggccggaatttcttcaccaggtatgattacgaggaggtggaagctgagggcgcaaacaaaatgatgaaggacttggaggccctgatgtttgatcgctcctttgtggggaagcagttctcagcaaatgacaaagtttacactgtggagaaggccgataactttgaatacagcgacccagtggatggaagcatttcaagaaatcagggcttgcgcctcattttcacagatggttctcgaatcgtcttccgactgagcggcactgggagtgccggggccaccattcggctgtacatcgatagctatgagaaggacgttgccaagattaaccaggacccccaggtcatgttggccccccttatttccattgctctgaaagtgtcccagctgcaggagaggacgggacgcactgcacccactgtcatcacctaagaagacaggcctgatgtggtacgtccctccacccccggacccatccaagtcatctgattgaagagcatgacagaaacaaaatgtattcaccaagcattttaggatttgactttttcactaaccagttgacgagcagtgcatttacaaggcactgccaaacaagatgcccttgggagctgtgagggaaagaggacctgcgggcttagatcaatctcaattccttttcatgccctcctgcattgctgctgcgtgggtatttgtctccttagccatcaggtacagtttacactacaatgtaagctataggtggagcatcagcagtgagtgaggccattcttcatccttaggatgtggcaatgaaatgatggtgcaagttcctttctcttttgtgaatctttccccccatttcctgtttacatgtaacccaacaaaatgcaatttctagtgccttctgtccaatcagttctttcctctgagtgagacgtacttggctacagatttctgccttgttttgcgacattgtcccattcacacagatattttgggataataaaggaaaataagctacaaaaaaaaaaaaaaaaa

SEQ ID NO: 12221 - DNA, 9161 bp, Homo sapiens
ctgaaaactggagagtgtgagagcgggaggagcccccgaccacacaaacccagcctggggaggaacctactagtggctgcaccctcttttttaatagcaccaattgtgtttcccaagatgatgtagagaatttcagtgctgtgtaccacgtcggaggcagaaattcctctgctgtcccaggagcaggcagggcagtttttatctggaaaagctaaaggtctcctcttttgtttgtgtttttgtgcctgcacaggacaaaagatccttcatcaccgaagtgacgttttagaaacagtggtcctgatcaacccttctgatgaagcagtcagcaccgaggtgcgcttaatgatcactgatgctgcccgacacaagctgctcgtgctgaccgggcagtgctttgaaaataccggagagctcattctccagtccggctctttctccttccagaacttcatagagattttcaccgatcaagagatcggggagttactaagcaccacccatcctgccaacaaagccagcttaaccctgttctgtcctgaagaaggggactggaagaactccaatcttgacagacacaatctccaagacttcatcaatattaaactcaattcagcttctatcttgccagaaatggaaggactttctgagtttaccgagtatctctcagaatcagtggaagtcccatctccctttgacatcttggaacctcccacatcgggtggatttctgaagctctccaagccctgctgttatatttttccaggagggaggggcgattctgccttgtttgcagtgaatggtttcaatatgctcatcaatggcggatcagagagaaaatcctgcttctggaagctcatccgacacttagaccgagtggactccatcctgctcacccacattggggatgacaatttgcctggaataaacagcatgttacagcggaaaattgcagagctcgaggaagaacagtcccagggctccaccacaaatagtgactggatgaaaaacctcatctcccctgacttaggagttgtatttctcaatgtacctgaaaatctcaaaaatccagagccaaacatcaagatgaagagaagcatagaagaagcctgcttcactctccagtacctaaacaaattgtccatgaaaccagaacctctgtttagaagtgtaggcaatactattgatcctgtcattcttttccaaaaaatgggagtaggtaaacttgagatgtatgtgcttaatccagtcaagagcagcaaggaaatgcagtattttatgcagcagtggactggtaccaacaaagacaaggctgaattcattctgcctaatggtcaagaagtagatctcccgatttcctacttaacttcagtctcatctttgattgtgtggcatccagcaaaccctgcggagaaaatcatccgagtcctgtttcctgggaacagcacccagtacaacatcctggaagggttggaaaagctcaaacatctagactttctgaagcagccactggccacccaaaaggatctcactggccaggtgcccactcctgtggtgaaacaaacaaaactgaaacagagggctgatagccgagaaagtctgaagccagccgcaaaaccacttcctagcaaatccgtgcgcaaggagtcaaaagaagaaacccctgaggtcacaaaagtgaatcacgtggaaaagccacccaaagttgaaagcaaagaaaaggtaatggtgaaaaaagacaagccagtaaaaacagagaccaaaccttcagtgactgaaaaggaggttcccagcaaagaagagccatctccagtgaaagccgaggtggctgagaagcaagccacagatgtcaaacccaaagctgccaaggagaagacggtgaaaaaggaaacaaaggtaaagcctgaagacaagaaagaggagaaagaaaagccaaagaaagaagtggctaaaaaggaggacaaaacacctatcaagaaggaggaaaaaccaaaaaaggaagaggtgaaaaaagaagtcaaaaaagagatcaagaaagaagagaaaaaagaacccaagaaagaggttaagaaagaaacaccgccaaaggaagtcaagaaggaagttaagaaggaagagaagaaggaagtgaaaaaggaagaaaaggaacccaaaaaagaaattaagaagctccctaaagacgcaaagaaatcatctactcctctgtctgaagcaaaaaaaccagctgctttaaaaccaaaagtacccaagaaggaagagtctgtcaagaaagattctgttgctgccggaaagccaaaggagaaggggaaaataaaagtcattaagaaggaaggcaaggccgcagaggctgtcgctgcagctgtcggcactggagccaccacagcagctgtcatggcggcagctggaatagcagccattggccctgccaaagaactcgaagctgagaggtcccttatgtcatctcctgaggatctaaccaaggactttgaagagttaaaggctgaagaggtcgatgtaacaaaggacatcaagcctcagctggagctaatcgaagacgaagagaaactgaaggaaactgagccagtcgaagcctacgtcatccagaaggagagagaagtcaccaaaggtcctgccgagtcccctgatgagggaatcactaccactgaaggggagggcgaatgtgaacagacacctgaggagctggagcccgtcgagaagcagggagtagacgacattgaaaaatttgaagatgaaggagccggttttgaagaatcttcagagactggagactatgaagagaaggcagaaactgaggaggctgaggagccagaagaggatggggaggaacacgtatgtgtgagcgcctccaagcacagccccactgaggatgaggaaagtgccaaggcggaggctgatgcatacatcagggagaagagggagtctgtggccagtggggatgaccgagccgaagaagacatggatgaggccattgagaaaggagaggctgaacaatctgaagaggaggctgatgaggaggacaaagctgaagatgccagagaggaggaatatgagccggaaaaaatggaagctgaagactatgtgatggctgtggtcgacaaggctgcagaggctggtggtgccgaggagcagtatggattcctcaccacaccaaccaagcaactaggagcccagtctcctggccgagaacctgcatcttcaattcatgatgagactttacctggaggctcagagagcgaggccaccgcttctgatgaggagaatcgagaagaccagcctgaggaattcactgccacctctggctacactcagtctactattgagatatccagtgagcccacccccatggatgagatgtctacccctcgagacgtgatgagtgatgagaccaacaatgaagagacggagtccccttctcaggaattcgtaaatatcaccaaatatgaatcttcattgtattctcaggaatactctaaacctgctgatgttacaccgctcaacggattttctgaaggatcaaaaacagatgccactgatggcaaggattacaatgcttcagcctctaccatatcaccaccctcttccatggaggaagacaaattcagcagatctgctttacgtgatgcttactgctctgaagtgaaagccagcaccactttggacatcaaagatagcatctcagctgtttcaagtgaaaaggtcagcccatcgaagagcccgtccctgagtccatctccaccatcacccttagaaaagacccccctgggtgaacgtagtgtgaacttctctctgacgcccaatgagattaaagtctctgcagaggcagaagtagccccggtgtctcctgaggtgacccaagaagtagttgaagaacattgtgctagtcctgaggacaagactctggaagtggtgtcaccatctcagtccgtgactggcagtgctggtcacacaccttactatcaatctcctactgacgagaaatccagtcatctccctacagaagtcattgaaaaaccaccagcagttccagtgagttttgaattcagtgatgccaaagatgagaatgaaagggcttcagtaagccccatggatgagcccgtgcctgactcagagtctcctattgaaaaagttttgtctcctttacgcagcccgcccctcattggatccgagtctgcttatgaaagttttctaagtgctgatgacaaggcttctggcagaggtgccgaaagtccttttgaagaaaagagtggaaaacaaggctctccagaccaagtaagtccagtttctgaaatgacttctactagtctttaccaagacaaacaggaagggaaaagcacagactttgcaccaataaaagaagactttggccaagaaaagaaaactgatgatgttgaagccatgagttctcaaccagcactggctctggatgaaaggaaattaggagatgtttctcccacacaaatagatgtcagtcagtttggatcttttaaagaagacactaagatgtccatttctgaaggtactgtctcagacaagtcagctactcctgttgatgagggcgtagcagaagacacgtactctcatatggagggtgtggcctcagtgtccacagcctcagtggctacgagctcatttccagagccaacaacagatgatgtgtctccatctctgcatgctgaggttggctccccacattccacagaagtagatgactccctttcagtgtctgttgtgcaaacacctaccacattccaggaaacagaaatgtctccatctaaagaagaatgcccaagaccgatgtcaatttctccaccagatttctcccctaaaactgcaaagtccaggacacccgttcaagatcacagatctgaacagtcctcaatgtctattgaatttggccaagaatctcctgagcaatcccttgctatggacttcagtcgacagtctccagatcaccctacagtgggtgcaggcgtgcttcacatcactgaaaatgggccaactgaagtggactacagtccttctgacatgcaggactccagtttatcacataagataccacctatggaggagccgtcctacacccaagataatgatctttctgagctcatctcagtatctcaggtagaggcctccccgtccacctcttctgctcataccccttctcagatcgcttctcctctccaagaagatactctatccgatgttgctcctcccagagatatgtccttatatgcctcactcacctctgaaaaagtgcaaagtctggaaggagagaagctctctccaaaatctgatatctctccactcaccccacgagagtcctctcctttatattcacctactttttcagattctacctctgcagtcaaagagaaaacagcaacttgccacagttcctcttctccaccaatagatgcagcatccgcagagccctatggcttccgtgcctcagtgttattcgatacaatgcaacaccatctagccttgaatagagatttgtccacacctggcctggagaaggacagtggagggaagacacctggtgactttagctatgcctatcaaaagcctgaggaaacaaccaggtccccagatgaagaagattatgactatgagtcttatgagaagaccacccggacctcagatgtgggtggctattactatgagaagatagagagaaccacaaaatctccaagtgacagtggctactcctatgagaccattgggaaaactaccaagacccctgaagatggtgactattcctatgaaattattgagaagaccacacggacccctgaagagggtgggtactcatatgacataagtgaaaagaccaccagcccccccgaagtgagtggttacagctatgaaaagactgagaggtctagaaggcttctggatgacatcagcaatggctatgatgactctgaggatggtggccacacacttggggaccccagctactcttatgaaaccactgagaaaattaccagtttccctgagtctgaaggttattcctatgagacatctacaaagacaacacgaacccctgatacttccacatactgttacgagactgcagagaaaatcactagaacccctcaggcatccacatattcctacgagacttcagacctatgctacactgcagaaaagaagtccccctcagaagcccgtcaggatgtcgatttatgcctcgtgtcctcttgtgaatacaagcaccccaagacagagctttcaccctctttcattaatcccaatcctcttgagtggtttgccagtgaagaacccactgaagaatctgaaaagcccctcactcaatcagggggagccccaccgcctccaggaggaaagcaacagggccgacagtgtgatgaaacccctcccacctcagtcagcgagtcagccccatcccagaccgactctgatgttcccccggagactgaagagtgcccctccatcacggccgatgccaatatcgactctgaagacgagtcggaaaccatccccacagacaaaactgtcacgtacaaacacatggacccacctccagctcccgtgcaagaccgcagcccttcgccacgccaccctgatgtgtccatggtggacccagaggccttggccattgagcagaacctgggcaaagctctaaagaaagatctgaaagagaagaccaaaaccaaaaagccaggtacaaagaccaagtcatcttcacctgtcaaaaagagtgatgggaagtctaagcccttggcagcttcaccaaaaccagcgggcttgaaagaatcctcggataaagtgtccagggtggcttctcctaagaagaaagaatctgtggaaaaggcagcaaaacccaccaccactcctgaggtcaaagctgcacgtggggaagagaaagacaaggagaccaagaatgctgccaatgcctctgcatccaagtcggccaagaccgccactgcaggaccaggaactaccaagacgaccaagtcatctgctgtgcccccaggcctccctgtgtatttggacctgtgctacattcctaaccacagcaatagtaagaatgttgatgtggaatttttcaagagagtgcggtcttcctactacgtggtgagtgggaatgaccctgctgctgaggagcccagccgggctgtcctggacgctttgttggaaggaaaggctcagtggggcagcaacatgcaggtgacactgatcccaactcatgactcagaagtgatgagggaatggtaccaggagacccatgagaaacagcaagatctcaacatcatggttttagcaagcagcagcacagtggttatgcaagatgaatccttccctgcatgcaagattgaactgtaaaaaccaaggccagccacaccacaggatctgaactttgtttccagaaattcttcaatttgaaatcaccttttctaaaaagtcaattcatctagttaagtcgctgaacaattacctgccaaatgctatactgtgtcatggtgatgcaagtcactaaatttctcagtttttgctgattgctaagggaaataacagtatttccacaatagggttcaaattcctgcaaaattacctaccccagttcatctctgctgaacatttggaaaccatgcactagccaacccaactgacttctgctaggtagaggcatttgtcttagagagagagagagcgcgggagagagtgagagagagtgagagcacaaagataacgcaggagagagagagagaaagaatgagaaagaaaaggaatgcaagagaaggagatgtaatgacagagagttctggtgagatacccagagagaaaaagagagagcagggtggggtaaggaggagaaaataaaccaacaattaggtctgcattttctcaggcagtaggcattctttagtctacataggcaaagttttccatttttgtcagtctgagtcatcaaaaagagtcttaattttctaaaacaagttggctagaagaaagtaaaaagaacaacacttgttatgagggcatgtgatattttcacatcttaattaagctccttcagtttgaaggctgcacactgacataatgtagtgagtgtagactggccatgcaagtggtttgggccccattcagaactctcagactctaaacacacaagtagattgatctaaggcatgctcccagcatttgtccacccacttagtccactctgagtcgattaacctgcatgcagcaacacccaagtccaccccaattaactgaagcaaataccaaagcagttgggagtacatatggtagacaatttgccttaggaagtgacttgaatgtacaaagatacttgatgcacttattttttaatgtgagacagcaagtttataaaacatccatataggattatagatacttaaaggaacacgtgggtgagcgtgtgtgggggtactagaagctgatctgattggtccaacagtttgatgctgagtcatgcgtgttgaatcccacttcagtgcacctgtggcctctcagtcaaacaagttgtgcctttcacagcttctttactactgcaagttcaagactgaaatggcttctatgatcagaactgggaaaacagtgaatcttatggtggaagaggttctcagcaagtgtacagtatttaccttcctttgtcttacattggctttttaaattttccattaatttcaacataattatgggaacaagtgtacagaagaattttttttttaagatatgtgagaacttttcatagatgaactttttaacaaatgttttcatttacaggaaattgcaaagaaaattctcaagtgatagtctttttttttaagtgtttcgtaagacaaaaattgaataatgttttttgaagttctggcaagattgaagtctgatattgcagtaatgatatttattaaaaacccataactaccaggaataatgatacctcccaccccttgattcccataacataaaagtgctacttgagagtgggggagaatggcatggtaggctacttttcagggccttgacaagtacatcacccagtggtatcctacatacttctttcaagatcttcaaccatgaggtaaaagagccaagttcaaagaaccctagcacaaatttgctttgggattttcttttctgga

SEQ ID NO: 12222 - DNA, 9416 bp, Homo sapiens
aagcgcgccgcctccccgccctctctcactccccgctcctctccgccgcgcactctcgcggcgctgggagagggcggagggggaggcggcgcgcggcgccagaggaggggggacgcagggggcggagcggagacagtaccttcggagataatcctttctcctgccgcagtggagaggagcggccggagcgagacacttcgccgaggcacagcagccggcaggatggcgaccgtggtggtggaagccaccgagccggagccgtccggcagcatcgccaacccggcggcgtccacctcgcctagcctgtcgcaccgcttccttgacagcaagttctacttgctggtggtcgtcggcgagatcgtgaccgaggagcacctgcggcgtgccatcggcaacatcgagctcggaatccgatcatgggacacaaacctgattgaatgcaacttggaccaagaactcaaactttttgtatctcgacactctgcaagattctctcctgaagtcccaggacaaaagatccttcatcaccgaagtgacgttttagaaacagtggtcctgatcaacccttctgatgaagcagtcagcaccgaggtgcgcttaatgatcactgatgctgcccgacacaagctgctcgtgctgaccgggcagtgctttgaaaataccggagagctcattctccagtccggctctttctccttccagaacttcatagagattttcaccgatcaagagatcggggagttactaagcaccacccatcctgccaacaaagccagcttaaccctgttctgtcctgaagaaggggactggaagaactccaatcttgacagacacaatctccaagacttcatcaatattaaactcaattcagcttctatcttgccagaaatggaaggactttctgagtttaccgagtatctctcagaatcagtggaagtcccatctccctttgacatcttggaacctcccacatcgggtggatttctgaagctctccaagccctgctgttatatttttccaggagggaggggcgattctgccttgtttgcagtgaatggtttcaatatgctcatcaatggcggatcagagagaaaatcctgcttctggaagctcatccgacacttagaccgagtggactccatcctgctcacccacattggggatgacaatttgcctggaataaacagcatgttacagcggaaaattgcagagctcgaggaagaacagtcccagggctccaccacaaatagtgactggatgaaaaacctcatctcccctgacttaggagttgtatttctcaatgtacctgaaaatctcaaaaatccagagccaaacatcaagatgaagagaagcatagaagaagcctgcttcactctccagtacctaaacaaattgtccatgaaaccagaacctctgtttagaagtgtaggcaatactattgatcctgtcattcttttccaaaaaatgggagtaggtaaacttgagatgtatgtgcttaatccagtcaagagcagcaaggaaatgcagtattttatgcagcagtggactggtaccaacaaagacaaggctgaattcattctgcctaatggtcaagaagtagatctcccgatttcctacttaacttcagtctcatctttgattgtgtggcatccagcaaaccctgcggagaaaatcatccgagtcctgtttcctgggaacagcacccagtacaacatcctggaagggttggaaaagctcaaacatctagactttctgaagcagccactggccacccaaaaggatctcactggccaggtgcccactcctgtggtgaaacaaacaaaactgaaacagagggctgatagccgagaaagtctgaagccagccgcaaaaccacttcctagcaaatccgtgcgcaaggagtcaaaagaagaaacccctgaggtcacaaaagtgaatcacgtggaaaagccacccaaagttgaaagcaaagaaaaggtaatggtgaaaaaagacaagccagtaaaaacagagaccaaaccttcagtgactgaaaaggaggttcccagcaaagaagagccatctccagtgaaagccgaggtggctgagaagcaagccacagatgtcaaacccaaagctgccaaggagaagacggtgaaaaaggaaacaaaggtaaagcctgaagacaagaaagaggagaaagaaaagccaaagaaagaagtggctaaaaaggaggacaaaacacctatcaagaaggaggaaaaaccaaaaaaggaagaggtgaaaaaagaagtcaaaaaagagatcaagaaagaagagaaaaaagaacccaagaaagaggttaagaaagaaacaccgccaaaggaagtcaagaaggaagttaagaaggaagagaagaaggaagtgaaaaaggaagaaaaggaacccaaaaaagaaattaagaagctccctaaagacgcaaagaaatcatctactcctctgtctgaagcaaaaaaaccagctgctttaaaaccaaaagtacccaagaaggaagagtctgtcaagaaagattctgttgctgccggaaagccaaaggagaaggggaaaataaaagtcattaagaaggaaggcaaggccgcagaggctgtcgctgcagctgtcggcactggagccaccacagcagctgtcatggcggcagctggaatagcagccattggccctgccaaagaactcgaagctgagaggtcccttatgtcatctcctgaggatctaaccaaggactttgaagagttaaaggctgaagaggtcgatgtaacaaaggacatcaagcctcagctggagctaatcgaagacgaagagaaactgaaggaaactgagccagtcgaagcctacgtcatccagaaggagagagaagtcaccaaaggtcctgccgagtcccctgatgagggaatcactaccactgaaggggagggcgaatgtgaacagacacctgaggagctggagcccgtcgagaagcagggagtagacgacattgaaaaatttgaagatgaaggagccggttttgaagaatcttcagagactggagactatgaagagaaggcagaaactgaggaggctgaggagccagaagaggatggggaggaacacgtatgtgtgagcgcctccaagcacagccccactgaggatgaggaaagtgccaaggcggaggctgatgcatacatcagggagaagagggagtctgtggccagtggggatgaccgagccgaagaagacatggatgaggccattgagaaaggagaggctgaacaatctgaagaggaggctgatgaggaggacaaagctgaagatgccagagaggaggaatatgagccggaaaaaatggaagctgaagactatgtgatggctgtggtcgacaaggctgcagaggctggtggtgccgaggagcagtatggattcctcaccacaccaaccaagcaactaggagcccagtctcctggccgagaacctgcatcttcaattcatgatgagactttacctggaggctcagagagcgaggccaccgcttctgatgaggagaatcgagaagaccagcctgaggaattcactgccacctctggctacactcagtctactattgagatatccagtgagcccacccccatggatgagatgtctacccctcgagacgtgatgagtgatgagaccaacaatgaagagacggagtccccttctcaggaattcgtaaatatcaccaaatatgaatcttcattgtattctcaggaatactctaaacctgctgatgttacaccgctcaacggattttctgaaggatcaaaaacagatgccactgatggcaaggattacaatgcttcagcctctaccatatcaccaccctcttccatggaggaagacaaattcagcagatctgctttacgtgatgcttactgctctgaagtgaaagccagcaccactttggacatcaaagatagcatctcagctgtttcaagtgaaaaggtcagcccatcgaagagcccgtccctgagtccatctccaccatcacccttagaaaagacccccctgggtgaacgtagtgtgaacttctctctgacgcccaatgagattaaagtctctgcagaggcagaagtagccccggtgtctcctgaggtgacccaagaagtagttgaagaacattgtgctagtcctgaggacaagactctggaagtggtgtcaccatctcagtccgtgactggcagtgctggtcacacaccttactatcaatctcctactgacgagaaatccagtcatctccctacagaagtcattgaaaaaccaccagcagttccagtgagttttgaattcagtgatgccaaagatgagaatgaaagggcttcagtaagccccatggatgagcccgtgcctgactcagagtctcctattgaaaaagttttgtctcctttacgcagcccgcccctcattggatccgagtctgcttatgaaagttttctaagtgctgatgacaaggcttctggcagaggtgccgaaagtccttttgaagaaaagagtggaaaacaaggctctccagaccaagtaagtccagtttctgaaatgacttctactagtctttaccaagacaaacaggaagggaaaagcacagactttgcaccaataaaagaagactttggccaagaaaagaaaactgatgatgttgaagccatgagttctcaaccagcactggctctggatgaaaggaaattaggagatgtttctcccacacaaatagatgtcagtcagtttggatcttttaaagaagacactaagatgtccatttctgaaggtactgtctcagacaagtcagctactcctgttgatgagggcgtagcagaagacacgtactctcatatggagggtgtggcctcagtgtccacagcctcagtggctacgagctcatttccagagccaacaacagatgatgtgtctccatctctgcatgctgaggttggctccccacattccacagaagtagatgactccctttcagtgtctgttgtgcaaacacctaccacattccaggaaacagaaatgtctccatctaaagaagaatgcccaagaccgatgtcaatttctccaccagatttctcccctaaaactgcaaagtccaggacacccgttcaagatcacagatctgaacagtcctcaatgtctattgaatttggccaagaatctcctgagcaatcccttgctatggacttcagtcgacagtctccagatcaccctacagtgggtgcaggcgtgcttcacatcactgaaaatgggccaactgaagtggactacagtccttctgacatgcaggactccagtttatcacataagataccacctatggaggagccgtcctacacccaagataatgatctttctgagctcatctcagtatctcaggtagaggcctccccgtccacctcttctgctcataccccttctcagatcgcttctcctctccaagaagatactctatccgatgttgctcctcccagagatatgtccttatatgcctcactcacctctgaaaaagtgcaaagtctggaaggagagaagctctctccaaaatctgatatctctccactcaccccacgagagtcctctcctttatattcacctactttttcagattctacctctgcagtcaaagagaaaacagcaacttgccacagttcctcttctccaccaatagatgcagcatccgcagagccctatggcttccgtgcctcagtgttattcgatacaatgcaacaccatctagccttgaatagagatttgtccacacctggcctggagaaggacagtggagggaagacacctggtgactttagctatgcctatcaaaagcctgaggaaacaaccaggtccccagatgaagaagattatgactatgagtcttatgagaagaccacccggacctcagatgtgggtggctattactatgagaagatagagagaaccacaaaatctccaagtgacagtggctactcctatgagaccattgggaaaactaccaagacccctgaagatggtgactattcctatgaaattattgagaagaccacacggacccctgaagagggtgggtactcatatgacataagtgaaaagaccaccagcccccccgaagtgagtggttacagctatgaaaagactgagaggtctagaaggcttctggatgacatcagcaatggctatgatgactctgaggatggtggccacacacttggggaccccagctactcttatgaaaccactgagaaaattaccagtttccctgagtctgaaggttattcctatgagacatctacaaagacaacacgaacccctgatacttccacatactgttacgagactgcagagaaaatcactagaacccctcaggcatccacatattcctacgagacttcagacctatgctacactgcagaaaagaagtccccctcagaagcccgtcaggatgtcgatttatgcctcgtgtcctcttgtgaatacaagcaccccaagacagagctttcaccctctttcattaatcccaatcctcttgagtggtttgccagtgaagaacccactgaagaatctgaaaagcccctcactcaatcagggggagccccaccgcctccaggaggaaagcaacagggccgacagtgtgatgaaacccctcccacctcagtcagcgagtcagccccatcccagaccgactctgatgttcccccggagactgaagagtgcccctccatcacggccgatgccaatatcgactctgaagacgagtcggaaaccatccccacagacaaaactgtcacgtacaaacacatggacccacctccagctcccgtgcaagaccgcagcccttcgccacgccaccctgatgtgtccatggtggacccagaggccttggccattgagcagaacctgggcaaagctctaaagaaagatctgaaagagaagaccaaaaccaaaaagccaggtacaaagaccaagtcatcttcacctgtcaaaaagagtgatgggaagtctaagcccttggcagcttcaccaaaaccagcgggcttgaaagaatcctcggataaagtgtccagggtggcttctcctaagaagaaagaatctgtggaaaaggcagcaaaacccaccaccactcctgaggtcaaagctgcacgtggggaagagaaagacaaggagaccaagaatgctgccaatgcctctgcatccaagtcggccaagaccgccactgcaggaccaggaactaccaagacgaccaagtcatctgctgtgcccccaggcctccctgtgtatttggacctgtgctacattcctaaccacagcaatagtaagaatgttgatgtggaatttttcaagagagtgcggtcttcctactacgtggtgagtgggaatgaccctgctgctgaggagcccagccgggctgtcctggacgctttgttggaaggaaaggctcagtggggcagcaacatgcaggtgacactgatcccaactcatgactcagaagtgatgagggaatggtaccaggagacccatgagaaacagcaagatctcaacatcatggttttagcaagcagcagcacagtggttatgcaagatgaatccttccctgcatgcaagattgaactgtaaaaaccaaggccagccacaccacaggatctgaactttgtttccagaaattcttcaatttgaaatcaccttttctaaaaagtcaattcatctagttaagtcgctgaacaattacctgccaaatgctatactgtgtcatggtgatgcaagtcactaaatttctcagtttttgctgattgctaagggaaataacagtatttccacaatagggttcaaattcctgcaaaattacctaccccagttcatctctgctgaacatttggaaaccatgcactagccaacccaactgacttctgctaggtagaggcatttgtcttagagagagagagagcgcgggagagagtgagagagagtgagagcacaaagataacgcaggagagagagagagaaagaatgagaaagaaaaggaatgcaagagaaggagatgtaatgacagagagttctggtgagatacccagagagaaaaagagagagcagggtggggtaaggaggagaaaataaaccaacaattaggtctgcattttctcaggcagtaggcattctttagtctacataggcaaagttttccatttttgtcagtctgagtcatcaaaaagagtcttaattttctaaaacaagttggctagaagaaagtaaaaagaacaacacttgttatgagggcatgtgatattttcacatcttaattaagctccttcagtttgaaggctgcacactgacataatgtagtgagtgtagactggccatgcaagtggtttgggccccattcagaactctcagactctaaacacacaagtagattgatctaaggcatgctcccagcatttgtccacccacttagtccactctgagtcgattaacctgcatgcagcaacacccaagtccaccccaattaactgaagcaaataccaaagcagttgggagtacatatggtagacaatttgccttaggaagtgacttgaatgtacaaagatacttgatgcacttattttttaatgtgagacagcaagtttataaaacatccatataggattatagatacttaaaggaacacgtgggtgagcgtgtgtgggggtactagaagctgatctgattggtccaacagtttgatgctgagtcatgcgtgttgaatcccacttcagtgcacctgtggcctctcagtcaaacaagttgtgcctttcacagcttctttactactgcaagttcaagactgaaatggcttctatgatcagaactgggaaaacagtgaatcttatggtggaagaggttctcagcaagtgtacagtatttaccttcctttgtcttacattggctttttaaattttccattaatttcaacataattatgggaacaagtgtacagaagaattttttttttaagatatgtgagaacttttcatagatgaactttttaacaaatgttttcatttacaggaaattgcaaagaaaattctcaagtgatagtctttttttttaagtgtttcgtaagacaaaaattgaataatgttttttgaagttctggcaagattgaagtctgatattgcagtaatgatatttattaaaaacccataactaccaggaataatgatacctcccaccccttgattcccataacataaaagtgctacttgagagtgggggagaatggcatggtaggctacttttcagggccttgacaagtacatcacccagtggtatcctacatacttctttcaagatcttcaaccatgaggtaaaagagccaagttcaaagaaccctagcacaaatttgctttgggattttcttttctgga

SEQ ID NO: 12223 - DNA, 3859 bp, Homo sapiens
aaagatgactcctgtacggtccctgccgtccaggaccctggagtcaagtcagaaatggatgtgtccacagctgattgtgtgacaaggtctggatttgtgggtgttttcattggagtccagggaccctggtaccttatgtgcttttttgccttgtttctttccagattgctcatttagaaagtggatgtgtgggataacatgtccaatgtgtccgaggagagaagaaaaaggcagcagaacattaaggaaggactgcagtttatacagtcaccgctgtcatatccaggaacacaggagcaatatgcggtatatttgcgtgctctcgtgagaaatctttttaatgaaggaaatgacgtttatcgggaacatgattggaacaactcgataagccagtacacggaagccttgaatatagctgattatgcaaaatctgaagaaattttaatccccaaagaaataattgaaaaactatatataaatcgtattgcctgctattctaatatgggtttccatgataaagttttggaggactgcaatatagtcctcagtttaaatgccagtaactgcaaagctctgtatcggaaatctaaggctttaagtgatttaggaagatacaaaaaggcttacgatgctgtagcaaagtgctccttagcagtgcctcaggatgagcatgtaataaaactaactcaagaactagctcagaaattgggatttaaaataagaaaagcgtatgtcagagctgagctctcattaaaatcagttcctggggatggggctaccaaggctttgaaccattctgtggaagatattgagccagatttattaactccaaggcaagaagcagttcctgttgtctctttaccggcacccagtttttctcatgaagttggaagtgagctggcctcagttcctgttatgcccttaacttctattttgccactacaagtggaagagagcgctctgccatctgcagtgctggcaaatggaggaaagatgcccttcactatgccagaagcttttctagatgatggagatatggtccttggagatgaactagatgacctgcttgattctgcacctgaaactaatgaaactgttatgccgtcagctttagtcagaggaccccttcagacagccagtgtctctcctagcatgcccttttcggcatcgctgttaggaaccttacccattggtgcgaggtatgctcctccaccctccttctcagaattttatccacctttgacttcatccttagaagatttttgttcttctttaaattcattttcaatgagtgaatccaaacgagatctgtccacctcaacttctagagagggaacaccgcttaacaacagtaattcttcccttttacttatgaatggaccaggtagtttgtttgcttcagagaatttcctgggaatttcaagtcagcctagaaatgactttggaaacttttttggaagtgcagttaccaaaccatcttcatcagtgactccaagacatcccctcgaaggaacccatgaattgagacaagcttgccagatctgttttgtaaaatcaggccctaagttaatggatttcacttaccatgctaacatagatcataagtgtaagaaagatattttaatcggtaggataaagaatgttgaagataaatcatggaaaaaaatacgtccaagaccaacaaaaacaaattatgaaggaccatattatatatgtaaagatgttgctgctgaggaggaatgtagatattcaggccactgcacgtttgcttattgccaagaggagatagatgtgtggacactggagcggaaaggagcattcagccgggaggctttctttggcggcaatggaaagattaaccttactgtgttcaaacttctccaggagcatcttggggaatttatattcctttgtgagaaatgttttgatcataagcctagaatgataagtaaaagaaataaagataattctactgcttgttctcacccggttacaaagcatgagtttgaagacaataagtgccttgtccacattttgcgagagacaacagtaaaatactccaaaatacgttcttttcatggtcagtgtcagcttgatttatgtcgacatgaagttcggtatggctgtttaagggaagatgagtgcttttatgcccatagtcttgtggaactgaaagtctggataatgcaaaatgaaacaggtatctcacatgatgctattgctcaagagtctaaacgatattggcagaatttggaagcaaatgtacctggagcgcaggtacttggtaatcaaataatgcctggatttcttaatatgaagataaagtttgtgtgcgcccagtgtctgagaaacggtcaagtcattgaaccagacaaaaacagaaaatattgtagtgcaaaagcaaggcattcgtggaccaaagaccggcgtgcgatgagagtgatgtctattgaacgtaagaagtggatgaacatccgtcctctccccacaaagaaacaaatgcctttacagtttgatctgtgcaaccatattgcttctgggaaaaaatgtcaatatgttggaaactgttcctttgctcatagtcctgaggaaagagaagtttggacttacatgaaggagaatgggatacaagatatggagcaattttacgaactatggctcaagagtcaaaaaaatgaaaaaagtgaagacatagccagtcagtcaaacaaggaaaatggaaaacaaattcacatgccaacagattatgctgaagttacagtggactttcactgctggatgtgtgggaaaaactgcaacagtgagaagcagtggcagggccacatctcctccgagaagcacaaagagaaggttttccacaccgaggacgaccagtactgctggcagcaccgcttcccaacaggctatttcagtatttgtgataggtatatgaatggcacctgcccagaaggaaacagctgtaaatttgcacatggaaatgccgaacttcatgaatgggaagaaagaagagatgccctaaagatgaagctcaacaaagcacgaaaagatcacttaattggcccaaatgataatgactttggaaaatatagttttttgtttaaagatttaaactaatatgctggcttttatgtatgatacctaatcagagcattgaccagaaaaattgaaagtgttctgaggcacatagcagaggagctgcagatttcctgcttgtattggcgtatatcgttcctcctgagcagcaacccacagtaggtaggaaaatgggctgtttcacaggcctggccacgctctcacggaaccactggcatcagatggtgaagtgactgctacccggttgccatctgttgaacagacttttggatgaagtgtgttggggaagaggataaggttatatctaggacaactctttgagttggtccttcatataagaatcgtgacggtaagagaataaacacttgtactgggatcagaatacatgatggatgaaattctttacatgttttagcagaatgaatttgtttaatataataaagtttgctacttatctgtatgtaggttgctaaaaaggattttcttaactcagattttaagccaaataaccatttaacactagtatttgttaaatggggtatttttctgtatttgtatgtttcactataataagggaattaaggataatgtgcattgagaatattttgaaaaataattgactcaaattttatttcttggtcttttgctgtttaaatgatgattttgaaagattaaacctgtactgttggtattgtgttagtgtatggaccaatactgcctgtaataaagattttatatatagatgcctttcaaaaaaaaaaaaaaa

SEQ ID NO: 12224 - DNA, 3818 bp, Homo sapiens
ttggacactactctaggaccgggtaactataactacccaatattgcagccatggagtccatgcttaataaattgaagagtactgttacaaaagtaacagctgatgtcactagtgctgtaatgggaaatcctgtcactagagaatttgatgttggtcgacacattgccagtggtggcaatgggctagcttggaagatttttaatggcacaaaaaagtcaacaaagcaggaagtggcagtttttgtctttgataaaaaactgattgacaagtatcaaaaatttgaaaaggatcaaatcattgattctctaaaacgaggagtccaacagttaactcggcttcgacaccctcgacttcttactgtccagcatcctttagaagaatccagggattgcttggcattttgtacagaaccagtttttgccagtttagccaatgttcttggtaactgggaaaatctaccttcccctatatctccagacattaaggattataaactttatgatgtagaaaccaaatatggtttgcttcaggtttctgaaggattgtcattcttgcatagcagtgtgaaaatggtgcatggaaatatcactcctgaaaatataattttgaataaaagtggagcctggaaaataatgggttttgatttttgtgtatcatcaaccaatccttctgaacaagagcctaaatttccttgtaaagaatgggacccaaatttaccttcattgtgtcttccaaatcctgaatatttggctcctgaatacatactttctgtgagctgtgaaacagccagtgatatgtattctttaggaactgttatgtatgctgtatttaataaagggaaacctatatttgaagtcaacaagcaagatatttacaagagtttcagtaggcagttggatcagttgagtcgtttaggatctagttcacttacaaatatacctgaggaagttcgtgaacatgtaaagctactgttaaatgtaactccgactgtaagaccagatgcagatcaaatgacaaagattcccttctttgatgatgttggtgcagtaacactgcaatattttgataccttattccaaagagataatcttcagaaatcacagtttttcaaaggactgccaaaggttctaccaaaactgcccaagcgtgtcattgtgcagagaattttgccttgtttgacttcagaatttgtaaaccctgacatggtaccttttgttttgcccaatgttctacttattgctgaggaatgcaccaaagaagaatatgtcaaattaattcttcctgaacttggccctgtgtttaagcagcaggagccaatccagattttgttaattttcctacaaaaaatggatttgctactaaccaaaacccctcctgatgagataaagaacagtgttctacccatggtttacagagcactagaagctccttccattcagatccaggagctctgtctaaacatcattccaacctttgcaaatcttatagactacccatccatgaaaaacgctttgataccaagaattaaaaatgcttgtctacaaacatcttcccttgcggttcgtgtaaattcattagtgtgcttaggaaagattttggaatacttggataagtggtttgtacttgatgatatcctacccttcttacaacaaattccatccaaggaacctgcggtcctcatgggaattttaggtatttacaaatgtacttttactcataagaagttgggaatcaccaaagagcagctggccggaaaagtgttgcctcatcttattcccctgagtattgaaaacaatcttaatcttaatcagttcaattctttcatttccgtcataaaagaaatgcttaatagattggagtctgaacataagactaaactggagcaacttcatataatgcaagaacagcagaaatctttggatataggaaatcaaatgaatgtttctgaggagatgaaagttacaaatattgggaatcagcaaattgacaaagtttttaacaacattggagcagaccttctgactggcagtgagtccgaaaataaagaggacgggttacagaataaacataaaagagcatcacttacacttgaagaaaaacaaaaattagcaaaagaacaagagcaggcacagaagctgaaaagccagcagcctcttaaaccccaagtgcacacacctgttgctactgttaaacagactaaggacttgacagacacactgatggataatatgtcatccttgaccagcctttctgttagtacccctaaatcttctgcttcaagtactttcacttctgttccttccatgggcattggtatgatgttttctacaccaactgataatacaaagagaaatttgacaaatggcctaaatgccaatatgggctttcagacttcaggattcaacatgcccgttaatacaaaccagaacttctacagtagtccaagcacagttggagtgaccaagatgactctgggaacacctcccactttgccaaacttcaatgctttgagtgttcctcctgctggtgcaaagcagacccaacaaagacccacagatatgtctgcccttaataatctctttggccctcagaaacccaaagttagcatgaaccagttatcacaacagaaaccaaatcagtggcttaatcagtttgtacctcctcaaggttctccaactatgggcagttcagtaatggggacacagatgaacgtgataggacaatctgcttttggtatgcagggtaatcctttctttaacccacagaactttgcacagccaccaactactatgaccaatagcagttcagctagcaatgatttaaaagatctttttgggtgaggtgtcttacttctattttgaaggattatttcagtttcaatcatgggtgagctgatttacatctttatatagttggcttggaggaagtacttctatgggaaagtgaacagttctgtgacaggaaacatctctgtccatgccagcatagtagttgtatggacttctaaccagttgagttttttaaagcattgaggattttttcctcttaccaactcctcttcaggtttttaaagacccagcccttcccaatctcaaagagaaaaaggaaactgagttatcttgaataacataactttttaatcaaatgtttattttggcttgtggatcttggtgttatttaaaaaattgaggtgatggtcattgcaagctcatctattaagtactatatggtacacagtctatgagtcattagtcttcattttaatatgtaaaaaatcttgatgctgtattgatttgtttgcatttaagatgacagtgagaaaatgataagcataaagagaagtatcaggttatttgctttttccaaacttttcagatgaactattgtttagtacagagactgagcaaatactacaaaattcaacttaaccttcatttcattggtttaaatgcgttattaaccatcttaagtgcaaactaatcattgtaaattatattttagcatggtctgcctcaaatagtaatgtatttttctgcattcacttggatatatttagaatcacttttttcctcctgtatcaaggaagaggtatgtgctgatttgtttggatatttgacaaggcactctgatgtgacttccctgactactaccttcatatttcatttcaaattcaaacttctgaggttgcagcatatatgaattgcattttcaaaagaagatttgtaagaattaaactatatttatgagtaaacttttgaggtttctgctgtattgtttcaaatgtaataaactttacttctgtaaaaaaaaaaaaaaaa

SEQ ID NO: 12225 - DNA, 4225 bp, Homo sapiens
ggccgcgcggcgcatcctgcgggcggcggcggcgggcgaggcgcctgcagccgggcgcaagatgatgaagtttcggttccggcggcagggcgccgacccgcagcgcgagaagctcaagcaggagcttttcgccttcaacaagactgtggagcatggcttccccaatcagcccagcgccctggccttcgacccggaacttcgcatcatggccatcggcaccaggtctggggctgtcaagatctatggtgcacctggcgtggagttcacaggcctgcaccgggatgcagccactgtcacacagatgcacttcttgaccggccagggccgcctcctgtccctgcttgatgacagcagtctgcatctctgggagattgtccaccataatggctgtgcccacctggaagaagcactcagtttccagctgcccagccggcccggctttgatggtgccagtgctccgctcagccttacccgagtcacagtggtcctgctggtggctgccggcgacatagcagccctgggcactgagggcagcagtgtcttcttcctggatgttaccaccctgaccctgctcgaggggcagacgcttgccccaggcgaggttctgcgcagcgtgccagacgactaccgctgtgggaaggcactgggccccgtggagtcactccagggacacctgcgggaccccacaaagattctcattggctacagccggggcctgctggtcatctggaaccaggcctcgcagtgtgtggaccacatcttcctggggaaccagcagctggagagcctatgctgggggcgtgatagcagcactgtggtcagctcacacagcgatggcagctatgctgtctggtctgtggatgccggcagcttcccaacgctgcagcccacggtagccaccacaccttacggcccctttccctgcaaggccattaacaagattctgtggcggaactgtgaatctgggggccactttatcatcttcagcggtggcatgccccgtgccagctatggtgaccgccactgtgtaagtgtgcttcgagccgagacattggtgacgctggacttcacttcccgcatcatcgacttcttcacagtgcacagcacacggcccgaggatgaatttgatgacccccaggccctggctgtgctgctggaagaggagctggtggtgctggacctgcagactcctggctggccagctgtgcctgccccatacctggccccgctgcactcctctgcaatcacttgctcggcccacgtggccagtgtccccgccaagctgtgggcccgcattgtgagcgctggcgagcagcagagcccccagcctgtctccagtgccttgagctggcccatcactgggggccgaaacctggcccaggagccgtcacagcgagggctgctgctgacgggccatgaggacggcaccgtgaggttctgggatgcctcgggtgtggcgctgcggccgctctataagctgagcacagctggcctcttccagacagactgtgagcacgctgacagcctggcccaggctgccgaggacgactggccacccttccgcaaggtgggctgcttcgatccctacagtgacgatccccggcttggcgtgcagaaggttgctctctgcaagtatacagcccagatggtggtggctggcactgcaggccaggtgctggtactggagcttagtgatgtgccggtggagcaggcggtcagcgtggccatcatagacctcctccaggaccgcgagggcttcacatggaagggccacgagcggctgagcccacgcacggggccgctgccctggcctgctggcttccagccccgtgtcctggtgcagtgcctgccgccagctgctgtaaccgctgtcacactccacaccgagtggagcctcgtggcttttggcaccagtcatggctttggcctcttcgactaccagcgcaagagccctgtgctggccaggtgcactcttcaccccaatgactccctggccatggagggtccgctctcccgggtgaagtctctcaagaagtcactgcgccagtctttccggcgcattcgcaagagtcgtgtctctggcaagaagcgggctgctaatgccagcagcaagttgcaggaagccaatgcacagctggctgagcaggcctgcccccacgacgtggagatgacgcccgtgcagcgccgcattgagccccgctctgccgatgactccttgtcgggtgtcgtgcgttgcctatactttgccgacacattccttcgagatggggcccaccacgggcccaccatgtgggctggcaccaactcaggctctgtgttcgcctatgcactggaggtgccggcagcagcagtgggtggtgagaagcggcctgagcaagcggtggaggccgtgctgggcaaggaggtgcagctgatgcaccgggcgcctgtggtggccattgccgtgttggacgggcgtggccgcccactgcccgagccctacgaggcctcacgggacctggcgcaggcacctgacatgcagggtggtcacgctgtgctcatcgcatctgaggagcagttcaaggtgttcacactgcccaaggtgagcgcgaagaccaagttcaagctgacggcccatgagggctgtcgtgtgcgcaaggtggcactggccacgtttgccagtgtggcctgcgaggactatgctgagacctgcctggcctgcctcaccaacctgggtgacgtccacgtcttctcggtgcctggcctgcggccccaggtgcactattcctgcatccggaaggaggacatcagcggcatcgcttcgtgcgtctttacgcgccatggccagggcttttacctgatatccccatcagaatttgaacgcttctccctaagtgcccggaacatcacagagccgctctgctctctggacattaactggccccgcgatgccacccaggccagttacaggatccgagagtcacccaagctgagccaggctaacgggaccccaagcatcctgctggccccacagagccttgatggaagccctgatccagcccacagcatgggacctgacaccccggagccacccgaggctgcactctcacccatgtccatcgactcagccaccagtgctgacaccacgctggacacgacaggggacgtcacagtggaagatgtgaaggatttcctgggctcctctgaggagtcagagaagaacctgaggaacctggcagaagacgaggcccacgcctgtgccatcctgatcaaatgaggaaggccagaactatcccgacctccacctgccctgctcggagctggagtgctggatccctggcacctgcctggccccttaacatagaaccacgcctgctaacctgtaggctccactgggacctgctgtcctgtcccgcctgaccctgggccctggagcagcaccagccccagggtgtgggcctgggacctgggccagaactgagccctcctgcaggcatttggctgccctgggggcccactgcctagggaagaggacaggtggggcccagcacctgtgccacctccccccctccacacaccatccttccccctcactttgcagagtatttttccttttttttttttttcttaaagacggagtcttgctctgtcgcccaggctggagtgcagtggccccatctctgctcactgcaagccccgccttctgggttcccgccattcttctgcctcagcctcccaagtagctgggactacaggcgcccaccaccacgcccagctaattttttctgtatttttagtagagatggggtttcaccatgttagccaggatggtctcgatctcctgacctcgtgatccacccacctcagcctcccaaagtgctgggattacaggcgtgagccaccatgcccagccctgcaaagagtatttttctagcgcctgggctggacagttgtttctaaaactaaactattttggtacctgcttctgggccagtccccagcctgtcatgagtgtgtgtgtgcgggcatggatgtgactgggagctctgctgggcacccacatctggggcctagtcaggtgtgtgtgtccggcggggggggggggcaggggggggggtcaagatgagtttccctgtagattgtaccttggggtttttttctgtcgttttgttaaaattagcgccattttaatattaaaaatactgatttttaatattgaaaataaaagcatttaatatctcttaaa

SEQ ID NO: 12226 - DNA, 3664 bp, Homo sapiens
gcgctaggtagagcgccgggacctgtgacagggctggtagcagcgcagaggaaaggcggcttttagccaggtatttcagtgtctgtagacaagatggaatcatctccatttaatagacggcaatggacctcactatcattgagggtaacagccaaagaactttctcttgtcaacaagaacaagtcatcggctattgtggaaatattctccaagtaccagaaagcagctgaagaaacaaacatggagaagaagagaagtaacaccgaaaatctctcccagcactttagaaaggggaccctgactgtgttaaagaagaagtgggagaacccagggctgggagcagagtctcacacagactctctacggaacagcagcactgagattaggcacagagcagaccatcctcctgctgaagtgacaagccacgctgcttctggagccaaagctgaccaagaagaacaaatccaccccagatctagactcaggtcacctcctgaagccctcgttcagggtcgatatccccacatcaaggacggtgaggatcttaaagaccactcaacagaaagtaaaaaaatggaaaattgtctaggagaatccaggcatgaagtagaaaaatcagaaatcagtgaaaacacagatgcttcgggcaaaatagagaaatataatgttccgctgaacaggcttaagatgatgtttgagaaaggtgaaccaactcaaactaagattctccgggcccaaagccgaagtgcaagtggaaggaagatctctgaaaacagctattctctagatgacctggaaataggcccaggtcagttgtcatcttctacatttgactcggagaaaaatgagagtagacgaaatctggaacttccacgcctctcagaaacctctataaaggatcgaatggccaagtaccaggcagctgtgtccaaacaaagcagctcaaccaactatacaaatgagctgaaagccagtggtggcgaaatcaaaattcataaaatggagcaaaaggagaatgtgcccccaggtcctgaggtctgcatcacccatcaggaaggggaaaagatttctgcaaatgagaatagcctggcagtccgttccacccctgccgaagatgactcccgtgactcccaggttaagagtgaggttcaacagcctgtccatcccaagccactaagtccagattccagagcctccagtctttctgaaagttctcctcccaaagcaatgaagaagtttcaggcacctgcaagagagacctgcgtggaatgtcagaagacagtctatccaatggagcgtctcttggccaaccagcaggtgtttcacatcagctgcttccgttgctcctattgcaacaacaaactcagtctaggaacatatgcatctttacatggaagaatctattgtaagcctcacttcaatcaactctttaaatctaagggcaactatgatgaaggctttgggcacagaccacacaaggatctatgggcaagcaaaaatgaaaacgaagagattttggagagaccagcccagcttgcaaatgcaagggagacccctcacagcccaggggtagaagatgcccctattgctaaggtgggtgtcctggctgcaagtatggaagccaaggcctcctctcagcaggagaaggaagacaagccagctgaaaccaagaagctgaggatcgcctggccaccccccactgaacttggaagttcaggaagtgccttggaggaagggatcaaaatgtcaaagcccaaatggcctcctgaagacgaaatcagcaagcccgaagttcctgaggatgtcgatctagatctgaagaagctaagacgatcttcttcactgaaggaaagaagccgcccattcactgtagcagcttcatttcaaagcacctctgtcaagagcccaaaaactgtgtccccacctatcaggaaaggctggagcatgtcagagcagagtgaagagtctgtgggtggaagagttgcagaaaggaaacaagtggaaaatgccaaggcttctaagaagaatgggaatgtgggaaaaacaacctggcaaaacaaagaatctaaaggagagacagggaagagaagtaaggaaggtcatagtttggagatggagaatgagaatcttgtagaaaatggtgcagactccgatgaagatgataacagcttcctcaaacaacaatctccacaagaacccaagtctctgaattggtcgagttttgtagacaacacctttgctgaagaattcactactcagaatcagaaatcccaggatgtggaactctgggagggagaagtggtcaaagagctctctgtggaagaacagataaagagaaatcggtattatgatgaggatgaggatgaagagtgacaaattgcaatgatgctgggccttaaattcatgttagtgttagcgagccactgccctttgtcaaaatgtgatgcacataagcaggtatcccagcatgaaatgtaatttacttggaagtaactttggaaaagaattccttcttaaaatcaaaaacaaaacaaaaaaacacaaaaaacacattctaaatactagagataactttacttaaattcttcattttagcagtgatgatatgcgtaagtgctgtaaggcttgtaactggggaaatattccacctgataatagcccagattctactgtattcccaaaaggcaatattaaggtagatagatgattagtagtatattgttacacactattttggaattagagaacatacagaaggaatttaggggcttaaacattacgactgaatgcactttagtataaagggcacagtttgtatatttttaaatgaataccaatttaattttttagtatttacctgttaagagattatttagtctttaaattttttaggttaattttcttgctgtgatatatatgaggaatttactactttatgtcctgctctctaaactacatcctgaactcgacgtcctgaggtataatacaacagagcactttttgaggcaattgaaaaaccaacctacactcttcggtgcttagagagatctgctgtctcccaaataagcttttgtatctgccagtgaatttactgtactccaaatgattgctttcttttctggtgatatctgtgcttctcataattactgaaagctgcaatattttagtaataccttcgggatcactgtcccccatcttccgtgttagagcaaagtgaagagtttaaaggaggaagaagaaagaactgtcttacaccacttgagctcagacctctaaaccctgtatttcccttatgatgtcccctttttgagacactaatttttaaatacttactagctctgaaatatattgatttttatcacagtattctcagggtgaaattaaaccaactataggcctttttcttgggatgattttctagtcttaaggtttggggacattataaacttgagtacatttgttgtacacagttgatattccaaattgtatggatgggagggagaggtgtcttaagctgtaggcttttctttgtactgcatttatagagatttagctttaatattttttagagatgtaaaacattctgctttcttagtcttacctagtctgaaacatttttattcaataaagattttaattaaaatttgaaaaaaaaaaaaaaaaa

SEQ ID NO: 12227 - DNA, 4307 bp, Homo sapiens
gccgaggcctgcgcgccgcccggccgcctgcactgcgcgcgcgcccaccccgcgtgggaggcagcgggaggggcccggagaggtgtggagcggcgcggcgggaggctccgtgggcggccacgggagacagcgccggcgggagcgcgcctctcggcctttcctccgcgcccccgcgtccccagccggccgctccgagaggacccggaggaggcaggtggctttctagaagatgaccatagaggaccttccagattttccattagaaggaaatcctttgtttggaagatacccatttatattttctgcttctgataccccagttatcttttccatttctgcagcaccaatgccttcagactgtgaattttctttctttgatcctaatgatgcatcatgccaggaaattctttttgatcccaaaacttcagtttcagaattatttgccattttgagacagtgggttcctcaggtccaacaaaacattgacattattggaaatgagattcttaagagaggttgcaatgtgaatgatagagatggattgacagatatgactcttttacattatacctgcaaatctggagctcatggtattggtgatgtggaaacagctgtaaaatttgcaactcagcttattgacctgggagcagacattagtttgcggagtcgctggacaaacatgaatgctttgcattatgctgcttattttgatgtccctgaacttataagagtgattttgaaaacgtcgaaaccaaaagatgtggatgccacttgcagtgattttaattttggaacagctttgcatattgcagcatacaacttgtgtgcaggtgctgtgaagtgcctcttggagcagggagcaaatcctgcatttaggaatgacaaaggacagatccctgctgatgttgttccagacccagtagatatgccgttagagatggctgacgccgcagccactgctaaggaaatcaagcagatgcttctagatgcggtgcctctgtcatgtaacatctcaaaggccatgctcccaaattatgatcatgtcactggcaaggcaatgcttacgtcacttggcctgaagttgggggatcgtgttgttattgcaggacagaaggttggtacattaagattttgtggaacaactgaatttgcaagtgggcagtgggctggcattgaactggatgaaccagaaggaaaaaataatggaagtgttggaaaagtccagtactttaaatgtgcccccaagtatggtatttttgcacctctttcaaagataagtaaagcaaaaggtcgaaggaagaatataacacacactccttctacaaaagctgctgtacctctcatcaggtcccagaaaattgacgtagctcatgtgacgtcaaaagtaaatactggattaatgacatcaaaaaaagatagtgcttctgagtcaacactttcattgcctcctggtgaagaacttaaaactgtgacagagaaagatgttgccctgcttggatctgtcagcagctgctcctctacatcttctttggaacacagacagagctaccccaagaaacagaatgcaatcagcagtaacaagaagacaatgagcaaaagcccttccctttcatccagagccagtgctggtttgaattcctcagcaacatctacagcaaataatagccgttgcgagggggaactccgcctcggagagagagtgttagtggtaggacagagactgggcaccattaggttctttgggacaacaaacttcgctccaggatattggtatggtatagagcttgaaaaaccccatggcaagaatgatggttcagttggaggtgtgcagtattttagctgttctccaagatatggaatatttgctcccccatccagggtgcaaagagtaacagattccctggataccctttcagaaatttcttcaaataaacagaaccattcttatcctggttttaggagaagttttagcacaacttctgcttcttcccaaaaggagattaacagaagaaatgctttttccaaatcgaaagctgctttgcgtcgcagttggagcagcacccccaccgcaggtggcattgaagggagcgtgaagctgcacgaggggtctcaggtcctgctcacgagctccaatgagatgggtactgttaggtatgtgggccccactgactttgcttcaggtatctggcttggacttgagctccgaagcgccaagggaaaaaatgatgggtcagtgggtgacaagcgctatttcacctgtaagccgaaccatggagtcttagttcgaccgagcagagtgacctatcggggaattaatgggtcaaaacttgtggatgagaattgttaagcttctaaaatattaaataagctcaaatatatatatttggtgtaaataaagagtccatggtaaatggtttactttatttagccatattaaaattttgaaaatatagttatcttcttaaaaaccattataacaattcagagagagttctttacaaagccatgaatatgaactatggggaatcatggttcttttaaagcaattttcaaaataagtaccaattaaagctttaggttccaagaagattctgggactcaggaagaaaaagtgccatcaggtgaccagctgttgcatttcttgcttattctgttttgtttttgcacatcataatggatttttcttagtgccctaattgtgaagggtttctctagctttggttatgtgtaatgttcacgtgacctttttttgtcaatcatttttggaatttttctttctttctgtgctttattactaataagtccaatgagtgagtagtagctagatgactagtatgtagttttatattttggtaaaattatttgccctttcagaaatgcctcatctaaagatacatgataattttggagttggaaggggccttagaggctctccagctctgcttcttgcccattgccaaatactgaaatggaagcccgtcttacctggggtcactaactggttggttaactgagctaagaatagactgtgggtctcctcacttgtggcccagtgctctttctgctatacaaaatgcctaatctcagatttttcttctgctgcttgactgcttcatctggatgaactacaaaaaacccatgattaaggtttatgaattcaagtaataattagattttttttgcacagacttacttaacttccttattggatatgtttgtaacacataaacacaaagcacttttcaaacatgatgcacttttatctttgtgaataatttactgtcctttcctcctgggatatgagaaacattttaaaaaacgtatttaacagaagagagcaaataaagatatatcaggaaggatgtattagttatttacttaaatgtttataatatctggattttttttgttttgttactcatagaactggtgttgtttgctgtttttatttctctaattgttgcagagttctgcctgttacaaagctacagaactgtattgtttttattttccttcttgagcacatgttaacaaactaagcttcacattagagtgatgtcataatgtaaaatgtttgcattgtggttaggtattgaagtttatgtcctgtctgtgtaaagattcatcttttattgtaaatatttagactttaccacagaaatattggaacagtttgctttataagattaaaaagcatccttcagaatggagcttgccttgtgcttagaaataatatgttgaactattttgcaatatactatttttaaatctaaattctgtcacttcgctgcctttttaaaatagtgtggtatttcaaatattgctagagctattttcctgaaatacatttgcaaaataaggctgctttgtaatcaaggaatatttttattgattgaaggaaatgactgtactgcgattcaaaagtaaacttattttattatacagattatttcttaaaaactctatttataccttaacatgaaatccatgaccacaccaaacttggttattcataatttttcctgttaaatataaaacactgtaagttaaaaacagtaatgccaacattgaatttatttttgaggtcaaagaaccagttgttctctttatatttagatgaggatgattgagtccatatactatgtatgtttacatatactatacatgcacattaggtgttttcatttgtgttttgcttatgaaatgtcatttaaagttcacttcttgagcatcaataaaaagggaagctgtgtggttttggaaaaaaaaaaaaaaaaaaaaaaaaagaaaaaaaaaaaaaaaaaaag

SEQ ID NO: 12228 - DNA, 1978 bp, Homo sapiens
ctcatcttcacgttttctgcatctattgaagtgcgccactgagatcgtggagttcttccctgtttgtccatatgatgaacaacactgattttctgatgttgaacaatccctggaataaactctgtttggtttccatggatttctgtttccctttagattttgttagtaatttattttggatttttgcatccaagttcataattgtaactggacaaataaaggcagattttaaaaggacaagttgggaggctaaggcggaaggatcacttgagcctgggagattgaagctgcagctagcttcgattgttccactgtactccagcctggtgacagcaggacctgcctctaaaataataatacttaaaaggacgagtttacctacagtctcaccaagcaatgaaagagcttatcttcttcctgtttcctttacggatcttgctcatgtattttatcttagttactttagcataaatgctaaatcaaattctttttcactagacatcataatagctctaggcataccacataatacccaagcacattttaatcattaaaattgtttcctttttttgtggctactgtaaccacttcagcgaaccatttagtgtgtagtgggtttaaattttttctccttcctgggataaatttcccaggagagggataattgggtcaaaagttacgaacatatttatgggttcttttccacaagagatcgatcagtttgcaagtgccatctgcactgtgggggaaccaatcttcaacttgcctgcatttggtattagtatttcattaacctttcattgatctaattacggctctttgacacaattttcatcagtgatggactaagtgtgatccggcctgacccgcctccggccggcgtgagaaggggcatgtgtcgggctaccctcgggcttcccctgccgcccattgtgatccagcccgctaggcgctccctgccgcccattgtgacgcctgccagccgcaggctgggtccccgaggcgggcggcatttaggctcggtctccacagccatggccgcgacgcaggagctgctgctgcagttgcagaaggataaccgagatggtcgccagcggaagcaggagctagagaagctgatgcgcgggctcgaggccgagagcgagagcctgcctcaaccagcgcctgcaggacctgagcgagcgggagcggaggctgctgcggaggcgaagccaggaagcgctgcttctgcaaggggaggtgcgcgaggcggcgcgggagcgcgcgcagcgggtgcgcagaagactggaggaggcggagcgccacaaggaggacttgaagcccggtaaaccccgtccttacgagccccgcccctagctcttctactacggaggggaactgcagagccagaagagcacggagcagcaactcgcagcccaattggtgacgctgcagaatgaactggagctggcggagaccaaatgcgccttgcaggaggagaagctgcagcaggacgcgctgcagacagcggaggcctgggccatattccaggagcagaccgtagtcctgcaggtgtgacgggcagcttcgcagagtgcagtacagcaccgagtcgctcatggaggagatggccagggcggaccgagagacgcggctgttcggcggtcctcgcgcgctggccatcaggcgctgctgacgctgccgctcctcttcctggggctgtcgctgctctggacggtgctgttggaccccggcgccgtctccgcgtggctctggagcctcacctcggagacgacgctgcgccgcctgcgctacacgctgtccccgctgctggagctgcgcgctaacgggctgctgccaacctaagtgcagcgccccgcgcctggctccaggtggactccagggcaccggctttatttctggtgcactcctctcctgagagtgtagaccaaggtcgcctaataaactcctcaagggataaaaaaaaaaaaaaaaaaaa

SEQ ID NO: 12229 - DNA, 372 bp, Homo sapiens
agtcccagcgaacccgcgtgcaacctgtcccgactctagccgcctcttcagcacgccatggatcccaactgctcctgcgccgccggtgactcctgcacctgcgccggttcctgcaaatgcaaagagtgcaaatgcacttcgtgcaagaaaagctgctgctcctgctgccctgtgggctgtgccaagtgtgcccaaggctgcatctgcaaaggggcgtcggacaagtgcagctgctgcgcctgatgctgggacagccccgctcccagatgtaaagaacgcgacttccacaaacctggattttttatgtacaaccctgaccgtgaccgtttgctatattcctttttctatgaaataatgtgaatgataataaaa

SEQ ID NO: 12230 - DNA, 1857 bp, Homo sapiens
gcatcccagctccactcccaggctctgggggctggggagtggttaccaagcctcctctctccttctgtcccactgccctctccccgtctctagctcagaggccccactggaccctcggctcttccttggacttcttgtgtgttctgtgagcttcgctggattcagggtcttgggcatcagaggtccgccgcgatggggaagccctggctgcgtgcgctacagctgctgctcctgctgggcgcgtcgtgggcgcgggcgggcgccccgcgctgcacctacaccttcgtgctgcccccgcagaagttcacgggcgctgtgtgctggagcggccccgcatccacgcgggcgacgcccgaggccgccaacgccagcgagctggcggcgctgcgcatgcgcgtcggccgccacgaggagctgttacgcgagctgcagaggctggcggcggccgacggcgccgtggccggcgaggtgcgcgcgctgcgcaaggagagccgcggcctgagcgcgcgcctgggccagttgcgcgcgcagctgcagcacgaggcggggcccggggcgggcccgggggcggatctgggggcggagcctgccgcggcgctggcgctgctcggggagcgcgtgctcaacgcgtccgccgaggctcagcgcgcagccgcccggttccaccagctggacgtcaagttccgcgagctggcgcagctcgtcacccagcagagcagtctcatcgcccgcctggagcgcctgtgcccgggaggcgcgggcgggcagcagcaggtcctgccgccacccccactggtgcctgtggttccggtccgtcttgtgggtagcaccagtgacaccagtaggatgctggacccagccccagagccccagagagaccagacccagagacagcaggagcccatggcttctcccatgcctgcaggtcaccctgcggtccccaccaagcctgtgggcccgtggcaggattgtgcagaggcccgccaggcaggccatgaacagagtggagtgtatgaactgcgagtgggccgtcacgtagtgtcagtatggtgtgagcagcaactggagggtggaggctggactgtgatccagcggaggcaagatggttcagtcaacttcttcactacctggcagcactataaggcgggctttgggcggccagacggagaatactggctgggccttgaacccgtgtatcagctgaccagccgtggggaccatgagctgctggttctcctggaggactgggggggccgtggagcacgtgcccactatgatggcttctccctggaacccgagagcgaccactaccgcctgcggcttggccagtaccatggtgatgctggagactctctttcctggcacaatgacaagcccttcagcaccgtggatagggaccgagactcctattctggtaactgtgccctgtaccagcggggaggctggtggtaccatgcctgtgcccactccaacctcaacggtgtgtggcaccacggcggccactaccgaagccgctaccaggatggtgtctactgggctgagtttcgtggtggggcatattctctcaggaaggccgccatgctcattcggcccctgaagctgtgactctgtgttcctctgtcccctaggccctagaggacattggtcagcaggagcccaagttgttctggccacaccttctttgtggctcagtgccaatgtgtcccacagaacttcccactgtggatctgtgaccctgggcgctgaaaatgggacccaggaatcccccccgtcaatatcttggcctcagatggctccccaaggtcattcatatctcggtttgagctcatatcttataataacacaaagtagccacag

SEQ ID NO: 12231 - DNA, 2048 bp, Homo sapiens
ctctgcaacagccgcgcttcccgggtcccgcggctcccgcgcgcgatctgccgcggccggctgctgggcaaaaatcagagccgcctccgccccattacccatcatggaaaccctccaggaaaaagtggccccggacgcgcgagcctgaggattctgcacaaaagaggtgcccaaaatgaagaccctgatgcgccatggtctggcagtgtgtttagcgctcaccaccatgtgcaccagcttgttgctagtgtacagcagcctcggcggccagaaggagcggcccccgcagcagcagcagcagcagcagcaacagcagcagcaggcgtcggccaccggcagctcgcagccggcggcggagagcagcacccagcagcgccccggggtccccgcgggaccgcggccactggacggatacctcggagtggcggaccacaagcccctgaaaatgcactgcagggactgtgccctggtgaccagctcagggcatctgctgcacagtcggcaaggctcccagattgaccagacagagtgtgtcatccgcatgaatgacgcccccacacgcggctatgggcgtgacgtgggcaatcgcaccagcctgagggtcatcgcgcattccagcatccagaggatcctccgcaaccgccatgacctgctcaacgtgagccagggcaccgtgttcatcttctggggccccagcagctacatgcggcgggacggcaagggccaggtctacaacaacctgcatctcctgagccaggtgctgccccggctgaaggccttcatgattactcgccacaagatgctgcagtttgatgagctcttcaagcaggagactggcaaagacaggaagatatccaacacttggctcagcactggctggtttacaatgacaattgcactggagctctgtgacaggatcaatgtttatggcatggtgcccccagacttctgcagggatcccaatcacccttcagtaccttatcattattatgaaccttttggacctgatgaatgtacaatgtacctctcccatgagcgaggacgcaagggcagtcatcaccgctttatcacagagaaacgagtctttaagaactgggcacggacattcaatattcacttttttcaaccagactggaaaccagaatcacttgctataaatcatcctgagaataaacctgtgttctaaggaatgagcatgccagactgtaatcccaggtattcactgcatcagacaccgagacactgaacttcctgagccaccagacaggaaagggtagcagaaaacagcttcactcctcaggaagtaccatggacagacgcctaccaggggtgacaaagcagtgcagttggattgtaaggaaaaattccggaattaatgcatcctaatgaatgttgtccccttcaatggtgttaccttaggagctgaacattcaattcagttacaccactatgactaaaaacagtttggatctcttagtattgcctttgaaactgcaacataagcaactcaacaatattagttgcattcctttatagacataccatgtcaaagacgtttttctatcaagttgtattctttcctgttctataacctttgtcatctgttagactctgtatgtgtgatttgtaaaaagcaggctgaaactatggacatgatttctgaagagcacatctccactgactttcataaagcaaatgtccaatatttatttattgagagttttttagtgcaatctgggccagtatttttatagattatgattatgtggtaatttatccttcctaactctttaatcctgaatgatggttggaaatggcctagaattaggttactctgttcacaatgctcattgttagcatgcaattggtatttgacttggaagtgttgtgttgtattttttgaacccctaggcttcaggaaaactgctcttttgtaaaaagaatagcgatgacattttctaatgtgcagaaatgttccaaaaggacaaaattgaaaaccaaaaactatgttattaaaacaaaaaaatgctaaaaaaaaaaaaaaaaaa

SEQ ID NO: 12232 - DNA, 2697 bp, Homo sapiens
gctgagcagtcaacagcatttcttgttccaagatcacccttctgagtacctctctggctgccaaattgccagggccttcacagtttgattccattctcagctccaagcattaggtaaacccaccaagcaatcctagcctgtgatggcgtttgacgtcagctgcttcttttgggtggtgctgttttctgccggctgtaaagtcatcacctcctgggatcagatgtgcattgagaaagaagccaacaaaacatataactgtgaaaatttaggtctcagtgaaatccctgacactctaccaaacacaacagaatttttggaattcagctttaattttttgcctacaattcacaatagaaccttcagcagactcatgaatcttacctttttggatttaactaggtgccagattaactggatacatgaagacacttttcaaagccatcatcaattaagcacacttgtgttaactggaaatcccctgatattcatggcagaaacatcgcttaatgggcccaagtcactgaagcatcttttcttaatccaaacgggaatatccaatctcgagtttattccagtgcacaatctggaaaacttggaaagcttgtatcttggaagcaaccatatttcctccattaagttccccaaagacttcccagcacggaatctgaaagtactggattttcagaataatgctatacactacatctctagagaagacatgaggtctctggagcaggccatcaacctaagcctgaacttcaatggcaataatgttaaaggtattgagcttggggcttttgattcaacggtcttccaaagtttgaactttggaggaactccaaatttgtctgttatattcaatggtctgcagaactctactactcagtctctctggctgggaacatttgaggacattgatgacgaagatattagttcagccatgctcaagggactctgtgaaatgtctgttgagagcctcaacctgcaggaacaccgcttctctgacatctcatccaccacatttcagtgcttcacccaactccaagaattggatctgacagcaactcacttgaaagggttaccctctgggatgaagggtctgaacttgctcaagaaattagttctcagtgtaaatcatttcgatcaattgtgtcaaatcagtgctgccaatttcccctcccttacacacctctacatcagaggcaacgtgaagaaacttcaccttggtgttggctgcttggagaaactaggaaaccttcagacacttgatttaagccataatgacatagaggcttctgactgctgcagtctgcaactcaaaaacctgtcccacttgcaaaccttaaacctgagccacaatgagcctcttggtctccagagtcaggcattcaaagaatgtcctcagctagaactcctcgatttggcatttacccgcttacacattaatgctccacaaagtcccttccaaaacctccatttccttcaggttctgaatctcacttactgcttccttgataccagcaatcagcatcttctagcaggcctaccagttctccggcatctcaacttaaaagggaatcactttcaagatgggactatcacgaagaccaacctacttcagactgtgggcagcttggaggttctgattttgtcctcttgtggtctcctctctatagaccagcaagcattccacagcttgggaaaaatgagccatgtagacttaagccacaacagcctgacatgcgacagcattgattctcttagccatcttaagggaatctacctcaatctggctgccaacagcattaacatcatctcaccccgtctcctccctatcttgtcccagcagagcaccattaatttaagtcataaccccctggactgcacttgctcgaatattcatttcttaacatggtacaaagaaaacctgcacaaacttgaaggctcggaggagaccacgtgtgcaaacccgccatctctaaggggagttaagctatctgatgtcaagctttcctgtgggattacagccataggcattttctttctcatagtatttctattattgttggctattctgctattttttgcagttaaataccttctcaggtggaaataccaacacatttagtgctgaaggtttccagagaaagcaaataagtgtgcttagcaaaattgctctaagtgaaggaactgtcatctgctggtgaccagaccagacttttcagattgcttcctggaactgggcagggactcactgtgcttttctgagcttcttactcctgtgagtcccagagctaaagaaccttctaggcaagtacaccgaatgactcagtccagagggtcagatgctgctgtgagaggcacagagccctttccgcatgtggaagagtgggaggaagcagagggagggactgggcagggactgccggccccggagtctcccacagggaggccattccccttctactaccgacatccctcccagcaccacacaccccgcccctgaaaggagatcatcagcccccacaatttgtcagagctgaagccagcccactacccacccccactacagcattgtgcttgggtctgggttctcagtaaatgtagccatttgagaaacttacttggggacaaagtctcaatccttattttaaatgaaaaaagaaaagaaaagcataataaatttaaaagaaaagg

SEQ ID NO: 12233 - DNA, 2222 bp, Homo sapiens
gcggccggaagccgggcgccgcggctctgcttccctcggggatctggcgacatggccagaaaggctctcaagcttgcttcgtggaccagcatggctcttgctgcctctggcatctacttctacagtaacaagtacttggaccctaatgactttggcgctgtcagggtgggcagagcagttgctacgacggctgtcatcagttacgactacctcacttccctgaagagtgtcccttatggctcagaggagtacttgcagctgagatctaaggtgcaccttcgctctgccaggcgtctctgtgagctctgctgtgccaaccggggcaccttcatcaaggtgggccagcacctgggggctctggactacctgttgccagaggagtacaccagcacgctgaaggtactgcacagccaggctccacagagcagcatgcaagagatccgccaggtcatccgagaagatctgggcaaggagatccatgatttgttccagagcttcgatgacacccctctggggacggcctccctggcccaggtccacaaggcagtgctgcatgatgggcggacggtggccgtgaaggtccagcacccaaaggtgcgggctcagagctcgaaggacattctcctgatggaggtgctcgttctggctgtgaagcagctgttcccagagtttgagtttatgtggcttgtggatgaagccaagaagaacctgcctttggagctggatttcctcaatgaagggaggaatgctgagaaggtgtcccagatgctcaggcattttgacttcttgaaggtcccccgaatccactgggacctgtccacggagcgggtcctcctgatggagtttgtggatggcgggcaggtcaatgacagagactacatggagaggaacaagatcgacgtcaatgagatctcacgccacctgggcaagatgtatagtgagatgatcttcgtcaatggcttcgtgcactgcgatccccaccccggcaatgtactggtgcggaagcaccccggcacgggaaaggcggagattgtcctgttggaccatgggctttaccagatgctcacggaagaattccgcctgaattactgccacctctggcagtctctgatctggactgacatgaagagagtgaaggagtacagccagcgactgggagccggggatctctaccccttgtttgcctgcatgctgacggcgcgatcgtgggactcggtcaacagaggcatcagccaagctcccgtcactgccactgaggacttagagattcgcaacaacgcggccaactacctcccccagatcagccatctcctcaaccacgtgccgcgccagatgctgctcatcttgaagaccaacgacctgctgcgtggcattgaggccgccctgggcacccgcgccagcgccagctcctttctcaacatgtcacgttgctgcatcagagcgctagctgagcacaagaagaagaatacctgttcattcttcagaaggacccagatctctttcagcgaggccttcaacttatggcagatcaacctccatgagctcatcctgcgtgtgaaggggttgaagctggctgaccgggtcttggccctaatatgctggctgttccctgctccactctgagtggaattgctctccctgccccattctggtgtctttccactcctcagcccctcatcttgcctccacccagctgctccatttttgccacatcgtggcccgcagccccagagtcactgtccatgtcaccatcctcctcctcctttggaatcctctccgcacactgtggcccttgtctcagggcccacaagctgaactgtggcatagctctctcttcttctccaagaagactcagcagcctacattcccattcctggtatgtgccattgggttggatgtccccactacttccgttaacccttcccattgtcaagatgtgccacgggtgccactgggggcacactgaacttgtagggagtgtgattttgttggaggtgcacatggtctctgaatttgacagagaacaccttccctttccttgccatgtcaccctccagaggaagtcacacctcagcgaggtggtttggcatctggggccaactccattacagctatgagctcactgctgtcagtgacgtttggtgttttctgtactgtgtttcaataaaaactccttcaaggttaaaaaaaaaaaaaaaaaaaaaaaaaaaaaaaaaaaaaaa

SEQ ID NO: 12234 - DNA, 4876 bp, Homo sapiens
cccgagtgtcggttcactgtggagacagcggtggcggagtgggtctccagggctctgggctggcaaggcccccggagggggtggggcgcggaggaggctacggatccgcttccgcgcggcggggccgggtgcttgggacgcggctctgggctcccgggataaggggctcccgggacaaggggctcccggagagcccagtggttagcgatgctgctgtcgccgtcgctgctgctgctgctgctgctgggggcgccgcggggctgcgccgagggtgtggcggcggcgcttacccccgagcggctcctggagtggcaggataaaggaatatttgttatccaaagtgagagtctcaagaaatgcattcaagcaggtaaatcggttctgaccctggagaactgcaagcaagcaaacaagcacatgctgtggaaatgggtttcaaaccatggcctctttaacataggaggcagtggttgcctgggcctgaatttctccgccccagagcagccattaagcttatatgaatgtgactccaccctcgtttccttacggtggcgctgtaacaggaagatgatcacaggcccgctgcagtactctgtccaggtggcgcatgacaacacagtggtggcctcacggaagtatattcataagtggatttcttatgggtcaggtggtggagacatttgtgaatatctacacaaagatttgcatacaatcaaagggaacacccacgggatgccgtgtatgtttcccttccagtataaccatcagtggcatcatgaatgtacccgtgaaggtcgggaagatgacttactgtggtgtgccacgacaagccgttatgaaagagatgaaaagtggggattttgccctgatcccacctctgcagaagtaggttgtgatactatttgggagaaggacctcaattcacacatttgctaccagttcaacctgctttcatctctctcttggagtgaggcacattcttcatgccagatgcaaggaggtacgctgttaagtattacagatgaaactgaagaaaatttcataagggagcacatgagcagtaaaacagtggaggtgtggatgggcctcaatcagctggatgaacacgctggctggcagtggtctgatggaacgccgctcaactatctgaattggagcccagaggtaaattttgagccatttgttgaagatcactgtggaacatttagttcatttatgccaagtgcctggaggagtcgggattgtgagtccaccttgccatatatatgtaaaaaatatctaaaccacattgatcatgaaatagttgaaaaagatgcgtggaaatattatgctacccactgtgagcctggctggaatccctacaatcgtaattgctacaaacttcagaaagaagaaaagacctggcatgaggctctgcgttcttgtcaggctgataacagtgcattaatagacataacctcattagcagaggtggagtttcttgtaaccctccttggagatgaaaatgcatcagaaacatggattggtttgagcagcaataaaattccagtttcctttgaatggtctaatgactcttcagtcatctttactaattggcacacacttgagccccacatttttccaaatagaagccagctgtgtgtctcagcagagcagtctgagggacactggaaagtcaaaaattgtgaagaaagacttttttacatttgtaaaaaagcaggccatgtcctctctgatgctgaatcaggatgtcaagagggatgggagagacatggtggattctgttacaaaattgacacagtccttcgaagctttgaccaagcttccagcggttattactgtcctcctgcacttgtaaccattacaaacaggtttgaacaggcttttattaccagtttgatcagtagtgtggtaaaaatgaaggacagttatttttggatagctcttcaggaccaaaatgatacgggagaatacacttggaagccagtagggcagaaacccgagccggtgcagtacacacactggaacacacaccagccgcgctacagtggtggctgtgttgccatgcgaggaaggcatccacttggtcgctgggaagtgaagcactgtcggcactttaaggcaatgtccttgtgcaagcagccagttgaaaatcaggaaaaagcagagtatgaagagagatggccctttcacccctgctatttggactgggagtcagagcctggtctggccagttgcttcaaggtatttcatagtgaaaaagttctgatgaaaagaacatggagagaagctgaagcattttgcgaagaatttggagctcatcttgcaagctttgcccatattgaggaagagaattttgtgaatgagctcttacattcaaaatttaattggacagaagaaaggcagttctggattggatttaataaaagaaacccactgaatgccggctcatgggagtggtctgatagaactcctgttgtctcttcgtttttagacaacacttattttggagaagatgcaagaaactgtgctgtttataaggcaaacaaaacattgctgcccttacactgtggttccaaacgtgaatggatatgcaaaatcccaagagatgtgaaacccaagattccgttctggtaccagtacgatgtaccctggctcttttatcaggatgcagaatacctttttcatacctttgcctcagaatggttgaactttgagtttgtctgtagctggctgcacagtgatcttctcacaattcattctgcacatgagcaagaattcatccacagcaaaataaaagcgctatcaaagtatggtgcaagttggtggattggacttcaagaagaaagagccaatgatgaatttcgctggagagatggaacaccagtgatataccagaactgggacacaggaagagaaagaactgtgaataatcagagccagagatgtggctttatttcttctataacaggactctggggtagtgaagagtgttcagtttctatgcctagtatctgtaagcgaaaaaaggtttggctcatagagaaaaagaaagatacaccaaaacaacatggaacgtgtcccaaaggatggctatattttaactataagtgccttctgctgaatatccccaaagacccaagcagttggaagaactggacgcatgctcaacatttctgtgctgaagaaggggggaccctggtcgccattgaaagtgaggtggagcaagctttcattactatgaatctttttggccagaccaccagtgtgtggataggtttacaaaatgatgattatgaaacatggctaaatggaaagcctgtggtatattctaactggtctccatttgatataataaatattccaagtcacaataccactgaagttcagaaacacattcctctctgtgccttactctcaagtaatcctaattttcatttcactggaaaatggtattttgaagactgtggaaaggaaggctatgggtttgtttgtgaaaaaatgcaagatacttctggacacggtgtaaatacatctgatatgtatccaatgcccaataccttagaatatggaaacagaacttacaaaataattaatgcaaatatgacttggtatgcagcaataaaaacctgcctgatgcacaaagcacaactggtcagcatcacagaccagtatcaccagtccttcctcactgttgtcctcaaccggctaggatatgcccactggattggactgttcaccacagataatggtcttaattttgactggtctgatggcaccaaatcttctttcactttttggaaagatgaggagtcctccctccttggtgactgcgtttttgccgacagcaacggacgctggcatagcacagcctgcgagtcatttctgcaaggtgccatttgtcatgtgccacctgaaacaagacaatctgaacacccagagttgtgctcagaaacatctattccctggataaaatttaaaagtaattgctacagtttttctacagtcctagacagtatgagttttgaggctgctcatgaattttgcaaaaaggaaggttctaatcttttaacaatcaaggatgaggctgaaaatgcatttctcctagaagagctgtttgcttttggttcttctgtccagatggtttggttgaatgctcaatttgatggtaacaatgaaaccataaagtggtttgatggaactcccacagaccagtcaaactggggcattcggaagccagacacagactacttcaagccccatcattgtgttgccttgaggatccctgaaggattatggcagctatccccgtgtcaagaaaaaaaaggctttatatgtaaaatggaggcagatattcacactgcagaggcgctgccagaaaaaggaccaagtcacagcatcattcctcttgcggttgtactgacactgatagtcattgtggccatttgcacactttccttctgcatatacaagcataacggtggcttcttcaggagacttgcagggtttcggaatccttactatcctgcaaccaactttagtacagtatatttagaagaaaatattctcatttctgatcttgagaagagtgaccaataataatgaggtcagagaatgccacagacaccagggtaagtaaagaagactaaacaggagtctcatctgtctttccctttacagcacagatgccattagaatgtgaattgggtcactattttaattattcttgaagtgattactggttttgaatcttaaccaaatcagatgggttttgatttattcatttccctaaactgtgatccattcttaaaaggggtaaattatgcattggttatttttcagaaagacaagaactattaaaagaaactccctattg

SEQ ID NO: 12235 - DNA, 9530 bp, Homo sapiens
cggggccagggcagcgcggactcgcgtcccgtggagcgttccaggcgggcgcgcggctttctccccagacccaccgagtggcggcggaggcgagatgcgcgggggcgtgctcctggtcttgctgctgtgtgtcgccgcgcagtgccggcagagaggcctgtttcctgccattctcaatcttgccagcaatgctcacatcagcaccaatgccacctgtggcgagaaggggccggagatgttctgcaaacttgtggagcatgtgccaggtcggcccgtccgaaacccacagtgccggatctgtgatggcaacagcgcaaaccccagagaacgccatccaatatcacatgccatagatggcaccaataactggtggcaaagtcccagcattcagaatgggagagaatatcactgggtcacaatcactctggacttaagacaggtctttcaagttgcatatgtcatcattaaagctgccaatgcccctcgacctggaaactggattttggagcgttctctggatggcaccacgttcagcccctggcagtattatgcagtcagcgactcagagtgtttgtctcgttacaatataactccaagacgagggccacccacctacagggctgatgatgaagtgatctgcacctcctattattccagattggtgccacttgagcatggagagattcatacatcactcatcaatggcagaccaagcgctgacgatctttcacccaagttgttggaattcacttctgcacgatatattcgccttcgcttgcaacgcattagaacgctcaatgcagatctcatgacccttagccaccgggaacctaaagaactggatcctattgttaccagacgctattattattcaataaaggacatttctgttggaggcatgtgtatctgctatggccatgctagtagctgcccatgggatgaaactacaaagaaactgcagtgtcaatgtgagcataatacttgcggggagagctgtaacaggtgctgtcctgggtaccatcagcagccctggaggccgggaaccgtgtcctccggcaatacatgtgaagcatgtaattgtcacaataaagccaaagactgttactatgatgaaagtgttgcaaagcagaagaaaagtttgaatactgctggacagttcagaggaggaggggtttgcataaattgcttgcagaacaccatgggaatcaactgtgaaacctgtattgatggatattatagaccacacaaagtgtctccttatgaggatgagccttgccgcccctgtaattgtgaccctgtggggtccctcagttctgtctgtattaaggatgacctccattctgacttacacaatgggaagcagccaggtcagtgcccatgtaaggaaggttatacaggagaaaaatgtgatcgctgccaacttggctataaggattacccgacctgtgtctcctgtgggtgcaacccagtgggcagtgccagtgatgagccctgcacagggccctgtgtttgtaaggaaaacgttgaggggaaggcctgtgatcgctgcaagccaggattctataacttgaaggaaaaaaacccccggggctgctccgagtgcttctgctttggcgtttctgatgtctgcagcagcctctcttggcctgttggtcaggtaaacagtatgtccgggtggctggtcaccgacttgatcagtcccaggaagatcccgtctcagcaagatgcactaggcgggcgccatcaggtcagcatcaacaacaccgcggtcatgcagagactggctcccaagtactactgggcagcccccgaggcctaccttggaaataagctgactgcgtttggcggattcctgaaatacacggtgtcctacgatattccggtagagacggtagacagtaacctcatgtcgcatgctgacgtcatcattaagggaaacggactcactttaagcacacaggctgagggtctgtcattgcagccttatgaagagtacctaaacgtggttagacttgtgcctgaaaacttccaagattttcacagcaaaaggcagattgatcgtgaccagctgatgactgtccttgccaatgtgacacatcttttgatcagagccaactacaattctgcaaaaatggctctttacaggttggagtccgtctctctggacatagccagctctaatgccatcgacctggtggtggccgctgatgtggagcactgtgaatgtccgcaaggctacacagggacctcctgtgagtcgtgcctctctggctattaccgcgtggatggaatactctttggaggaatttgtcaaccctgtgaatgccacggccatgcagctgagtgtaatgttcacggcgtttgcattgcgtgtgcgcacaacaccaccggcgtccactgtgagcagtgcttgcccggcttctacggggagccttcccgagggacacctggggactgccagccctgcgcctgccctctcaccatagcctccaacaatttcagccccacctgccacctcaatgatggagatgaagtggtctgtgactggtgtgccccgggctactcaggagcttggtgtgagagatgtgcagatggttactatggaaacccaacagtgcctggcgaatcttgtgttccctgtgactgcagcggcaacgtggacccctcggaggctggtcactgtgactcagtcaccggggagtgcctgaagtgcctggggaacacagatggcgcccactgtgaaaggtgtgctgacgggttctatggggacgctgtgacagccaagaactgccgcgcctgtgaatgccatgtgaaaggctcccattctgccgtgtgccatcttgagaccgggctctgtgactgcaaaccaaacgtgactggacagcagtgtgaccagtgcttgcatggctattatgggctggactcaggccatggctgccggccctgcaactgcagcgtggcaggctccgtgtcagatggctgcacggatgaaggccagtgtcactgtgtcccaggtgtggcagggaaaaggtgtgacaggtgtgcccatggcttctacgcctaccaggatggtagctgtacaccctgtgactgcccacacactcagaatacctgcgacccagaaactggagagtgtgtctgcccccctcacacacagggtgtgaagtgtgaagaatgtgaggatgggcactggggctacgatgcggaggtggggtgccaggcctgcaattgcagtctcgtggggtcgactcatcatcggtgcgatgtggtcaccggccattgccagtgcaagtcaaaatttggtggccgggcctgcgatcagtgttccttgggttacagagactttcccgactgtgttccctgtgactgtgacctgagggggacgtcgggggacgcctgcaacctggagcagggtctctgcggctgtgtggaggaaaccggggcctgcccttgcaaggaaaatgtctttggtcctcagtgcaacgaatgtcgagagggcaccttcgctctccgcgcagacaaccccctgggctgcagcccgtgcttctgctccgggctgtcccacctctgctcagagctggaggactacgtgaggaccccagtaacgctgggctccgatcagcctcttctgcgtgtggtttctcagagtaacttgaggggcacgaccgagggggtttactaccaggcccccgacttcctgctggatgccgccaccgtccggcagcacatccgtgcagagccgttttactggcggctgccgcagcagttccaaggagaccagctcatggcctatggtggcaaactgaagtacagcgtggccttctattctttggatggcgtcggcacctccaattttgagcctcaagttctcatcaaaggtggtcggatcagaaagcaagtcatttacatggatgcaccagccccagagaatggagtgagacaggaacaagaagtagcaatgagagagaatttttggaaatattttaactctgtttctgaaaaacctgtcacgcgagaggattttatgtctgtcctcagcgatattgagtacatcctcatcaaggcatcgtatggtcaaggattacagcagagcagaatctcagacatttcaatggaggttggcagaaaggctgaaaagctgcacccagaagaagaggttgcatctcttttagagaattgtgtctgtcctcctggcactgtgggattctcatgtcaggactgcgcccctgggtaccacagagggaagctcccagcagggagtgacaggggaccacgccctctggttgctccttgtgttccctgcagttgcaacaaccacagtgacacctgtgaccccaacaccgggaagtgtctgaactgtggcgataacacagcaggtgaccattgtgatgtgtgtacttctggctactacgggaaggtgactggctcagcaagtgactgtgctctgtgtgcctgtcctcacagccctcctgccagttttagtcccacttgtgtcttggaaggggaccacgatttccgttgtgacgcctgtctcctgggctatgaaggaaaacactgtgaaaggtgctcctcaagctattatgggaaccctcaaacaccaggtggcagttgccagaagtgtgactgcaacccgcacggctctgtccacggtgactgtgaccgcacatctgggcagtgcgtttgcaggctgggggcctcggggctccggtgcgatgagtgtgaaccgaggcacattctgatggaaacagattgtgtttcctgtgatgatgagtgtgtaggtgtgctgctgaatgacttggatgagattggtgatgccgttctttctctgaacctcactggcattatccctgtcccatatggaattttgtcaaacctggaaaatacaactaaatatctccaggaatctttattaaaagaaaatatgcaaaaggacctgggaaaaattaagcttgaaggtgttgcagaagaaacggacaacctgcaaaagaagctcactaggatgttagcgagtacccaaaaggtgaatagggcaactgagagaatcttcaaggagagtcaagacctggccatagccattgagaggctgcagatgagcatcacagaaattatggaaaagacaactttaaatcagactttggatgaagatttcctactacccaattctactcttcagaacatgcaacagaatggtacatctttgctagaaatcatgcagataagagacttcacacagttgcaccaaaatgccacccttgaactcaaggctgctgaagatttattgtcacaaattcaggaaaattaccagaagccgctggaagaattggaggtattgaaagaagcagcaagccacgtcctttcaaagcacaacaatgaactaaaggcggctgaggcgctcgtgagggaagctgaggcaaagatgcaggaaagcaaccacctgctgctcatggtcaatgctaatctgagagaattcagtgataaaaagctgcatgttcaagaagaacaaaatctgacctcagagctcattgtccaaggaagaggattgatagatgctgctgctgcacaaacagatgctgtacaagatgctctagagcacttagaggatcaccaggataagctacttttatggtctgccaaaatcaggcaccacatagatgacctggtcatgcacatgtcccaaaggaacgcagtcgacctggtctacagagctgaggaccatgccgctgagttccagagactagcagatgttctgtacagtggccttgaaaacatcagaaatgtgtccctgaatgccaccagtgcagcctatgtccattacaacatccagagcctgattgaagaatcggaggaactggccagagatgctcacaggactgtgactgagacgagcctgctctcagaatcccttgtttctaacgggaaagcggccgtgcagcgcagctccagatttctaaaagaaggcaacaacctcagcaggaagcttccaggtattgcattggaactgagtgaattgagaaataagacaaacagatttcaagagaatgctgttgaaattaccaggcaaaccaatgaatcactcttgatacttagagcaattcctaaaggtataagagacaagggagccaaaaccaaagagctggccacgtctgcaagccagagcgcggtgagcacgctgagggacgtggcggggctgagccaggagctgctgaacacatctgccagcctgtccagggtcaacaccacattacgagagacacaccagcttctgcaggactccaccatggccactctgttggctggaagaaaagtcaaagacgtggaaattcaagccaaccttttgtttgatcggttgaagcctttgaagatgttagaggagaatctgagcagaaacctatcagaaattaaactgttgatcagccaggcccgcaaacaagcagcttctattaaagtcgccgtgtctgcagacagagattgcatccgggcctaccagcctcagatttcctctaccaactacaataccttaacactaaatgttaagacacaggaacccgataatcttctcttctacctcggtagcagcaccgcttctgatttccttgcagtggagatgcggcgagggagagtggccttcctgtgggacctgggctccgggtccacacgcttggagtttccagactttcccattgatgacaacagatggcacagtatccatgtagccagatttggaaacattggttcactgagtgtaaaggaaatgagctcaaatcaaaagtcaccaacaaaaacaagtaaatcccctgggacagctaatgttctggatgtaaacaattcaacactcatgtttgttggaggtcttggaggacaaatcaagaaatctcctgctgtgaaggttactcattttaaaggctgcttgggggaggccttcctgaatggaaaatccataggcctatggaactatattgaaagggaaggcaagtgccgtgggtgcttcggaagctcccagaatgaagacccttccttccattttgacgggagtgggtactctgtcgtggagaagtcacttccggctaccgtgacccagataatcatgctttttaataccttttcacctaatggacttcttctctacctgggttcatacggcacaaaagactttttatccatcgagctgtttcgtggcagagtgaaggttatgactgacctgggttcaggacccattacccttttgacagacagacgttataacaatggaacctggtacaaaattgccttccagcgaaaccggaagcaaggagtgctagcagttatcgatgcctataacaccagtaataaagaaaccaagcagggcgagactccgggagcatcttctgacctcaaccgcctagacaaggacccgatttatgtgggtggattaccaaggtcaagagttgtaaggagaggtgtcaccaccaaaagctttgtgggctgcatcaagaacctggaaatatccagatcaacctttgacttactcagaaattcctatggagtgagaaaaggctgtttactggagcccatccggagtgttagcttcctgaaaggcggctacattgaattgccacccaaatctttgtcaccagaatcagaatggctggtaacatttgccaccacgaacagcagtggcatcatcctggctgccctcggcggggatgtggagaagcggggtgatcgtgaggaagcacacgtgcccttcttttccgtcatgctgatcggaggcaacattgaggtacatgtcaatcctggggatgggacaggcctgagaaaagctctcctgcacgctcccacgggtacctgcagtgatggacaagcgcattccatctccttggtcaggaatcggagaattatcactgtccaattggatgagaacaatcctgtggaaatgaagttgggcacattagtagaaagcaggacgataaatgtgtccaatctgtacgtcgggggaattccagagggagaggggacgtcactgctcacaatgagaagatcgttccatggctgtatcaaaaacctgatcttcaatttggaacttttggatttcaacagtgcagttggccatgagcaagtcgacctggacacctgctggctgtcagaaaggcctaagctggctcccgatgcagaggacagcaagctcttgccagagccccgggcttttccagaacagtgtgtggtggatgcagctctggagtacgttcccggcgctcaccagtttggtctcacacaaaacagccatttcatcttgccttttaatcagtcggctgtcagaaagaagctctcggttgagctaagcatccgcacgttcgcctccagcggcctgatttactacatggctcatcagaaccaagcagactacgctgtgctccagctgcacgggggccgcctccacttcatgtttgaccttggcaaaggcagaacaaaggtctctcaccctgcactgctcagtgatggcaagtggcacacggtcaagacagactatgttaaaagaaaaggcttcataactgtcgacggccgagagtctcccatggtgactgtggtgggagatggaaccatgctggatgtggagggtttgttctacctaggaggcctgccctcccagtaccaggccaggaaaattggaaatatcacccacagcatccctgcctgcattggggatgtgacggttaacagcaaacagctggacaaggacagcccggtgtctgccttcacggtgaacaggtgctacgcagtggcccaggaaggaacatactttgacggaagcggatatgcagctcttgtcaaagagggctacaaagtccagtcagatgtgaacatcacactggagtttcgaacctcctcgcagaatggcgtcctcctggggatcagcactgccaaagtggatgccattggactagagcttgtggacggcaaggtcttgttccatgtcaacaatggtgctggcaggataacagctgcatatgagcccaaaaccgccactgtgctctgtgatggaaaatggcacactcttcaagctaacaaaagcaaacaccgtatcactctgattgttgacgggaacgcagttggcgctgaaagtccacacacccagtctacctcagtggacaccaacaatcccatttatgttggtggctatcctgctggtgtgaagcaaaaatgcctgcgcagccagacctcgttccgcgggtgtttgaggaagctagctctgattaagagcccgcaggtgcagtcctttgacttcagcagagcgttcgaactgcacggagttttccttcattcctgtcctgggaccgagtcctgaacttcaagcagaatcctcagttggaatcattgctaatattttgaggagaagtgtatgtgtgaattaagaatctcttcagttcatatttcatttccaactcaggttaagtgtttctggggagagatgttgtgtttacgttacactaaaaccacatgtgcaacaaatacctccattaaatggtctaaaatgtaaaaaaaaaaaaaaaaaa

SEQ ID NO: 12236 - DNA, 5718 bp, Homo sapiens
ctcctgaggctgccagcagccagcagtgactgcccgccctatctgggacccaggatcgctctgtgagcaacttggagccagagaggagatcaacaaggaggaggagagagccggcccctcagccctgctgcccagcagcagcctgtgctcgccctgcccaacgcagacagccagacccagggcggcccctctggcggctctgctcctcccgaaggatgcttggggagtgaggcgaagctgggccgctcctctcccctacagcagcccccttcctccatccctctgttctcctgagccttcaggagcctgcaccagtcctgcctgtccttctactcagctgttacccactctgggaccagcagtctttctgataactgggagagggcagtaaggaggacttcctggagggggtgactgtccagagcctggaactgtgcccacaccagaagccatcagcagcaaggacaccatgcggcttccgggtgcgatgccagctctggccctcaaaggcgagctgctgttgctgtctctcctgttacttctggaaccacagatctctcagggcctggtcgtcacacccccggggccagagcttgtcctcaatgtctccagcaccttcgttctgacctgctcgggttcagctccggtggtgtgggaacggatgtcccaggagcccccacaggaaatggccaaggcccaggatggcaccttctccagcgtgctcacactgaccaacctcactgggctagacacgggagaatacttttgcacccacaatgactcccgtggactggagaccgatgagcggaaacggctctacatctttgtgccagatcccaccgtgggcttcctccctaatgatgccgaggaactattcatctttctcacggaaataactgagatcaccattccatgccgagtaacagacccacagctggtggtgacactgcacgagaagaaaggggacgttgcactgcctgtcccctatgatcaccaacgtggcttttctggtatctttgaggacagaagctacatctgcaaaaccaccattggggacagggaggtggattctgatgcctactatgtctacagactccaggtgtcatccatcaacgtctctgtgaacgcagtgcagactgtggtccgccagggtgagaacatcaccctcatgtgcattgtgatcgggaatgaggtggtcaacttcgagtggacatacccccgcaaagaaagtgggcggctggtggagccggtgactgacttcctcttggatatgccttaccacatccgctccatcctgcacatccccagtgccgagttagaagactcggggacctacacctgcaatgtgacggagagtgtgaatgaccatcaggatgaaaaggccatcaacatcaccgtggttgagagcggctacgtgcggctcctgggagaggtgggcacactacaatttgctgagctgcatcggagccggacactgcaggtagtgttcgaggcctacccaccgcccactgtcctgtggttcaaagacaaccgcaccctgggcgactccagcgctggcgaaatcgccctgtccacgcgcaacgtgtcggagacccggtatgtgtcagagctgacactggttcgcgtgaaggtggcagaggctggccactacaccatgcgggccttccatgaggatgctgaggtccagctctccttccagctacagatcaatgtccctgtccgagtgctggagctaagtgagagccaccctgacagtggggaacagacagtccgctgtcgtggccggggcatgccccagccgaacatcatctggtctgcctgcagagacctcaaaaggtgtccacgtgagctgccgcccacgctgctggggaacagttccgaagaggagagccagctggagactaacgtgacgtactgggaggaggagcaggagtttgaggtggtgagcacactgcgtctgcagcacgtggatcggccactgtcggtgcgctgcacgctgcgcaacgctgtgggccaggacacgcaggaggtcatcgtggtgccacactccttgccctttaaggtggtggtgatctcagccatcctggccctggtggtgctcaccatcatctcccttatcatcctcatcatgctttggcagaagaagccacgttacgagatccgatggaaggtgattgagtctgtgagctctgacggccatgagtacatctacgtggaccccatgcagctgccctatgactccacgtgggagctgccgcgggaccagcttgtgctgggacgcaccctcggctctggggcctttgggcaggtggtggaggccacggctcatggcctgagccattctcaggccacgatgaaagtggccgtcaagatgcttaaatccacagcccgcagcagtgagaagcaagcccttatgtcggagctgaagatcatgagtcaccttgggccccacctgaacgtggtcaacctgttgggggcctgcaccaaaggaggacccatctatatcatcactgagtactgccgctacggagacctggtggactacctgcaccgcaacaaacacaccttcctgcagcaccactccgacaagcgccgcccgcccagcgcggagctctacagcaatgctctgcccgttgggctccccctgcccagccatgtgtccttgaccggggagagcgacggtggctacatggacatgagcaaggacgagtcggtggactatgtgcccatgctggacatgaaaggagacgtcaaatatgcagacatcgagtcctccaactacatggccccttacgataactacgttccctctgcccctgagaggacctgccgagcaactttgatcaacgagtctccagtgctaagctacatggacctcgtgggcttcagctaccaggtggccaatggcatggagtttctggcctccaagaactgcgtccacagagacctggcggctaggaacgtgctcatctgtgaaggcaagctggtcaagatctgtgactttggcctggctcgagacatcatgcgggactcgaattacatctccaaaggcagcacctttttgcctttaaagtggatggctccggagagcatcttcaacagcctctacaccaccctgagcgacgtgtggtccttcgggatcctgctctgggagatcttcaccttgggtggcaccccttacccagagctgcccatgaacgagcagttctacaatgccatcaaacggggttaccgcatggcccagcctgcccatgcctccgacgagatctatgagatcatgcagaagtgctgggaagagaagtttgagattcggccccccttctcccagctggtgctgcttctcgagagactgttgggcgaaggttacaaaaagaagtaccagcaggtggatgaggagtttctgaggagtgaccacccagccatccttcggtcccaggcccgcttgcctgggttccatggcctccgatctcccctggacaccagctccgtcctctatactgccgtgcagcccaatgagggtgacaacgactatatcatccccctgcctgaccccaaacccgaggttgctgacgagggcccactggagggttcccccagcctagccagctccaccctgaatgaagtcaacacctcctcaaccatctcctgtgacagccccctggagccccaggacgaaccagagccagagccccagcttgagctccaggtggagccggagccagagctggaacagttgccggattcggggtgccctgcgcctcgggcggaagcagaggatagcttcctgtagggggctggcccctaccctgccctgcctgaagctccccccctgccagcacccagcatctcctggcctggcctgaccgggcttcctgtcagccaggctgcccttatcagctgtccccttctggaagctttctgctcctgacgtgttgtgccccaaaccctggggctggcttaggaggcaagaaaactgcaggggccgtgaccagccctctgcctccagggaggccaactgactctgagccagggttcccccagggaactcagttttcccatatgtaagatgggaaagttaggcttgatgacccagaatctaggattctctccctggctgacaggtggggagaccgaatccctccctgggaagattcttggagttactgaggtggtaaattaacttttttctgttcagccagctacccctcaaggaatcatagctctctcctcgcacttttatccacccaggagctagggaagagaccctagcctccctggctgctggctgagctagggcctagccttgagcagtgttgcctcatccagaagaaagccagtctcctccctatgatgccagtccctgcgttccctggcccgagctggtctggggccattaggcagcctaattaatgctggaggctgagccaagtacaggacacccccagcctgcagcccttgcccagggcacttggagcacacgcagccatagcaagtgcctgtgtccctgtccttcaggcccatcagtcctggggctttttctttatcaccctcagtcttaatccatccaccagagtctagaaggccagacgggccccgcatctgtgatgagaatgtaaatgtgccagtgtggagtggccacgtgtgtgtgccagtatatggccctggctctgcattggacctgctatgaggctttggaggaatccctcaccctctctgggcctcagtttccccttcaaaaaatgaataagtcggacttattaactctgagtgccttgccagcactaacattctagagtattccaggtggttgcacatttgtccagatgaagcaaggccatataccctaaacttccatcctgggggtcagctgggctcctgggagattccagatcacacatcacactctggggactcaggaaccatgccccttccccaggcccccagcaagtctcaagaacacagctgcacaggccttgacttagagtgacagccggtgtcctggaaagcccccagcagctgccccagggacatgggaagaccacgggacctctttcactacccacgatgacctccgggggtatcctgggcaaaagggacaaagagggcaaatgagatcacctcctgcagcccaccactccagcacctgtgccgaggtctgcgtcgaagacagaatggacagtgaggacagttatgtcttgtaaaagacaagaagcttcagatgggtaccccaagaaggatgtgagaggtgggcgctttggaggtttgcccctcacccaccagctgccccatccctgaggcagcgctccatgggggtatggttttgtcactgcccagacctagcagtgacatctcattgtccccagcccagtgggcattggaggtgccaggggagtcagggttgtagccaagacgcccccgcacggggagggttgggaagggggtgcaggaagctcaacccctctgggcaccaaccctgcattgcaggttggcaccttacttccctgggatccccagagttggtccaaggagggagagtgggttctcaatacggtaccaaagatataatcacctaggtttacaaatatttttaggactcacgttaactcacatttatacagcagaaatgctattttgtatgctgttaagtttttctatctgtgtacttttttttaagggaaagattttaatattaaacctggtgcttctcactcacaaaaa

SEQ ID NO: 12237 - DNA, 3692 bp, Homo sapiens
ggctgcccgagcgagcgttcggacctcgcaccccgcgcgccccgcgccgccgccgccgccggcttttgttgtctccgcctcctcggccgccgccgcctctggaccgcgagccgcgcgcgccgggaccttggctctgcccttcgcgggcgggaactgcgcaggacccggccaggatccgagagaggcgcgggcgggtggccgggggcgccgccggccccgccatggagctccgggcccgaggctggtggctgctatgtgcggccgcagcgctggtcgcctgcgcccgcggggacccggccagcaagagccggagctgcggcgaggtccgccagatctacggagccaagggcttcagcctgagcgacgtgccccaggcggagatctcgggtgagcacctgcggatctgtccccagggctacacctgctgcaccagcgagatggaggagaacctggccaaccgcagccatgccgagctggagaccgcgctccgggacagcagccgcgtcctgcaggccatgcttgccacccagctgcgcagcttcgatgaccacttccagcacctgctgaacgactcggagcggacgctgcaggccaccttccccggcgccttcggagagctgtacacgcagaacgcgagggccttccgggacctgtactcagagctgcgcctgtactaccgcggtgccaacctgcacctggaggagacgctggccgagttctgggcccgcctgctcgagcgcctcttcaagcagctgcacccccagctgctgctgcctgatgactacctggactgcctgggcaagcaggccgaggcgctgcggcccttcggggaggccccgagagagctgcgcctgcgggccacccgtgccttcgtggctgctcgctcctttgtgcagggcctgggcgtggccagcgacgtggtccggaaagtggctcaggtccccctgggcccggagtgctcgagagctgtcatgaagctggtctactgtgctcactgcctgggagtccccggcgccaggccctgccctgactattgccgaaatgtgctcaagggctgccttgccaaccaggccgacctggacgccgagtggaggaacctcctggactccatggtgctcatcaccgacaagttctggggtacatcgggtgtggagagtgtcatcggcagcgtgcacacgtggctggcggaggccatcaacgccctccaggacaacagggacacgctcacggccaaggtcatccagggctgcgggaaccccaaggtcaacccccagggccctgggcctgaggagaagcggcgccggggcaagctggccccgcgggagaggccaccttcaggcacgctggagaagctggtctctgaagccaaggcccagctccgcgacgtccaggacttctggatcagcctcccagggacactgtgcagtgagaagatggccctgagcactgccagtgatgaccgctgctggaacgggatggccagaggccggtacctccccgaggtcatgggtgacggcctggccaaccagatcaacaaccccgaggtggaggtggacatcaccaagccggacatgaccatccggcagcagatcatgcagctgaagatcatgaccaaccggctgcgcagcgcctacaacggcaacgacgtggacttccaggacgccagtgacgacggcagcggctcgggcagcggtgatggctgtctggatgacctctgcggccggaaggtcagcaggaagagctccagctcccggacgcccttgacccatgccctcccaggcctgtcagagcaggaaggacagaagacctcggctgccagctgcccccagcccccgaccttcctcctgcccctcctcctcttcctggcccttacagtagccaggccccggtggcggtaactgccccaaggccccagggacagaggccaaggactgactttgccaaaaatacaacacagacgatatttaattcacctcagcctggagaggcctggggtgggacagggagggccggcggctctgagcaggggcaggcgcagaggtcccagccccaggcctggcctcgcctgcctttctgccttttaattttgtatgaggtcctcaggtcagctgggagccagtgtgcccaaaagccatgtatttcagggacctcaggggcacctccggctgcctagccctccccccagctccctgcaccgccgcagaagcagcccctcgaggcctacagaggaggcctcaaagcaacccgctggagcccacagcgagcctgtgccttcctccccgcctcctcccactgggactcccagcagagcccaccagccagccctggcccaccccccagcctccagagaagccccgcacgggctgtctgggtgtccgccatccagggtctggcagagcctctgagatgatgcatgatgccctcccctcagcgcaggctgcagagcccggccccacctccctgcgcccttgaggggccccagcgtctgcagggtgacgcctgagacagcaccactgctgaggagtctgaggactgtcctcccacagaccctgcagtgaggggccctccatgcgcagatgaggggccactgacccacctgcgcttctgctggaggaggggaagctgggcccaaaggcccagggaggcagcgtgggctctgccaatgtgggctgcccctcgcacacagggctcacagggcaggccttgctggggtccagggctgttggaggaccccgagggctgaggagcagccaggacccgcctgctcccatcctcacccagatcaggaaccagggcctccctgttcacggtgacacaggtcagggctcagagtgaccctcggctgtcacctgctcacagggatgctggtggctggtgagaccccgcactgcacacgggaatgcctaggtcccttcccgacccagccagctgcactgcagggcacggggacctggatagttaagggcttttccaaacatgcatccatttactgacacttcctgtccttgttcatggagagctgttcgctcctcccagatggcttcggaggcccgcagggcccaccttggaccctggtgacctcctgtcactcactgaggccatcagggccctgccccaggcctggacgggccctccttccctcctgtgccccagctgccaggtggccctggggaggggtggtgtggtgttgggaaggggtcctgcagggggaggaggacttggagggtctgggggcagctgtcctgaaccgactgaccctgaggaggccgcttagtgctgctttgcttttcatcaccgtcccgcacagtggacggaggtccccggttgctggtcaggtccccatggcttgttctctggaacctgactttagatgttttgggatcaggagcccccaacacaggcaagtccaccccataataaccctgccagtgccagggtgggctggggactctggcacagtgatgccgggcgccaggacagcagcactcccgctgcacacagacggcctaggggtggcgctcagaccccaccctacgctcatctctggaaggggcagccctgagtggtcactggtcagggcagtggccaagcctgctgtgtccttcctccacaaggtccccccaccgctcagtgtcagcgggtgacgtgtgttcttttgagtccttgtatgaataaaaggctggaaacctaaa

SEQ ID NO: 12238 - DNA, 1033 bp, Homo sapiens
cgggcgatgcctccgctctgggccctgctggccctcggctgcctgcggttcggctcggctgtgaacctgcagccccaactggccagtgtgactttcgccaccaacaaccccacacttaccactgtggccttggaaaagcctctctgcatgtttgacagcaaagaggccctcactggcacccacgaggtctacctgtatgtcctggtcgactcagccatttccaggaatgcctcagtgcaagacagcaccaacaccccactgggctcaacgttcctacaaacagagggtgggaggacaggtccctacaaagctgtggcctttgacctgatcccctgcagtgacctgcccagcctggatgccattggggatgtgtccaaggcctcacagatcctgaatgcctacctggtcagggtgggtgccaacgggacctgcctgtgggatcccaacttccagggcctctgtaacgcacccctgtcggcagccacggagtacaggttcaagtatgtcctggtcaatatgtccacgggcttggtagaggaccagaccctgtggtcagaccccatccgcaccaaccagctcaccccatactcgacgatcgacacgtggccaggccggcggagcggaggcatgatcgtcatcacttccatcctgggctccctgcccttctttctacttgtgggttttgctggcgccattgccctcagcctcgtggacatggggagttctgatggggaaacgactcacgactcccaaatcactcaggaggctgttcccaagtcgctgggggcctcggagtcttcctacacgtccgtgaaccgggggccgccactggacagggctgaggtgtattccagcaagctccaagactgagcccagcaccacccctgggcagcagcatcctcctctctggccttgccccaggccctgcagcggtggttgtcacaccctgacttcagggaaggtgaaacagggcttgtccctccaactgcaggaaaacccttaataaaatcttctgatgagttctaaaaaaaaa

SEQ ID NO: 12239 - DNA, 2491 bp, Homo sapiens
ccggcggcgctcggggagggagccagcagcctagggcctaggcccgggccaccatggcgctgcctccaggcccagccgccctccggcacacactgctgctcctgccagcccttctgagctcaggttggggggagttggagccacaaatagatggtcagacctgggctgagcgggcacttcgggagaatgaacgccacgccttcacctgccgggtggcaggggggcctggcacccccagattggcctggtatctggatggacagctgcaggaggccagcacctcaagactgctgagcgtgggaggggaggccttctctggaggcaccagcaccttcactgtcactgcccatcgggcccagcatgagctcaactgctctctgcaggaccccagaagtggccgatcagccaacgcctctgtcatccttaatgtgcaattcaagccagagattgcccaagtcggcgccaagtaccaggaagctcagggcccaggcctcctggttgtcctgtttgccctggtgcgtgccaacccgccggccaatgtcacctggatcgaccaggatgggccagtgactgtcaacacctctgacttcctggtgctggatgcgcagaactacccctggctcaccaaccacacggtgcagctgcagctccgcagcctggcacacaacctctcggtggtggccaccaatgacgtgggtgtcaccagtgcgtcgcttccagccccagggcttctggctacccgggtggaagtgccactgctgggcattgttgtggctgctgggcttgcactgggcaccctcgtggggttcagcaccttggtggcctgcctggtctgcagaaaagagaagaaaaccaaaggcccctcccggcacccatctctgatatcaagtgactccaacaacctaaaactcaacaacgtgcgcctgccacgggagaacatgtccctcccgtccaaccttcagctcaatgacctcactccagattccagagcagtgaaaccagcagaccggcagatggctcagaacaacagccggccagagcttctggacccggagcccggcggcctcctcaccagccaaggtttcatccgcctcccagtgctgggctatatctatcgagtgtccagcgtgagcagtgatgagatctggctctgagccgagggcgagacaggagtattctcttggcctctggacaccctcccattcctccaaggcatcctctacctagctaggtcaccaacgtgaagaagttatgccactgccacttttgcttgccctcctggctggggtgccctccatgtcatgcacgtgatgcatttcactgggctgtaacccgcaggggcacaggtatctttggcaaggctaccagttggacgtaagcccctcatgctgactcagggtgggccctgcatgtgatgactgggcccttccagagggagctctttggccaggggtgttcagatgtcatccagcatccaagtgtggcatggcctgctgtataccccaccccagtactccacagcaccttgtacagtaggcatgggggcgtgcctgtgtgggggacagggagggccctgcatggattttcctccttcctatgctatgtagccttgttccctcaggtaaaatttaggaccctgctagctgtgcagaacccaattgccctttgcacagaaaccaacccctgacccagcggtaccggccaagcacaaacgtcctttttgctgcacacgtctctgcccttcacttcttctcttctgtccccacctcctcttgggaattctaggttacacgttggaccttctctactacttcactgggcactagacttttctattggcctgtgccatcgcccagtattagcacaagttagggaggaagaggcaggcgatgagtctagtagcacccaggacggcttgtagctatgcatcattttcctacggcgttagcactttaagcacatcccctaggggagggggtgagtgaggggcccagagccctctttgtggcttccccacgtttggccttctgggattcactgtgagtgtcctgagctctcggggttgatggtttttctctcagcatgtctcctccaccacgggaccccagccctgaccaacccatggttgcctcatcagcaggaaggtgcccttcctggaggatggtcgccacaggcacataattcaacagctttaggggaacatggagaaagaaggagaccacataccccaaagtgacctaagaacactttaaaaagcaacatgtaaatgattggaaattaatatagtacagaatatatttttcccttgttgagatcttcttttgtaatgtttttcatgttactgcctagggcggtgctgagcacacagcaagtttaataaacttgactgaattcatttacaaaaaaaaaaaaaaaaaaaaaaaaaaaaaaaaaaaaaaaaaaaaaaaaaaaaaaaaaaaaaaaaaaaaaaaaaaaaaaaaaaaaaaaaaaa

SEQ ID NO: 12240 - DNA, 1528 bp, Homo sapiens
cggcgagcgagcaccttcgacgcggtccggggaccccctcgtcgctgtcctcccgacgcggacccgcgtgccccaggcctcgcgctgcccggccggctcctcgtgtcccactcccggcgcacgccctcccgcgagtcccgggcccctcccgcgcccctcttctcggcgcgcgcgcagcatggcgcccccgcaggtcctcgcgttcgggcttctgcttgccgcggcgacggcgacttttgccgcagctcaggaagaatgtgtctgtgaaaactacaagctggccgtaaactgctttgtgaataataatcgtcaatgccagtgtacttcagttggtgcacaaaatactgtcatttgctcaaagctggctgccaaatgtttggtgatgaaggcagaaatgaatggctcaaaacttgggagaagagcaaaacctgaaggggccctccagaacaatgatgggctttatgatcctgactgcgatgagagcgggctctttaaggccaagcagtgcaacggcacctccacgtgctggtgtgtgaacactgctggggtcagaagaacagacaaggacactgaaataacctgctctgagcgagtgagaacctactggatcatcattgaactaaaacacaaagcaagagaaaaaccttatgatagtaaaagtttgcggactgcacttcagaaggagatcacaacgcgttatcaactggatccaaaatttatcacgagtattttgtatgagaataatgttatcactattgatctggttcaaaattcttctcaaaaaactcagaatgatgtggacatagctgatgtggcttattattttgaaaaagatgttaaaggtgaatccttgtttcattctaagaaaatggacctgacagtaaatggggaacaactggatctggatcctggtcaaactttaatttattatgttgatgaaaaagcacctgaattctcaatgcagggtctaaaagctggtgttattgctgttattgtggttgtggtgatagcagttgttgctggaattgttgtgctggttatttccagaaagaagagaatggcaaagtatgagaaggctgagataaaggagatgggtgagatgcatagggaactcaatgcataactatataatttgaagattatagaagaagggaaatagcaaatggacacaaattacaaatgtgtgtgcgtgggacgaagacatctttgaaggtcatgagtttgttagtttaacatcatatatttgtaatagtgaaacctgtactcaaaatataagcagcttgaaactggctttaccaatcttgaaatttgaccacaagtgtcttatatatgcagatctaatgtaaaatccagaacttggactccatcgttaaaattatttatgtgtaacattcaaatgtgtgcattaaatatgcttccacagtaaaatctgaaaaactgatttgtgattgaaagctgcctttctatttacttgagtcttgtacatacatacttttttatgagctatgaaataaaacattttaaactg

SEQ ID NO: 12241 - DNA, 1498 bp, Homo sapiens
catggcgtgtgttgggttcttcttgctgcagggggcctggccacaggagggagtccacagaaaaccttccttcctggccctcccaggtcacctggtgaaatcagaagagacagtcatcctgcaatgttggtcggatgtcatgtttgagcacttccttctgcacagagaggggaagtttaacaacactttgcacctcattggagagcaccatgatggggtttccaaggccaacttctccattggtcccatgatgcctgtccttgcaggaacctacagatgctacggttctgttcctcactccccctatcagttgtcagctcccagtgaccctctggacatggtgatcataggtctatatgagaaaccttctctctcagcccagccgggccccacggttcaggcaggagagaatgtgaccttgtcctgcagctccatctatccagggaaggggaggcccatgaacgtaggctccctgcagtgcgcagcatcaacggaacattccaggccgactttcctctgggccctgccacccacggagggacctacagatgcttcggctctttccgtgacgctccctacgagtggtcaaactcgagtgatccactgcttgtttccgtcacaggaaacccttcaaatagttggccttcacccactgaaccaagctccaaaaccggtaaccccagacacctacatgttctgattgggacctcagtggtcaaaatccctttcaccatcctcctcttctttctccttcatcgctggtgctccgacaaaaaaaatgctgctgtaatggaccaagagcctgcagggaacagaacagtgaacagcgaggattctgatgaacaagaccatcaggaggtgtcatacgcataattggatcactgtgttttcacacagagaaaaatcactcgcccttctgagaggcccaagacacccccaacagataccagcatgtacatagaacttccaaatgctgagcccagatccaaagttgtcttctgtccacgagcaccacagtcaggccttgaggggatcttctagggagacaacagccctgtctcaaaaccgggttgccagctcccatgtaccagcagctggaatctgaaggcatcagtcttcatcttagggcatcgctcttcctcacaccacgaatctgaacatgcctctctcttgcttacaaatgtctaaggtccccactgcctgctggagagaaaacacactcctttgcttagcccacaattctccatttcacttgacccctgcccacctctccaacctaactggcttacttcctagtctacctgaggctgcaatcacactgaggaactcacaattccaaacatacaagaggctgcctcttaacacagcacttagacacgtgctgttccacctcccttcagactatctttcagccttctgccagcagtaaaacttataaattttttaaataatttcaatgtagttttcccgccttcaaataaacatgtctgccctcatg

SEQ ID NO: 12242 - DNA, 1565 bp, Homo sapiens
gctgagctgagctggggcgcggccgcctgtctgcaccggcagcaccatgtcgctcatggtcatcatcatggcgtgtgttgggttcttcttgctgcagggggcctggccacaggagggagtccacagaaaaccttccttcctggccctcccaggtcacctggtgaaatcagaagagacagtcatcctgcaatgttggtcggatgtcatgtttgagcacttccttctgcacagagaggggaagtttaacaacactttgcacctcattggagagcaccatgatggggtttccaaggccaacttctccattggtcccatgatgcctgtccttgcaggaacctacagatgctacggttctgttcctcactccccctatcagttgtcagctcccagtgaccctctggacatggtgatcataggtctatatgagaaaccttctctctcagcccagccgggccccacggttcaggcaggagagaatgtgaccttgtcctgcagctccatctatccagggaaggggaggcccatgaacgtaggctccctgcagtgcgcagcatcaacggaacattccaggccgactttcctctgggccctgccacccacggagggacctacagatgcttcggctctttccgtgacgctccctacgagtggtcaaactcgagtgatccactgcttgtttccgtcacaggaaacccttcaaatagttggccttcacccactgaaccaagctccaaaaccggtaaccccagacacctacatgttctgattgggacctcagtggtcaaaatccctttcaccatcctcctcttctttctccttcatcgctggtgctccgacaaaaaaaatgctgctgtaatggaccaagagcctgcagggaacagaacagtgaacagcgaggattctgatgaacaagaccatcaggaggtgtcatacgcataattggatcactgtgttttcacacagagaaaaatcactcgcccttctgagaggcccaagacacccccaacagataccagcatgtacatagaacttccaaatgctgagcccagatccaaagttgtcttctgtccacgagcaccacagtcaggccttgaggggatcttctagggagacaacagccctgtctcaaaaccgggttgccagctcccatgtaccagcagctggaatctgaaggcatcagtcttcatcttagggcatcgctcttcctcacaccacgaatctgaacatgcctctctcttgcttacaaatgtctaaggtccccactgcctgctggagagaaaacacactcctttgcttagcccacaattctccatttcacttgacccctgcccacctctccaacctaactggcttacttcctagtctacctgaggctgcaatcacactgaggaactcacaattccaaacatacaagaggctgcctcttaacacagcacttagacacgtgctgttccacctcccttcagactatctttcagccttctgccagcagtaaaacttataaattttttaaataatttcaatgtagttttcccgccttcaaataaacatgtctgccctcatgg

SEQ ID NO: 12243 - DNA, 2891 bp, Homo sapiens
gcttcccttccacgtctcccggaagcggtagcagggccccggcgggtcggggaggaggtttactcagcttgggccccctccgggccagccgccgagggggcgcggcccaggacggcggctaggccgtagtgcagcctctccggagtcctcaggtttgccaataggattatcctgctgccatcatgtcttggtttgttgatcttgctggaaaggcagaagatcttttaaaccgagttgatcaaggggctgcaacagctctcagtaggaaagacaatgccagcaacatatatagcaaaaatactgactatactgaacttcaccagcaaaatacagatttgatatatcagactggacctaaatctacgtatatttcatcagcagctgataacattcgaaatcaaaaagccaccatcttagctggcactgcaaatgtgaaagtaggatctcggacaccagtagaggcctctcatcctgttgaaaatgcatctgttcctaggccttcatcccattttgtgcgaagaaaaaagtcagaacctgatgatgagctgctgtttgattttcttaatagttcacagaaggagcctaccgggagggtggaaatcagaaaggaaaaaggcaagacacctgtctttcagagctctcagacatcaagtgtcagttctgtgaaccccagtgtaaccaccatcaaaaccattgaagaaaattcttttgggagccaaacccacgaagctgccagtaactcagattctagccatgaaggtcaagaggaatcttcaaaggaaaatgtgtcatcaaatgctgcctgccctgaccacaccccaacacctaatgatgatggcaaatcacatgaactgtctaaccttcgactggagaatcagctgctgaggaatgaagttcagtctttaaatcaagaaatggcctcgttactccaaagatccaaagagactcaagaagaattaaacaaagcaagagcaagagttgaaaagtggaatgctgaccattcaaagagtgatcgaatgactcgaggactccgagcccaagtagatgacctgactgaagctgtggctgcaaaggattcccagctggctgtactgaaagtgagactccaggaagctgaccagctactgagtactcgcacagaagcattagaagccttacagagtgaaaaatcacgaataatgcaggatcaaagtgaaggtaacagcctgcagaatcaagctctgcagacttttcaggagagactgcatgaagcggatgccactctgaagagagagcaggagagctataaacagatgcagagcgagtttgctgcacgccttaataaagtggaaatggaacgtcagaatttagcagaagcaattacactggccgaaagaaaatactcagatgagaagaagagggttgatgaactgcagcagcaagtcaagctgtataagttgaacttggagtcctctaagcaggaattaattgactacaagcaaaaagctactagaatactgcaatctaaggaaaaattgattaacagcttgaaagaaggctctggttttgaaggcctagatagcagcactgccagtagcatggagctggaagaacttcggcatgagaaagagatgcagagggaggaaatacagaagctgatgggccagatacatcagctcagatccgaattacaggatatggaggcacagcaagttaatgaagcagaatcagcaagagaacagttacaggatctgcatgaccaaatagctgggcagaaagcatccaaacaagaactagagacagaactggagcgactgaagcaggagttccactatatagaagaagatctttatcgaacaaagaacacattgcaaagcagaattaaagatcgagacgaagaaattcaaaaactcaggaatcagcttaccaataaaactttaagcaatagcagtcagtctgagttagaaaatcgactccatcagctaacagagactctcatccagaaacagaccatgctggagagtctcagcacagaaaagaactccctggtctttcaactggagcgcctcgaacagcagatgaactccgcctctggaagtagtagtaatgggtcttcgattaatatgtctggaattgacaatggtgaaggcactcgtctgcgaaatgttcctgttctttttaatgacacagaaactaatctggcaggaatgtacggaaaagttcgcaaagctgctagttcaattgatcagtttagtattcgcctgggaatttttctccgaagataccccatagcgcgagtttttgtaattatatatatggctttgcttcacctctgggtcatgattgttctgttgacttacacaccagaaatgcaccacgaccaaccatatggcaaatgaaccaagcccagttgttgcagtgattggttgtctttttctagacttgggatctgcaagaaggccaattgcctaaaatttctgagaacagtgcacaagattattttatcactacaagcttttaactttttaagttattgtacaagtattctacctaaatcttccaatttcctttaaatggtaagagtttctaaaacagacaataatttaacaagctcagctctgctttatctgagtttagtggtcctaatatatatgtagagaaagatggtggggttgttcacctctgtacagaccatctgtatgttaggtgacattgattatgggttataatcagggaaactaattgtatttagtgacaaaaataaaaagtttttttttataattcagtctgcttttggattttcatatatttaactttgcaaaaagatttactttgtacatgttacaggcttgattggtgtaaatctttttataaatacataaataaaagaaaaatatgcatttttcttttct

SEQ ID NO: 12244 - DNA, 3362 bp, Homo sapiens
aaaaaatcaattttggaagatgtcactgaacaactcttccaatgtatttctggattcagtgcccagtaataccaatcgctttcaagttagtgtcataaatgagaaccatgagagcagtgcagctgcagatgacaatactgacccaccacattatgaagaaacctcttttggggatgaagctcagaaaagactcagaatcagctttaggcctgggaatcaggagtgctatgacaatttcctccacagtggagaaactgctaaaacagatgccagttttcacgcttatgattctcacacaaacacatactatctacaaacttttggccacaacaccatggatgccgttcccaagatagagtactatcgtaacaccggcagcatcagtgggcccaaggtcaaccgacccagcctgcttgagattcacgagcaactcgcaaagaatgtggcagtcaccccaagttcagctgacagagttgctaacggtgatgggatacctggagatgaacaagctgaaaataaggaagatgatcaagctggtgttgtgaagtttggatgggtgaaaggtgtgctggtaagatgcatgctgaacatctggggagtcatgctcttcattcgcctctcctggattgttggagaagctggaattggtcttggagttatcatcattggcctatccaccatagtaacgacaatcacaggtatgtccacgtctgctattgccacgaacggagttgttagaggaggtggggcctactatcttatttccagaagtttagggcccgagttcggtgggtcaataggcctgatctttgcttttgctaatgcagtggctgttgctatgtatgtggtgggattcgctgaaactgtagtagatctacttaaggagagtgattcgatgatggtggatccaaccaatgacatccggattataggctccatcacagtggtgattcttctaggaatttcagtagctggaatggaatgggaggcaaaggcccaagtcattcttctggtcattcttctaattgctattgcaaacttcttcattggaactgtcattccatccaacaatgagaaaaagtccagaggtttctttaattaccaagcatcaatatttgcagaaaactttgggccacgcttcacaaagggtgaaggcttcttctctgtctttgccatttttttcccagcagctactgggattcttgctggtgccaatatctcaggagatttggaggatccccaagatgccatccccagaggaaccatgctggccattttcatcaccactgttgcctacttaggggttgcaatttgtgtaggggcctgtgtggtccgagatgccaccgggaacatgaatgacaccatcatttctgggatgaactgcaatggttcagcagcatgtgggttgggctatgacttctcaagatgtcgacatgaaccatgtcagtacgggctgatgaacaatttccaggtcatgagcatggtatcagggttcggccccctcatcactgcgggaatcttttctgcaacactctcctccgccctggcctcccttgtcagcgcacccaaagtgttccaggctctgtgcaaggacaacatctacaaagccctgcagttttttgcaaagggatatgggaaaaacaatgaacccctgagaggatatattctcacttttcttatagccatggcatttattcttattgcggaactgaacaccattgctcccatcatctccaactttttcctggcctcatatgcacttattaatttctcctgcttccatgcctcttatgccaaatctccaggatggagacctgcgtatggaatttacaacatgtgggtatctctttttggagctgttttgtgctgtgcagtcatgtttgtcatcaactggtgggcagctgtcatcacctatgtcattgaattcttcctttacgtctatgtgacttgtaagaagccagatgtgaactggggctcctccacacaggctctttcctacgtgagtgctttagacaatgctctggaattaaccacagtggaagaccacgtaaaaaacttcaggccccagtgcattgtcttaacagggggacccatgacaagacctgctctcctggacataactcacgcctttaccaagaacagtggcctttgcatctgctgtgaagtctttgtgggaccgcgcaaactgtgtgttaaggagatgaacagtggcatggcgaaaaaacaggcctggcttataaagaacaaaatcaaggctttttatgctgcagtggcggcagactgtttcagggatggtgtccgaagtcttcttcaggcctcaggcttaggaagaatgaaaccaaacactctggtgattggatataagaaaaactggaggaaagctcccttgacagagattgagaactacgtgggaatcatacatgatgcatttgattttgagattggcgtggttatagtcagaatcagccaaggatttgacatctctcaggttcttcaggtgcaagaggaattagagagattagaacaggagagactagcattggaagcgactatcaaagataatgagtgtgaagaggaaagtggaggcatccgaggcttgtttaaaaaagctggcaagttgaacattactaagacaacgcctaaaaaagatggcagcattaacacaagccagtcgatgcatgtgggagagttcaaccagaaactggtggaagccagcactcaatttaaaaagaaacaagaaaaaggcacaattgatgtttggtggttgtttgatgatggagggttaacacttcttatcccctatatcttaactctcagaaaaaaatggaaagactgtaaattaagaatctatgtgggagggaagatcaaccgcattgaagaagaaaaaattgcaatggcttcccttctgagcaaatttaggataaaatttgcagacatccatatcatcggtgacatcaacattaggccaaacaaagagagctggaaagtctttgaagagatgattgaaccatatcgtctccatgaaagctgcaaagatttaacaactgctgagaaattaaaaagagaaactccgtggaaaattacagatgcagaactggaagcagtcaaggaaaagagttaccgccaagttcgactgaatgaactcttacaggagcactccagagctgctaatctcattgtcctgagccttcccgtggcaagaaagggatccatatcggatttgttgtatatggcttggttggaaatcctcacaaagaacctcccacctgtcttactagttagaggaaatcacaaaaatgtcttgacattttactcttaaaacatgaaagattggaatacattttaacttaatgtaatgcata

SEQ ID NO: 12245 - DNA, 4784 bp, Homo sapiens
gaggcgacactgagtctccaagtccggagaggtgcccgagggaaaagaggcggcagctaaactggtcctggagagaagccccttccgcccctctcctcagccagcatgtcccggactccgccgctcctcagtccgcgcggtggggaccccgggccgtggcggccggcgcagccctgacgggttgcgaaccagggggcgccccgaacgcgggggttggggtctgggagcgcgagcggccgctacggtacgagcggggtgtgctgagtcccgtggccacccccggccccagccatgaggagggacgagcgagacgccaaagccatgcggtccctgcagccgccggatggggccggctcgccccccgagagtctgaggaacggctacgtgaagagctgcgtgagccccttgcggcaggaccctccgcgcggcttcttcttccacctctgccgcttctgcaacgtggagctgcggccgccgccggcctctccccagcagccgcggcgctgctcccccttctgccgggcgcgcctctcgctgggcgccctggctgcctttgtcctcgccctgctgctgggcgcggaacccgagagctgggctgccggggccgcctggctgcggacgctgctgagcgtgtgttcgcacagcttgagccccctcttcagcatcgcctgtgccttcttcttcctcacctgcttcctcacccggaccaagcggggacccggcccgggccggagctgcggctcctggtggctgctggcgctgcccgcctgctgttacctgggggacttcttggtgtggcagtggtggtcttggccttggggggatggcgacgcagggtccgcggccccgcacacgcccccggaggcggcagcgggcaggttgctgctggtgctgagctgcgtagggctgctgctgacgctcgcgcacccgctgcggctccggcactgcgttctggtgctgctcctggccagcttcgtctggtgggtctccttcaccagcctcgggtcgctgccctccgccctcaggccgctgctctccggcctggtggggggcgctggctgcctgctggccctggggttggatcacttctttcaaatcagggaagcgcctcttcatcctcgactgtccagtgccgccgaagaaaaagtgcctgtgatccgaccccggaggaggtccagctgcgtgtcgttaggagaaactgcagccagttactatggcagttgcaaaatattcaggagaccgtcgttgccttgtatttccagagaacagatgattctttgggattgggacttaaaacaatggtataagcctcattatcaaaattctggaggtggaaatggagttgatctttcagtgctaaatgaggctcgcaatatggtgtcagatcttctgactgatccaagccttccaccacaagtcatttcctctctacggagtattagtagcttaatgggtgctttctcaggttcctgtaggccaaagattaatcctctcacaccatttcctggattttacccctgttctgaaatagaggacccagctgagaaaggggatagaaaacttaacaagggactaaataggaatagtttgccaactccacagctgaggagaagctcaggaacttcaggattgctacctgttgaacagtcttcaaggtgggatcgtaataatggcaaaaggcctcaccaagaatttggcatttcaagtcaaggatgctatctaaatgggccttttaattcaaatctactgactatcccgaagcaaaggtcatcttctgtatcactgactcaccatgtaggtctcagaagagctggtgttttgtccagtctgagtcctgtgaattcttccaaccatggaccagtgtctactggctctctaactaatcgatcacccatagaatttcctgatactgctgattttcttaataagccaagcgttatcttgcagagatctctgggcaatgcacctaatactccagatttttatcagcaacttagaaattctgatagcaatctgtgtaacagctgtggacatcaaatgctgaaatatgtttcaacatctgaatcagatggtacagattgctgcagtggaaaatcaggtgaagaagaaaacattttctcgaaagaatcattcaaacttatggaaactcaacaagaagaggaaacagagaagaaagacagcagaaaattatttcaggaaggtgataagtggctaacagaagaggcacagagtgaacagcaaacaaatattgaacaggaagtatcactggacctgattttagtagaagagtatgactcattaatagaaaagatgagcaactggaattttccaatttttgaacttgtagaaaagatgggagagaaatcaggaaggattctcagtcaggttatgtataccttatttcaagacactggtttattggaaatatttaaaattcccactcaacaatttatgaactattttcgtgcattagaaaatggctatcgagacattccttatcacaatcgtatacatgccacagatgtgctacatgcagtttggtatctgacaacacggccagttcctggcttacagcagatccacaatggttgtggaacaggaaatgaaacagattctgatggtagaattaaccatgggcgaattgcttatatttcttcgaagagctgctctaatcctgatgagagttatggctgcctgtcttcaaacattcctgcattagaattgatggctctatacgtggcagctgccatgcatgattatgatcacccagggaggacaaatgcatttctagtggctacaaatgcccctcaggcagttttatacaatgacagatctgttctggaaaatcatcatgctgcgtcagcttggaatctatatctttctcgcccagaatacaacttccttcttcatcttgatcatgtggaattcaagcgctttcgttttttagtcattgaagcaatccttgctacggatcttaaaaagcattttgattttctcgcagaattcaatgccaaggcaaatgatgtaaatagtaatggcatagaatggagtaatgaaaatgatcgcctcttggtatgccaggtgtgcatcaaactggcagatataaatggcccagcaaaagttcgagacttgcatttgaaatggacagaaggcattgtcaatgaattttatgagcagggagatgaagaagcaaatcttggtctgcccatcagtccattcatggatcgttcttctcctcaactagcaaaactccaagaatcttttatcacccacatagtgggtcccctgtgtaactcctatgatgctgctggtttgctaccaggtcagtggttagaagcagaagaggataatgatactgaaagtggtgatgatgaagacggtgaagaattagatacagaagatgaagaaatggaaaacaatctaaatccaaaaccaccaagaaggaaaagcagacggcgaatattttgtcagctaatgcaccacctcactgaaaaccacaagatatggaaggaaatcgtagaggaagaagaaaaatgtaaagctgatgggaataaactgcaggtggagaattcctccttacctcaagcagatgagattcaggtaattgaagaggcagatgaagaggaatagcgacagtttgagtaaaagaaaagtcatattgaagaagcccagagggttgtgcccaggggcagaaatcattgcctagtgttcaccggctgactctcaactgaccattcccatgtggacaggccttaatactgtgagaggatccttgctctgctggcagtttcccactcctatgcactttcacaggaactagaaaactattcttaaaccaaaaataccatccgtgttgacccatgttgcagagcccttacttaaatccttcactggtgtatgaatactttgtcataatgctgctttgctgggtagtgagctcttatttttcactgggggtcagctataactaaaaactcaagtgacatatttcagttaccaaagtggccaggaactttttgcttttatgaaaatagattcatattgtatttcccagtgtgtcttttatgtctttgaatgttttggagaaaagtctatgcctgtctaaaaatgaatccagtgttgcctttctgagggatttctgctcaatgcaatacactgttcagtgctattctcccagctaggtttatccatgaaggactgagtgacctttgttgtatttaacaaaatccaggtgcatcaatttctgatgctttttactattgtgtattatctactatgtgtgttttatttctgctgagagtattcaggtttgccatggacatcagaagtttgaattccagtcttatcttatgttccatggctgaattttaaagctgtttaggtttaacaatgaagggatttattctttagtcaaaattgttgtttttactctagctcaggattcgtatttttaaagatttagttaatataaacacagcacagatttgtcagaagaaaaaaaatttgctgtaataccaaaactaacctcatcaaagatacagaaaaaaagaaatatagtgagccctaaaggacacatacattgaataaataattggaacatgtggttatctttagatccacatcttagctgtcatttgttcactctaaaactgatgttcatctttctgttaatttccctctgcctaaagagtacatgacagaaatgacctatcactacttattatttctgaagcctaactgcaagagtgatttcttgagaacaagtaaagaactggctcgtgccg

SEQ ID NO: 12246 - DNA, 11965 bp, Homo sapiens
agcgaaccatcggggcggccgggagccatgttggagcggcgggaggcggcagcagcgtcggggatgctgtggtgggggcggaaaaagccagggccgcacgccggaggggctccggccgcggagtagatggtgcccagagggcggcgggggtgcggagagacaggcggaggggcgggggcccggggcggcggcaggggcccgggagggggcccgagcggcggggccagcccaaggcccggaccggggcggggggcggtggaggccgtgcagggaggcgggagatgatggcgaggcggccgccgtggcggggcctcggggaacggtcgacccccatactcctgctccttctcctctctttgttccccctcagccaggaggagctggggggcggtgggcaccagggctgggacccaggcttagctgccactacggggccaagggcgcatatcggtggcggagccttagctctttgtccggagtcttccggggtccgggaggatggggggcctggcctgggggtcagggagcctatcttcgtggggctccgagggagaaggcaaagcgcccggaatagtcgagggccccctgagcagccgaatgaggagctggggattgaacacggcgtccagccattgggcagccgcgaacgagagacaggacagggaccagggtctgtgttatactggcgcccagaggtctcctcttgcgggcggacaggacctttgcaaagaggtagtctgtcaccaggggctctgtcctcaggggtcccgggctcggggaacagctcgcccctcccttcagactttttgattcggcaccacggtcccaagccggtgtcctcccagcggaacgctgggacaggctcccgcaaaagagtgggcaccgcgcgctgctgtggggaattatgggcaacagggagcaagggtcagggcgagagagccacgacatccggagcagaaaggacagccccccggcggaactgtcttccaggggcctcgggatctggccccgagctggattcagcaccacgcacggcgaggacagctcctgcatcaggttcagcaccccgcgagtctcggacagctcccgagccggcgcccaagcgcatgcgctcccggggtctcttccgctgccgcttcctcccgcagcgccccgggccgcgtcccccgggactcccggcccgtcctgaagccaggaaagtaacctcggcgaaccgggcacgctttcgtcgcgccgcaaaccgccacccgcagtttccgcagtacaactaccagacgctggtgccggagaatgaggcagcaggcaccgcggtgctacgcgtggttgctcaggacccggacgccggcgaggccgggcgcctagtctactcgctggcggcactcatgaacagccgctcgctggagctgttcagcatcgacccgcagagcggccttatccgtacggcggcagctctggaccgcgagagcatggagcgtcactacctgcgtgtgaccgcgcaggaccacgggtcgccgcgcctctcggccaccacgatggtggccgtgacagtagccgaccgcaacgaccactcgccggtttttgagcaagcgcagtaccgggagacccttcgcgagaatgtggaggagggctaccctatcctgcagctgcgtgccactgacggcgacgcgccccccaacgccaacctgcgctaccgcttcgtggggccgccagctgcgcgcgctgcagctgccgccgccttcgagattgatccacgctccggcctcatcagcaccagcggccgagtggaccgcgagcacatggaaagctatgagctggtggtggaagccagcgaccagggccaggaacccgggccgcgctcggccactgtgcgcgtacacataactgtgctagacgagaacgacaatgctcctcagttcagcgagaagcgctacgtggcgcaggtgcgcgaggatgtgcgcccccacacagtcgtgctgcgcgtcacggccactgaccgggacaaggacgccaacggattggtgcactacaacatcatcagtggcaatagccgtggacactttgccatcgacagcctcactggcgagatccaggtggtggcacctctggacttcgaggcagagagagagtatgccttgcgcatcagggcgcaggatgctggccggccaccgctgtccaacaacacgggcctggccagcatccaggtggtggacatcaatgaccacattcctatttttgtcagcacgcccttccaagtttctgtcttggaaaatgctcccttgggtcactcagtcatccacattcaggcagtcgatgcagaccatggggagaatgccagattggagtactccctaactggtgtggcacctgatactccttttgtgataaacagcgccactggctgggtctctgtgagtggtcccctggaccgtgagtctgtggagcattacttctttggtgtggaggctcgagaccatggctcacccccactctctgcctcagccagtgtcaccgtgactgtgctggacgttaatgacaatcggcctgagttcacaatgaaggagtaccacctacgactgaatgaggatgcagctgtgggcaccagtgtggtcagcgtgaccgcagtagaccgtgatgccaacagtgccatcagctaccagatcacaggcggcaacacccggaatcgctttgccatcagcacccaggggggtgtgggtctggtgactctggctctgccactggactacaagcaggaacgctacttcaagctggtactaactgcatctgaccgtgcccttcatgatcactgctatgtgcacatcaacatcacagatgccaacactcatcggccggtctttcaaagtgcccactactcagtgagtgtgaatgaagatcggccaatgggtagcaccatagtggtcatcagtgcctctgatgatgacgtgggtgagaatgctcgtatcacctatctcctggaggacaacctgccccagttccgcattgatgcagactcaggagccattacattacaggccccattagactatgaggaccaggtgacctacaccctggctatcacagctcgggacaatggcatcccacagaaggcagacactacttatgtggaggtgatggtcaatgacgtgaatgacaatgctccacaatttgtggcctcccactatacagggctggtctctgaggatgccccacctttcaccagtgtcctgcagatctcagccactgaccgggatgctcatgccaatggccgggtccagtacactttccagaatggtgaagatggggatggagattttaccattgagcccacctctggaattgtccgtacagtaaggcggctagaccgggaggcagtatcagtgtatgagttgactgcctacgcagtggacagaggtgtgcccccactccggactccagtcagtatccaggtgatggtgcaggatgtgaacgacaatgcacctgtcttcccagctgaggagtttgaggtgcgggtgaaagagaatagcattgtgggctcagtggtggcccagatcactgcagtggaccctgacgaaggccccaatgcccatataatgtaccagatcgtggaggggaacatccctgagctgttccaaatggacatcttctctggagaactgacggcactcattgacctagactatgaggctcgccaagaatatgtgattgtggtgcaggccacatctgctcctttggtcagccgggccactgtgcacgtccgcctggttgaccagaatgacaacagccctgtgctcaacaacttccagatcctcttcaacaactatgtatccaaccgttcagacaccttcccgtcgggcattattgggcgcatcccagcttatgaccccgatgtctccgaccacctcttctactcctttgagcgtggcaatgagctgcagctgctggtagtcaaccagaccagtggggagctgcgactcagccgaaagctagacaataaccgcccactggtggcctccatgttggtgactgtcacagatggcctgcacagcgtgacggcgcagtgtgtgctgcgcgtggtcatcatcacggaggagttgctggccaacagcctgaccgtgcgccttgagaacatgtggcaggagcgcttcctgtcaccgctgctgggccgcttcctcgagggcgtggctgcggtgctcgctacgcccgctgaggacgtcttcatcttcaacatccagaacgacacagacgtagggggcaccgtgctcaatgtgagtttctcggcgctagctccacgtggggccggggcgggcgctgcagggccctggttcagctccgaggagctgcaggagcagttgtacgtgcgccgggcggcgctggcggctcgctccctgctcgacgtactgcccttcgacgacaacgtgtgcctgcgagagccctgtgagaactacatgaaatgcgtgtccgtgctccgctttgactcgtccgcgcccttcctggcctcggcctccacgctgttccgacccatccagcccatcgctggcctgcgctgccgctgcccgcccggattcacgggagacttttgcgagaccgagctcgacctctgctactccaacccatgtcgcaacggcggagcctgcgcgcggcgcgagggaggctacacgtgcgtctgccgcccgcgcttcaccggagaggactgcgagctggacaccgaggccggccgctgcgtgccgggcgtctgccgcaacgggggcacctgcaccgacgcgcccaacggcggctttcgctgccagtgcccggcaggcggcgccttcgagggcccgcgctgcgaggtggctgcgcgctccttcccgcccagttcgttcgtcatgtttcgcggcctgcggcagcgattccaccttacgctgtccctctcgttcgcgacagtgcagcagagcgggctgctcttctacaacgggcgcctgaacgagaagcacgacttcctggccctggaactcgtggctggccaagtgcggctcacatattccacgggtgaatccaacaccgtggtcagccccacagttccagggggcttgagtgacgggcaatggcatacagtgcatctgagatactacaacaagccccggacagatgccctagggggtgcacagggcccctccaaggacaaggtggctgtgctaagcgtggatgattgtgatgtggccgtggctctgcagtttggtgctgagattggcaactactcatgcgcggctgctggtgtgcaaacaagctccaagaagtccctggacctgacgggccctcttcttctgggaggtgtccccaacctccccgagaacttccccgtatcccataaggacttcatcggctgtatgcgggacctgcacattgatggccgccgagtggacatggcggcttttgtcgcaaataatggcaccatggcaggctgccaagccaagctacacttttgtgactcaggcccctgcaagaacagtggcttctgctcggagcgctggggcagcttcagctgcgactgccctgtgggcttcggcggcaaagactgtcagcttactatggcccatccccaccatttccgtggcaacggcacactgagctggaactttggaagtgacatggctgtgtctgtgccatggtacctggggctggcatttcggacacgggcaacgcagggggtcctgatgcaagtgcaggctgggccacacagcacgctcctttgccagctagatcgggggttactgtctgtgacagtgaccaggggctcgggccgtgcttcccatctccttctggaccaggtgactgtcagtgatggccggtggcacgatctgcggctggagttgcaggaggaaccaggtggccggcggggccaccatgtccttatggtctcactggactttagcctcttccaggacaccatggcggtggggagtgagctgcagggcctgaaggtaaagcagctccacgtgggaggcctgccccccggcagtgcagaggaggctcctcagggtctggttggctgcatccagggggtgtggctcggctccacaccctctggctccccggccctgctaccccccagccaccgagtgaatgcggagcctggctgtgttgtgaccaacgcctgtgcctctgggccctgcccacctcacgcagactgccgggacctctggcagaccttttcttgcacctgccagccaggttactacggcccaggctgtgtggatgcctgcctcctgaacccctgtcagaaccagggatcatgccggcacctgccaggagccccccatggctatacctgtgactgtgtgggtggctatttcgggcaccactgtgagcacaggatggaccagcagtgcccacggggctggtgggggagcccaacctgtggcccctgcaactgtgatgttcacaaaggttttgatcccaactgcaacaagacaaatgggcagtgtcactgcaaggagttccactaccgaccgcggggcagtgactcttgcctcccatgtgactgctaccctgtgggctccacctcgcgctcatgtgcaccccacagcgggcagtgcccctgtcgcccaggagcccttggccgccagtgcaacagctgtgacagtcccttcgcagaggtgacagccagcggctgccgggtgctctatgatgcctgccctaagtccctgagatctggtgtgtggtggccccagacaaagtttggcgtcctggccacagtgccctgtccccggggggccctgggtgctgctgtgcggctgtgtgatgaggcccagggttggctggagcccgacctcttcaactgtacctcccctgcctttcgagagctcagtctgctgctggatggcctagagctgaacaagacggcactggataccatggaggccaagaagctggctcagcggctacgggaggtgactggccacactgaccactattttagccaagatgttcgagtcactgcccgcctgctggcccacctgctggccttcgagagccatcagcagggcttcgggctgacagccacacaggatgcccacttcaatgagaatctgctgtgggccggctctgcactgcttgccccagagacaggggacttgtgggcggcgctggggcagcgggcccctgggggctccccaggcagcgcgggactggtgaggcacctggaggagtatgcagccacactcgcaaggaatatggaactcacatacctgaatcccatggggctggtgacgcctaatatcatgctcagcattgaccgcatggagcaccccagttctccccggggggcccgtcgctaccctcgctaccatagcaacctctttcgaggccaggatgcctgggatcctcacacccatgtgctgctgccttcccagtccccacggccatccccatctgaagttctgcccacaagcagcagcatagaaaactccaccacctcaagtgtggtccccccaccagccccgccagagccagagcctgggatctccattatcattctcctcgtttaccgcaccttagggggactgctccctgcccagttccaggcagaacgccgaggtgccaggcttcctcagaaccccgtcatgaactccccggtggtcagcgtggctgtgttccacggacgcaacttcctaaggggaatcctggagtcccccatcagcctagagtttcgcctgctacagacagcgaatcggagcaaggcgatctgtgtgcagtgggacccacctggcctggcggagcagcatggtgtgtggacagcacgggactgcgagctggtgcacaggaatgggtcccacgcacggtgtcgctgcagccggacagggacctttggggtcctcatggatgcctctccccgtgagaggctggagggcgacctggagctgctggctgtgttcacccacgtggtcgtggctgtgtctgtggctgcgctggtgctgactgcagccatcctgctgagcctgcgcagcctcaagtccaatgtgcgtgggatccatgccaatgtggcagccgccctgggggtggcagagctcctcttcctgctggggattcacaggacccacaatcagctggtgtgcactgcagtcgccatcctcctgcactacttcttcctcagcaccttcgcgtggctcttcgtgcaggggctgcacctctaccgcatgcaggttgagccacgcaacgtggaccgcggcgccatgcgcttctaccatgccctgggctggggcgtccctgctgtgctgctgggccttgctgtgggcctggaccctgagggctatgggaaccctgacttctgctggatctcagtccacgagcccctcatctggagctttgctggccctgttgtcctggtcatagtgatgaacgggaccatgtttctcctcgctgcccgcacatcctgctccacagggcagagggaggccaagaagacctctgcactgacccttcgcagctccttcctgctgcttctgctggtcagtgcctcctggctctttgggctcctggcagtcaaccacagcatcctagccttccactacctccatgctggactctgcggcctccagggcctggcggtgctgctgctcttctgtgtcctaaatgcagatgctcgggctgcctggatgccagcctgtctgggcaggaaggcagcgcctgaggaggcaaggccagcacctgggctgggacctggggcctacaacaacacggctctctttgaggagagtggcctcatccgcatcactctgggcgcctccaccgtctcctctgtgagcagtgcccgctccggccggacccaggaccaggacagccagcggggccgcagctacctcagggacaatgtcctggttcgacatggctcagccgctgaccacactgaccacagcctccaggctcatgctggccccactgacctggacgtggccatgttccatcgagatgctggcgcagactccgactctgacagtgacctgtccttggaggaggagaggagtctctccattccatcttcagaaagcgaggacaatggccggacgcgggggcgcttccaacggccactctgccgagcagcccagagtgagaggctcctcacccaccccaaagatgtggatggcaatgacctcctgtcctactggccagccctgggggagtgcgaggcagccccctgtgctctgcagacttggggctctgaaaggcgcctggggctggacaccagcaaggatgcagctaacaacaaccagccagacccggccctgaccagtggggatgagacttctctgggccgggcccagcgccagaggaaaggcatcctgaagaaccggttgcaatacccactggtgccacagacccgaggtgcccctgagctgtcctggtgccgtgcagccaccttgggccaccgtgcagtgccagctgcctcttacggtcgcatctatgctggcgggggcacgggcagcctttcacagccagccagccgctactcttctagagaacagctggacctgctcctccggcggcaactgagccgtgagcgactagaggaagcccctgcccctgttctacgtcccctgagccggccagggtcccaggaatgcatggatgctgcaccaggccgactggagcccaaagatcggggcagcaccctgccacggaggcagccacctcgggactaccctggcgccatggctggccgcttcgggtcacgggatgcgctcgacttaggggcacctcgagagtggttgagcacgctgcctccgccccgccgcacccgggaccttgacccacagcccccacctctgcccctgtctccccagcggcaactctcaagggaccccctcttgccatcccggccgctggactctctgtctaggagctcgaactctcgggagcagctggaccaggtgcctagccggcacccctcacgagaagcccttgggccactcccgcagctgctcagagctagggaggactcggtcagtggccccagccatggcccctccacagaacagttggacattctttcctccatccttgcctctttcaactcctcggccctctcctctgtgcaatcttcaagcacacccttgggccctcacaccactgccacaccttctgccacagcctctgtgcttgggccctccacgccacgttctgccacgtctcacagcatctcggagctgtcgccagactcagaagttcccagaagtgagggtcactcctgaggggatgacggcgtggacgaggaacagctgagggcgacagaggatctaggctaacaggagagactccaggagtgggggcagatcccaaggcagcctcctgctccccagtggtgggtgccccagctctacctggtgtggcagggctgaggctccatgtgcatctgtgagcatgcgtgtgacaggtgcagagacgggggactggagggagacttttatacgttttgtacctttgtaaccagagagatgcttatgttatttttcagcttttctgtctcctggggggtttgaggctgggctgggagggggagggagatagagggagagatgcagtttgaccccatttgggtcctgagcaaaccctatgctcatctctctctccttcctggggtggactcagatgggtgggacacatgccttcctccccctattccacccccaagttgatctgagtatcgtcaggggcccaaagtacagaattgttctttgctttttattgaatgctccaaaggccaaacttctggggctgggggttggtcttggaaacaggggtcctctgacttcctcatgggggcttgctcataccgcccctcctggtggatgtgtgtgtttattatgtggagtccctgccacttactgccttatgacctaggactgatgctgtggggtgctggtggagcagctgatgtcgtgtttacagagcaaggcttccctgtctcccacggggaggggctcgggcctctagtcagacattcctgcagagggtcggtggaggggtcattcacctgcccctgcagcaagcaaaagttgtctgtggtgccatttgattccctgacactgccccctgcttgaattgattccgaagggtagggtgggaaggtgagcaaagggagcagaaacaagggaattcaagacccagaatgtaggtgccactgcctcctatgtttacaggatcctccgtggccctaggcacctgggctgcaggaagtgactccgttccactcctcctttattcccttaaaaagggaaaaatgactgttacgaccctgttcacaaaactcttacttttgctattttgtctgctgtccagaactgaagactttaaaattttgttactgtttacaagtccagattcaaaaaatgtttttactttgtttacaactcaaaactttgagttttacactttgtttacagtagataattttttttcctttgtttccaagtgaaaggtagggaaagtgggagagggacttggaggacccacctgtgaggaccctgacctggccatcttgaggggttttctaacccccaggtctcccaggccgaaggtcagccttgagtcccgtttaacagcagatccagaagaccttgagagtaggcgtcctctaaccacgggggagagtggctgtgcagggctggggggtggtctgtgcagacacctcctcacccaccaccccatgcatactcttgggaagcagcttcctgggagattagaaattctacttccctgactggagctaaatcccaccagccaggacccaaactctccttaccgagaaggaccccagctcttgaagggctgagtggcctgctgggggtgggagggtgtctttactatgtcctaggtttcgtagatgcccctctctggggttcccctcctccagcccagcggccctctttcctgtctgtgtaaattgttccgtgaagccgcgctctgttttgggaataaacttctatagaaaacaaaa

SEQ ID NO: 12247 - DNA, 1478 bp, Homo sapiens
agcggctgggcggcgggccgggcccggggccgcttggaatggcgcctcctccgccttcgccccaactgcttctcctggcagccctcgcgaggctcctgggtcccagcgaggtgatggctggaccggcggaggaggcgggagcccattgtcccgagagcctgtggcctctgcctccgcaggtgtcaccaagagtgacctacacacgagtgagcccagggcaggctgaggatgtcaccttcctctaccacccctgtgcccatccctggctgaagctccagcttgccctcctggcctatgcttgtatggctaacccttccctcacccctgacttcagcctcacgcaggatcggcccctggtgctgactgcatgggggctggcgctggagatggcctgggtagagccagcctgggctgcccactggctgatgaggaggcggaggaggaagcagaggaagaagaaggcatggatctactgtgaaagcctttcagggcctgctccctccgagccaactcccggtagagggaggctgtgccgaagagggtgtgtgcaggccctggctctggcctttgctctgcggagctggcggccccctggcacagaggtgacatctcaagggcccaggcagccctcttctagtggtgccaagaggcggaggctgcgggctgcccttggtccccagcccactcgctcagccctgaggtttccctctgcttccccagggagcttgaaggccaagcagtccatggcgggaatccctggtagggagagtaatgccccatctgtgcccactgtctccctgctgccgggggcgcctggaggcaatgccagctccaggacagaggctcaggtgcccaacgggcaaggcagcccagggggctgtgtctgttcaagtcaggcttccccggcccctcgcgcagcagcgcctccacgggcagcccggggccccaccccacgcactgaagaggccgcctgggctgccatggccctgaccttcctgctggtgctgctcaccctggccacgctctgcacacggctgcacagaaacttccgacgcggggagagcatctactgggggcccacagcggacagccaggacacagtggctgctgtgctgaagcggaggctgctgcagccctcgcgccgggtcaagcgctcgcgccggagacccctcctcccgcccacgccggacagcggcccggaaggcgagagctcggagtgacggcctgggacctgccactgtggcgtgcggctcctccccgcgccgcgaggccgcgacctctgccacgtggaccgcgcgcggggcgctccctggtggcgatggcgcggcactggccgagcactgcgggggctttcctccttgttggttgctgagtgggcggccaaggggagaaaaggagccgcttctgcctcccttgccaaaactccgtttctaattaaattatttttagtagaaaaaaaaaaaaaaaaaaaaaaaaaa

SEQ ID NO: 12248 - DNA, 2100 bp, Homo sapiens
cggccccccgcattccccgcccccacctccccgccttgttgtccaacttctcccggagcagccggagagcaggcgtcgggacgcagcaaagagaggagagaccccagagtcagaaggagtgagaaccctgacccctaatcccactgcatccagccaataggagcccagccaccatggcggagctgcaggaggtgcagatcacagaggagaagccactgttgccaggacagacgcctgaggcggccaagactcactctgtggagacaccatacggctctgtcactttcactgtctatggcacccccaaacccaaacgcccagcgatccttacctaccacgatgtgggactcaactataaatcttgcttccagccactgtttcagttcgaggacatgcaggaaatcattcagaactttgtgcgggttcatgtggatgcccctggaatggaagagggagcccctgtgttccctttgggatatcagtacccatctctggaccagcttgcagacatgatcccttgcgtcctgcagtacctaaatttctctacaataattggagttggtgttggagctggagcctacatcctggcgagatatgctcttaaccacccggacactgttgaaggtcttgtcctcatcaacattgatcccaatgccaagggttggatggattgggcagcccacaagctaacaggcctcacctcttccattccggagatgatccttggacatcttttcagccaggaagagctctctggaaattctgagttgatacaaaagtacagaaatatcattacacatgcacccaacctggataacattgaattgtactggaacagctacaacaaccgccgagacctgaactttgagcgtggaggtgatatcaccctcaggtgtcctgtgatgctggtggtaggagaccaagcacctcatgaagatgcagtggtggaatgtaactcaaaactggaccccacccagacctcgttcctcaagatggctgactccggaggtcagccccagctgactcagccaggcaagctgaccgaggccttcaagtacttcctgcaaggcatgggctacatggcctcatcctgcatgactcgcctgtcccggtctcgtacagcctctctgaccagtgcagcatccgttgatggcaaccggtcccgctctcgcaccctgtcccagagcagcgagtctggaactctttcttcggggcccccggggcacaccatggaggtctcctgttgaatggcccttgttgccctagagtgggacccagccctcacctcccccagagctaacctgggaggtgctgaaggggcattgggccaccgtaagcaagggaaaaagggcagatcatgcggggagatgaccttgatctttgattgctaccctaaccttgacctttaacccgtgattccccccagctcctggaagagatgtcctaatatctcttagggacccagacccctaaattctcctcctcccccattttgatgttaaggtggagagggcatatgcatcctctgtcctgatctaggtgtctatagctgaggggtaagaggttgttgtagttgtcctggtgcctccatcagactctccctacttgtcccatatttgcaaggggaggggatttggggctggggctccattcaccaaagctgaggtggcttctcattaaccctttaggactctgaagggtatggacctacgtgaatgtgtgtcagggggagacttgctggtgggttagtggtcctcaggatgtgatagaaacatccagtgtaaaaaggaagttggaatgggagttggcgggcagtgaacgagtgtggggaaggattggtgctggggcaacaggaaggggcctggggccgtttggctgcactaactttggtagctcagtgtgcatctagagtgggactggggagggagctaagcttgggctgggctgcttggggcttggcatagggtggaaagggctaccctggggctctgaccacactgtagtatgtgtggagggtgccctcccgtctcccacaacttctgctataacaataaactgtagaggaatctgagtaccgttaaaaaaaaaaaaaaaaaaaaa

SEQ ID NO: 12249 - DNA, 5073 bp, Homo sapiens
ggctcctgaggcgcacagcgccgagcgcggcgccgcgcacccgcgcgccggacgccagtgaccgcgatggtgaactccagtcgcgtgcagcctcagcagcccggggacgccaagcggccgcccgcgccccgcgcgccggacccgggccggctgatggctggctgcgcggccgtgggcgccagcctcgccgccccgggcggcctctgcgagcagcggggcctggagatcgagatgcagcgcatccggcaggcggccgcgcgggaccccccggccggagccgcggcctccccttctcctccgctctcgtcgtgctcccggcaggcgtggagccgcgataaccccggcttcgaggccgaggaggaggaggaggaggtggaaggggaagaaggcggaatggtggtggagatggacgtagagtggcgcccgggcagccggaggtcggccgcctcctcggccgtgagctccgtgggcgcgcggagccgggggcttgggggctaccacggcgcgggccacccgagcgggaggcggcgccggcgagaggaccagggcccgccgtgccccagcccagtcggcggcggggacccgctgcatcgccacctccccctggaagggcagccgccccgagtggcctgggcggagaggctggttcgcgggctgcgaggtctctggggaacaagactcatggaggaaagcagcactaaccgagagaaataccttaaaagtgttttacgggaactggtcacatacctcctttttctcatagtcttgtgcatcttgacctacggcatgatgagctccaatgtgtactactacacccggatgatgtcacagctcttcctagacacccccgtgtccaaaacggagaaaactaactttaaaactctgtcttccatggaagacttctggaagttcacagaaggctccttattggatgggctgtactggaagatgcagcccagcaaccagactgaagctgacaaccgaagtttcatcttctatgagaacctgctgttaggggttccacgaatacggcaactccgagtcagaaatggatcctgctctatcccccaggacttgagagatgaaattaaagagtgctatgatgtctactctgtcagtagtgaagatagggctccctttgggccccgaaatggaaccgcttggatctacacaagtgaaaaagacttgaatggtagtagccactggggaatcattgcaacttatagtggagctggctattatctggatttgtcaagaacaagagaggaaacagctgcacaagttgctagcctcaagaaaaatgtctggctggaccgaggaaccagggcaacttttattgacttctcagtgtacaacgccaacattaacctgttctgtgtggtcaggttattggttgaattcccagcaacaggtggtgtgattccatcttggcaatttcagcctttaaagctgatccgatatgtcacaacttttgatttcttcctggcagcctgtgagattatcttttgtttctttatcttttactatgtggtggaagagatattggaaattcgcattcacaaactacactatttcaggagtttctggaattgtctggatgttgtgatcgttgtgctgtcagtggtagctataggaattaacatatacagaacatcaaatgtggaggtgctactacagtttctggaagatcaaaatactttccccaactttgagcatctggcatattggcagatacagttcaacaatatagctgctgtcacagtattttttgtctggattaagctcttcaaattcatcaattttaacaggaccatgagccagctctcgacaaccatgtctcgatgtgccaaagacctgtttggctttgctattatgttcttcattattttcctagcgtatgctcagttggcataccttgtctttggcactcaggtcgatgacttcagtactttccaagagtgtatcttcactcaattccgtatcattttgggcgatatcaactttgcagagattgaggaagctaatcgagttttgggaccaatttatttcactacatttgtgttctttatgttcttcattcttttgaatatgtttttggctatcatcaatgatacttactctgaagtgaaatctgacttggcacagcagaaagctgaaatggaactctcagatcttatcagaaagggctaccataaagctttggtcaaactaaaactgaaaaaaaataccgtggatgacatttcagagagtctgcggcaaggaggaggcaagttaaactttgacgaacttcgacaagatctcaaagggaagggccatactgatgcagagattgaggcaatattcacaaagtacgaccaagatggagaccaagaactgaccgaacatgaacatcagcagatgagagacgacttggagaaagagagggaggacctggatttggatcacagttctttaccacgtcccatgagcagccgaagtttccctcgaagcctggatgactctgaggaggatgacgatgaagatagcggacatagctccagaaggaggggaagcatttctagtggcgtttcttacgaagagtttcaagtcctggtgagacgagtggaccggatggagcattccatcggcagcatagtgtccaagattgacgccgtgatcgtgaagctagagattatggagcgagccaaactgaagaggagggaggtgctgggaaggctgttggatggggtggccgaggatgaaaggctgggtcgtgacagtgaaatccatagggaacagatggaacggctagtacgtgaagagttggaacgctgggaatccgatgatgcagcttcccagatcagtcatggtttaggcacgccagtgggactaaatggtcaacctcgccccagaagctcccgcccatcttcctcccaatctacagaaggcatggaaggtgcaggtggaaatgggagttctaatgtccacgtatgatatgtgtgtttcagtatgtgtgtttctaataagtgaggaagtggctgtcctgaattgctgtaacaagcacactatttatatgccctgaccaccataggatgctagtctttgtgaccgattgctaatcttctgcactttaatttattttatataaactttacccatggttcaaagatttttttttctttttctcatataagaaatctaggtgtaaatattgagtacagaaaaaaaatcttcatgatgtgtattgagcggtacgcccagttgccaccatgactgagtcttctcagttgacaatgaagtagccttttaaagctagaaaactgtcaaagggcttctgagtttcatttccagtcacaaaaatcagtattgttatttttttccaagagtgtgaaggaaaatggggcattcctttccactctggcatagttcatgagcttaatacatagctttcttttaagaaaggagccttttttttcaactagcttcctggggtaaacttttctaaaagataaaatggaaaggaactccaaactatgatagaatctgtgtgaatggttaagatgaatgttaaatactatgcttttttgtaagttgatcgtatctgatgtctgtgggactaactgtatcacttaatttttaccttattttggctctaatttgaataagctgagtaaaaccaccaaagatcagttataggataaaatggcatctctaaccataacacaggagaattggaaggagccctaagttgtcactcagtttaatttcttttaatggttagtttagcctaaagatttatctgcatattctttttcccatgtggctctactcatttgcaactgaatttaatgttataactcatctagtgagaccaacttactaaatttttagtatgcactgaaagtttttatccaacaattatgttcattttaagcaaaattttaagaaagttttgaaattcataaagcatttggttttaaactattttaagaatatagtactcggtcaggtatgacggctcacgcctgtaatcccagcactttgggaggccgaaacaggcgaatcacttgagcccaggagttcaagaccaacatgggcaatgtggcgaaactccatctctacaaaaaatgcaaaaataaaaaatatagtactcaagtattcttgatcctgtgtttcaaaactagaatttgtaatgcaaatggagctcagtctaataaaaaagaggttttggtattaaaagttcatacattagacagtatcagccaaaatttgagttagcaacactgttttctttacgagagggtctcacccaaatttatggggagaaatctatttctcaaaaaaaaaaatcttcttttacagaaatgttgagtaaggtgacattttgagcgctaataagcaaaagagcatgcagtgctgttgaataaccctcacttggagaaccaagagaatcctgtcgtttaatgctatattttaatttcacaagttgttcatttaactggtagaatgtcagtccaatctccaatgagaacatgagcaaatagacctttccaggttgaaagtgaaacatactgggtttctgtaagtttttcctcatggcttcatctctatctttactttctcttgaatatgctacacaaagttctttattactacatactaaagtttgcattccagggatattgactgtacatatttatgtatatgtaccatgttgttacatgtaaacaaacttcaatttgaagtgcagctattatgtggtatccatgtgtatcgaccatgtgccatatatcaattatggtcactagaaagtctctttatgatactttttattgtactgtttttcatttcacttgcaaaattttgcagaattcctcctttctacccataaattacatatatttttcttctttagtcatggagaactccccccctcatctcttccctattatctttccctgtgtactggtattattaaaaagacattacatacgcaagtctttctcgacaatcaagaatgttattaatgtgtaatactgagcactttacttcttaataaaaacttgatatagtagcaaaaaaaaaaaaaaaaaa

SEQ ID NO: 12250 - DNA, 1476 bp, Homo sapiens
ccccgccgggctcgcgccgcagaggccggtgaggcgccggcggccacgccgcggaaggcgcgggccgagcagagccgggcgttggagcccgcgcgcgcatggaggcgttgccggcagccccctgagggcagcggggagacaagacccggcgacctcgcgcatccctcgagccgccacgcgctctcgccaccgggcggcgacgggccgcggagccggcgcggccatggcgacgggcggccagcagaaggagaacacgctgcttcacctcttcgccggcgggtgtggaggcacagttggtgctattttcacttgtccactagaagtcattaagacacggttgcagtcttcaagattagctctccggacagtctactatcctcaggttcatctggggaccattagtggagctggaatggtgagaccaacatccgtgacacctggactctttcaggttctgaagtcgatcttggagaaagagggaccaaagtcactttttagaggcttgggtccaaatttggttggagttgcaccatcaagggctgtatactttgcatgttactccaaagccaaagagcaatttaatggcattttcgtgcctaacagcaatattgtgcatattttctcagctggctctgcagcttttatcacaaattccttaatgaatcctatatggatggttaaaacccgaatgcagctagaacagaaagtgaggggctctaagcagatgaatacactccagtgtgctcgttacgtttaccagaccgaaggcattcgtggcttctatagaggattaactgcctcgtatgctggaatttccgaaactataatctgctttgctatttatgaaagtttaaagaagtatctgaaagaagctccattagcctcttctgcaaatgggactgagaaaaattccacaagtttttttggacttatggcagctgctgctctttctaagggctgtgcctcctgcattgcttatccacacgaagtcataaggacgaggctccgggaagagggcaccaagtacaagtcttttgtccagacggcgcgcctggtgttccgggaagaaggctaccttgccttttatagaggactgtttgcccagcttatccggcagatcccaaatactgccattgtgttgtctacttatgagttaattgtgtacctgttagaagaccgtactcagtaacaggccggaaaattgtgctctagaagaataaaactgaaaaactctagagaattttttttccccattgatgtttagaaagtttgagactgaaacaggaaaggccataaaatatctggttcatatcacctgttggacatttccttttggattcatgctttctggaaggtttaaattcattaacgttaatagttaattataactttttttttaacttaagaggattcagggttaagcaccaactaaattaaatcatgctatttaatttaagtataaaaaaaaaaaaaaaa

SEQ ID NO: 12251 - DNA, 5296 bp, Homo sapiens
ctgctggagtaggcacccatttaaagaaaaaatgaagaagcagcaataaagaagttgtaatcgttacctagacaaacagagaactggttttgacagtgtttctagagtgctttttattattttcctgacagttgtgttccaccatgattactttctccttcagcgaataggctaaatgaatatgaaacagaaaagcgtgtatcagcaaaccaaagcacttctgtgcaagaattttcttaagaaatggaggatgaaaagagagagcttattggaatggggcctctcaatacttctaggactgtgtattgctctgttttccagttccatgagaaatgtccagtttcctggaatggctcctcagaatctgggaagggtagataaatttaatagctcttctttaatggttgtgtatacaccaatatctaatttaacccagcagataatgaataaaacagcacttgctcctcttttgaaaggaacaagtgtcattggggcaccaaataaaacacacatggacgaaatacttctggaaaatttaccatatgctatgggaatcatctttaatgaaactttctcttataagttaatatttttccagggatataacagtccactttggaaagaagatttctcagctcattgctgggatggatatggtgagttttcatgtacattgaccaaatactggaatagaggatttgtggctttacaaacagctattaatactgccattatagaaatcacaaccaatcaccctgtgatggaggagttgatgtcagttactgctataactatgaagacattacctttcataactaaaaatcttcttcacaatgagatgtttattttattcttcttgcttcatttctccccacttgtatattttatatcactcaatgtaacaaaagagagaaaaaagtctaagaatttgatgaaaatgatgggtctccaagattcagcattctggctctcctggggtctaatctatgctggcttcatctttattatttccatattcgttacaattatcataacattcacccaaattatagtcatgactggcttcatggtcatatttatactcttttttttatatggcttatctttggtagctttggtgttcctgatgagtgtgctgttaaagaaagctgtcctcaccaatttggttgtgtttctccttaccctcttttggggatgtctgggattcactgtattttatgaacaacttccttcatctctggagtggattttgaatatttgtagcccttttgcctttactactggaatgattcagattatcaaactggattataacttgaatggtgtaatttttcctgacccttcaggagactcatatacaatgatagcaactttttctatgttgcttttggatggtctcatctacttgctattggcattatactttgacaaaattttaccctatggagatgagcgccattattctcctttatttttcttgaattcatcatcttgtttccaacaccaaaggactaatgctaaggttattgagaaagaaatcgatgctgagcatccctctgatgattattttgaaccagtagctcctgaattccaaggaaaagaagccatcagaatcagaaatgttaagaaggaatataaaggaaaatctggaaaagtggaagcattgaaaggcttgctctttgacatatatgaaggtcaaatcacggcaatcctgggtcacagtggagctggcaaatcttcactgctaaatattcttaatggattgtctgttccaacagaaggatcagttaccatctataataaaaatctctctgaaatgcaagacttggaggaaatcagaaagataactggcgtctgtcctcaattcaatgttcaatttgacatactcaccgtgaaggaaaacctcagcctgtttgctaaaataaaagggattcatctaaaggaagtggaacaagaggtacaacgaatattattggaattggacatgcaaaacattcaagataaccttgctaaacatttaagtgaaggacagaaaagaaagctgacttttgggattaccattttaggagatcctcaaattttgcttttagatgaaccaactactggattggatcccttttccagagatcaagtgtggagcctcctgagagagcgtagagcagatcatgtgatccttttcagtacccagtccatggatgaggctgacatcctggctgatagaaaagtgatcatgtccaatgggagactgaagtgtgcaggttcttctatgtttttgaaaagaaggtggggtcttggatatcacctaagtttacataggaatgaaatatgtaacccagaacaaataacatccttcattactcatcacatccccgatgctaaattaaaaacagaaaacaaagaaaagcttgtatatactttgccactggaaaggacaaatacatttccagatcttttcagtgatctggataagtgttctgaccagggagtgacaggttatgacatttccatgtcaactctaaatgaagtctttatgaaactggaaggacagtcaactatcgaacaagatttcgaacaagtggagatgataagagactcagaaagcctcaatgaaatggagctggctcactcttccttctctgaaatgcagacagctgtgagtgacatgggcctctggagaatgcaagtctttgccatggcacggctccgtttcttaaagttaaaacgtcaaactaaagtgttattgaccctattattggtatttggaatcgcaatattccctttgattgttgaaaatataatgtatgctatgttaaatgaaaagatcgattgggaatttaaaaacgaattgtattttctctctcctggacaacttccccaggaaccccgtaccagcctgttgatcatcaataacacagaatcaaatattgaagattttataaaatcactgaagcatcaaaatatacttttggaagtagatgactttgaaaacagaaatggtactgatggcctctcatacaatggagctatcatagtttctggtaaacaaaaggattatagattttcagttgtgtgtaataccaagagattgcactgttttccaattcttatgaatattatcagcaatgggctacttcaaatgtttaatcacacacaacatattcgaattgagtcaagcccatttcctcttagccacataggactctggactgggttgccggatggttcctttttcttatttttggttctatgtagcatttctccttatatcaccatgggcagcatcagtgattacaagaaaaatgctaagtcccagctatggatttcaggcctctacacttctgcttactggtgtgggcaggcactagtggacgtcagcttcttcattttaattctccttttaatgtatttaattttctacatagaaaacatgcagtaccttcttattacaagccaaattgtgtttgctttggttatagttactcctggttatgcagcttctcttgtcttcttcatatatatgatatcatttatttttcgcaaaaggagaaaaaacagtggcctttggtcattttacttcttttttgcctccaccatcatgttttccatcactttaatcaatcattttgacctaagtatattgattaccaccatggtattggttccttcatataccttgcttggatttaaaacttttttggaagtgagagaccaggagcactacagagaatttccagaggcaaattttgaattgagtgccactgattttctagtctgcttcataccctactttcagactttgctattcgtttttgttctaagatgcatggaactaaaatgtggaaagaaaagaatgcgaaaagatcctgttttcagaatttccccccaaagtagagatgctaagccaaatccagaagaacccatagatgaagatgaagatattcaaacagaaagaataagaacagccactgctctgaccacttcaatcttagatgagaaacctgttataattgccagctgtctacacaaagaatatgcaggccagaagaaaagttgcttttcaaagaggaagaagaaaatagcagcaagaaatatctctttctgtgttcaagaaggtgaaattttgggattgctaggacccaatggtgctggaaaaagttcatctattagaatgatatctgggatcacaaagccaactgctggagaggtggaactgaaaggctgcagttcagttttgggccacctggggtactgccctcaagagaacgtgctgtggcccatgctgacgttgagggaacacctggaggtgtatgctgccgtcaaggggctcaggaaagcggacgcgaggctcgccatcgcaagattagtgagtgctttcaaactgcatgagcagctgaatgttcctgtgcagaaattaacagcaggaatcacgagaaagttgtgttttgtgctgagcctcctgggaaactcacctgtcttgctcctggatgaaccatctacgggcatagaccccacagggcagcagcaaatgtggcaggcaatccaggcagtcgttaaaaacacagagagaggtgtcctcctgaccacccataacctggctgaggcggaagccttgtgtgaccgtgtggccatcatggtgtctggaaggcttagatgcattggctccatccaacacctgaaaaacaaacttggcaaggattacattctagagctaaaagtgaaggaaacgtctcaagtgactttggtccacactgagattctgaagcttttcccacaggctgcagggcaggaaaggtattcctctttgttaacctataagctgcccgtggcagacgtttaccctctatcacagacctttcacaaattagaagcagtgaagcataactttaacctggaagaatacagcctttctcagtgcacactggagaaggtattcttagagctttctaaagaacaggaagtaggaaattttgatgaagaaattgatacaacaatgagatggaaactcctccctcattcagatgaaccttaaaacctcaaacctagtaattttttgttgatctcctataaactcatgttttatgtaataattaatagtatgtttaattttaaagatcatttaaaattaacatcaggtatattttgtaaatttagttaacaaatacataaattttaaaattattcttcctctcaaacataggggtgatagcaaacctgtgataaaggcaatacaaaatattagtaaagtcacccaaagagtcaggcactgggtattgtggaaataaaactatataaactt

SEQ ID NO: 12252 - DNA, 10396 bp, Homo sapiens
cgggcctgggctgtggctgtgactggcgctgccgtgggcgccgcagccctcgcgggagccggacgcggtaatgccccagcggcgcagcgggcggctgcgtccctgagccgctatataagcgcggcagggaacatccggaggggctgaagatgaaggtgcccgcgcatgggcccccgctgattgccagtccctcccgaccccgcgccccgcgcggagcccgaggccgccgaggacccgccttcgccgcagtagcagctggagcagcgacagaggcggcagctgcggcggcggcggcgcccgcgcccctcgcgccagcgcgtagagcggcggcggcagctcgggggccgccactgccccggctgccatgagttgtgcggaggtgatgtatcacccccagccttatggagcgtcccagtatctgcccaaccccatggcagcgacaacctgccccacagcctactatcagccggcgccccaacctggccagcagaagaagttagcggtattcagcaagatgcaggactctctggaagtcacccttcccagcaaacaagaggaggaggatgaggaggaggaggaggaggagaaagaccagcctgccgagatggagtaccttaactctcgctgtgtccttttcacttatttccagggagacattgggtcagtagtggatgaacacttctcaagagctttgggccaagccatcaccctccatccagaatctgccatttcaaaaagcaagatggggctaacccccctatggcgagacagctcagctctctcaagccagcggaatagtttcccaacttccttttggaccagctcttaccagcccccacctgcaccttgtttggggggagttcatcctgacttccaggtcactggaccccctggcaccttttctgcagctgatcccagtccttggccgggacacaacctgcatcagactggcccagcccctccccctgctgtgtctgagtcctggccttatcctttgacatctcaggtgagcccatcctacagccatatgcatgacgtgtacatgcggcaccaccaccctcatgcccacatgcaccaccgccaccgccaccatcatcaccatcaccaccctcctgctggctctgccctggatccatcctatgggcctctgctgatgccttcagtgcatgcggccaggattcctgctccccagtgtgacatcacaaagacagaaccaactacagtcacctctgctacctcagcatgggctggagcctttcatggaacagtagacatagtgcccagcgtgggattcgatacaggtctacagcatcaagacaagagtaaggaatcaccgtggtactgaaacacacaatcttagtgagttaagttgcagcataaatccaagggcccactgggaaaagatactgtcgggtttttccattcagcaataggacacgaaaggcatagaaggagaagacaaagtgtcacgcagttgactggttttcggcctttcttgagaaagcaaagtgggtcccagacattgaagaaaagcatttttatttgtttatttcctcatctgagcctttgccaactgtgcaactctctccttttgttatcttgcttttatcaatatatagctaagtttttgtttcattttgatttttttttttagccaaccaccttgtcaggaaaggatgaaccacacattaaaatgttcattctttcaggaatacaagtttgtagctctatgtgcatctatttttgtagaaatacaaaaagtttggtttagcattgatgggctatttttgagggatgtattttttttaaaattgtaaaaattgttgagttctgtttaaagaacttgctctcagagaagcactggcaaaaatgtttaaaatgcttatctctaagatgtctattatatgctctgtctgtgctttctaggttacctcaaatgttttgtttttttccttcttacaaaagtagctataccgtagtcaaaccaatgcagtattgtttttacattgaatctcagtaaagatttaattccatgctagctcaattagttttgaattatatgtatagcttgaaaagtttttttttaatgactgtgctaaagaaatgatattttattgctttgatttctcccaaagaataacttggaggttgactaataagaaagttggcataaactttcaatcaaatgaagagtttgcctagaggagactaattctctttctagcccatccaaatttgataaatggaaccagaggttatatacaactacaaggaaaaaaatgcatttaaccatgccacctatgagtgccagtgacttattttacttgtttttaattattcattcatggcaatttaaaaagtcatattttaagtgggatttgtttttcctgaagggcatttgaaggaacaatatctgggaaggtactagagaaattacaaagcccgagctctttcttataatgccacctatccctgtaagctaaacaaacaaacaaacaaacaaacaaacagttctatatataatagtttcaacacagaacttaacaagtctctttttttgtttgtttaaatctggctttacttgatttaattcctttttagaaagaaatttagggcaaaataaagtgtatattaggatttaaatttatgccacaatttaaaaataaaaccagaggttatatacaatttaaattgggctaaaaattaaaaatttgaggatttaacttgatatagctctcaggatctaaataaagtttaaattatcattaagacactgctaggagaagattaagattatgaaagtaacagttattgatactgctggacttcaaaggcaaagttcatttcttccattaactgcttccagagatgtcatgtaaaaaagttagtgtattagagaagttttttagctttataaagaggttttttcaaatttctcccatttttctctccacccacataaaatagtatgttcagtgaaatgccactttctatctttaattgttcgtatcatatatgcgaactttttagacatgaacatgacatgttcagctaggcagagttctcatagataattttcaaatattttccttggctgtaatttatgtattcatttatatcctatccgtcttttgagcttcagatctatatactcttttgtactctcatcactccgcactttgctgtttcttacctagactctcttttacacaatatgcacatttttaccattgtggggtccaaatttaagataccttccactcactaataatatgaacttatatttcctgggagtagccaggttaaattttctatactttggtccataatttgatttgatatgattgtttcatttataatttgcccaaatacatggagcacaaaatttagtgaatttataaatctggatttgccttgtgtccttctgagttttcaaaggcaagtattcaacagtccctgtgtgatgactgacagggttatttgcctcatccacatccaccttcggaatacattaacttcctttgtaatttatttgaaagtagtgttaaactcattcagatcattcagttggattttcccaatgaagaggaaaaggaaagtagttattcctagctccatttcttattttccaccaaatttaattgaagggcattaattagatgtcttcaccctgaatttagactttgctctgtgttctcccggtaactgtcagacaaaaagtttattggctctgaggaactgagaaatgttgggaacctggtttctgctgtacacaggaaagatttgtaagtgagctctctctttgaaaacaggacccaggctgggcacagcagctcatgcctgtaatcctagtattataggaggcagaggctcgggaggattgcttgagcccaggagttcaagatcagcctaggcaacatagggagaccctatccctacaaaaaatttctgaaaaattacctgggcattgtggggcacacctgttgtcccagctactctggaggctgagtccggaggaacgtttgagcctgggagtttgagtttgcagcttgcagtgagctgtgattgcaccactgtactccagcttgggcaacagagcaagatcctgtctcaaaaggaaaaagaaaacaggacctaggtgtttggggtacactgccacccagggagtggatcaaaaatatacatagaaagagaatgagcatgtctctataattgtcttctaggaccatattgctgttagaagtcctaaaagaggatgggttgtaatttagcataatattctgaattcattccaagtttaaaatcctgtcattctctggctcttcttttttcacatcaaaatgatgctgttggacttagaggcttccgaactgttttattgagggctactatctgcctccacaattttattaaaaccactccacctttagacaaaggtgacttttgtctgattttacaaatcagattttattcaagctttctaaatatctgtgaagtagaccctagaaaattgtctcgtttattttaaatagaatctatgcttccaccaataaaccatcgggagctaagaaacaacataatgttgacaaatcaggaacctaacagattattttgtctctcattattaatttgaaagagcctctaaacttttgagaaatcaatgtgtcttcttaagaaagttaagcaccctctcttaactttcccctctatttgctctcctttttctttcttcttaagagtatttatattattttgttaagcaaaaatggctaagattgctctaaaatttgcaaaatgaggagtggattgcaaataattgagggatttatttctttaactttataagactttaaaaaaaaaacccaaattctaagcactgacatgaaagttgcctttgagaagcttgttattcattatacaaaaagtatttgcccattcctattctaagatttgcagaatatgtcaccctatctagcttttgagtttgctatctggtttaatgttgtatttataatttaaagtggaaatcagaaactgtttcaagaacctgtattctattccttactgagtgtcccttctttaaatagtgtttgctgaattaagccgatgggggcagtggcgttaagtggtggaaaaaggaaagtatatatgttagagttttgaatgagggataaatagaaagcagaatgaattaatggaaaagaactcggctgttaggccattctctaaattctagtttagccaaaagtttatgtgtggtttggggcttcatttatttatctcatgagtaaaatggaataatacctaacaggcaggctctggaagttggaaatcacatacacacacacacacacacagacacacacacacacgatcaatcatgtagctcatattagatgttcaataaataacagctactacagatgcctatcagttgagtaagtagttcattaaattgagctcccaaaggtctcttctcttcacatccatatccgtttctgcagcaatcaaatagatacatgattgtttttctgtaagaaattactgcaaagagaatctttttctcctactaactgttccttctacctggtataggagataaatgtacgtttcttaattagctgactttttagtatgtcatttctgaaggaaaaataaattaaccttaaagtggcatgtaggtccaattcagttttcctacatgttccaaaattttatttaaattactgtgtccaaaattatgaggacagtgtcattcattcaccatagtttatatttttagttatatatcaaacttccttggcacctaggataagaacatttcttttgaagttatccaatttttttttatttttacttgacttgaaggaaagttggaaaatatggtggaaaaaatcttccgcattaaaagggggaaaaacacaaccatttacgatctcagtcagcagatttactctactcaaggaaaaaaagaaacaatcttattggaagcagatgttgacactgtgtcagttattgaagacggaaggagttcacttgagccattgcagttacaaaggggtattgatggcagtttggattcctgattgatcacctttgcagccaagggaaagacagcagaaactgtatgggatcagaaatgaaatcagcctgccagtttaatggagaggctcctagaaactcattttttttctttcctgtaagataaaagacatctttcagaataagaaaggcttgtttgagagagaaattacagtttattctctgaaaatatttaaaggccaaagtgccctttaaatctattattaaagcattgaaactgttattaaaatcattatagaaaaattaggtaaaaattttagcctaactttcaacatccattcaaaaacgaatgttgaaaacaaacatataacctataaaaaagtgaatggctctggcaagtgggggcatgggtggagtccataaggaaacctcagtctcaataacttcaaaatgttacttttcatggtaacttggtcatggagattggtcacagcacagacatttagaattttttagcaggttttttttttcttttgaatcttgtagtgctctctgggaattgcaccatgtacacttttacaacctacagaaatcgtcattattgttaaagtatctcaacttttctatttcttttattgtctattgtgcttttttgtttaaaaatacttttatagttttaaagtattggtcaaagtagtattctcttgaagttctagtcaatttaatttgatccaataagtttttctgaatctcctttttaagttccaagaaattctattataaataagtgtacttttaccaattccattgtataagcaaacagacaccttttagaaaaggataagtaatcatcaatttgtttttttaaaaaaaaaaacaatttctagactactaaatttggcataagaataattcttttaaaatgcaacatactttaattagtttttttggtatatgcataagatgtgaactttcctattgatatcactttatattaatagagatgtacatttctttctatgccgtggctagagcaaaagttaataatgattatttacacaattgatttaatttcttaggatatgtataatattggatattatatctgatttaaaaatactattccatacattttttttttcaggagataaaacatagggaaaggttttcatgtgaattctttgtatcactttgaagtacatatatttaaagggaagatggatacaatttgtttttattatataaatctaggtaaggtgaaatgcttttgtcaacaaaaatacagtgtagtgaattttatatttgtcacttgattaggtaaactgaaaactaacaatagaaatattattttactgcattgaaataccatgaactttcagacttgttagttctacaagaagttgtgctaccttaattttgtgtttccagaaataaaaattaaccttagttatgctgtcatttttaactaataaaaaaagtataattcataaaacttttggctttataagataattataaaattatatatttttttctgtttttgtggggttgggaaaacattttcttatttctattcactcttcaaatgcaggtctcataatatgtgtcaatgatataagatgatggaagactttgtaataaaaacatatgtcattatcttcaatttgttcaataaataatttaatgtgaattgaatgtttgtattttaacatagcatttggatttggtctgcatttcttgagaatttaaagctctttttgtttcctccttattcaattaagcatcttataaatattttggaaattacaacatcttaggtgttattaattaagaagttaatttctagggccaagaagtctatatgttacagcaaggaatagattataaaatacatgtttataatggaaaagaaaatgaaatggggtatattaattacataacagcaagagtcttgagaattttataatacaatgcttctaaggatattggttgaccaaggtgtattttattgtttttacatttgttgacagggactctgccataagtagtatgaaaaaacaaacaaaaacttttctacgattcattaacattgaaaagagaattccaagaccttgtattctgaagaaagctagagtttctctaagtgggccttcaattttcttattacacgtatctttaatgtgaaagtactaaagtctgaaaatcagcatttaaataatagactttccagcattacagatgaaataatttggcgcaggctttttaactgtctaccatatttagaatgtggtgtcaaaatgagatttttagaactgctgtaaaatattactacattactacaacgataacggcctaaaacaacacaaatttattatcttacagctctgtcagtcagacattcagcaaagatcttagtcttggtgggctacagaatgtaggaggcatttcctggatgcttccaagagagaatcttgctgttccctgcttctagagtcctttgcttagtttccttccatcttcaaatccagcaacctggtcaagaccttctcacatgacatcactgacttcctcttcttcctctcccttacatatttaaggactcatgtgattacaatagctgcatctgtgtaatccagaataatctcttcatctcaaggtttttgttctgttttgtttttttgttttgttttgttttgttttgttttgatggagtcttgctctgtcgtcaggctggagtgcagtggcgcgatctcggctcactccaacctccacctcccgggttcaaaggattcccctgcctcagcctctcgagtagctgggactacagatgcgtgctaccacacaaggctaatattttgtattttagtagagacgggatttcaccatgttggccaggatggtctccgtctcctgacctcgtgatctgcctgccttggcctcccaaagtgttgggattacaggcataagccattgcgccatgctcaaggttcttaattacatctttaaaggccctttttccatgtacagtaacatattcaatggttctggggattaggacttggagccattattctacctacaacaattagtattggacttccatcattttctatcactcttgtaatcgagaaggactatttcactgggagtagcaagtcataatgtttgcgttggcatttgtgtgggggtttatcttcattcattaaataattgcatgtaaagaaaattcctgtcactatttcaaatgtttcatgtagttattatagtgcttcagaatccaaagggttatgtgttacttatgtaagatgagcagtctagggggtggagaacaggtcatctagtgcagattcttcctagctgaagtgtgttttctctggggacaaccaagtaggatttaattgttttgcttccttttttgggaacttagacccatcttgcgatgtcctaagtctccaagcatcttatttgacctgcttatacacatttgactaaatagctaaatatgaccacattgacgtggtaaagctttaacacttttgtccagattgaatcactccatctgctatcagttaagcagtggaaaactgttatggaaaagcaaacatgttttgatagatttaatgtgtaaagaaggtatccatactctggaatgctgctgatcaataaatgagctgcaagactttgttcgaaacaacactcaagcacaactgttttactttccataccaagtttggctgtgactgaatgaagaacatcagcattgatctttgctttgcacttgtacaagagactatttgcagagagccaaatatagcaacagaggatttaatatcttgccaaaaaatacaaaatctgttcccctttaagcatgacactctatcctttcttgtggatcttgctaaaaggaaaatatagctttaaactcccctattccttctgttgaaagcttaagaatctttttcaaatgagctatgtatggttttgtggtattttatgtttccaaaagaaaatggctacatgaaaaatctgtccagtgttatcatttttcttacaaaaaatacttctagttatggttgtattaattaatttgattgtgataatgattacacaatgtttacctatatcaaatcatcatatcgtataccttaaatatatataacttttatgtgtcaattataactcagtaagtctgggaaaatatcgttaagtcaaagattagagtcaacagaaataaagaaaaatcatactttgataacttcaggactaatcaaggatcaatgggtgacatgatatcatgctatgtgccattttgtgttaaacaaattacaccaacaataaaaaaaattggcttcaa

SEQ ID NO: 12253 - DNA, 3199 bp, Homo sapiens
gtttttctaaacagcctgacactgaggggaggcagtgagactgtaagcagtctgggttgggcagaaggcagaaaaccagcagagtcacagaggagatggccaactgccaaatagccatcttgtaccagagattccagagagtggtctttggaatttcccaactcctttgcttcagtgccctgatctctgaactaacaaaccagaaagaagtggcagcatggacttatcattacagcacaaaagcatactcatggaatatttcccgtaaatactgccagaatcgctacacagacttagtggccatccagaataaaaatgaaattgattacctcaataaggtcctaccctactacagctcctactactggattgggatccgaaagaacaataagacatggacatgggtgggaaccaaaaaggctctcaccaacgaggctgagaactgggctgataatgaacctaacaacaaaaggaacaacgaggactgcgtggagatatacatcaagagtccgtcagcccctggcaagtggaatgatgagcactgcttgaagaaaaagcacgcattgtgttacacagcctcctgccaggacatgtcctgcagcaaacaaggagagtgcctcgagaccatcgggaactacacctgctcctgttaccctggattctatgggccagaatgtgaatacgtgagagagtgtggagaacttgagctccctcaacacgtgctcatgaactgcagccaccctctgggaaacttctcttttaactcgcagtgcagcttccactgcactgacgggtaccaagtaaatgggcccagcaagctggaatgcttggcttctggaatctggacaaataagcctccacagtgtttagctgcccagtgcccacccctgaagattcctgaacgaggaaacatgatctgccttcattctgcaaaagcattccagcatcagtctagctgcagcttcagttgtgaagagggatttgcattagttggaccggaagtggtgcaatgcacagcctcgggggtatggacagccccagccccagtgtgtaaagctgtgcagtgtcagcacctggaagcccccagtgaaggaaccatggactgtgttcatccgctcactgcttttgcctatggctccagctgcaaatttgagtgccagcccggctacagagtgaggggcttggacatgctccgctgcattgactctggacactggtctgcacccttgccaacctgtgaggctatttcgtgtgagccgctggagagtcctgtccacggaagcatggattgctctccatccttgagagcgtttcagtatgacaccaactgtagcttccgctgtgctgaaggtttcatgctgagaggagccgatatagttcggtgtgataacttgggacagtggacagcaccagccccagtctgtcaagctttgcagtgccaggatctcccagttccaaatgaggcccgggtgaactgctcccaccccttcggtgcctttaggtaccagtcagtctgcagcttcacctgcaatgaaggcttgctcctggtgggagcaagtgtgctacagtgcttggctactggaaactggaattctgttcctccagaatgccaagccattccctgcacacctttgctaagccctcagaatggaacaatgacctgtgttcaacctcttggaagttccagttataaatccacatgtcaattcatctgtgacgagggatattctttgtctggaccagaaagattggattgtactcgatcgggacgctggacagactccccaccaatgtgtgaagccatcaagtgcccagaactctttgccccagagcagggcagcctggattgttctgacactcgtggagaattcaatgttggctccacctgtcatttctcttgtaacaatggctttaagctggaggggcccaataatgtggaatgcacaacttctggaagatggtcagctactccaccaacctgcaaaggcatagcatcacttcctactccagggttgcaatgtccagccctcaccactcctgggcagggaaccatgtactgtaggcatcatccgggaacctttggttttaataccacttgttactttggctgcaacgctggattcacactcataggagacagcactctcagctgcagaccttcaggacaatggacagcagtaactccagcatgcagagctgtgaaatgctcagaactacatgttaataagccaatagcgatgaactgctccaacctctggggaaacttcagttatggatcaatctgctctttccattgtctagagggccagttacttaatggctctgcacaaacagcatgccaagagaatggccactggtcaactaccgtgccaacctgccaagcaggaccattgactatccaggaagccctgacttactttggtggagcggtggcttctacaataggtctgataatgggtgggacgctcctggctttgctaagaaagcgtttcagacaaaaagatgatgggaaatgccccttgaatcctcacagccacctaggaacatatggagtttttacaaacgctgcatttgacccgagtccttaaggtttccataaacacccatgaatcaaagacatggaattaccttagattagctctggaccagcctgttggacccgctctggaccaaccctgtttcctgagtttgggattgtggtacaatctcaaattctcaacctaccaccccttcctgtcccacctcttctcttcctgtaacacaagccacagaagccaggagcaaatgtttctgcagtagtctctgtgctttgactcacctgttacttgaaataccagtgaaccaaagagactggagcatctgactcacaagaagaccagactgtggagaaataaaaatacctctttattttttgattgaaggaaggttttctccactttgttggaaagcaggtggcatctctaattggaagaaattcctgtagcatcttctggagtctccagtggttgctgttgatgaggcctcttggacctctgctctgaggcttccagagagtcctctggatggcaccagaggctgcagaaggccaagaatcaagctagaaggccacatgtcaccgtggaccttcctgccaccagtcactgtccctcaaatgacccaaagaccaatattcaaatgcgtaattaaaagaattttcccc

SEQ ID NO: 12254 - DNA, 2830 bp, Homo sapiens
cggacgcgtgggcggacgcgtgggtcgcccacgcgtccgacttgttgcagttgctgtaggattctaaatccaggtgattgtttcaaactgagcatcaacaacaaaaacatttgtatgatatctatatttcaatcatggaccaaaatcaacatttgaataaaacagcagaggcacaaccttcagagaataagaaaacaagatactgcaatggattgaagatgttcttggcagctctgtcactcagctttattgctaagacactaggtgcaattattatgaaaagttccatcattcatatagaacggagatttgagatatcctcttctcttgttggttttattgacggaagctttgaaattggaaatttgcttgtgattgtatttgtgagttactttggatccaaactacatagaccaaagttaattggaatcggttgtttcattatgggaattggaggtgttttgactgctttgccacatttcttcatgggatattacaggtattctaaagaaactaatatcgattcatcagaaaattcaacatcgaccttatccacttgtttaattaatcaaattttatcactcaatagagcatcacctgagatagtgggaaaaggttgtttaaaggaatctgggtcatacatgtggatatatgtgttcatgggtaatatgcttcgtggaataggggagactcccatagtaccattggggctttcttacattgatgatttcgctaaagaaggacattcttctttgtatttaggtatattgaatgcaatagcaatgattggtccaatcattggctttaccctgggatctctgttttctaaaatgtacgtggatattggatatgtagatctaagcactatcaggataactcctactgattctcgatgggttggagcttggtggcttaatttccttgtgtctggactattctccattatttcttccataccattctttttcttgccccaaactccaaataaaccacaaaaagaaagaaaagcttcactgtctttgcatgtgctggaaacaaatgatgaaaaggatcaaacagctaatttgaccaatcaaggaaaaaatattaccaaaaatgtgactggttttttccagtcttttaaaagcatccttactaatcccctgtatgttatgtttgtgcttttgacgttgttacaagtaagcagctatattggtgcttttacttatgtcttcaaatacgtagagcaacagtatggtcagccttcatctaaggctaacatcttattgggagtcataaccatacctatttttgcaagtggaatgtttttaggaggatatatcattaaaaaattcaaactgaacaccgttggaattgccaaattctcatgttttactgctgtgatgtcattgtccttttacctattatattttttcatactctgtgaaaacaaatcagttgccggactaaccatgacctatgatggaaataatccagtgacatctcatagagatgtaccactttcttattgcaactcagactgcaattgtgatgaaagtcaatgggaaccagtctgtggaaacaatggaataacttacatctcaccctgtctagcaggttgcaaatcttcaagtggcaataaaaagcctatagtgttttacaactgcagttgtttggaagtaactggtctccagaacagaaattactcagcccatttgggtgaatgcccaagagatgatgcttgtacaaggaaattttacttttttgttgcaatacaagtcttgaatttatttttctctgcacttggaggcacctcacatgtcatgctgattgttaaaattgttcaacctgaattgaaatcacttgcactgggtttccactcaatggttatacgagcactaggaggaattctagctccaatatattttggggctctgattgatacaacgtgtataaagtggtccaccaacaactgtggcacacgtgggtcatgtaggacatataattccacatcattttcaagggtctacttgggcttgtcttcaatgttaagagtctcatcacttgttttatatattatattaatttatgccatgaagaaaaaatatcaagagaaagatatcaatgcatcagaaaatggaagtgtcatggatgaagcaaacttagaatccttaaataaaaataaacattttgtcccttctgctggggcagatagtgaaacacattgttaaggggagaaaaaaagccacttctgcttctgtgtttccaaacagcattgcattgattcagtaagatgttatttttgaggagttcctggtcctttcactaagaatttccacatcttttatggtggaagtataaataagcctatgaacttataataaaacaaactgtaggtagaaaaaatgagagtactcattgttacattatagctacatatttgtggttaaggttagactatatgatccatacaaattaaagtgagagacatggttactgtgtaataaaagaaaaaatacttgttcaggtaattctaattcttaataaaacaaatgagtatcatacaggtagaggttaaaaaggaggagctagattcatatcctaagtaaagagaaatgcctagtgtctattttattaaacaaacaaacacagagtttgaactataatactaaggcctgaagtctagcttggatatatgctacaataatatctgttactcacataaaattatatatttcacagactttatcaatgtataattaacaattatcttgtttaagtaaatttagaatacatttaagtattgtggaagaaataaagacattccaatatttgcaaaaaaaaaaaaaaa

SEQ ID NO: 12255 - DNA, 2776 bp, Homo sapiens
agaagggcaaaaacattgactgcctcaaggtctcaagcaccagtcttcaccgcggaaagcatgttgtggctgttccaatcgctcctgtttgtcttctgctttggcccagggaatgtagtttcacaaagcagcttaaccccattgatggtgaacgggattctgggggagtcagtaactcttcccctggagtttcctgcaggagagaaggtcaacttcatcacttggcttttcaatgaaacatctcttgccttcatagtaccccatgaaaccaaaagtccagaaatccacgtgactaatccgaaacagggaaagcgactgaacttcacccagtcctactccctgcaactcagcaacctgaagatggaagacacaggctcttacagagcccagatatccacaaagacctctgcaaagctgtccagttacactctgaggatattaagacaactgaggaacatacaagttaccaatcacagtcagctatttcagaatatgacctgtgagctccatctgacttgctctgtggaggatgcagatgacaatgtctcattcagatgggaggccttgggaaacacactttcaagtcagccaaacctcactgtctcctgggaccccaggatttccagtgaacaggactacacctgcatagcagagaatgctgtcagtaatttatccttctctgtctctgcccagaagctttgcgaagatgttaaaattcaatatacagataccaaaatgattctgtttatggtttctgggatatgcatagtcttcggtttcatcatactgctgttacttgttttgaggaaaagaagagattccctatctttgtctactcagcgaacacagggccccgagtccgcaaggaacctagagtatgtttcagtgtctccaacgaacaacactgtgtatgcttcagtcactcattcaaacagggaaacagaaatctggacacctagagaaaatgatactatcacaatttactccacaattaatcattccaaagagagtaaacccactttttccagggcaactgcccttgacaatgtcgtgtaagttgctgaaaggcctcagaggaattcgggaatgacacgtcttctgatcccatgagacagaacaaagaacaggaagcttggttcctgttgttcctggcaacagaatttgaatatctaggataggatgatcacctccagtccttcggacttaaacctgcctacctgagtcaaacacctaaggataacatcatttccagcatgtggttcaaataatattttccaatccacttcaggccaaaacatgctaaagataacacaccagcacattgactctctctttgataactaagcaaatggaattatggttgacagagagtttatgatccagaagacaaccacttctctccttttagaaagcagcaggattgacttattgagaaataatgcagtgtgttggttacatgtgtagtctctggagttggatgggcccatcctgatacaagttgagcatcccttgtctgaaatgcttgggattagaaatgtttcagatttcaattttttttcagattttggaatatttgcattatatttagcggttgagtatccaaatccaaaaatccaaaattcaaaatgctccaataagcatttcccttgagtttcattgatgtcgatgcagtgctcaaaatctcagattttggagcattttggatattggatttttggatttgggatgctcaacttgtacaatgtttattagacacatctcctgggacatactgcctaaccttttggagccttagtctcccagactgaaaaaggaagaggatggtattacatcagctccattgtttgagccaagaatctaagtcatccctgactccagtgtctttgtcaccaggccctttggactctacctcagaaatatttcttggaccttccacttctcctccaactccttgaccaccatcctgtatccaaccatcaccacctctaacctgaatcctaccttaagatcagaacagttgtcctcacttttgttcttgtccctctccaacccactctccacaagatggccagagtaatgtttttaatataaattggatccttcagtttcctgcttaaaaccctgcaggtttcccaatgcactcagaaagaaatccagtttccatggccctggatggtctggcccacctccagcctcagctagcattacccttctgacactctctatgtagcctccctgatcttctttcagctcctctattaaaggaaaagttctttatgttaattatttacatcttcctgcaggcccttcctctgcctgctggggtcctcctattctttaggtttaattttaaatatgtcacctcctaagagaaaccttcccagaccactctttctaaaatgaatcttctaggctgggcatggtggctcacacctgtaatccctgtactttgggaggccaaggggggagatcacttgaggtcaggagttcaagaccagcctggccaacttggtgaaaccccgtctttactaaaaatacaaaaaaattagccaggcgtggtggtgcacccctaaaatcccagctacttgagagactgaggcaggagaatcgcttgaacccaggaggtggaggttccagtgagccaaaatcatgccaatgtattccagtctgggtgacagagtgagactctgtctcaaaaaataaataaataaaataaaatgaaatagatcttataaaaaaaaaaaaaaaaaaaaaaaaaaaaaaaaaaaaaaaaaaa

SEQ ID NO: 12256 - DNA, 1824 bp, Homo sapiens
cagctctctgtcagaatggccaccatggtaccatccgtgttgtggcccagggcctgctggactctgctggtctgctgtctgctgaccccaggtgtccaggggcaggagttccttttgcgggtggagccccagaaccctgtgctctctgctggagggtccctgtttgtgaactgcagtactgattgtcccagctctgagaaaatcgccttggagacgtccctatcaaaggagctggtggccagtggcatgggctgggcagccttcaatctcagcaacgtgactggcaacagtcggatcctctgctcagtgtactgcaatggctcccagataacaggctcctctaacatcaccgtgtacgggctcccggagcgtgtggagctggcacccctgcctccttggcagccggtgggccagaacttcaccctgcgctgccaagtggagggtgggtcgccccggaccagcctcacggtggtgctgcttcgctgggaggaggagctgagccggcagcccgcagtggaggagccagcggaggtcactgccactgtgctggccagcagagacgaccacggagcccctttctcatgccgcacagaactggacatgcagccccaggggctgggactgttcgtgaacacctcagccccccgccagctccgaacctttgtcctgcccgtgacccccccgcgcctcgtggccccccggttcttggaggtggaaacgtcgtggccggtggactgcaccctagacgggctttttccagcctcagaggcccaggtctacctggcgctgggggaccagatgctgaatgcgacagtcatgaaccacggggacacgctaacggccacagccacagccacggcgcgcgcggatcaggagggtgcccgggagatcgtctgcaacgtgaccctagggggcgagagacgggaggcccgggagaacttgacggtctttagcttcctaggacccattgtgaacctcagcgagcccaccgcccatgaggggtccacagtgaccgtgagttgcatggctggggctcgagtccaggtcacgctggacggagttccggccgcggccccggggcagccagctcaacttcagctaaatgctaccgagagtgacgacggacgcagcttcttctgcagtgccactctcgaggtggacggcgagttcttgcacaggaacagtagcgtccagctgcgagtcctgtatggtcccaaaattgaccgagccacatgcccccagcacttgaaatggaaagataaaacgagacacgtcctgcagtgccaagccaggggcaacccgtaccccgagctgcggtgtttgaaggaaggctccagccgggaggtgccggtggggatcccgttcttcgtcaacgtaacacataatggtacttatcagtgccaagcgtccagctcacgaggcaaatacaccctggtcgtggtgatggacattgaggctgggagctcccactttgtccccgtcttcgtggcggtgttactgaccctgggcgtggtgactatcgtactggccttaatgtacgtcttcagggagcaccaacggagcggcagttaccatgttagggaggagagcacctatctgcccctcacgtctatgcagccgacagaagcaatgggggaagaaccgtccagagctgagtgacgctgggatccgggatcaaagttggcgggggcttggctgtgccctcagattccgcaccaataaagccttcaaactccctaaaaaaaaaaaaaaaaaaaaaaaaaaaaaaaaaaaaaaaaaaaaaaaaaaaaaaaaaaaaaaaaaaaaaaaaaaaaaaaaaaaaaa

SEQ ID NO: 12257 - DNA, 1428 bp, Homo sapiens
gcccgcgcttccgtatcgctcctcgtaggccggggctcggcgcgcgcacccgcactaaagacgcttcttcccggcgggtaggaatcccgccggcgagccgaacagttccccgagcgcagcccgcggaccaccacccggccgcacgggccgcttttgtcccccgcccgccgcttctgtccgagaggccgcccgcgaggcgcatcctgaccgcgagcgtcgggtcccagagccgggcgcggctggggcccgaggctagcatctctcgggagccgcaaggcgagagctgcaaagtttaattagacacttcagaattttgatcacctaatgttgatttcagatgtaaaagtcaagagaagactctaaaaatagcaaagatgcttttgagccagaatgccttcatcttcagatcacttaatttggttctcatggtgtatatcagcctcgtgtttggtatttcatatgattcgcctgattacacagatgaatcttgcactttcaagatatcattgcgaaatttccggtccatcttatcatgggaattaaaaaaccactccattgtaccaactcactatacattgctgtatacaatcatgagtaaaccagaagatttgaaggtggttaagaactgtgcaaataccacaagatcattttgtgacctcacagatgagtggagaagcacacacgaggcctatgtcaccgtcctagaaggattcagcgggaacacaacgttgttcagttgctcacacaatttctggctggccatagacatgtcttttgaaccaccagagtttgagattgttggttttaccaaccacattaatgtgatggtgaaatttccatctattgttgaggaagaattacagtttgatttatctctcgtcattgaagaacagtcagagggaattgttaagaagcataaacccgaaataaaaggaaacatgagtggaaatttcacctatatcattgacaagttaattccaaacacgaactactgtgtatctgtttatttagagcacagtgatgagcaagcagtaataaagtctcccttaaaatgcaccctccttccacctggccaggaatcagaatcagcagaatctgccaaaataggaggaataattactgtgtttttgatagcattggtcttgacaagcaccatagtgacactgaaatggattggttatatatgcttaagaaatagcctccccaaagtcttgaggcaaggtctcgctaagggctggaatgcagtggctattcacaggtgcagtcataatgcactacagtctgaaactcctgagctcaaacagtcgtcctgcctaagcttccccagtagctgggattacaagcgtgcatccctgtgccccagtgattaagttttattatgtagaaaataaagagcaaacagtacagctgaaaaaaaaaaaaaaaaaa

SEQ ID NO: 12258 - DNA, 1715 bp, Homo sapiens
ggcctgccgagtccgcggcgttccccggctgcagccgggagggggccgaggagtgactgagccccgggctgtgcagtccgacgccgactgaggcacgagcgggtgacgctgggcctgcagcgcggagcagaaagcagaacccgcagagtcctccctgctgctgtgtggacgacacgtgggcacaggcagaagtgggccctgtgaccagctgcactggtttcgtggaaggaagctccaggactggcgggatgggctcagcctgtatcaaagtcaccaaatactttctcttcctcttcaacttgatcttctttatcctgggcgcagtgatcctgggcttcggggtgtggatcctggccgacaagagcagtttcatctctgtcctgcaaacctcctccagctcgcttaggatgggggcctatgtcttcatcggcgtgggggcagtcactatgctcatgggcttcctgggctgcatcggcgccgtcaacgaggtccgctgcctgctggggctgtactttgctttcctgctcctgatcctcattgcccaggtgacggccggggccctcttctacttcaacatgggcaagctgaagcaggagatgggcggcatcgtgactgagctcattcgagactacaacagcagtcgcgaggacagcctgcaggatgcctgggactacgtgcaggctcaggtgaagtgctgcggctgggtcagcttctacaactggacagacaacgctgagctcatgaatcgccctgaggtcacctacccctgttcctgcgaagtcaagggggaagaggacaacagcctttctgtgaggaagggcttctgcgaggcccccggcaacaggacccagagtggcaaccaccctgaggactggcctgtgtaccaggagggctgcatggagaaggtgcaggcgtggctgcaggagaacctgggcatcatcctcggcgtgggcgtgggtgtggccatcatcgagctcctggggatggtcctgtccatctgcttgtgccggcacgtccattccgaagactacagcaaggtccccaagtactgaggcagctgctatccccatctccctgcctggcccccaacctcagggctcccaggggtctccctggctccctcctccaggcctgcctcccacttcactgcgaagaccctcttgcccatcctgactgaaagtagggggctttctggggcctagcgatctctcctggcctatccgctgccagccttgagccctggctgttctgtggttcctctgctcaccgcccatcagggttctcttagcaactcagagaaaaatgctccccacagcgtccctggcgcaggtgggctggacttctacctgccctcaagggtgtgtatattgtataggggcaactgtatgaaaaattggggaggagggggccgggcgcggtggctcacgcctgtaatcccagcactttgggaggccgaggcgggtggatcacgaggtcaggagatcgagaccatcctggctaacatggtgaaaccccgtctctactaaaaatacaaaaaaaatttagccgggcgcggtggcgggcacctgtagtcccagctacttgggaggctgaggcaggagaatggtgtgaacccgggagcggaggttgcagtgagctgagatcgtgctactgcactccagcctgggggacagaaagagactccgtctcaaaaaaaaaaaaaaaaaaaaaaaaaa

SEQ ID NO: 12259 - DNA, 2339 bp, Homo sapiens
acgcggtgccgcggggcgggagtagaggcggagggaggggacacgggctcattgcggtgtgcgccctgcactctgtccctcactcgccgccgacgacctgtctcgccgagcgcacgccttgccgccgccccgcagaaatgcttcggttacccacagtctttcgccagatgagaccggtgtccagggtactggctcctcatctcactcgggcttatgccaaagatgtaaaatttggtgcagatgcccgagccttaatgcttcaaggtgtagaccttttagccgatgctgtggccgttacaatggggccaaagggaagaacagtgattattgagcagagttggggaagtcccaaagtaacaaaagatggtgtgactgttgcaaagtcaattgacttaaaagataaatacaaaaacattggagctaaacttgttcaagatgttgccaataacacaaatgaagaagctggggatggcactaccactgctactgtactggcacgctctatagccaaggaaggcttcgagaagattagcaaaggtgctaatccagtggaaatcaggagaggtgtgatgttagctgttgatgctgtaattgctgaacttaaaaagcagtctaaacctgtgaccacccctgaagaaattgcacaggttgctacgatttctgcaaacggagacaaagaaattggcaatatcatctctgatgcaatgaaaaaagttggaagaaagggtgtcatcacagtaaaggatggaaaaacactgaatgatgaattagaaattattgaaggcatgaagtttgatcgaggctatatttctccatactttattaatacatcaaaaggtcagaaatgtgaattccaggatgcctatgttctgttgagtgaaaagaaaatttctagtatccagtccattgtacctgctcttgaaattgccaatgctcaccgtaagcctttggtcataatcgctgaagatgttgatggagaagctctaagtacactcgtcttgaataggctaaaggttggtcttcaggttgtggcagtcaaggctccagggtttggtgacaatagaaagaaccagcttaaagatatggctattgctactggtggtgcagtgtttggagaagagggattgaccctgaatcttgaagacgttcagcctcatgacttaggaaaagttggagaggtcattgtgaccaaagacgatgccatgctcttaaaaggaaaaggtgacaaggctcaaattgaaaaacgtattcaagaaatcattgagcagttagatgtcacaactagtgaatatgaaaaggaaaaactgaatgaacggcttgcaaaactttcagatggagtggctgtgctgaaggttggtgggacaagtgatgttgaagtgaatgaaaagaaagacagagttacagatgcccttaatgctacaagagctgctgttgaagaaggcattgttttgggagggggttgtgccctccttcgatgcattccagccttggactcattgactccagctaatgaagatcaaaaaattggtatagaaattattaaaagaacactcaaaattccagcaatgaccattgctaagaatgcaggtgttgaaggatctttgatagttgagaaaattatgcaaagttcctcagaagttggttatgatgctatggctggagattttgtgaatatggtggaaaaaggaatcattgacccaacaaaggttgtgagaactgctttattggatgctgctggtgtggcctctctgttaactacagcagaagttgtagtcacagaaattcctaaagaagagaaggaccctggaatgggtgcaatgggtggaatgggaggtggtatgggaggtggcatgttctaactcctagactagtgctttacctttattaatgaactgtgacaggaagcccaaggcagtgttcctcaccaataacttcagagaagtcagttggagaaaatgaagaaaaaggctggctgaaaatcactataaccatcagttactggtttcagttgacaaaatatataatggtttactgctgtcattgtccatgcctacagataatttattttgtatttttgaataaaaaacatttgtacattcctgatactgggtacaagagccatgtaccagtgtactgctttcaacttaaatcactgaggcatttttactactattctgttaaaatcaggattttagtgcttgccaccaccagatgagaagttaagcagcctttctgtggagagtgagaataattgtgtacaaagtagagaagtatccaattatgtgacaacctttgtgtaataaaaatttgtttaaagttaaaaaaaaaaaaaaaaaaaa

SEQ ID NO: 12260 - DNA, 705 bp, Homo sapiens
ctctttccagccagcgccgagcgatgggcatctctcgggacaactggcacaagcgccgcaaaaccgggggcaagagaaagccctaccacaagaagcggaagtatgagttggggcgcccagctgccaacaccaagattggcccccgccgcatccacacagtccgtgtgcggggaggtaacaagaaataccgtgccctgaggttggacgtggggaatttctcctggggctcagagtgttgtactcgtaaaacaaggatcatcgatgttgtctacaatgcatctaataacgagctggttcgtaccaagaccctggtgaagaattgcatcgtgctcatcgacagcacaccgtaccgacagtggtacgagtcccactatgcgctgcccctgggccgcaagaagggagccaagctgactcctgaggaagaagagattttaaacaaaaaacgatctaaaaaaattcagaagaaatatgatgaaaggaaaaagaatgccaaaatcagcagtctcctggaggagcagttccagcagggcaagcttcttgcgtgcatcgcttcaaggccgggacagtgtggccgagcagatggctatgtgctagagggcaaagagttggagttctatcttaggaaaatcaaggcccgcaaaggcaaataaatccttgttttgtcttcacccatgtaataaaggtgtttattgttttgttcccaca

SEQ ID NO: 12261 - DNA, 777 bp, Homo sapiens
catgctgttctgacagtttgagattacttattgtcttttctgggaagacaaaaacatgtcggagactgctccacttgctcctaccattcctgcacccgcagaaaaaacacctgtgaagaaaaaggcgaagaaggcaggcgcaactgctgggaaacgcaaagcatccggacccccagtatctgagcttatcaccaaggcagtggcagcttctaaggagcgcagcggcgtttctctggccgcgcttaagaaagcgcttgcggctgctggctacgatgtagaaaaaaacaacagccgtatcaagcttggcctcaagagcttggtgagcaaaggtactctggtgcagaccaaaggtaccggtgcttctggctccttcaaactcaacaagaaagcggcttccggggaaggcaaacccaaggccaaaaaggctggcgcagccaagcctaggaagcctgctggggcagccaagaagcccaagaaggtggctggcgccgctaccccgaagaaaagcatcaaaaagactcctaagaaggtaaagaagccagcaaccgctgctgggaccaagaaagtggccaagagtgcgaaaaaggtgaaaacacctcagccaaaaaaagctgccaagagtccagctaaggccaaagcccctaagcccaaggcggccaagcctaagtcggggaagccgaaggttacaaaggcaaagaaggcagctccgaagaaaaagtgaaactggcgggacgttcccctttgaaaattttaaacggctcttttcagagccaccca

SEQ ID NO: 12262 - DNA, 732 bp, Homo sapiens
catcggcgctttgccacttgtacccgagtttttgattctcaacatgtccgagactgctcctgccgctcccgctgccgcgcctcctgcggagaaggcccctgtaaagaagaaggcggccaaaaaggctgggggtacgcctcgtaaggcgtctggtcccccggtgtcagagctcatcaccaaggctgtggccgcctctaaagagcgtagcggagtttctctggctgctctgaaaaaagcgttggctgccgccggctatgatgtggagaaaaacaacagccgtatcaaacttggtctcaagagcctggtgagcaagggcactctggtgcaaacgaaaggcaccggtgcttctggctcctttaaactcaacaagaaggcagcctccggggaagccaagcccaaggttaaaaaggcgggcggaaccaaacctaagaagccagttggggcagccaagaagcccaagaaggcggctggcggcgcaactccgaagaagagcgctaagaaaacaccgaagaaagcgaagaagccggccgcggccactgtaaccaagaaagtggctaagagcccaaagaaggccaaggttgcgaagcccaagaaagctgccaaaagtgctgctaaggctgtgaagcccaaggccgctaagcccaaggttgtcaagcctaagaaggcggcgcccaagaagaaataggcgaacgcctacttctaaaacccaaaaggctcttttcagagccacca

SEQ ID NO: 12263 - DNA, 785 bp, Homo sapiens
agtcccggccagtgcctctgcttccggctcgaattgctctcgctcacgcttgccttcaacatgtccgagactgcgcctgccgcgcccgctgctccggcccctgccgagaagactcccgtgaagaagaaggcccgcaagtctgcaggtgcggccaagcgcaaagcgtctgggcccccggtgtccgagctcattactaaagctgttgccgcctccaaggagcgcagcggcgtatctttggccgctctcaagaaagcgctggcagccgctggctatgacgtggagaagaacaacagccgcatcaagctgggtctcaagagcctggtgagcaagggcaccctggtgcagaccaagggcaccggcgcgtcgggttccttcaaactcaacaagaaggcggcctctggggaagccaagcctaaggctaaaaaggcaggcgcggccaaggccaagaagccagcaggagcggcgaagaagcccaagaaggcgacgggggcggccacccccaagaagagcgccaagaagaccccaaagaaggcgaagaagccggctgcagctgctggagccaaaaaagcgaaaagcccgaaaaaggcgaaagcagccaagccaaaaaaggcgcccaagagcccagcgaaggccaaagcagttaaacccaaggcggctaaaccaaagaccgccaagcccaaggcagccaagccaaagaaggcggcagccaagaaaaagtagaaagttcctttggccaactgcttagaagcccaacacaacccaaaggctcttttcagagccaccca

SEQ ID NO: 12264 - DNA, 757 bp, Homo sapiens
cgcatcctgcttcgtcaggtttataccactttatttggtgtgctgtgttagtcaccatgtctgaaacagtgcctcccgcccccgccgcttctgctgctcctgagaaacctttagctggcaagaaggcaaagaaacctgctaaggctgcagcagcctccaagaaaaaacccgctggcccttccgtgtcagagctgatcgtgcaggctgcttcctcctctaaggagcgtggtggtgtgtcgttggcagctcttaaaaaggcgctggcggccgcaggctacgacgtggagaagaacaacagccgcattaagctgggcattaagagcctggtaagcaagggaacgttggtgcagacaaagggtaccggagcctcgggttccttcaagctcaacaagaaggcgtcctccgtggaaaccaagcccggcgcctcaaaggtggctacaaaaactaaggcaacgggtgcatctaaaaagctcaaaaaggccacgggggctagcaaaaagagcgtcaagactccgaaaaaggctaaaaagcctgcggcaacaaggaaatcctccaagaatccaaaaaaacccaaaactgtaaagcccaagaaagtagctaaaagccctgctaaagctaaggctgtaaaacccaaggcggccaaggctagggtgacgaagccaaagactgccaaacccaagaaagcggcacccaagaaaaagtaaattcagttagaagtttcttctagtaacccaacggctcttttaagagccaccta

SEQ ID NO: 12265 - DNA, 725 bp, Homo sapiens
catgcttttcgctggttattacatcttgcgtttctctgttgttatgtctgaaaccgtgcctgcagcttctgccagtgctggtgtagccgctatggagaaacttccaaccaagaagcgagggaggaagccggctggcttgataagtgcaagtcgcaaagtgccgaacctctctgtgtccaagttgatcaccgaggccctttcagtgtcacaggaacgagtaggtatgtctttggttgcgctcaagaaggcattggccgctgctggctacgacgtagagaagaataacagccgcatcaaactgtccctcaagagcttagtgaacaagggaatcctggtgcaaaccaggggtactggtgcttccggttcctttaagcttagtaagaaggtgattcctaaatctaccagaagcaaggctaaaaagtcagtttctgccaagaccaagaagctggttttatccagggactccaagtcaccaaagactgctaaaaccaataagagagccaagaagccgagagcgacaactcctaaaactgttaggagcgggagaaaggctaaaggagccaagggtaagcaacagcagaagagcccagtgaaggcaagggcttcgaagtcaaaattgacccaacatcatgaagttaatgttagaaaggccacatctaagaagtaaagagctttccgggaggccaatttggaaagaacccaaaggctcttttaagagccaccca

SEQ ID NO: 12266 - DNA, 1483 bp, Homo sapiens
gacacagtagaaataacactttataagcctcttcctcctcccatctcctggcctccttccatcctcctctgcccagactccgcccctcccagacggtcctcacttctcttttccctagactgcagccagcggagcccgcagccggcccgagccaggaacccaggtccggagcctcaacttcaggatgttgacaacattgctgccgatactgctgctgtctggctgggccttttgtagccaagacgcctcagatggcctccaaagacttcatatgctccagatctcctacttccgcgacccctatcacgtgtggtaccagggcaacgcgtcgctggggggacacctaacgcacgtgctggaaggcccagacaccaacaccacgatcattcagctgcagcccttgcaggagcccgagagctgggcgcgcacgcagagtggcctgcagtcctacctgctccagttccacggcctcgtgcgcctggtgcaccaggagcggaccttggcctttcctctgaccatccgctgcttcctgggctgtgagctgcctcccgagggctctagagcccatgtcttcttcgaagtggctgtgaatgggagctcctttgtgagtttccggccggagagagccttgtggcaggcagacacccaggtcacctccggagtggtcaccttcaccctgcagcagctcaatgcctacaaccgcactcggtatgaactgcgggaattcctggaggacacctgtgtgcagtatgtgcagaaacatatttccgcggaaaacacgaaagggagccaaacaagccgctcctacacttcgctggtcctgggcgtcctggtgggcagtttcatcattgctggtgtggctgtaggcatcttcctgtgcacaggtggacggcgatgttaattactctccagccccctcagaaggggctggattgatggaggctggcaagggaaagtttcagctcactgtgaagccagactccccaactgaaacaccagaaggtttggagtgacagctcctttcttctcccacatctgcccactgaagatttgagggaggggagatggagaggagaggtggacaaagtacttggtttgctaagaacctaagaacgtgtatgctttgctgaattagtctgataagtgaatgtttatctatctttgtggaaaacagataatggagttggggcaggaagcctatggcccatcctccaaagacagacagaatcacctgaggcgttcaaaagatataaccaaataaacaagtcatccacaatcaaaatacaacattcaatacttccaggtgtgtcagacttgggatgggacgctgatataatagggtagaaagaagtaacacgaagaagtggtggaaatgtaaaatccaagtcatatggcagtgatcaattattaatcaattaataatattaataaatttcttatatttaaggcaaaaaaaaaataaaaaaaaaaaaaaaaaaaaaaa

SEQ ID NO: 12267 - DNA, 3678 bp, Homo sapiens
ccccgcgcggcgcgggccagggaagggccacccaggggtcccccacttcccgcttgggcgcccggacggcgaatggagcaggggcgcgcagataattaaagatttacacacagctggaagaaatcatagagaagccgggcgtggtggctcatgcctataatcccagcacttttggaggctgaggcgggcagatcacttgagatcaggagttcgagaccagcctggtgccttggcatctcccaatggggtggctttgctctgggctcctgttccctgtgagctgcctggtcctgctgcaggtggcaagctctgggaacatgaaggtcttgcaggagcccacctgcgtctccgactacatgagcatctctacttgcgagtggaagatgaatggtcccaccaattgcagcaccgagctccgcctgttgtaccagctggtttttctgctctccgaagcccacacgtgtatccctgagaacaacggaggcgcggggtgcgtgtgccacctgctcatggatgacgtggtcagtgcggataactatacactggacctgtgggctgggcagcagctgctgtggaagggctccttcaagcccagcgagcatgtgaaacccagggccccaggaaacctgacagttcacaccaatgtctccgacactctgctgctgacctggagcaacccgtatccccctgacaattacctgtataatcatctcacctatgcagtcaacatttggagtgaaaacgacccggcagatttcagaatctataacgtgacctacctagaaccctccctccgcatcgcagccagcaccctgaagtctgggatttcctacagggcacgggtgagggcctgggctcagtgctataacaccacctggagtgagtggagccccagcaccaagtggcacaactcctacagggagcccttcgagcagcacctcctgctgggcgtcagcgtttcctgcattgtcatcctggccgtctgcctgttgtgctatgtcagcatcaccaagattaagaaagaatggtgggatcagattcccaacccagcccgcagccgcctcgtggctataataatccaggatgctcaggggtcacagtgggagaagcggtcccgaggccaggaaccagccaagtgcccacactggaagaattgtcttaccaagctcttgccctgttttctggagcacaacatgaaaagggatgaagatcctcacaaggctgccaaagagatgcctttccagggctctggaaaatcagcatggtgcccagtggagatcagcaagacagtcctctggccagagagcatcagcgtggtgcgatgtgtggagttgtttgaggccccggtggagtgtgaggaggaggaggaggtagaggaagaaaaagggagcttctgtgcatcgcctgagagcagcagggatgacttccaggagggaagggagggcattgtggcccggctaacagagagcctgttcctggacctgctcggagaggagaatgggggcttttgccagcaggacatgggggagtcatgccttcttccaccttcgggaagtacgagtgctcacatgccctgggatgagttcccaagtgcagggcccaaggaggcacctccctggggcaaggagcagcctctccacctggagccaagtcctcctgccagcccgacccagagtccagacaacctgacttgcacagagacgcccctcgtcatcgcaggcaaccctgcttaccgcagcttcagcaactccctgagccagtcaccgtgtcccagagagctgggtccagacccactgctggccagacacctggaggaagtagaacccgagatgccctgtgtcccccagctctctgagccaaccactgtgccccaacctgagccagaaacctgggagcagatcctccgccgaaatgtcctccagcatggggcagctgcagcccccgtctcggcccccaccagtggctatcaggagtttgtacatgcggtggagcagggtggcacccaggccagtgcggtggtgggcttgggtcccccaggagaggctggttacaaggccttctcaagcctgcttgccagcagtgctgtgtccccagagaaatgtgggtttggggctagcagtggggaagaggggtataagcctttccaagacctcattcctggctgccctggggaccctgccccagtccctgtccccttgttcacctttggactggacagggagccacctcgcagtccgcagagctcacatctcccaagcagctccccagagcacctgggtctggagccgggggaaaaggtagaggacatgccaaagcccccacttccccaggagcaggccacagacccccttgtggacagcctgggcagtggcattgtctactcagcccttacctgccacctgtgcggccacctgaaacagtgtcatggccaggaggatggtggccagacccctgtcatggccagtccttgctgtggctgctgctgtggagacaggtcctcgccccctacaacccccctgagggccccagacccctctccaggtggggttccactggaggccagtctgtgtccggcctccctggcaccctcgggcatctcagagaagagtaaatcctcatcatccttccatcctgcccctggcaatgctcagagctcaagccagacccccaaaatcgtgaactttgtctccgtgggacccacatacatgagggtctcttaggtgcatgtcctcttgttgctgagtctgcagatgaggactagggcttatccatgcctgggaaatgccacctcctggaaggcagccaggctggcagatttccaaaagacttgaagaaccatggtatgaaggtgattggccccactgacgttggcctaacactgggctgcagagactggaccccgcccagcattgggctgggctcgccacatcccatgagagtagagggcactgggtcgccgtgccccacggcaggcccctgcaggaaaactgaggcccttgggcacctcgacttgtgaacgagttgttggctgctccctccacagcttctgcagcagactgtccctgttgtaactgcccaaggcatgttttgcccaccagatcatggcccacgtggaggcccacctgcctctgtctcactgaactagaagccgagcctagaaactaacacagccatcaagggaatgacttgggcggccttgggaaatcgatgagaaattgaacttcagggagggtggtcattgcctagaggtgctcattcatttaacagagcttccttaggttgatgctggaggcagaatcccggctgtcaaggggtgttcagttaaggggagcaacagaggacatgaaaaattgctatgactaaagcagggacaatttgctgccaaacacccatgcccagctgtatggctgggggctcctcgtatgcatggaacccccagaataaatatgctcagccaccctgtgggccgggcaatccagacagcaggcataaggcaccagttaccctgcatgttggcccagacctcaggtgctagggaaggcgggaaccttgggttgagtaatgctcgtctgtgtgttttagtttcatcacctgttatctgtgtttgctgaggagagtggaacagaaggggtggagttttgtataaataaagtttctttgtctctttaaaaaaaaaaa

SEQ ID NO: 12268 - DNA, 6082 bp, Homo sapiens
ataacgtctttgtcactaaaatgttccccaggggccttcggcgagtctttttgtttggttttttgtttttaatctgtggctcttgataatttatctagtggttgcctacacctgaaaaacaagacacagtgtttaactatcaacgaaagaactggacggctccccgccgcagtcccactccccgagtttgtggctggcatttgggccacgccgggctgggcggtcacagcgaggggcgcgcagtttggggtcacacagctccgcttctaggccccaaccaccgttaaaaggggaagcccgtgccccatcaggtccgctcttgctgagcccagagccatcccgcgctctgcgggctgggaggcccgggccaggacgcgagtcctgcgcagccgaggttccccagcgccccctgcagccgcgcgtaggcagagacggagcccggccctgcgcctccgcaccacgcccgggaccccacccagcggcccgtacccggagaagcagcgcgagcacccgaagctcccggctggcggcagaaaccgggagtggggccgggcgagtgcgcggcatcccaggccggcccgaacgctccgcccgcggtgggccgacttcccctcctcttccctctctccttcctttagcccgctggcgccggacacgctgcgcctcatctcttggggcgttcttccccgttggccaaccgtcgcatcccgtgcaactttggggtagtggccgtttagtgttgaatgttccccaccgagagcgcatggcttgggaagcgaggcgcgaacccggcccccgaagggccgccgtccgggagacggtgatgctgttgctgtgcctgggggtcccgaccggccgcccctacaacgtggacactgagagcgcgctgctttaccagggcccccacaacacgctgttcggctactcggtcgtgctgcacagccacggggcgaaccgatggctcctagtgggtgcgcccactgccaactggctcgccaacgcttcagtgatcaatcccggggcgatttacagatgcaggatcggaaagaatcccggccagacgtgcgaacagctccagctgggtagccctaatggagaaccttgtggaaagacttgtttggaagagagagacaatcagtggttgggggtcacactttccagacagccaggagaaaatggatccatcgtgacttgtgggcatagatggaaaaatatattttacataaagaatgaaaataagctccccactggtggttgctatggagtgccccctgatttacgaacagaactgagtaaaagaatagctccgtgttatcaagattatgtgaaaaaatttggagaaaattttgcatcatgtcaagctggaatatccagtttttacacaaaggatttaattgtgatgggggccccaggatcatcttactggactggctctctttttgtctacaatataactacaaataaatacaaggcttttttagacaaacaaaatcaagtaaaatttggaagttatttaggatattcagtcggagctggtcattttcggagccagcatactaccgaagtagtcggaggagctcctcaacatgagcagattggtaaggcatatatattcagcattgatgaaaaagaactaaatatcttacatgaaatgaaaggtaaaaagcttggatcgtactttggagcttctgtctgtgctgtggacctcaatgcagatggcttctcagatctgctcgtgggagcacccatgcagagcaccatcagagaggaaggaagagtgtttgtgtacatcaactctggctcgggagcagtaatgaatgcaatggaaacaaacctcgttggaagtgacaaatatgctgcaagatttggggaatctatagttaatcttggcgacattgacaatgatggctttgaagatgttgctatcggagctccacaagaagatgacttgcaaggtgctatttatatttacaatggccgtgcagatgggatctcgtcaaccttctcacagagaattgaaggacttcagatcagcaaatcgttaagtatgtttggacagtctatatcaggacaaattgatgcagataataatggctatgtagatgtagcagttggtgcttttcggtctgattctgctgtcttgctaaggacaagacctgtagtaattgttgacgcttctttaagccaccctgagtcagtaaatagaacgaaatttgactgtgttgaaaatggatggccttctgtgtgcatagatctaacactttgtttctcatataagggcaaggaagttccaggttacattgttttgttttataacatgagtttggatgtgaacagaaaggcagagtctccaccaagattctatttctcttctaatggaacttctgacgtgattacaggaagcatacaggtgtccagcagagaagctaactgtagaacacatcaagcatttatgcggaaagatgtgcgggacatcctcaccccaattcagattgaagctgcttaccaccttggtcctcatgtcatcagtaaacgaagtacagaggaattcccaccacttcagccaattcttcagcagaagaaagaaaaagacataatgaaaaaaacaataaactttgcaaggttttgtgcccatgaaaattgttctgctgatttacaggtttctgcaaagattgggtttttgaagccccatgaaaataaaacatatcttgctgttgggagtatgaagacattgatgttgaatgtgtccttgtttaatgctggagatgatgcatatgaaacgactctacatgtcaaactacccgtgggtctttatttcattaagattttagagctggaagagaagcaaataaactgtgaagtcacagataactctggcgtggtacaacttgactgcagtattggctatatatatgtagatcatctctcaaggatagatattagctttctcctggatgtgagctcactcagcagagcggaagaggacctcagtatcacagtgcatgctacctgtgaaaatgaagaggaaatggacaatctaaagcacagcagagtgactgtagcaatacctttaaaatatgaggttaagctgactgttcatgggtttgtaaacccaacttcatttgtgtatggatcaaatgatgaaaatgagcctgaaacgtgcatggtggagaaaatgaacttaactttccatgttatcaacactggcaatagtatggctcccaatgttagtgtggaaataatggtaccaaattcttttagcccccaaactgataagctgttcaacattttggatgtccagactactactggagaatgccactttgaaaattatcaaagagtgtgtgcattagagcagcaaaagagtgcaatgcagaccttgaaaggcatagtccggttcttgtccaagactgataagaggctattgtactgcataaaagctgatccacattgtttaaatttcttgtgtaattttgggaaaatggaaagtggaaaagaagccagtgttcatatccaactggaaggccggccatccattttagaaatggatgagacttcagcactcaagtttgaaataagagcaacaggttttccagagccaaatccaagagtaattgaactaaacaaggatgagaatgttgcgcatgttctactggaaggactacatcatcaaagacccaaacgttatttcaccatagtgattatttcaagtagcttgctacttggacttattgtacttctgttgatctcatatgttatgtggaaggctggcttctttaaaagacaatacaaatctatcctacaagaagaaaacagaagagacagttggagttatatcaacagtaaaagcaatgatgattaaggacttctttcaaattgagagaatggaaaacagactcaggttgtagtaaagaaatttaaaagacactgtttacaagaaaaaatgaattttgtttggacttcttttactcatgatcttgtgacatattatgtcttcatgcaaggggaaaatctcagcaatgattactctttgagatagaagaactgcaaaggtaataatacagccaaagataatctctcagcttttaaatgggtagagaaacactaaagcattcaatttattcaagaaaagtaagcccttgaagatatcttgaaatgaaagtataactgagttaaattatactggagaagtcttagacttgaaatactacttaccatatgtgcttgcctcagtaaaatgaaccccactgggtgggcagaggttcatttcaaatacatctttgatacttgttcaaaatatgttctttaaaaatataattttttagagagctgttcccaaattttctaacgagtggaccattatcactttaaagccctttatttataatacatttcctacgggctgtgttccaacaaccattttttttcagcagactatgaatattatagtattataggccaaactggcaaacttcagactgaacatgtacactggtttgagcttagtgaaattacttctggataattatttttttataattatggatttcaccatctttctttctgtatatatacatgtgtttttatgtaggtatatatttaccattcttcctatctattcttcctataacacacctttatcaagcatacccaggagtaatcttcaaatcttttgttatattctgaaacaaaagattgtgagtgttgcactttacctgatacacgctgatttagaaaatacagaaaccatacctcactaataactttaaaatcaaagctgtgcaaagactagggggcctatacttcatatgtattatgtactatgtaaaatattgactatcacacaactatttccttggatgtaattctttgttaccctttacaagtataagtgttaccttacatggaaacgaagaaacaaaattcataaatttaaattcataaatttagctgaaagatactgattcaatttgtatacagtgaatataaatgagacgacagcaaaattttcatgaaatgtaaaatatttttatagtttgttcatactatatgaggttctattttaaatgactttctggattttaaaaaatttctttaaatacaatcatttttgtaatatttattttatgcttatgatctagataattgcagaatatcattttatctgactctgccttcataagagagctgtggccgaattttgaacatctgttatagggagtgatcaaattagaaggcaatgtggaaaaacaattctgggaaagatttctttatatgaagtccctgccactagccagccatcctaattgatgaaagttatctgttcacaggcctgcagtgatggtgaggaatgttctgagatttgcgaaggcatttgagtagtgaaatgtaagcacaaaacctcctgaacccagagtgtgtatacacaggaataaactttatgacatttatgtatttttaaaaaactttgtatcgttataaaaaggctagtcattctttcaggagaacatctaggatcatagatgaaaaatcaagccccgatttagaactgtcttctccaggatggtctctaaggaaatttacatttggttctttcctactcagaactactcagaaacaactatatatttcaggttatctgagcacagtgaaagcagagtactatggttgtccaacacaggcctctcagatacaaggggaacacaattacatattgggctagattttgcccagttcaaaatagtatttgttatcaacttactttgttacttgtatcatgaattttaaaaccctaccactttaagaagacagggatgggttattcttttttggcaggtaggctatataactatgtgattttgaaatttaactgctctggattagggagcagtgaatcaaggcagacttatgaaatctgtattatatttgtaacagaatataggaaatttaacataattgatgagctcaaatcctgaaaaatgaaagaatccaaattatttcagaattatctaggttaaatattgatgtattatgatggttgcaaagtttttttgtgtgtccaataaacacattgtaaaaaaaa

SEQ ID NO: 12269 - DNA, 2828 bp, Homo sapiens
gcgctacggcggacccggctgggcagttccttccccagaaggagagattcctctgccatggagtcctacgatgtgatcgccaaccagcctgtcgtgatcgacaacggatccggtgtgattaaagctggttttgctggtgatcagatccccaaatactgctttccaaactatgtgggccgacccaagcacgttcgtgtcatggcaggagcccttgaaggcgacatcttcattggccccaaagctgaggagcaccgagggctgctttcaatccgctatcccatggagcatggcatcgtcaaggattggaacgacatggaacgcatttggcaatatgtctattctaaggaccagctgcagactttctcagaggagcatcctgtgctcctgactgaggcgcctttaaacccacgaaaaaaccgggaacgagctgccgaagttttcttcgagaccttcaatgtgcccgctcttttcatctccatgcaagctgtactcagcctttacgctacaggcaggaccacaggggtggtgctggattctggggatggagtcacccatgctgtgcccatctatgagggctttgccatgccccactccatcatgcgcatcgacatcgcgggccgggacgtctctcgcttcctgcgcctctacctgcgtaaggagggctacgacttccactcatcctctgagtttgagattgtcaaggccataaaagaaagagcctgttacctatccataaacccccaaaaggatgagacgctagagacagagaaagctcagtactacctgcctgatggcagcaccattgagattggtccttcccgattccgggcccctgagttgctcttcaggccagatttgattggagaggagagtgaaggcatccacgaggtcctggtgttcgccattcagaagtcagacatggacctgcggcgcacgcttttctctaacattgtcctctcaggaggctctaccctgttcaaaggttttggtgacaggctcctgagtgaagtgaagaaactagctccaaaagatgtgaagatcaggatatctgcacctcaggagagactgtattccacgtggattgggggctccatccttgcctccctggacacctttaagaagatgtgggtctccaaaaaggaatatgaggaagacggtgcccgatccatccacagaaaaaccttctaatgtcgggacatcatcttcacctctctctgaagttaactccactttaaaactcgctttcttgagtcggagtgtttgcgaggaactgcctgtgtgtgagtgcgtgtgtggatatgagtgtgtgcgcacatgcgagtgccgtgtggccctgggaccctgggcccagaaaggacgatgaactacccgcagtggtgatgcctgaggcctggggttgaccactaactggctcctgacagggaagagcgctggcagaggctgtgctccctcctcaggtggcctctggctggctgtgggggactccgtttactaccacagggagacagagggaggtaagccatcccccgggagaccttgctgctgaccatcctaggctgggctggcccaccctcacccccacccccagggtgccctgaggccccaggcagctgctgcctccactatcgatgcctcctgactgcacactgaggactgggactggggttgagttctgtctggttttgttgccattttggtttgggaggctggaaaagcaccccaagaagctattacagagactggagtcaggagagagcaggaggccctcatgttcaccagggaacaggaccacaccggccactgaaggagggcaggagcagtcctccctctgaatggctgcagagttaatgttcccagcccagtcccctttcgggggccttgggagagtttaaggcacctgctggttccaggacctcgctttccatctgttcttgttgcaatgccatcttcaaaccgttttatttattgaagtgtttgttcagttaggggctggagagagggagcttgctgcctcctgccttgctacactaatgtttacagcacctaagcttagcctccagggccccacctctcccagctgatggtgagctgacagtgtccacaggttccaggaccatttgagattggaagctacactcaaagacactcccaccaggctctttctcccttttcctcttctcactgccctggaatcaacaggctggttgctggttagattttctgaaacaggaggtaaaatttttctttggcagaggcccctaagcaagggaggggtgttggagagccagtgcccttaagactggagaaagctgcaatttaccaagttgccttttgccactgtagctgaccaggggactaggttgtagaggtgggaaggcccctctgggctgatcttgtgccattcttgaccttggacctgcttggttaaggagggagtgggccagaccagagtgccaggagctaatggagccaggcctgacacctaggagtggtccaaagccttcagcctagatggtgcaaagctggggccagcctgtcttcaccggcaccctcacctgtgacaccaagacccaccccaatccagacttcacacagtattctcccccacgccgtctatgaccaaaggcccctgccaggtgtgggtccacagcagcaggtatgtgtgaaagcaacgtagcgccccgcggactgcagtgcgcttaaccaactcacctcccttctcttagcccaagcctgtccctcgcacagcctcgcacaaaccacattgcctggtggggcccagtgtactgaaataaagtcgttccgatagacacgtcaaaaaaaaaaaa

SEQ ID NO: 12270 - DNA, 5484 bp, Homo sapiens
aattgtcagcacgggatctgagacttccaaaaaatgaagccggcgacaggactttgggtctgggtgagccttctcgtggcggcggggaccgtccagcccagcgattctcagtcagtgtgtgcaggaacggagaataaactgagctctctctctgacctggaacagcagtaccgagccttgcgcaagtactatgaaaactgtgaggttgtcatgggcaacctggagataaccagcattgagcacaaccgggacctctccttcctgcggtctgttcgagaagtcacaggctacgtgttagtggctcttaatcagtttcgttacctgcctctggagaatttacgcattattcgtgggacaaaactttatgaggatcgatatgccttggcaatatttttaaactacagaaaagatggaaactttggacttcaagaacttggattaaagaacttgacagaaatcctaaatggtggagtctatgtagaccagaacaaattcctttgttatgcagacaccattcattggcaagatattgttcggaacccatggccttccaacttgactcttgtgtcaacaaatggtagttcaggatgtggacgttgccataagtcctgtactggccgttgctggggacccacagaaaatcattgccagactttgacaaggacggtgtgtgcagaacaatgtgacggcagatgctacggaccttacgtcagtgactgctgccatcgagaatgtgctggaggctgctcaggacctaaggacacagactgctttgcctgcatgaatttcaatgacagtggagcatgtgttactcagtgtccccaaacctttgtctacaatccaaccacctttcaactggagcacaatttcaatgcaaagtacacatatggagcattctgtgtcaagaaatgtccacataactttgtggtagattccagttcttgtgtgcgtgcctgccctagttccaagatggaagtagaagaaaatgggattaaaatgtgtaaaccttgcactgacatttgcccaaaagcttgtgatggcattggcacaggatcattgatgtcagctcagactgtggattccagtaacattgacaaattcataaactgtaccaagatcaatgggaatttgatctttctagtcactggtattcatggggacccttacaatgcaattgaagccatagacccagagaaactgaacgtctttcggacagtcagagagataacaggtttcctgaacatacagtcatggccaccaaacatgactgacttcagtgttttttctaacctggtgaccattggtggaagagtactctatagtggcctgtccttgcttatcctcaagcaacagggcatcacctctctacagttccagtccctgaaggaaatcagcgcaggaaacatctatattactgacaacagcaacctgtgttattatcataccattaactggacaacactcttcagcacaatcaaccagagaatagtaatccgggacaacagaaaagctgaaaattgtactgctgaaggaatggtgtgcaaccatctgtgttccagtgatggctgttggggacctgggccagaccaatgtctgtcgtgtcgccgcttcagtagaggaaggatctgcatagagtcttgtaacctctatgatggtgaatttcgggagtttgagaatggctccatctgtgtggagtgtgacccccagtgtgagaagatggaagatggcctcctcacatgccatggaccgggtcctgacaactgtacaaagtgctctcattttaaagatggcccaaactgtgtggaaaaatgtccagatggcttacagggggcaaacagtttcattttcaagtatgctgatccagatcgggagtgccacccatgccatccaaactgcacccaagggtgtaacggtcccactagtcatgactgcatttactacccatggacgggccattccactttaccacaacatgctagaactcccctgattgcagctggagtaattggtgggctcttcattctggtcattgtgggtctgacatttgctgtttatgttagaaggaagagcatcaaaaagaaaagagccttgagaagattcttggaaacagagttggtggaaccattaactcccagtggcacagcacccaatcaagctcaacttcgtattttgaaagaaactgagctgaagagggtaaaagtccttggctcaggtgcttttggaacggtttataaaggtatttgggtacctgaaggagaaactgtgaagattcctgtggctattaagattcttaatgagacaactggtcccaaggcaaatgtggagttcatggatgaagctctgatcatggcaagtatggatcatccacacctagtccggttgctgggtgtgtgtctgagcccaaccatccagctggttactcaacttatgccccatggctgcctgttggagtatgtccacgagcacaaggataacattggatcacaactgctgcttaactggtgtgtccagatagctaagggaatgatgtacctggaagaaagacgactcgttcatcgggatttggcagcccgtaatgtcttagtgaaatctccaaaccatgtgaaaatcacagattttgggctagccagactcttggaaggagatgaaaaagagtacaatgctgatggaggaaagatgccaattaaatggatggctctggagtgtatacattacaggaaattcacccatcagagtgacgtttggagctatggagttactatatgggaactgatgacctttggaggaaaaccctatgatggaattccaacgcgagaaatccctgatttattagagaaaggagaacgtttgcctcagcctcccatctgcactattgacgtttacatggtcatggtcaaatgttggatgattgatgctgacagtagacctaaatttaaggaactggctgctgagttttcaaggatggctcgagaccctcaaagatacctagttattcagggtgatgatcgtatgaagcttcccagtccaaatgacagcaagttctttcagaatctcttggatgaagaggatttggaagatatgatggatgctgaggagtacttggtccctcaggctttcaacatcccacctcccatctatacttccagagcaagaattgactcgaataggagtgaaattggacacagccctcctcctgcctacacccccatgtcaggaaaccagtttgtataccgagatggaggttttgctgctgaacaaggagtgtctgtgccctacagagccccaactagcacaattccagaagctcctgtggcacagggtgctactgctgagatttttgatgactcctgctgtaatggcaccctacgcaagccagtggcaccccatgtccaagaggacagtagcacccagaggtacagtgctgaccccaccgtgtttgccccagaacggagcccacgaggagagctggatgaggaaggttacatgactcctatgcgagacaaacccaaacaagaatacctgaatccagtggaggagaacccttttgtttctcggagaaaaaatggagaccttcaagcattggataatcccgaatatcacaatgcatccaatggtccacccaaggccgaggatgagtatgtgaatgagccactgtacctcaacacctttgccaacaccttgggaaaagctgagtacctgaagaacaacatactgtcaatgccagagaaggccaagaaagcgtttgacaaccctgactactggaaccacagcctgccacctcggagcacccttcagcacccagactacctgcaggagtacagcacaaaatatttttataaacagaatgggcggatccggcctattgtggcagagaatcctgaatacctctctgagttctccctgaagccaggcactgtgctgccgcctccaccttacagacaccggaatactgtggtgtaagctcagttgtggttttttaggtggagagacacacctgctccaatttccccacccccctctctttctctggtggtcttccttctaccccaaggccagtagttttgacacttcccagtggaagatacagagatgcaatgatagttatgtgcttacctaacttgaacattagagggaaagactgaaagagaaagataggaggaaccacaatgtttcttcatttctctgcatgggttggtcaggagaatgaaacagctagagaaggaccagaaaatgtaaggcaatgctgcctactatcaaactagctgtcactttttttctttttctttttctttctttgtttctttcttcctcttctttttttttttttttttaaagcagatggttgaaacacccatgctatctgttcctatctgcaggaactgatgtgtgcatatttagcatccctggaaatcataataaagtttccattagaacaaaagaataacattttctataacatatgatagtgtctgaaattgagaatccagtttctttccccagcagtttctgtcctagcaagtaagaatggccaactcaactttcataatttaaaaatctccattaaagttataactagtaattatgttttcaacactttttggtttttttcattttgttttgctctgaccgattcctttatatttgctcccctatttttggctttaatttctaattgcaaagatgtttacatcaaagcttcttcacagaatttaagcaagaaatattttaatatagtgaaatggccactactttaagtatacaatctttaaaataagaaagggaggctaatatttttcatgctatcaaattatcttcaccctcatcctttacatttttcaacatttttttttctccataaatgacactacttgataggccgttggttgtctgaagagtagaagggaaactaagagacagttctctgtggttcaggaaaactactgatactttcaggggtggcccaatgagggaatccattgaactggaagaaacacactggattgggtatgtctacctggcagatactcagaaatgtagtttgcacttaagctgtaattttatttgttctttttctgaactccattttggattttgaatcaagcaatatggaagcaaccagcaaattaactaatttaagtacatttttaaaaaaagagctaagataaagactgtggaaatgccaaaccaagcaaattaggaaccttgcaacggtatccagggactatgatgagaggccagcacattatcttcatatgtcacctttgctacgcaaggaaatttgttcagttcgtatacttcgtaagaaggaatgcgagtaaggattggcttgaattccatggaatttctagtatgagactatttatatgaagtagaaggtaactctttgcacataaattggtataataaaaagaaaaacacaaacattcaaagcttagggataggtccttgggtcaaaagttgtaaataaatgtgaaacatcttctc

SEQ ID NO: 12271 - DNA, 15563 bp, Homo sapiens
cgcacgccgagcggctgccgggggaagcagaggcgccggaggctggggcaccgccgacgcctcgggagccatggccgaagggggagaaggaggcgaggacgagatccagtttctgaggactgaggatgaagtggtactccagtgcatcgccaccattcataaggagcagaggaagttctgcctggcagccgagggacttgggaatcgcctgtgcttcttggaacccacttcagaagccaagtacattcctccagatctctgcgtctgcaattttgtgctggaacagtccctatctgtcagagccctgcaggaaatgcttgccaacacaggtgaaaatggcggcgaaggggcagcacaaggaggtggccacaggaccctgttatacggccatgcagttctcctgaggcactctttcagcggaatgtatctaacatgcttgactacatcaagatcccagacagacaaacttgcctttgatgtaggtctacgggaacatgccacaggagaagcctgttggtggactatacatcctgcttccaaacagaggtccgaaggagagaaagttcgaattggcgatgacctcatcctcgtcagcgtgtcctctgaaagataccttcatctctcagtatcaaatggtaacatacaagtggatgcctcctttatgcaaacactctggaatgtacatcctacgtgctcaggaagtagcatcgaagaaggatacctacttggtgggcatgtagtacgtcttttccatggtcatgatgaatgtttgacgataccatctacagaccagaatgattcccagcacaggaggatattctacgaagctgggggagctgggactcgagccaggtctctttggagagtggaaccccttcggataagctggagtggcagtaacatcagatggggccaggctttccgactccggcatctcaccacaggccactacctggccttgacagaagaccaaggccttatactgcaagaccgggcaaagtcagacaccaagtccacagctttctctttccgggcatcaaaggaactcaaggagaaattagactccagtcacaagcgagacatagaaggcatgggagttccagaaatcaagtatggagattctgtctgctttgtgcagcatatagccagtggtctgtgggtgacctacaaagcacaagacgccaaaacttcccgcctgggacctctaaaaagaaaggtcatactccatcaggaaggccacatggatgatggattaacactgcagagatgccagcgtgaggagtcccaggctgctcggatcatccggaacactacagccttattcagccagtttgtcagtggaaacaatcgcacagctgcccccatcaccctgcctatagaagaagtcctgcagaccctacaggacttgatcgcctacttccagcccccagaggaggagatgcgacatgaagacaagcagaacaagctccgctcactcaaaaacagacaaaatcttttcaaggaagagggaatgttggcccttgtcttaaattgcattgaccgcttaaatgtctacaatagcgtagcacactttgcagggattgcaagggaagagagtggcatggcctggaaagaaattctgaacctcctctacaaattgctggctgctctcattcgcggaaacagaaacaattgcgctcaattctccaataaccttgattggctcatcagtaaattggacagactagaatcttcctcaggtatcttggaagttttgcactgcatcttaactgaaagcccagaagccttaaatctgatagcggagggccacatcaagtcgatcatctccctgttggataagcacgggcggaatcacaaggttctggatatcctgtgctccctctgtctctgcaatggggttgcagtgagagccaaccagaatctgatctgtgacaacttgctgccccggagaaacctactcctgcagacacgactgattaacgatgtaaccagtatccggccaaacatcttcctgggagtcgcggagggctcagcccagtacaagaagtggtacttcgagctgattatcgaccaggtggaccccttcctaacagcagagcccacacatctgcgggtgggctgggcctcttcttcaggctatgccccatacccaggaggtggagaaggatggggaggcaatggtgttggtgacgacctgtactcctatggctttgatggacttcacctttggtcaggccggatacccagagctgtggcttccatcaaccagcacctcctgagatcggatgacgtggtaagctgctgcctggacctcggggtgcccagcatctcattccgcatcaatgggcagcccgtgcaggggatgtttgagaacttcaacacagacgggctcttcttccctgtgatgagcttttcagcaggtgtcaaagtacgtttcctgatgggtggacgtcatggagagtttaagttcctgcctccctctggctatgccccttgctatgaagccttacttccaaaagagaagatgagattggagcctgtcaaagaatataaacgtgatgctgatggcattagagatctcttgggtaccacccagttcctctcccaagcctctttcatcccatgccccgtagacaccagtcaggttattttgccacctcacctagaaaagatccgagacagactagctgaaaacatccatgagctttggggaatgaataaaatagaacttggctggactttcggcaagatacgagatgacaataaaagacaacacccttgccttgtggagttttcaaagctcccagaaactgagaagaactataacctgcaaatgtcaactgaaaccttaaaaaccctcttggccctggggtgccacattgctcatgttaacccagctgctgaggaggatctcaagaaggtcaaactgcccaaaaactatatgatgtccaacggctataagccagcccctttggatttgtctgatgtgaagctgttacctcctcaagaaattttagtggataagcttgcagaaaatgcacacaatgtttgggcaaaagacagaataaaacaaggatggacctatggcatccaacaggatttgaagaacaaaagaaatccccgtctggtgccatatgcattactggatgagcgtaccaagaagtcaaacagggacagcctgcgggaagctgtgcgcacttttgttggttacgggtataacattgagccatcagaccaagaactagctgactcggctgtggagaaggtcagcatagacaagatccgatttttccgggtagagcgatcttatgcagtgagatctggaaagtggtattttgagtttgaagtggtgactggaggagacatgcgagtcggctgggcgaggccaggctgtcgacctgatgtcgagctgggggccgatgaccaagcctttgtgtttgaaggcaacaggggccagcgttggcatcaaggaagtgggtattttgggcgtacctggcagccaggggatgtggtcggatgtatgattaacctggatgatgcttcaatgatcttcacactgaatggggagctgctgatcaccaacaaaggctctgaacttgccttcgctgactacgagattgagaatggcttcgtgcccatctgctgtctgggtctatctcagatcggccgcatgaatctcgggacagatgccagtaccttcaagttttataccatgtgcggtctccaagagggctttgagccttttgctgtcaacatgaacagagatgttgctatgtggttcagcaagcgcctcccgacgtttgtcaacgtgccaaaggatcatccacacatagaggtcatgaggattgatggcaccatggacagccctccgtgtctcaaggtgacgcataagacatttggcacacagaatagcaatgccgacatgatctattgccgcttgagcatgcctgtcgagtgccactcctccttcagccacagcccctgtctggacagtgaagctttccagaaaaggaaacagatgcaagaaatactctctcatacaacaacacagtgctactacgccatccgcatctttgctggacaggatccatcctgtgtctgggtcggatgggtgactccagactatcacttgtacagtgaaaagtttgacctgaataaaaactgcacagtgactgtcaccctaggggatgaaagaggccgggtccatgaaagtgtgaaacgcagcaactgctacatggtctggggtggagacattgtagccagttcccagagatcaaatcggagcaacgtggacctggagatcggctgtctcgtggatctggccatgggcatgttgtccttctcagccaatggaaaggaactgggcacctgctaccaggtggagcctaataccaaagtgtttccagcagtcttcctgcagcctacaagtacttctttgtttcagtttgaacttggaaagctgaagaacgcaatgcccctgtcagcggccatattcaggagtgaagagaagaacccagtcccacagtgtccacctcggctggacgtccaaaccatccagcccgtgctctggagccgcatgcccaacagcttcctgaaggtggagaccgagcgtgtgagcgagcgccacggctgggtggtgcagtgcctggagcccctgcagatgatggcgctccacatccccgaggagaacaggtgtgtggatatcctggagctctgtgagcaggaggacctgatgcggttccattaccacacgctgaggctctacagcgcggtgtgcgccctgggaaacagccgcgtggcctacgccctgtgcagccacgtggacctctcccagctcttctatgccattgacaacaagtacctccccggcctccttcgatctggtttctatgacctgctcatcagcatccacctggccagcgccaaggagaggaagctgatgatgaagaacgagtacatcatccccattaccagcaccaccaggaatatctgcctcttcccggacgagtccaagaggcatggactgcctggggtgggcctgagaacatgtctcaagcccgggttcaggttctccaccccttgctttgttgtgactggtgaggatcaccaaaagcagagccccgagattcccttggagagtctcaggacgaaggctctgagtatgctgacagaggcagtgcagtgcagcggggcccacatccgagaccctgtaggggggtctgtggagttccagtttgtgcctgtgctgaaactcattggaaccctgctggtcatgggcgtgtttgatgatgatgatgttcggcagatcctcctcctgattgatccctctgtgtttggggagcatagtgcggggacagaggagggagcagaaaaggaggaagtgacccaggtggaggagaaggctgtggaggctggggagaaggccggcaaggaggctcctgtcaaaggcttgttgcagactcgattacccgaatccgtcaagctgcagatgtgtgagctcctcagctatctctgcgactgtgagctgcagcaccgagtggaggccattgtggcatttggtgacatttatgtctccaagctgcaggcaaatcagaagttccgctacaatgagctcatgcaggccctgaacatgtctgcggccctgactgcccggaagaccaaggagttccgctcacccccacaggagcagatcaacatgctgcttaactttcaactgggagagaactgcccctgcccagaggagattcgggaggagctgtatgatttccatgaggaccttctccttcactgtggggttcctttggaagaagaggaagaggaggaggaggacacctcctggacaggaaaactctgtgccttggtttacaaaatcaaaggcccacccaagccagagaaggagcagccgacggaggaggaggagagatgccccacaacattgaaggaactcatctcacagacgatgatctgctgggcccaggaggaccagatccaggattcagagctggtccgaatgatgttcaacctcctccggaggcagtatgacagcattggggagctgctgcaggcgctgcggaagacctacaccatcagccacacctctgtaagcgacaccatcaacctgctggctgccctgggccaaatccgctccctcctcagtgtcaggatgggcaaggaagaggagttgctcatgatcaatgggctgggagacataatgaacaacaaggtgttttaccagcatcccaacctcatgagagtcctgggcatgcacgagacggtgatggaggtgatggtgaacgtgttgggtacagagaaatctcagattgcatttccaaagatggttgctagctgctgccgtttcctttgctatttctgtcgaattagccggcaaaatcagaaggccatgtttgagcatctgagttatcttctggagaatagcagtgttggcctagcctccccgtcgatgaggggatccaccccgctggatgtggcagcttcctctgtgatggacaacaatgagttagcgctgagcttagaggaaccagacctcgagaaggtggtgacctacttggcaggctgtggcctacagagctgccccatgcttctggccaaaggataccctgatgtcggctggaaccccattgaaggggaacgctacctgtccttcctgaggtttgctgtcttcgtgaacagtgagagtgtggaagaaaacgccagcgttgtggtcaagctgctcatcagacgcccagagtgcttcggcccggccctgcggggtgaggggggaaacgggctcttggcagccatgcagggtgccattaagatctctgagaacccagcgctcgacctcccctctcaaggatacaaaagagaagtcagcacggaggacgatgaagaggaagaagaaatcgtgcatatgggcaatgcaattatgtcattttattcggcccttatagatctactgggccgctgtgctcctgaaatgcacctcatccagacaggaaagggggaagccatccgcatcaggtccatcctgcgctccctggtccccacagaagacctggttgggatcatcagcatccccttgaaactgccctccctcaacaaagatgggtcggtcagtgagccagatatggcggccaatttctgccctgaccacaaggcacctatggtgctgttcttggaccgcgtttatggcattaaggatcaaacttttctgctccacttgctggaggttggatttttacctgacctaagagcttctgcctctctagatacagtttccctaagcaccacagaggctgcgcttgcactaaataggtatatatgttctgctgtgctcccgctcctcacaagatgtgcccctctctttgccggaacagaacactgcacctctctgattgattccacactgcagacaatatacaggctatccaagggacgttccctcaccaaagcacaaagggacactatagaagaatgtttgcttgccatttgcaatcacttgaggccttccatgttacagcaactcctgcgacgcctcgtttttgatgtgccgcaactcaatgaatactgcaaaatgcctctcaagcttctgacgaatcactatgaacagtgttggaagtattactgcctgccttcaggatgggggagctacgggctagctgtggaagaagagctgcacctaacggagaagcttttctgggggatttttgactcgctctcccataagaaatatgacccagatcttttccgaatggccctgccttgtctcagtgctatagctggggccttgccaccagattatttagataccagaatcacagccacgttggagaaacagatctcagtggatgcggatggcaactttgacccaaaacctattaacaccatgaatttttccttgcctgaaaaattggaatacatcgtcaccaagtatgctgagcattcacatgataaatgggcctgtgacaagagtcagagtggatggaaatatgggatttccctggatgaaaatgtgaagacccacccactgataaggcctttcaagacattaacggagaaggagaaggaaatttatcgctggcctgcgcgagagtccctgaaaaccatgctggctgtgggctggactgtggagaggaccaaagagggagaagctttggttcaacagcgggaaaatgagaagcttcgaagtgtgtcccaggccaaccagggcaacagctacagtcctgctcccctcgacctctcaaacgttgtgctctccagagagctccagggaatggtggaggtcgtggctgagaactatcacaatatctgggccaagaagaagaagctggagctggagagcaaaggtggtggcagccaccctcttctggtaccatatgacaccttgactgccaaggaaaagttcaaggaccgggagaaggcacaggacctgtttaagttcctccaagtgaatggcatcatagtttccaggggtatgaaggatatggagctggatgcctcctccatggagaagaggtttgcctataagttcttgaagaagatcctgaaatacgttgattctgctcaagaatttattgcccatttagaagccattgtcagcagtgggaaaactgaaaagtctccccgtgaccaggagatcaaattctttgccaaagttctcctcccgctggttgaccagtacttcaccagtcattgcctctacttcttgtcatcccctctgaagccccttagcagcagcggatatgcctcccataaggagaaagaaatggtggccggcctgttctgcaaacttgccgctctcgttagacacagaatttccctctttggtagtgattctactacaatggtgagctgtcttcacatcttagctcagacacttgacacaaggactgtcatgaagtcaggctcagagctggtgaaggctgggttacgagcattctttgaaaatgctgcagaagatttggagaagacttcagaaaacctgaaacttgggaagttcacccattcccgaacgcagattaaaggcgtttctcagaatattaactacactacagtggctctgctccccatcctgacgtccatctttgagcacgtcactcagcatcagtttggaatggatctactcttgggtgatgtgcagatttcatgctaccacatactgtgcagcctctactcccttgggacgggaaagaacatttatgttgaaaggcaacgccctgcccttggagaatgtctggcctcgctggcagctgccataccagtggcattcctggagcccacccttaatcgctacaatccactctcggtcttcaacaccaaaacccccagggagaggtctattctggggatgccagacacggtagaagacatgtgtcctgacatcccccagctggaaggcctgatgaaggaaatcaacgacctggccgagtcaggggcccggtacacagagatgccccatgtcatcgaggtgatcttacccatgctctgcaactacttgtcctactggtgggagcggggtcctgagaacctgccccccagcacagggccatgctgcaccaaggtcacctctgaacacctcagtctcatcctgggcaacattctgaaaatcatcaacaacaacctgggcatcgatgaggcctcctggatgaagcgcattgcagtgtatgcacagcccatcatcagcaaagccaggcccgacctgctgagaagccacttcatcccaactctggagaagctgaagaaaaaggctgtcaagacggtgcaggaggaggagcagttgaaagccgatggcaaaggggacacccaggaggcagaactcctcatcctggacgagttcgcggtcctctgcagagatctctatgccttctaccccatgctgatccgctacgtggacaacaacagatctaactggctgaaaagtcctgatgctgattctgaccagctcttccgcatggtggcagaagtcttcattctgtggtgtaaatctcataacttcaagagagaagagcaaaattttgtgattcagaatgaaattaataatttggcatttttaactggagacagcaaaagcaagatgtcaaaagccatgcaagtaaagtctggaggacaagaccaggagcggaagaagacaaagcggcggggagacttgtattccatccagacctccctcatcgtggctgcactcaagaaaatgctgcccattggtttgaatatgtgtactccaggcgaccaggagctgatctccctcgcaaaatcgcgatacagccatagggacacagatgaagaggtcagagaacatctgcggaacaacttgcacttgcaggaaaagtctgatgacccagctgtaaaatggcaactgaacctctacaaggatgttctgaagagtgaagaacctttcaatccggaaaagacagtggagcgtgtgcagagaatttcagcagctgtcttccacctggaacaggtggaacagcctttgaggtccaagaaggccgtctggcacaaactgttatcaaagcaacggaaacgggcagtggtggcctgtttcaggatggcccctctctacaacctgcccaggcaccgctctattaacctcttcctccatggctatcagagattttggatagaaacagaggagtattcctttgaagagaaactagtacaggatttggctaaatctccaaaggtggaagaggaggaggaggaagagacagaaaaacaacctgacccactacatcagatcattctctattttagccgcaacgctctcacggagaggagcaaattggaagacgaccctttgtacacctcctattccagcatgatggccaagagttgtcaaagtggtgaggatgaagaagaagatgaagacaaggaaaaaacattcgaagagaaagagatggagaagcaaaaaaccctctatcagcaagctcggctgcatgagcgtggtgctgcagagatggtccttcagatgataagcgctagcaaaggtgagatgagccccatggtggttgagacgctgaagctggggatcgccattctgaacggaggcaatgctggtgtgcaacagaaaatgctagattacctaaaggagaaaaaggatgctggattctttcaaagcctttctggtcttatgcagtcttgcagtgtccttgatttgaatgcatttgagaggcagaataaagctgaaggcctggggatggtgactgaagaaggaacactcattgttcgggaacgtggtgaaaaagtactccagaatgacgagttcacgcgtgatctctttagattcctacagttactttgtgagggacataacagtgactttcagaacttcctgcggactcagatgggcaacaccaccaccgtgaatgtcatcatcagcactgtggactaccttctgcgtctgcaggaatcaatcagtgatttctactggtattattcagggaaggacatcattgatgaatctggacagcacaatttttccaaagctctggcagtcaccaagcagattttcaattctcttacagaatacatccagggcccttgcattggtaatcaacagagcctggctcacagcaggctgtgggacgcagtggttggcttcctccatgtctttgctaatatgcagatgaaactctctcaggattccagtcagatcgagctgctgaaggaactcttggatctccttcaggacatggtggtgatgcttctgtccctcctggaagggaatgtggtaaatggcaccattggcaagcagatggttgacacactggtagaatcatctaccaatgtagaaatgatcttgaaattctttgacatgttcttgaaacttaaagacttaaccagctcagacaccttcaaagaatatgacccagatggtaaaggaattatctccaaaaaagaattccagaaggccatggaagggcaaaaacagtacacgcagtcagagattgactttctcctgtcgtgtgcagaagctgatgagaatgacatgtttaattacgttgattttgtagaccggttccatgagccagccaaggacatagggtttaatgtggctgtgttattgacaaatctttctgaacacatgccaaacgattcccgcctgaagtgtctgttggacccagcagaaagtgtgctaaattacttcgaaccctacctaggacgcatcgagatcatgggtggggccaagaagattgagcgtgtttattttgagatcagtgaatccagtcgcactcagtgggagaagccccaggtgaaggaatctaagcgacagttcatttttgatgttgtcaatgaaggtggggagcaggaaaagatggagctgtttgtgaacttctgtgaggacaccatctttgaaatgcagttagcatctcagatctctgaatccgattcagctgacaggccagaagaggaggaagaagatgaagattcttcttacgtgttagaaattgcgggtgaagaggaagaagacgggtctcttgagccggcctctgcatttgctatggcctgtgcctctgtgaagaggaatgtcaccgacttcctgaagagagcaaccctgaagaacctcaggaagcagtacaggaacgtgaaaaagatgactgcgaaggagctggtgaaggtgctcttctcctttttctggatgctgttcgtggggctattccagttgctcttcaccatcctgggaggaatctttcagatcctctggagcacagtgtttggagggggcctggtagaaggggcaaagaacatcagagtgaccaagatcctgggtgacatgcctgacccaacccaatttggtatccatgatgacactatggaggctgagagggcagaggtgatggagccaggtatcaccactgaactagtacacttcataaagggggagaagggagatacagatatcatgtcagacctctttggactccacccaaagaaagagggcagcttaaagcatgggcctgaagtgggtttgggtgacctctcagaaattattggcaaggatgaaccccctacattagagagtactgtacagaagaagaggaaagctcaggcagcagaaatgaaagcagcaaatgaagcagaaggaaaagtagaatccgagaaggcagacatggaagatggagagaaggaagacaaagacaaagaagaggagcaagctgagtacctgtggacagaagtgacaaaaaagaagaagcggcggtgtggtcagaaggttgagaagccggaagctttcacagccaatttctttaaagggctggaaatctatcagaccaagttactgcattacctggccaggaatttctacaacctgaggttccttgctctgtttgtagccttcgctatcaacttcatcctgcttttttataaggtcactgaagaacctttagaagaagagacagaggatgttgcaaacctatggaattcctttaatgacgaggaagaggaagaagcgatggtattctttgtccttcaggagagcaccgggtatatggcaccaaccctgcgtgccctggccatcatccataccatcatctctctagtctgtgtggtgggctactactgcctgaaggtgcctttggtggttttcaaaagggaaaaagaaatcgccaggaagctggagtttgatggcctatatatcaccgaacagccatctgaagatgacatcaaggggcagtgggaccgcttggtgatcaacacaccatcttttcctaataactactgggacaagtttgtaaagagaaaggtgatcaacaagtatggagatctctacggagcagaacgcattgctgaacttctgggtttggacaaaaatgctcttgactttagcccagtagaagagaccaaagcagaagcggcttctctggtgtcatggctaagttccatagacatgaagtaccatatctggaagcttggagttgtttttactgacaactcctttctctaccttgcctggtatacaaccatgtcagtcctgggccactacaataacttcttctttgctgctcacctattggacatcgcaatgggcttcaagacactgaggaccattctgtcatctgtaactcacaatggcaaacagttggttctgactgtcggtctcctggccgtggtggtttatctctatactgtggtggctttcaacttcttccgcaagttctacaacaaaagcgaagacgatgacgagcccgatatgaagtgcgacgacatgatgacgtgttaccttttccacatgtacgtgggagtgagagcaggaggtggcattggtgatgaaattgaagaccctgctggtgatccttatgaaatgtatcgcattgtctttgacattacctttttcttcttcgtcattgtcatcttgctggccatcattcaaggtcttattattgatgctttcggagagctaagagaccagcaggaacaagtacgagaagatatggagactaaatgtttcatctgtgggattggcaatgactactttgacacaacccctcatggttttgaaacacatacattacaagagcacaacttagccaactacttgttctttctgatgtatttgattaataaagatgaaacagagcacacgggtcaggaatcttatgtctggaagatgtaccaagaaaggtgttgggatttcttcccagccggtgactgctttcgtaaacaatatgaagatcagcttggataaatctgaatcaaagaagcgcgacaattctggacagtcaacttcccatgaaataaagtcccctttttacagttctgcaacatatctgaaatgtgacattttctaaatgcctcccttaaaaaaaaaactgctgaaaatctgtgctattttgaaattgatttggctttttgtgcctaatggacatacactgtgggagagaacctgtcaaaatgtcgaagaaggaaggcgaagaatcaagtaatctctaggcaaatgccttcaagttttccagttctgaggtaactagttcagtttgttgggatggaagcatgaaggaaagggctagagaagtatgaaatctcgaatgtgtaatacctgaaaatttaaacacttgaatgtcatcatggtatccaacttgtgactcatagggtctgaactcactccaaaagataataactgcagtctaatttttcccatggtacttgctagtgactgtatccagaaaagctttaagcagttaaagaaacagaaaaaaaccgacactttgtcgacactgaaatatcgattaagtgccttaaaacctctttagacatagctatgcaagttttttatgtttgtgttccagaaggacagttccattcattagttgtgatcttccgtcttactttatgaaactgcacttgaaggttattcatacaagtttttttagtaacagctgtcagtcaactgctgttattagaagaaaagtactgtactgaaaattcagaaaaaaaatctcaaccttatgccaaaatggagtaatgctttatggtcccttgtaagtagtggagctgctctgtttaggtgaatctcctcaaatacaatgaagtgcccactgcaataaagtaatacgtaccaataaaaa

SEQ ID NO: 12272 - DNA, 2401 bp, Homo sapiens
agcctcccgcccgccgcctctgtctccctctctccacaaactgcccaggagtgagtagctgctttcggtccgccggacacaccggacagatagacgtgcggacggcccaccaccccagcccgccaactagtcagcctgcgcctggcgcctcccctctccaggtccatccgccatgtggcccctgtggcgcctcgtgtctctgctggccctgagccaggccctgccctttgagcagagaggcttctgggacttcaccctggacgatgggccattcatgatgaacgatgaggaagcttcgggcgctgacacctcgggcgtcctggacccggactctgtcacacccacctacagcgccatgtgtcctttcggctgccactgccacctgcgggtggttcagtgctccgacctgggtctgaagtctgtgcccaaagagatctcccctgacaccacgctgctggacctgcagaacaacgacatctccgagctccgcaaggatgacttcaagggtctccagcacctctacgccctcgtcctggtgaacaacaagatctccaagatccatgagaaggccttcagcccactgcggaagctgcagaagctctacatctccaagaaccacctggtggagatcccgcccaacctacccagctccctggtggagctccgcatccacgacaaccgcatccgcaaggtgcccaagggagtgttcagcgggctccggaacatgaactgcatcgagatgggcgggaacccactggagaacagtggctttgaacctggagccttcgatggcctgaagctcaactacctgcgcatctcagaggccaagctgactggcatccccaaagacctccctgagaccctgaatgaactccacctagaccacaacaaaatccaggccatcgaactggaggacctgcttcgctactccaagctgtacaggctgggcctaggccacaaccagatcaggatgatcgagaacgggagcctgagcttcctgcccaccctccgggagctccacttggacaacaacaagttggccagggtgccctcagggctcccagacctcaagctcctccaggtggtctatctgcactccaacaacatcaccaaagtgggtgtcaacgacttctgtcccatgggcttcggggtgaagcgggcctactacaacggcatcagcctcttcaacaaccccgtgccctactgggaggtgcagccggccactttccgctgcgtcactgaccgcctggccatccagtttggcaactacaaaaagtagaggcagctgcagccaccgcggggcctcagtgggggtctctggggaacacagccagacatcctgatggggaggcagagccaggaagctaagccagggcccagctgcgtccaacccagccccccacctcgggtccctgaccccagctcgatgccccatcaccgcctctccctggctcccaagggtgcaggtgggcgcaaggcccggcccccatcacatgttcccttggcctcagagctgcccctgctctcccaccacagccacccagaggcaccccatgaagcttttttctcgttcactcccaaacccaagtgtccaaggctccagtcctaggagaacagtccctgggtcagcagccaggaggcggtccataagaatggggacagtgggctctgccagggctgccgcacctgtccagacacacatgttctgttcctcctcctcatgcatttccagcctttcaaccctccccgactctgcggctcccctcagcccccttgcaagttcatggcctgtccctcccagacccctgctccactggcccttcgaccagtcctcccttctgttctctctttccccgtccttcctctctctctctctctctctctctctctctttctgtgtgtgtgtgtgtgtgtgtgtgtgtgtgtgtgtgtgtgtgtgtcttgtgcttcctcagacctttctcgcttctgagcttggtggcctgttccctccatctctccgaacctggcttcgcctgtccctttcactccacaccctctggccttctgccttgagctgggactgctttctgtctgtccggcctgcacccagcccctgcccacaaaaccccagggacagcggtctccccagcctgccctgctcaggccttgcccccaaacctgtactgtcccggaggaggttgggaggtggaggcccagcatcccgcgcagatgacaccatcaaccgccagagtcccagacaccggttttcctagaagcccctcacccccactggcccactggtggctaggtctccccttatccttctggtccagcgcaaggaggggctgcttctgaggtcggtggctgtctttccattaaagaaacaccgtgcaacgtgaaaaaaaaaaaaaaaaaaaaa

SEQ ID NO: 12273 - DNA, 3958 bp, Homo sapiens
ttttcaagaggctgcagctgacaagaagcttcaagcataggttaatatcagagaagcacatgacctgggcaatctgcatgtgatgccaaccaagccttggaaagacagtgcaaccacagaagtgccgagctgggtaaaggccctgctggacaagcagttggagtgagaatcaagacagccggaccacaggaccagacccaccaggatccacatgacagtggtatcttccggtatcatcctattcaaacaacgtgttcaagcatccttggaaaattgaggtggagaacaggccacacaagctgtaaaccctttgtagtcataagacgaaagaggatttgttaagagtattgttttgggtagaacttgcattagcagtgacaaagatagccacctcaacctttggtaataacccttggcacacaaatataaaccataatggagtctgagtatgtcctatgcgactggaaagaccagttgtggccagcaaaagttttgtccagatctgaaacttcatcaaacagtaagaggaaaaaggcattttctctagaagttcaaatactctcactagatgaaaaaattaaattggacagcacagaaacaaagatcctaaataaatctcaaattgaagccattgctgcctcattaggactacagtcagaggacagtgctccacctacagaggaaactgcctatggaagatcactaaaagtggcactgggtattctgaatgagagaacaaatttgagtcaagcaagcacttcagatgaagaggagatcactatgctgtctcaaaatgtaccacaaaaacagtccgattcaccccctcataaaaaataccggaaggatgaaggtgacttaccagggtgtcttgaggaaagggaaaactcagcatgcttgttagcatcttcagagagtgatgattccctgtatgatgataaatcacaagcacccacaatggtcgatactattccaagtgaagtggaaacaaagtcattacaaaactctagctggtgcgagactttcccttcactttcggaagataatgatgaaaaagagaacaagaataagattgatatctcagcagttatgtctgtgcattctgcagtcaaagaggaaagtgcatgtgttaaagatgaaaagtttgctccacctttgtcacctttgtcatcagatatgctcattatgcccaaagctttgaaagaagagagcgaggatacctgcctagagaccctggctgttccctctgaatgctctgctttctcagagaatattgaggatcctggagagggtccctcaaatccatgcttagataccagccagaatcaaccttccatggaatcagagatgggggctgcagcatgccctgggagttgttcaagggaatgcgaggtttcatttagtgcctctaaccctgtctgggattattcacatcttatgagtagtgaaagaaattttcagagactggattttgaagaacttgaggaagaaggtcaagcctctgacaagtcattgcttccaagtcgcattaatctttctctattagatgatgatgaggaagacgaagaacttccacgcttcattttacattatgagacacatccgtttgaaacaggaatgatagtctggtttaaatatcagaaatatccattttggccagcagtgataaaaagtatcagacgaaaagagaggaaagcaagtgtgctttttgttgaggcaaacatgaattctgaaaagaagggcattagagtaaattttagaagattaaagaaatttgattgtaaagagaaacaaatgctagtggacaaagccagggaggattatagtgagagtattgactggtgcatctcactaatttgtgactacagagttagaataggttgtggttctttcacgggctctttgcttgagtattatgctgctgatattagttacccagttaggaaagaaacaaaacaggatactttcaggaacaaatttccaaagctgcataatgaagatgccagggaaccgatggctgtaacttcccagaccaagaaaatgtccttccaaaaaattctccctgaccggatgaaggctgctcgggaccgagccaacaagaacctggtggacttcattgtgaatgcaaagggaacagagaaccatcttctggccattgtaaatggcacaaaaggatccagatggctgaaatcatttttgaatgcaaataggttcacaccctgtattgaaacatactttgaggatgaagatcagttggatgaagtggtgaaatatttacaagaagtctgcaatcaaatagatcaaataatgccaacttggataaaagatgataaaattaaatttatcctataagttcttctgccagaagcaattatttgttcaatttctgctgttgatgggttagattacgaggcagctgaagcaaagtatctaaaaggaccatgtctaggctacagggaaagagaattatttgatgcaaaaataatatatgaaaagagacgaaaagcaccaacaaatgaagctcactaaatgtgctgaaagttgaaaccatgacagggagctctcatagatactagttgaaaaaagtctctgaacaattctctctaatacatattttctgcaaatgggagcatggataatgtgttcacttttttttgagatctctaggatctgtggttataattacatctttatttccttttcttgcgcttcttcaaagttaattttgtcaacatatttcagcagttctactttcccgtacattttttagaaagcataattcctaaatgattttgaagggaaagtactattttgttttatgacacttttgagtctatgctgtattgttaaatatattgtgcacaattattttaatgttaaaattgcactggtgttagatattaacgaagatgattggaaaaaagtctgaaagatacatcatttctatattccttgcttaatttttataaaatattgggttttcccttaagatagttgaagtatttttcttgccatgcctatttatttttgcaaaaaaattatctgctatatagaaccaaagatagattcgctttgctatatattataactatacttgcttttgcaataaaacaacttgtaattcaaaaatgaagattatctgcatatagtatttatgtgtgtgaataacatcttggcatgcagaaaataattttggctgctttgaacaggattgttcattctacacttccctgaaattccatttttgggagtgtctatccttcaatggctgaatagttccttaaatcagacaagctcctggctatcttcataaccagcagtgagtagatcttcttaatatagctgtctgaccacatgtggaaggcagctagacttattgtatttacagcctggccactctagacatatgaatccaggctgactgcttaagtgcccatctcgtttgatataaactgtagaaaaggcaagcactttgttctgagtcttttatctccaaatacatagttgtctcaaaccaagcaagctttatcaaaatggcttatttgcagaatagttccaatgatataaatgccaactggcaagtcattccaaactgcttgaaggagtagatgaaccagaatctgagaatttggaaataggtcacagaaaaagcctccatttggctaaatatgacaattatctgagtatggttaaatacatacaattaaatgtctgaagccaatgagttgtttattctaacttgaaatatatttttgtgagaataaatgttagaaaagttagtttattttggaaacctgccgtgaaaggaaattctaaaggcttaacatgaaactgtctgcatttctacctgttagacaatggttgctcttgggctcttgttatacagtcatatggctacacgtttatgtaaagtttgcaaaagtttggtgttttgatttataataaaactgttatattattc

SEQ ID NO: 12274 - DNA, 3159 bp, Homo sapiens
gctgccgccccgcactcgggcgagcgcgggagccgcacagtagacggagcgcgcccggccgagcgggccatggccgcgggggccgccgccgcaggtggtggcgcgcggtgaggagagcgcggcgccccctccggggcggatggaacgcggctcggcgggcgggcagtgccggcgtccgcggctggaatggtgctggctgtgttggtcggtgcctgcgttctgaagcccgagaggagccacaatggagacgccgccgctgcctcccgcatgcacaaagcagggtcatcagaagcctctcgattcaaaagatgataataccgaaaaacactgcccagtgacagtgaatccttggcatatgaagaaagctttcaaagtcatgaacgaattaagaagtcaaaatttgctgtgcgatgtcacaattgtggcagaagacatggaaatttctgctcatagagtggtgctggccgcctgtagtccttattttcatgccatgtttacaggtgagatgagtgagagccgagcaaagagagttagaataaaagaggtagatggctggaccctgaggatgctaattgattatgtttacactgcagaaattcaggttacagaagaaaatgtacaggtacttctcccagcagctggtctcttacagttacaggatgtgaagaagacttgttgtgaatttttggaatcccagcttcaccctgtcaactgcttaggaatccgggcttttgctgatatgcatgcatgtactgaccttctgaacaaggccaacacctatgcagagcaacattttgcagatgttgtacttagtgaagaatttctcaatcttggcatcgaacaagtgtgcagcttaatctcaagtgacaaacttaccatttcttcagaagagaaggtatttgaagcagtaatagcatgggtgaaccatgacaaggatgtgaggcaagagtttatggcccgactgatggaacatgtacggttacctttgcttcctcgggaatatttagttcagagggttgaagaggaagcattggtcaagaatagcagtgcttgcaaagattacctcattgaagcaatgaagtaccatttgctgccaacagagcagcgtatattaatgaagagtgtccggacccggctgaggacacccatgaaccttcccaaattgatggtggtggttgggggccaagcaccaaaggctatccggagtgtggaatgctatgactttaaagaagaaaggtggcaccaagtagcagagttgccttccaggaggtgcagggcaggcatggtctacatggctggacttgtttttgctgttggtggctttaatggctcattaagagttcgcactgtagattcctacgaccctgtgaaggaccagtggaccagcgttgctaacatgagagaccggagaagcactttgggagctgctgtgttaaatggattattatacgctgtgggaggctttgatgggagtacaggtttgtcatctgtggaagcatacaacataaagtctaatgagtggtttcatgtagctcccatgaatacaaggaggagcagtgttggtgtgggtgttgttggaggtttgctctatgctgtaggaggttatgatgtagcatcacgtcagtgtcttagcacagtagaatgctataatgctacaacaaatgagtggacctatatagcagaaatgagcaccaggcggagtggagcaggtgttggtgtgttaaacaatttattgtatgctgtaggaggtcatgatggccctttagtacgaaaaagtgttgaagtatatgatcccaccactaacgcatggagacaggttgcagatatgaacatgtgcagaagaaatgcaggagtttgtgcagttaatggtctgttatatgttgttggaggggatgatggttcctgtaacttggcgtcagtagaatattataacccaacaaccgataaatggacagttgtgtcatcgtgtatgagcacagggagaagttatgcaggggtcacagttattgataaacgattatgagcctgaaggacattttcagcatatttatacatgagaaacagccttcaacaagtatttgtgaagtgactgagaatctagcacttctccacttgtagctgcactttaagtctcagcagaagatacgatcgtctgcctttataggcctcagatactgaagattatttttggtagaagcaccgtgtaggctttttctgcaatgagcagcagctgactgaattttcataagaaacttggactgcaggacttaatctgtagtctttagacaacagttgctttcataaagactagttcttatcaaccttgaatgactacagattattttgtgaaggaggatgaagtaatgtgtgttcttgtaaaattaaattttatctttatttcttctaaaaatctgtataccaggaactgaaaatctttgaacagatattaaaatctacgtaagtatacaaactagttgagggatacactgtttgcttttataaaataactttgattacatgaatataataaattatgtgcatataaatgtgtgtctatatgctttcctttaaatatgtttgaaaagatgtttgaaacttgattatactatttataattggcacagtactttgaattatgccagtactacattgtaaaacagagttgtattttttgatatttaacaatgcttaacactttaaatgccacttctgaggaatggacctggtgtaacacacttgaatatgtgtgatgccaaactttttaaaatacaatataagttatgcttatttattattttctttagtttaatcttggtcatgttttggtgtgtatttttaatttttttcttaaattaacactttggcatgaacattactgcaggtttttgatgaatataatgaatgtatggaattcaattgaatttgcatggtcttcggaattttttctgtgtgtataaatttagctgctattaacagaagagagaactttctgtgagtagccatgtgtgttgatcagatacagtttttctgagatcttcaattaatctcactttaaaaatgaccaaaacatgtctttcttgaattaactttgaataaaagtttgtatattaaaaaaaaaaaaaaaaaaaaaaaaaaaaaaaaagaaaaaaaaaaaaaaaa

SEQ ID NO: 12275 - DNA, 2884 bp, Homo sapiens
agcaacgtcagggccagggccgcgaggtagttggcagaggcctcggggtcctcctggaaggggcctcatgacagattcggacgaggatgccctgaaggttgaccagggcccctcacgggacatcccaaagccatgggtgattccagcccccaaagggatcctgcagcacatctttgggaccagccacgtgttccaaagcatctgtgatgtaaaaccaaaggtcacagggttaacagtgcccctcaaagtcagggaatactactccagaggccagcagtgcttggagcaggcagactgggagacagctgtgctgctcttctcccgcgcactccacctggacccacagctggtggacttctatgccttacgggctgaggcctacctccagctctgtgacttctcctcggccgcccagaacctgcgaagggcctactcattacagcaggacaactgcaagcacctggagcgcctcacctttgtgctctacctacagggacaatgcctttttgagcagtgtgccttcctggatgccctgaatgtcttctcacatgctgctgagctccagcctgagaaaccatgcttccgttaccgatgcatggcctgtctcctggccctcaagcagcatcaggcctgcctcacgctcatcaccaacgagctgaagcaggacaccaccaacgccgatgtctacatcttccgggccagactctacaactttctccagaagccccacctctgctaccgggacctgcacagcgccttgctgttgaatcccaagcacccgcaggccaggatgctgctccagaagatggtggcccaggcccagcaggcgcgccaagatgcggggatcctggctgtgcagggcaagctgcagcacgcactgcagcggatcaaccgtgccatcgagaacaaccctctggaccccagtctcttcctcttccggggcaccatgtaccgacggctccaggagttcgatggggcagtggaggacttcctgaaggtgctggacatggtgaccgaggaccaggaggacatggtgcggcaggcacagcgccagctgttgctgacctacaacgactttgccgtgcactgctacaggcagggcgcctaccaggagggcgtgctgctgctgaacaaggccctccgggacgagcagcaggagaaaggactctacatcaaccgaggcgattgcttcttccagctgggcaacctggcctttgccgaggcggactaccagcaggcgctggcgctgagccctcaggacgagggcgccaacacgcgcatgggcctgctgcaggagaagatgggcttctgcgagcagaggcgcaagcagttccagaaggcagagaaccacttctccacggccatccggcacaacccccagaaggcccagtactacctgtaccgggccaagagccggcagctgctgcagaacatttttggggcccgccaggatgtggccactgtcctgctcctcaaccccaagcaaccaaagctgtccctgctgatgaccaacctcttcccgggcatgtcggtggaggaggtgcttagcacccagatagcccacctggccaggctgcagctggagcagatggtggagggcagcctgcaggccggcagcccacaaggcattgtggggatgcttaaacggcacgagttggagcgccagaaggccttggccctgcagcactcatggaagcagggggagcctttgattgcgacctccgaggagctgaaggccacccctgagattccgcaggtaaaaccgggaagctcagagggagaggctgaggcccctgaggaggaggaagaaaaggagaaggagaaaaaagaggagaaaaaatcagagctcatacctagcaaggtggcgtccctgtctgacagctaccttgaccagacctcttcagcctccagcatgagcttcaggaccacaggcacctcagagactgagatgtcggctatctgccaggaatacaggagcacctcagccaccgccgtgacattctctgactcgtcactgttgaagacgcaatcctcggactctgggaacaacagggaggcactaagccatggtcccagaaaaatcaaggccacccagggccagaggcagagccttagcaagactgagcccacccagagccagaggcggaactccagcaagaccaaggccactatacacaagaggaactccagcaagaccaaggccacccaaagccagaggcggaactccagcaagaccagggccacccagggccaggggcagagctccagcaagactgaggccactcagggccagaggcagagctccagcgagattgaggccacccagggcccaaggcaggagcccagcaagaccaagaccacccggagcccaaggcagaggcccagaaaggtcaaggctgctcgtggccggagctggagacccagcaaggttgatgccacccagggccgaagcaggggactgctccgaagttccaccaagactgaggctttctatgactcaaactggagcctcagcaaaactgagtatgcccaaggccagggccagaggtccagcaaggctgagggtgcccagggcaagagccagggcatgagctcaacttccagcaaggccgagtccacctggggacccagcccaagtctcagcaaaactgaggttgatcaggacctcacctactatgaagctgtctgaagggaccatccagaccctcccttcttgctggggaggggacgagttctacccacctccccacactggcactcagccagctgcctccttccagagcaattaaaagtcttagcaacagtcctctggtcccacagctgagtttattatacttgttttcttttacaaaattaaaaacatctaaaaccaggcccaagtggc

SEQ ID NO: 12276 - DNA, 3680 bp, Homo sapiens
tgagtaaatgccgcagattctggaaagttctgatcagtgcgatacataaggctgaggaagtgggacctccccttttgggtcggtagttcagcgccggcgccggtgtgcgagccgcggcagagtgaggcaggcaacccgaggtgcggagcgacctgcggaggctgagccccgctttctcccagggtttcttatcagccagccgccgctgtccccgggggagtaggaggctcctgacaggccgcggctgtctgtgtgtccttctgagtgtcagaggaacggccagaccccgcgggccggagcagaacgcggccagggcagaaagcggcggcaggagaagcaggcagggggccggaggacgcagaccgagacccgaggcggaggcggaccgcgagccggccatgtcggtggtggggttggacgtgggctcgcagagctgctacatcgcggtagcccgggccgggggcatcgagaccatcgccaatgagttcagcgaccggtgcaccccgtcagtcatatcatttggatcaaaaaatagaacaatcggagttgcagccaaaaatcagcaaatcactcatgcaaacaatacggtgtctaacttcaaaagatttcatggccgagcattcaatgaccccttcattcaaaaggagaaggaaaacttgagttacgatttggttccattgaaaaatggtggagttggaataaaggtaatgtacatgggtgaagaacatctatttagtgtggagcagataacagccatgttgttgactaagctgaaggaaactgctgaaaacagcctcaagaaaccagtaacagattgtgttatttcagtcccctccttctttacagatgctgagaggcgatctgtgttagatgctgcacagattgttggcctaaactgtttaagacttatgaatgacatgacagctgttgctttgaattacggaatttataagcaggatctcccaagcctggatgagaaacctcggatagtggtttttgttgatatgggacattcagcttttcaagtgtctgcttgtgcttttaacaagggaaaattgaaggtactgggaacagcttttgatcctttcttaggaggaaaaaacttcgatgaaaagttagtggaacatttttgtgcagaatttaaaactaagtacaagttggatgcaaaatccaaaatacgagcactcctacgtctgtatcaggaatgtgaaaaactgaaaaagctaatgagctctaacagcacagaccttccactgaatatcgaatgctttatgaatgataaagatgtttccggaaagatgaacaggtcacaatttgaagaactctgtgctgaacttctgcaaaagatagaagtacccctttattcactgttggaacaaactcatctcaaagtagaagatgtgagtgcagttgagattgttggaggcgctacacgaattccagctgtgaaggaaagaattgccaaattctttggaaaagatattagcacaacactcaatgcagatgaagcagtagccagaggatgtgcattacagtgtgcaatactttccccggcatttaaagttagagaattttccgtcacagatgcagttccttttccaatatctctgatctggaaccatgattcagaagatactgaaggtgttcatgaagtctttagtcgaaaccatgctgctcctttctccaaagttctcacctttctgagaagggggccttttgagctagaagctttctattctgatccccaaggagttccatatccagaagcaaaaataggccgctttgtagttcagaatgtttctgcacagaaagatggagaaaaatctagagtaaaagtcaaagtgcgagtcaacacccatggcattttcaccatctctacggcatctatggtggagaaagtcccaactgaggagaatgaaatgtcttctgaagctgacatggagtgtctgaatcagagaccaccagaaaacccagacactgataaaaatgtccagcaagacaacagtgaagctggaacacagccccaggtacaaactgatgctcaacaaacctcacagtctcccccttcacctgaacttacctcagaagaaaacaaaatcccagatgctgacaaagcaaatgaaaaaaaagttgaccagcctccagaagctaaaaagcccaaaataaaggtggtgaatgttgagctgcctattgaagccaacttggtctggcagttagggaaagaccttcttaacatgtatattgagacagagggtaagatgataatgcaagataaattggaaaaagaaaggaatgatgctaaaaatgcagttgaggaatatgtgtatgagttcagagacaagctgtgtggaccatatgaaaaatttatatgtgagcaggatcatcaaaattttttgagactcctcacagaaactgaagactggctgtatgaagaaggagaggaccaagctaaacaagcatatgttgacaagttggaagaattaatgaaaattggcactccagttaaagttcggtttcaggaagctgaagaacggccaaaaatgtttgaagaactaggacagaggctgcagcattatgccaagatagcagctgacttcagaaataaggatgagaaatacaaccatattgatgagtctgaaatgaaaaaagtggagaagtctgttaatgaagtgatggaatggatgaataatgtcatgaatgctcaggctaaaaagagtcttgatcaggatccagttgtacgtgctcaggaaattaaaacaaaaatcaaggaattgaacaacacatgtgaacccgttgtaacacaaccgaaaccaaaaattgaatcacccaaactggaaagaactccaaatggcccaaatattgataaaaaggaagaagatttagaagacaaaaacaattttggtgctgaacctccacatcagaatggtgaatgttaccctaatgagaaaaattctgttaatatggacttggactagataaccttaaattggcctattccttcaattaataaaatatttttgccatagtatgtgactctacataacatactgaaactatttatattttcttttttaaggatatttagaaattttgtgtattatatggaaaaagaaaaaaagcttaagtctgtagtctttatgatcctaaaagggaaaattgccttggtaactttcagattcctgtggaattgtgaattcatactaagctttctgtgcagtctcaccatttgcatcactgaggatgaaactgacttttgtcttttggagaaaaaaaactgtactgcttgttcaagagggctgtgattaaaatctttaagcatttgttcctgccaaggtagttttcttgcattttgctctccattcagcatgtgtgtgggtgtggatgtttataaacaagactaagtctgacttcataagggctttctaaaaccatttctgtccaagagaaaatgactttttgctttgatattaaaaattcaatgagtaaaacaaaagctagtcaaatgtgttagcagcatgcagaacaaaaactttaaactttctctctcactatacagtatattgtcatgtgaaagtgtggaatggaagaaatgtcgatcctgttgtaactgattgtgaacacttttatgagctttaaaataaagttcatcttatggtgtcatttctaaaaaaaaaaaaaaa

SEQ ID NO: 12277 - DNA, 7466 bp, Homo sapiens
gtaaaagtgacattctaaatgttcctcactctgcgaggcttattttttagggactttgctataattctgaaagacttagttttacagtacatctgaaagtaggagttttcagaagtatggctcttgggataaatttagattcttaattgtgaagctctgttaccacttgttagaaggcaggtcagctcacctgcttggggaggtaaatatatgaatgcactctcgagtaatttaatggagccctacctcaatgtacagaatgacagtatcacagatcaagaatggagtacgagtgattttcggctatggtgggggtaggtaggtcacttgtcccctgttgtctcttactatttgtaaagtgaagactatgattagtctttttgatcgggatggtttgagatgaataaagaataggcaggcaatttggatactttaggcttttcaagaacattagtaacattttttcttagatatttctcctaatacaatgagtgttgtgaaataacatggcagttattgttgagagaaaagccttcccagttatgtattgagtccttaggcgttttgaccttccctccactcttacagaacttggtggaaggggccactatgttttctacctccttccgtgcctttcacaaagccacatcctgcaccgtctacccttctctgtggatatttttccgcttggcaatttcctttcctgaggcacccacttgggacatctgaatctccatctccatgttgatggcccgtttgtgcttggacgtgttcttccacttgagactgagggttcatgtaatcaaagaagtttctttgttgtgtgtatctttacagaacacaacaggaattgaaaatgaatcagaacactactgagcctgtggcggccaccgagaccctggctgaggtacccgaacatgtgctgcgaggacttccggaggaagtgaggcttttcccttctgctgttgacaagacccggattggtgtctgggccactaaaccaattttaaaaggcaaaaaatttgggccatttgttggtgataagaaaaaaagatctcaggttaagaataatgtatacatgtgggaggtgtattacccaaatttgggatggatgtgcattgatgccactgatccagagaagggaaactggctgcgatatgtgaattgggcttgctcaggagaagagcaaaatttattcccactggaaatcaacagagccatttactataaaactttaaagccaatcgcgccgggcgaggagctcctggtctggtacaatggggaagacaaccctgagatagcagctgcgattgaggaagagcgagccagcgcccggagcaagcggagctcccccaagagccggaaagggaagaaaaaatcccaggaaaataaaaacaaaggaaacaaaatccaagacatacaactgaagacaagtgagccagatttcacctctgcaaatatgagagattctgcagaaggtcctaaagaagacgaagagaagccttcagcctcagcacttgagcagccggccaccctccaggaggtggccagtcaggaggtgcctccagaactagcaacccctgcccctgcctgggagccacagccagaaccagacgagcgattagaagcggcagcttgtgaggtgaatgatttgggggaagaggaggaggaggaagaggaggaggatgaagaagaagaagaagatgatgatgatgatgagttggaagacgagggggaagaagaagccagcatgccaaatgaaaattctgtgaaagagccagaaatacggtgtgatgagaagccagaagatttattagaggaaccaaaaacaacttcagaagaaactcttgaagactgctcagaggtaacacctgccatgcaaatccccagaactaaagaagaggccaatggtgatgtatttgaaacgtttatgtttccgtgtcaacattgtgaaaggaagtttacaaccaaacaggggcttgagcgtcacatgcatatccatatatccaccgtcaatcatgctttcaaatgcaagtactgtgggaaagcctttggcacacagattaaccggcggcgacatgagcggcgccatgaagcagggttaaagcggaaacccagccaaacactacagccgtcagaggatctggctgatggcaaagcatctggagaaaacgttgcttcaaaagatgattcgagtcctcccagtcttgggccagactgtctgatcatgaattcagagaaggcttcccaagacacaataaattcttctgtcgtagaagagaatggggaagttaaagaacttcatccgtgcaaatattgtaaaaaggtttttggaactcatactaatatgagacggcatcagcgtagagttcacgaacgtcatctgattcccaaaggtgtacggcgaaaaggaggccttgaagagccccagcctccagcagaacaggcccaggccacccagaacgtgtatgtaccaagcacagagccggaggaggaaggggaagcagatgatgtgtacatcatggacatttctagcaatatctctgaaaacttaaattactatattgatggtaaaattcaaactaataacaacactagtaactgtgatgtgattgagatggagtctgcttcggcagatttgtatggtataaattgtctgctcactccagttacagtggaaattactcaaaatataaagaccacacaggtccctgtaacagaagatcttcctaaagagcctttgggcagcacaaatagtgaggccaagaagcggagaactgcgagcccacctgcactgcccaaaattaaggccgaaacagactctgaccccatggtcccctcttgctctttaagtcttcctcttagcatatcaacaacagaggcagtgtctttccacaaagagaaaagtgtttatttgtcatcaaagctcaaacaacttcttcaaacccaagataaactaactcctgcagggatttcagcaactgaaatagctaaattaggtcctgtttgtgtgtctgctcctgcatcaatgttgcctgtgacctcaagtaggtttaagaggcggaccagctctcctcccagttctccacagcacagtcctgcccttcgagactttggaaagccaagtgatgggaaagcagcatggaccgatgccgggctgacttccaaaaaatccaaattagaaagtcacagcgactcaccagcatggagtttgtctgggagagatgagagagaaactgtgagccctccatgctttgatgaatataaaatgtctaaagagtggacagctagttctgcttttagcagtgtgtgcaaccagcagccactggatttatccagcggtgtcaaacagaaggctgagggtacaggcaagactccagtccagtgggaatctgtcttagatctcagtgtgcataaaaagcattgtagtgactctgaaggcaaggaattcaaagaaagtcattcagtgcagcctacgtgtagtgctgtaaagaaaaggaaaccaaccacctgcatgctgcagaaggttcttctcaatgaatataatggcatcgatttacctgtagaaaaccctgcagatgggaccaggagcccaagtccttgtaaatccctagaagctcagccagatcctgacctcggtccgggctctggtttccctgcccctactgttgagtccacacctgatgtttgtccttcatcacctgccctgcagacaccctccctttcatccggtcagctgcctcctctcttgatccccacagatccctcttcccctccaccctgtcccccggtattaactgttgccactccgccccctcccctccttcctaccgtacctcttccagccccctcttccagtgcatctccacacccatgcccctctccactctcaaatgccaccgcacagtccccacttccaattctgtccccaacagtgtccccctctccctctcccattcctcccgtggagcccctgatgtctgccgcctcacccgggcctccaacactttcttcttcctcctcttcatcttcctcctcctcttcgttttcttcttcatcttcctcctcttctccttctccacctcctctctccgcaatatcatctgttgtttcctctggtgataatctggaggcttctctccccatgatatctttcaaacaggaggaattagagaatgaaggtctgaaacccagggaagagccccagtctgctgctgaacaggatgttgttgttcaggaaacattcaacaaaaactttgtttgcaacgtctgtgaatcaccttttctttccattaaagatctaaccaaacatttatctattcatgctgaagaatggcccttcaaatgtgaattttgtgtgcagctttttaaggataaaacggacttgtcagaacatcgctttttgcttcatggagttgggaatatctttgtgtgttctgtttgtaaaaaagaatttgcttttttgtgcaatttgcagcagcaccagcgagatctccacccagataaggtgtgcacacatcacgagtttgaaagcgggactctgaggccccagaactttacagatcccagcaaggcccatgtagagcatatgcagagcttgccagaagatcctttagaaacttctaaagaagaagaggagttaaatgattcctctgaagagctttacacgactataaaaataatggcttctggaataaagacaaaagatccagatgttcgattgggcctcaatcagcattacccaagctttaaaccacctccatttcagtaccatcaccgtaaccccatggggattggtgtgacagccacaaatttcactacacacaatattccacagactttcactaccgccattcgctgcacaaagtgtggaaaaggtgtcgacaatatgccggagttgcacaaacatatcctggcttgtgcttctgcaagtgacaagaagaggtacacgcctaagaaaaacccagtaccattaaaacaaactgtgcaacccaaaaatggcgtggtggttttagataactctgggaaaaatgccttccgacgaatgggacagcccaaaaggcttaactttagtgttgagctcagcaaaatgtcgtcgaataagctcaaattaaatgcattgaagaaaaaaaatcagctagtacagaaagcaattcttcagaaaaacaaatctgcaaagcagaaggccgacttgaaaaatgcttgtgagtcatcctctcacatctgcccttactgtaatcgagagttcacttacattggaagcctgaataaacacgccgccttcagctgtcccaaaaaacccctttctcctcccaaaaaaaaagtttctcattcatctaagaaaggtggacactcatcacctgcaagtagtgacaaaaacagtaacagcaaccaccgcagacggacagcggatgcggagattaaaatgcaaagcatgcagactccgttgggcaagaccagagcccgcagctcaggccccacccaagtcccacttccctcctcatccttcaggtccaagcagaacgtcaagtttgcagcttcggtgaaatccaaaaaaccaagctcctcctctttaaggaactccagcccgataagaatggccaaaataactcatgttgaggggaaaaaacctaaagctgtggccaagaatcattctgctcagctttccagcaaaacatcacggagcctgcacgtgagggtacagaaaagcaaagctgttttacaaagcaaatccaccttggcgagtaagaaaagaacagaccggttcaatataaaatctagagagcggagtggggggccagtcacccggagccttcagctggcagctgctgctgacttgagtgagaacaagagagaggacggcagcgccaagcaggagctgaaggacttcaggaacttcctgtagaaaagcccccaaaacaaaacaaaccttaattgactaaaaagtattgcatgctcaacttaggataagcactacggcaaaggatacgaaatctaccaagcttgcaagaccagttgaagctgactcaaaaatcctaacattcagctgattgccggcagcttagagtcaggcatctgctgcttcggtgggggcccaacgcgcatgctgggcgcccgggtgattgagatccaaagagaagggcactgtaagacaggccagatgaactggctcctcgtcatgggactggtacctcagatctgagcatggcccttgtttttggcacgtagcagagaaaggattgatttgaacttaaccttgcaaagcaagttgcctgttttagcagtagtttgttgtaggtttcagggatgacagatttggatgcactcatttaaaacgttttggtcacatatcagctcttgatgcctttcttttaaattaattatagacagagagaggcatttagctgatctcttacccctggtatttcttttttttgttgttttcgtttttttaaatcacaagtagattgccagcgtaatggagaggaaaccagattggatatggactcttttttatgcctattctggtgttgcgtttgtatatccaaatggacgttatcctctcagattcttatctggcactaatttataactattatattatcagagactatgtagcaatatatcagtgcacaggcgcatcccaggcctgtacagatgtatgtctacacgtaagtataaatgaatttgcataccaggttttacacttgcatctctaatagagattaaaaacaacaaattggcctcttcctaagtatattaatatcatttatccttacattttatgcctccccctaaattaatgactgagttggtggaaagcggctaggttttattcatactgttttttgttctcaacttcaaaagtaatctacctctgaaaaatttgtagtttaatatttgtttggtgaatttgtgccactttaatccttccactatcattcccattttgttacatttctgttatggggactttatgttgaaatattgtataaagcatttgtagcaatttaaaaataaaatatttaaaattatttaaattgttttggacgcttcaattgtattatatgtgatttacatttcactttttttgttggcgttgttaacccggagagtgctcctgtattgaactttgctgttagttattttattgcttctttttggagagtgctataaaagactattctaatgaaaacattaaaatttacaatttgacatacaaaaaggggttgtccattgattttaaccaatgtagcactgagagagagagaggttaattatagatagacaagagtggtgtttgttgtttttcccctcccagcattgaaatcattggggcttgtcagatgtattaaaaaaagatttgttgtgctattgctgcaaacacttaataactagaggagaatttaaacaatgcattttatattattgtaaccaataaaaaactttctaaaaaaaaaaaaaaa

SEQ ID NO: 12278 - DNA, 7958 bp, Homo sapiens
gtaaaagtgacattctaaatgttcctcactctgcgaggcttattttttagggactttgctataattctgaaagacttagttttacagtacatctgaaagtaggagttttcagaagtatggctcttgggataaatttagattcttaattgtgaagctctgttaccacttgttagaaggcaggtcagctcacctgcttggggaggtaaatatatgaatgcactctcgagtaatttaatggagccctacctcaatgtacagaatgacagtatcacagatcaagaatggagtacgagtgattttcggctatggtgggggtaggtaggtcacttgtcccctgttgtctcttactatttgtaaagtgaagactatgattagtctttttgatcgggatggtttgagatgaataaagaataggcaggcaatttggatactttaggcttttcaagaacattagtaacattttttcttagatatttctcctaatacaatgagtgttgtgaaataacatggcagttattgttgagagaaaagccttcccagttatgtattgagtccttaggcgttttgaccttccctccactcttacagaacttggtggaaggggccactatgttttctacctccttccgtgcctttcacaaagccacatcctgcaccgtctacccttctctgtggatatttttccgcttggcaatttcctttcctgaggcacccacttgggacatctgaatctccatctccatgttgatggcccgtttgtgcttggacgtgttcttccacttgagactgagggttcatgtaatcaaagaagtttctttgttgtgtgtatctttacagaacacaacaggaattgaaaatgaatcagaacactactgagcctgtggcggccaccgagaccctggctgaggtacccgaacatgtgctgcgaggacttccggaggaagtgaggcttttcccttctgctgttgacaagacccggattggtgtctgggccactaaaccaattttaaaaggcaaaaaatttgggccatttgttggtgataagaaaaaaagatctcaggttaagaataatgtatacatgtgggaggtgtattacccaaatttgggatggatgtgcattgatgccactgatccagagaagggaaactggctgcgatatgtgaattgggcttgctcaggagaagagcaaaatttattcccactggaaatcaacagagccatttactataaaactttaaagccaatcgcgccgggcgaggagctcctggtctggtacaatggggaagacaaccctgagatagcagctgcgattgaggaagagcgagccagcgcccggagcaagcggagctcccccaagagccggaaagggaagaaaaaatcccaggaaaataaaaacaaaggaaacaaaatccaagacatacaactgaagacaagtgagccagatttcacctctgcaaatatgagagattctgcagaaggtcctaaagaagacgaagagaagccttcagcctcagcacttgagcagccggccaccctccaggaggtggccagtcaggaggtgcctccagaactagcaacccctgcccctgcctgggagccacagccagaaccagacgagcgattagaagcggcagcttgtgaggtgaatgatttgggggaagaggaggaggaggaagaggaggaggatgaagaagaagaagaagatgatgatgatgatgagttggaagacgagggggaagaagaagccagcatgccaaatgaaaattctgtgaaagagccagaaatacggtgtgatgagaagccagaagatttattagaggaaccaaaaacaacttcagaagaaactcttgaagactgctcagaggtaacacctgccatgcaaatccccagaactaaagaagaggccaatggtgatgtatttgaaacgtttatgtttccgtgtcaacattgtgaaaggaagtttacaaccaaacaggggcttgagcgtcacatgcatatccatatatccaccgtcaatcatgctttcaaatgcaagtactgtgggaaagcctttggcacacagattaaccggcggcgacatgagcggcgccatgaagcagggttaaagcggaaacccagccaaacactacagccgtcagaggatctggctgatggcaaagcatctggagaaaacgttgcttcaaaagatgattcgagtcctcccagtcttgggccagactgtctgatcatgaattcagagaaggcttcccaagacacaataaattcttctgtcgtagaagagaatggggaagttaaagaacttcatccgtgcaaatattgtaaaaaggtttttggaactcatactaatatgagacggcatcagcgtagagttcacgaacgtcatctgattcccaaaggtgtacggcgaaaaggaggccttgaagagccccagcctccagcagaacaggcccaggccacccagaacgtgtatgtaccaagcacagagccggaggaggaaggggaagcagatgatgtgtacatcatggacatttctagcaatatctctgaaaacttaaattactatattgatggtaaaattcaaactaataacaacactagtaactgtgatgtgattgagatggagtctgcttcggcagatttgtatggtataaattgtctgctcactccagttacagtggaaattactcaaaatataaagaccacacaggtccctgtaacagaagatcttcctaaagagcctttgggcagcacaaatagtgaggccaagaagcggagaactgcgagcccacctgcactgcccaaaattaaggccgaaacagactctgaccccatggtcccctcttgctctttaagtcttcctcttagcatatcaacaacagaggcagtgtctttccacaaagagaaaagtgtttatttgtcatcaaagctcaaacaacttcttcaaacccaagataaactaactcctgcagggatttcagcaactgaaatagctaaattaggtcctgtttgtgtgtctgctcctgcatcaatgttgcctgtgacctcaagtaggtttaagaggcggaccagctctcctcccagttctccacagcacagtcctgcccttcgagactttggaaagccaagtgatgggaaagcagcatggaccgatgccgggctgacttccaaaaaatccaaattagaaagtcacagcgactcaccagcatggagtttgtctgggagagatgagagagaaactgtgagccctccatgctttgatgaatataaaatgtctaaagagtggacagctagttctgcttttagcagtgtgtgcaaccagcagccactggatttatccagcggtgtcaaacagaaggctgagggtacaggcaagactccagtccagtgggaatctgtcttagatctcagtgtgcataaaaagcattgtagtgactctgaaggcaaggaattcaaagaaagtcattcagtgcagcctacgtgtagtgctgtaaagaaaaggaaaccaaccacctgcatgctgcagaaggttcttctcaatgaatataatggcatcgatttacctgtagaaaaccctgcagatgggaccaggagcccaagtccttgtaaatccctagaagctcagccagatcctgacctcggtccgggctctggtttccctgcccctactgttgagtccacacctgatgtttgtccttcatcacctgccctgcagacaccctccctttcatccggtcagctgcctcctctcttgatccccacagatccctcttcccctccaccctgtcccccggtattaactgttgccactccgccccctcccctccttcctaccgtacctcttccagccccctcttccagtgcatctccacacccatgcccctctccactctcaaatgccaccgcacagtccccacttccaattctgtccccaacagtgtccccctctccctctcccattcctcccgtggagcccctgatgtctgccgcctcacccgggcctccaacactttcttcttcctcctcttcatcttcctcctcctcttcgttttcttcttcatcttcctcctcttctccttctccacctcctctctccgcaatatcatctgttgtttcctctggtgataatctggaggcttctctccccatgatatctttcaaacaggaggaattagagaatgaaggtctgaaacccagggaagagccccagtctgctgctgaacaggatgttgttgttcaggaaacattcaacaaaaactttgtttgcaacgtctgtgaatcaccttttctttccattaaagatctaaccaaacatttatctattcatgctgaagaatggcccttcaaatgtgaattttgtgtgcagctttttaaggataaaacggacttgtcagaacatcgctttttgcttcatggagttgggaatatctttgtgtgttctgtttgtaaaaaagaatttgcttttttgtgcaatttgcagcagcaccagcgagatctccacccagataaggtgtgcacacatcacgagtttgaaagcgggactctgaggccccagaactttacagatcccagcaaggcccatgtagagcatatgcagagcttgccagaagatcctttagaaacttctaaagaagaagaggagttaaatgattcctctgaagagctttacacgactataaaaataatggcttctggaataaagacaaaagatccagatgttcgattgggcctcaatcagcattacccaagctttaaaccacctccatttcagtaccatcaccgtaaccccatggggattggtgtgacagccacaaatttcactacacacaatattccacagactttcactaccgccattcgctgcacaaagtgtggaaaaggtgtcgacaatatgccggagttgcacaaacatatcctggcttgtgcttctgcaagtgacaagaagaggtacacgcctaagaaaaacccagtaccattaaaacaaactgtgcaacccaaaaatggcgtggtggttttagataactctgggaaaaatgccttccgacgaatgggacagcccaaaaggcttaactttagtgttgagctcagcaaaatgtcgtcgaataagctcaaattaaatgcattgaagaaaaaaaatcagctagtacagaaagcaattcttcagaaaaacaaatctgcaaagcagaaggccgacttgaaaaatgcttgtgagtcatcctctcacatctgcccttactgtaatcgagagttcacttacattggaagcctgaataaacacgccgccttcagctgtcccaaaaaacccctttctcctcccaaaaaaaaagtttctcattcatctaagaaaggtggacactcatcacctgcaagtagtgacaaaaacagtaacagcaaccaccgcagacggacagcggatgcggagattaaaatgcaaagcatgcagactccgttgggcaagaccagagcccgcagctcaggccccacccaagtcccacttccctcctcatccttcaggtccaagcagaacgtcaagtttgcagcttcggtgaaatccaaaaaaccaagctcctcctctttaaggaactccagcccgataagaatggccaaaataactcatgttgaggggaaaaaacctaaagctgtggccaagaatcattctgctcagctttccagcaaaacatcacggagcctgcacgtgagggtacagaaaagcaaagctgttttacaaagcaaatccaccttggcgagtaagaaaagaacagaccggttcaatataaaatctagagagcggagtggggggccagtcacccggagccttcagctggcagctgctgctgacttgagtgagaacaagagagaggacggcagcgccaagcaggagctgaaggacttcagctacagcctccgcttggcgtcccgatgctctccaccagcggccccgtacatcaccaggcagtataggaaggtcaaagctccggctgcagcccagttccagggaccattcttcaaagagtagacactctggctgctccctgacagcacctgaagtgacctggaatcagtgaagccaaagggactggcagtctgccctgcagggagtaccgacctatcccagttgtgtgaggctgcgagagaaagggagtgcatgtgcgcgcgtgcatgtgtgcgtgcgtgtgtgttcacgtgttctcgtgcgggcgcgtgagtggtcttcaaacgagggtcccgatccccggggcggcaggaagggggccgactccacgctgtcctttgggatgatacttggatgcagctcttgggaccgtgttctgcagcccagccttcctgttggggtggggcctctcctactatgcaatttttcaagagctccttgaccctgctttttgcttcttgagttgtcttttgccattatggggactttggtttgacccaggggtcagccttaggaaggccttcaggaggaggccgagttccccttcagtaccacccctctctccccaccttccctctcccggcaacatctctgggaatcaacagcatattgacacgttggagccgagcctgaacatgcccctcggccccagcacatggaaaacccccttccttgcctaaggtgtctgagtttctggctcttgaggcatttccagacttgaaattctcatcagtccattgctcttgagtctttgcagagaacctcagatcaggtgcacctgggagaaagactttgtccccacttacagatctatctcctcccttgggaagggcagggaatggggacggtgtatggaggggagggatctcctgcgcccttcattgccacacttggtgggaccatgaacatctttagtgtctgagcttctcaaattagctgcaataggaaaaaaacaaattgggaaatgaaaaaaaaatgggaagattaaaaagcacagggggaagaagaagagatttcggaggccatcctgccaggggcggacggggctgactcctgctctctggaggacggtcagtccatgtctcggagaaacgggtgagctgagcttggcgtttggacccagttcagtgaggttcttgggttttgtgcctttggggcagaccccaggcaaggatgtctgagaccacttgggcgctgttttctcagctccaatttcaagagtgagctatcaaacccagagcggaaggagggagctctgatgagcacggtttgtcacacgataaagggattttttttttcagggctactacggttgatcttgcaactctgtaaatatgtatgtagacacttttaaaagcacgtatttatgtccctgactgtaaatgctccatttttaaagttttataacttgtgttatttaatgagtcagtcaatcggctgcagtatgggatctgataaggatctaggagaagggtctcatgcggaccctcacatgggcagaaaaatggtggtcattggccgacatcacagttttcctgtttcccacccagctaaaaaccgttgtttgctttaaattttcataaactggaatcctttcacccgctcctacagctaaccctcacaagcatgaagtgctgtggctgttccttatcctaatgatgcgcttttgtcccgtaaatgttaacactcatgaagcataccccggcctctcagttcttgagggcctccccaccgcagcagcaaggaaagctcacgaaccccaaacctggcaagtcacctgcagcccatggtgagctctgggaagtgtggttgaggccttggggtcactccttttttgcatgtgcaaatgtgctggtcacccttcaacgctcccagacggtcaggaaaactgttccaatcatgaaaaggggggatgattttgtaaaagtggcatttcctggtcagtggtggtcttcaagacgacagctctgtatctgccatgtgaagagaattaacaataaaagtgtgaagagcgattgtgaggaacaag

SEQ ID NO: 12279 - DNA, 4868 bp, Homo sapiens
agccctaggttctcctgaatccctgcggtcccagcgtcgctccggacgctgccaacctgttctccaccgtcgctcgacttccacctctaagactcccacgaaactcaggttgaataattcatcaaattacacaactgaactcaagacatggctgcccagtgtgtcacaaaggtggcgctgaatgtttcctgtgccaatcttttggataaagatatagggtcaaagtcagaccctttatgtgtgttgtttttgaatacaagtggtcaacagtggtatgaggttgagcgcacagaaaggattaagaattgcttgaatccccaattttccaagacatttattattgattactactttgaagtggttcagaaattgaaatttggggtttatgacatcgacaacaaaactattgagctgagtgatgatgacttcttaggggaatgtgaatgtacccttggacaaattgtttccagcaagaagctaactcgaccactggtgatgaaaactggcagacctgcaggaaaagggagcattacgatttcagctgaagaaataaaagataatagagtggtcttgtttgaaatggaagccagaaaactggataataaggatctatttggaaagtcagacccatacctggaattccacaagcagacatctgatggaaactggctaatggttcatcggacagaggttgttaaaaacaacttgaatcctgtttggaggcctttcaagatctctcttaactcactgtgttacggagatatggacaaaaccattaaggtggagtgttatgattatgacaatgatgggtcacatgatctcattggaacatttcagaccaccatgacaaaactgaaagaagcctccagaagctcacctgttgaatttgaatgcataaatgagaaaaaaaggcaaaagaaaaaaagctacaagaattcaggtgttatcagtgtgaaacagtgtgagattacagtagaatgcacattccttgactatataatgggaggatgtcagctgaattttactgtgggagtggacttcactggctccaatggtgacccaaggtctccagactcccttcattacatcagccccaatggcgttaatgagtatttgactgctctctggtctgtgggactggtcattcaagattatgatgctgataagatgtttccagcttttggttttggcgctcagatacctcctcagtggcaggtatcacatgaatttccaatgaacttcaacccatccaatccctactgcaatggaatccaaggcattgtagaggcgtatcggtcttgtcttcctcagataaaactctatggaccaactaatttttctccaatcataaatcacgtggccaggtttgctgctgcagccacgcaacagcagacagcttctcaatattttgtgcttttgattattactgatggtgtgatcacagaccttgatgaaaccagacaagctatagttaatgcctccaggctgcctatgtccatcataattgttggagttggaggtgctgacttcagcgccatggagtttctggatggtgatggtggaagtctccgctccccattgggcgaagtggccatcagagatattgtccagtttgtgcctttcagacagttccagaatgctccaaaagaagcacttgctcagtgtgtcttggcagagattccccagcaggtggtgggctacttcaatacatacaaactccttcctcccaagaacccagccacgaaacaacagaagcagtgaccacttcaacagaattcttttgtgttatgtggagcaatgccatctctcaccccaaatcgtgtatctgtcattctacgtactttttacccccagcatttatgatgtaaatctctttctctatggattatatctgtttaaagcattctttctaggttattttggggggacagtgccaagtccatctttgcccagtcaattcagtgattgatagcaatttacattaattgcagtaaagctctttggattagaaattagtgtggggaaagcttattctgttgttgtttttgtttactttcatatgatgaaaatgctgtgtttaagtgtttgtcaataggaagaatggaaaactgttgggatgatgtggtttgcaggttgctgtgcctgattcacagtgtatgttgtataagccaatgtccatacctgattatgagagcttcttaaattatatgatatcaaatttgttcctgtaactctgtatacagtgcttttctgcaaggtaaaaataacctgtctatgcatctgatttttgctacagtttagacactgtggtttacaaaacagcatgcactcaacttgggactttatgaaaagtactgaatgagcaggaaaaggcacatactcagttttttaaatgtacaatcaacaagtaaaaataacctcatgtaagtaagccatttttatttgcctttctagatattttattttattgtggaaaactgtaaacatggtcagatttggctttttttttcattaactgagcaagactttcaggatattgtagatgcacagatggtaggttgtcctgaattctacattattagattactttaattgagatttgttaaaacggttaggactgttttgtccaggaaagataagaggaccaaacatataaggtgaaattcagaattccgtttccttctaactaatgaaaaactgcttactaaaaaaaaattttatactttccttgctaaggtcccatatattgatttgtacagatccacttagtcattttctcctttttttaagaaccattttcatctgatttttaaactcacgataccagttatctgttaatcaaaattgcattttacaatttaataatgtgatatttcctatgtctacagcataccttattaggtataaaacctactgcaacttagaaaaaggaaagaaaaaagaaaacttttccaactgctgcattaagatagggtggattttatgtgctttttttttttaagagttgaatttcttttcctgacttttaccttttacagcgtattacttagtgaacattacattttcagaatagatcctaatattttattgagggcctatgtgctaaaaactatgcatatctatatattggccaattatctttaataatttaccttttgaaattgcatgtttatcatatatccttaagtggacacatacagtgccatgttgatgtgcctctcagttttattgaaaagctgccccacagcccatgtctcttgttctctgcaatgcctcaagggagtgagctctcaaccacagatagctgtggcttctcagaagcagctcattgccaaggccaggctgagaggggacctgcttgctgtggtggttgcctagcccagatgagcatttacctaccaccttcccacttggctagctgtcctttggatatgtgctgttaactggggaaggcatctaactagtagcctgctactccatagtatggctcaatagatgacacatcattttgacattatcaataggagaaaagaaaactaacccttcttctgattgtttggagccatagttgtctcagatgttctaattctctttgtatgcttggaaacagcatagatatgttgctgtggttttcagaattttctcttttaatcacaagaagccttttaaaaaatgacttacacatattctcaatgtacagtaaaacagacagaagtgagcttatctgtttgatgctgtggcagggtcccagtcactgggcatatcctccttctccttaaccagctccacagcagcccctgagtcacctgcacaaggtgcttgggaactgctggttatgagcattcctggttttcttcagccaaataacaggtaatcactgtcaattggatttggtcttcattattttatattctgattttatcagaattattctattttaaaattgttttaaaatttaaaacatttaattcatgatcatgttcatcagtagatgctattattcataagaactgtgattccagcaaactagggtaattggtgcctttttacagttttgaataaaagcatttacaatttctaaattatcagttttcacagtttcagcactcaacctcatcatacgctgatttaatattgttttacattaaaatagtccttttccctgttgtgccaccattcatttaagtgctgtttgttcttaaaatgcatttaaagaaaaattacccatattgactttcacacctcatataatcagatctattacaaatatatatcggagtgacggtgcccaggatagatgtaatatttcttacagatgctggcacagaggaaataatataccagctaatctagtcacctaaccttgtggttagaattgcaattttaagaccagaaaaatttgaagtctgatcagagatttacaactgttcattatagtggtgccttaggcaatctttccaaagtaaattcagggccccattgctacttatgccatatttggacatactttttttttcttcaattttgtaaacttcctggaaagctgtcttcactaagtatcccctagtctctatatatgtggttagtagtcatggaaatgacacataaagtacgccagaagtttgatggaacgtgttagaaactgttttgtgcttttatggatgtcatacttgacaatacatgtgtaagttactaatatatgaattgatgctaaatatatcttacatttgaattccttttggataaagttatttcttgatgtgacagagtagtgtgttttcatttttattctttacatgtgaccaaaacaatagaaaagttaaaaataaaatatagtgttttaggtggcaaaaaaaaaaaaaaaaaaa

SEQ ID NO: 12280 - DNA, 2527 bp, Homo sapiens
ctcaagctcctctacaaagaggtggacagagaagacagcagagaccatgggacccccctcagcccctccctgcagattgcatgtcccctggaaggaggtcctgctcacagcctcacttctaaccttctggaacccacccaccactgccaagctcactattgaatccacgccattcaatgtcgcagaggggaaggaggttcttctactcgcccacaacctgccccagaatcgtattggttacagctggtacaaaggcgaaagagtggatggcaacagtctaattgtaggatatgtaataggaactcaacaagctaccccagggcccgcatacagtggtcgagagacaatataccccaatgcatccctgctgatccagaacgtcacccagaatgacacaggattctataccctacaagtcataaagtcagatcttgtgaatgaagaagcaaccggacagttccatgtatacccggagctgcccaagccctccatctccagcaacaactccaaccccgtggaggacaaggatgctgtggccttcacctgtgaacctgaggttcagaacacaacctacctgtggtgggtaaatggtcagagcctcccggtcagtcccaggctgcagctgtccaatggcaacatgaccctcactctactcagcgtcaaaaggaacgatgcaggatcctatgaatgtgaaatacagaacccagcgagtgccaaccgcagtgacccagtcaccctgaatgtcctctatggcccagatggccccaccatttccccctcaaaggccaattaccgtccaggggaaaatctgaacctctcctgccacgcagcctctaacccacctgcacagtactcttggtttatcaatgggacgttccagcaatccacacaagagctctttatccccaacatcactgtgaataatagcggatcctatatgtgccaagcccataactcagccactggcctcaataggaccacagtcacgatgatcacagtctctggaagtgctcctgtcctctcagctgtggccaccgtcggcatcacgattggagtgctggccagggtcgctctgatatagcagccctggtgtattttcgatatttcaggaagactggcagattggaccagaccctgaattcttctagctcctccaatcccattttatccatggaaccactaaaaacaaggtctgctctgctcctgaagccctatatgctggagatggacaactcaatgaaaatttaaagggaaaaccctcaggcctgaggtgtgtgccactcagagacttcacctaactagagacaggcaaactgcaaaccatggtgagaaattgacgacttcacactatggacagcttttcccaagatgtcaaaacaagactcctcatcatgataaggctcttacccccttttaatttgtccttgcttatgcctgcctctttcgcttggcaggatgatgctgtcattagtattcacaagaagtagcttcagagggtaacttaacagagtatcagattctatcttgtcaatcccaacgttttacataaaataagagatcctttagtgcacccagtgactgacattagcagcatctttaacacagccgtgtgttcaaatgtacagtggtccttttcagagttggacttctagactcacctgttctcactccctgttttaatttcaacccagccatgcaatgccaaataatagaattgctccctaccagctgaacagggaggagtctgtgcagtttctgacacttgttgttgaacatggctaaatacaatgggtatcgctgagactaagttgtagaaattaacaaatgtgctgctggtaaaatggctacactcatctgactcattctttattctattttagttggtttgtatcttgcctaaggtgcgtagtccaactcttggtattaccctcctaatagtcatactagtagtcatactccctggtgtagtgtattctctaaaagctttaaatgtctgcatgcagccagccatcaaatagtgaatggtctctctttggctggaattacaaaactcagagaaatgtgtcatcaggagaacatcataacccatgaaggataaaagccccaaatggtggtaactgataatagcactaatgcttaagatttggtcacactctctcacctaggtgagcgcattgagccagtggtgctaaatgctacatactccaactgaaatgttaaggaagaagatagatccaattaaaaaaaattaaaaccaatttaaaaaaaaaaagaacacaggagattccagtctacttgagttagcataatacagaagtcccctctactttaacttttacaaaaaagtaacctgaactaatctgatgttaaccaatgtatttatttctgtggttctgtttccttgttccaatttgacaaaacccactgttcttgtattgtattgccaggggggagctatcactgtacttgtagagtggtgctgctttaattcataaatcacaaataaaagccaattagctctataact

SEQ ID NO: 12281 - DNA, 5269 bp, Homo sapiens
ggggcctggtctggccaatggaagcacagagtgcaggctcagtggtcacgtgtccagcgggcgggaattttaccccaggaagagatgcaggaggcgatttttacctcagatgttgaaatttacactgctttgaaagaaagaagatatgttttcagcattgaaatatcatgcaatagactatttatatgagaatgtggttagaaagaagttttacagagatgctttattgcttcgaatcccttcatgtttatatcaagatgaaagttaccatgtagcagttactgataataaatttaggaggccatggacgagagtctcagctgtttcagttccgggaatgacagatacctcagtcttggaccaatggaaagcaagtttctttgtggaggatttccttgagaaaaaaacaattacaagaatggtgacccagattaattgtgaatttgaggaagttgttccaagttcaaatccagactcccaaattgaagtagaggaggtcagtttatacacccacatggactacaatgaagtctttacccctgtcagttgtttagaaaaatgttcagcacttcaaaaccagaaccaagatttatttattgatgataaaggaatactttttgtaagtagtagaaaacacctaccaactttgcctactctcttgagtagactaaaactgtttttggtaaaggatcctcttttagatttcaaaggacagatcttcacagaagctaatttttccagggaatgtttctctcttcaagaaactttggaagcttttgtgaaagaagatttttgtatggataaagtgaacttttgtcaagagaaactagaagatacaatatgtttaaatgagccgtcaagttttcttattgagtatgaattcttaatacctccaagcctcaaaccagaaattgatattccatcactctcagaactgaaggagttattaaacccagtgccagaaataataaactatgtagatgaaaaggaaaagctttttgaaagagatcttactaacaagcatggaattgaggatatcggggatataaaattcagctccacagagattttgaccattcaaagccagagtgaaccagaagagtgcagtaaaccaggagagttagaaatgccactaactcctctattcctaacatgccaacattcttcagtgaattcattacgtacagaacttcagacatttccattatctccggtttgtaaaattaatttgcttactgctgaagaatcagctaatgaatactacatgatgtggcaattagaaagatgtagaagccctttgaacccatttttgcttacagtgccaagaattcaagagccccacagccaatattcagttacagatttgaaaaagatattttctgttaaagaagaaagccttgtgattaatctggaaaaggcagagtggtggaaacaagcaggactaaatctgaaaatgatggaaacattggaacatctgaatacatatttatgtcatgataatttgtcttctaatgacactaaaattgagatatttttgcctacgaaagtgcttcaattagaatcatgtctagaacataaaagtcgttcttcacctattgcacttattgatgaaaaatctacaaatgctcatttatcacttccacaaaagagtccatctctggcaaaagaagtaccagatctatgtttttctgatgactatttctctgataaaggagcagcaaaagaagaaaaaccaaagaatgaccaagaaccagtaaacagaataatccaaaagaaagaaaataacgatcactttgaacttgactgcacaggaccatctattaaatcaccttcctcttcaataattaaaaaagcatcttttgaacatggcaaaaaacaagagaatgatttggaccttttgagcgactttattatgctgcgaaataaatataagacttgcacctcaaagactgaagtcacaaacagtgatgaaaaacatgataaagaagcatgttctttgacacttcaagaagaaagtcctattgttcatattaataaaaccctggaggaaataaatcaggaaaggggaacagatagtgtcattgaaattcaagcgtcagatagccagtgccaagcattttgcctcctcgaagcagcagcttctcctatcttaaaaaaccttgtatccttgtgtaccctccctactgctaattggaaatttgccactgttatttttgaccaaacaaggtttctcttaaaggaacaagaaaaagtagtaagtgatgctgttcgccaaggtacaattgatgaaagagaaatgactttcaagcatgccgctctcttacatcttctggtaacaattagagatgtccttttaacatgcagcttggacacagcattgggatatttgtcgaaggcaaaagatatctacaacagcattttaggcccctatttgggtgacatttggagacagctggagattgtacagtttattagggggaaaaagcctgaaaccaactacaagatacaagaattgcaatgtcagatactaagttggatgcaaagtcaacagcaaattaaggtactgattataataagaatggactcagacggtgaaaaacattttctcattaaaattcttaacaaaatagaaggtttaacactgactgtccttcattcaaatgaaagaaaagattttctggaatctgaaggtgttttaaggggtacaagttcctgtgtagttgtacataatcaatatattggagcagatttcccctggagtaatttctcatttgtggtggaatacaattatgtggaagactcttgttggactaaacactgcaaagagttgaatattccttacatggcctttaaagtgattcttccagacacagttttagaaagaagcaccttgctggatagatttggaggttttcttttggaaattcagattccatatgtgttttttgcatctgaaggacttcttaatactccagacatacttcagctgctagaatccaactataacatctcactagtagagagaggctgcagtgagtcattgaaactctttggaagttcagagtgttatgtagtggtgacaattgatgaacacactgccataattttgcaggatctagaagaattgaattgtgagaaggcatcagacaatatcattatgaggctgatggcattatcattacagtacagatattgttggataattttatataccaaagaaacattaaattcagagtatccgcttacagaaaagacacttcatcacctagcactgatttatgcagctttggtttcatttgggctaaactctgaagaactggatgtaaagcttataattgccccaggagtagaagcaactgccttgataattcgacaaattgctgaccacagtttaatgacctcaaagagagatcctcatgaatggttggataaatcctggcttaaagtttcaccatctgaggaagaaatgtacttacttgattttccatgtattaacccattggtggctcagctcatgctaaataaaggaccttcactgcattggatattattagcaactctgtgtcaacttcaggaactcctacctgaagtcccagaaaaagtgttaaagcatttttgtagcatcacttccctattcaagattggttcttcttccataacaaaatcaccgcaaatttcgtcacctcaggaaaataggaatcagattagtaccttgtcttctcaaagttcagcttctgatttagactctgtcattcaagaacataatgaatattatcagtatttaggattaggagagacagtgcaggaagacaaaaccaccactttgaatgacaactcttccattatggaactaaaaggaatctcaagttttttaccacctgtgacttcatacaatcagaccagctactggaaagactccagctgtaaatctaatatagggcagaatactccttttctaattaatatagaatcaaggagaccggcttataactcctttctaaaccacagtgattcagagtcagatgtcttttctttgggtctaacacaaatgaactgtgaaactataaaatcaccaactgacactcagaagagagtgtcagttgtcccccgttttataaattctcagaaaaggagaacacatgaagcaaaaggtttcataaataaagatgtatcggaccctatcttttcactagagggcactcaatctcctcttcattggaactttaagaaaaatatatgggaacaagagaatcacccgttcaacttacaatatggtgcacagcagactgcatgtaacaaattgtactctcagaaaggtaatttattcactgatcagcaaaaatgtctatcagatgagtctgaaggcctcacatgtgaaagttcaaaagatgagactttctggagagaattaccatctgtccccagtttggatttatttcgtgcttctgattctaatgcaaatcaaaaagaattcaacagcctttatttctaccaaagagctggaaaaagtttaggacagaaaaggcaccatgaatcttcatttaactcaggagacaaggaatcattaacaggttttatgtgctcacaactaccacaattcaaaaaacgacgtctagcatatgaaaaagtccctggtagagttgatgggcagactcggctgaggtttttttgaaggaggagaagagcaatgttacatgccatattccactgtttttgatgctaatccactagcgcaattatttagatttgctcatacactaaagaaaacacaattgttcatatatgtctcagtatttctgtattaaatattcataatatgtattctgccctatggtttgcatctttgtaagttaaatattctaatttatcaattagcagaataattatcataagatccaaaatgtcttccagacacccctgcacacaggccatttaaatgagtctccatcacagtctgaccctttgagtcaggaagtgaagatcatcacagttaaccctcccacatcaagaaagttaaaacctaggacaaaattgaagttagaaaacttccaacttaaagtatcattttctgtaaacacaatttaagaacaaattactaagaggaaatatttgcaacccagataataggaaaaaaagtttacatttctcatatataaagaattcctacaaattgatagaaagaagacaacctgatagaagaatgggcaaaatatatgaacagatatttcctcagaaaaaaacaaaaattgtcattaaacatttgaaacac

SEQ ID NO: 12282 - DNA, 21813 bp, Homo sapiens
gccaaggagcggagcgcgctcagctgcgcccagagccttcggccggacctgaaaaagcgagagggagagcgagcaaaaggcgcgatccagagagccaggcaagcggggcgccgacctcgggcggccccggcccgcgcccttgcccctcggccgggcggacgttcacttcttcaactgagatggacatgatataatctccattgagtcaaagaatggcatctagtcctgagcttcccaccgaagatgaacagggttcctggggcatcgacgatctccatatttcattgcaagctgaacaggaagacacccagaagaaagccttcacgtgctggataaactcacagttggccaggcacacttctccctcagttatatccgacctattcacagacattaaaaaggggcatgtcctcctggatctgctagaagtactttctgggcaacagttgcctcgggataaaggatctaataccttccagtgtagaatcaatatagaacatgccttgacattcctaagaaaccgatcaattaagctaataaatattcatgttactgatatcattgatggaaacccatccattatccttggcctaatttggacaattatcctgcactttcatattgagaagcttgcccagactctttcttgcaattacaatcagccttccctggatgatgtgagtgtggttgactcatctcctgcctcaagtcctccagctaagaaatgctctaaagtgcaagcaagatggcaaatgtctgcaagaaaggcccttcttttgtgggctcaggaacaatgcgccacctatgagtctgtcaatgtgaccgattttaagtcaagttggagaaatgggatggcttttttggccatcattcatgccttgcgaccagacctaattgacatgaagagtgtgaagcatagatccaacaaagacaatctgagagaggccttcagaattgcagaacaagaattaaaaatccccagattgctggaaccagaagatgtggatgttgttgatcctgatgaaaagtccatcatgacctatgtggcacagtttctgcagtattccaaagatgcccctgggactggagaggaggctcagggaaaggtgaaagatgctatgggctggttaactctgcaaaaggaaaaactacagaagttgctaaaggattcagagaatgatacctactttaaaaagtataatagcctgctgtcctttatggagtcattcaatgaagaaaaaaagtcctttttggatgtcctgtcaataaaacgggatctggatgagctggacaaggatcatttacagttgagagaagcctgggatggcctcgatcaccagattaatgcatggaaaataaagctaaattatgccttgcccccacccctccatcaaactgaagcttggctccaggaggtagaagagcttatggatgaagatttgtcagcctcccaggatcactctcaagccgtgactctgatacaagagaaaatgactttattcaagagcctgatggatagatttgagcatcattcgaacattctccttacctttgaaaataaggatgaaaatcacttgccattggtaccacctaacaaattggaggaaatgaaaagacgaatcaacaacattttggagaaaaaatttattctacttctagaatttcattactacaagtgcttagttcttggtttggtagatgaagtgaaatcaaaattggatatttggaacattaaatatgggagcagagaatctgtggaattattgctggaagactggcataaatttattgaagaaaaagaattcctagctcgacttgatacttcttttcaaaaatgtggagaaatttataagaatttggctggagaatgtcagaatattaataaacagtatatgatggtgaaatctgatgtttgtatgtatagaaaaaatatatataatgtgaagtccactctacaaaaagtgctggcatgttgggctacttatgtggaaaaccttcgcttactaagggcttgctttgaggagacaaagaaggaagaaattaaagaggtaccctttgagacactagcccagtggaatctagaacacgctactttaaatgaagcaggaaatttcttagtcgaagtcagcaatgatgtggttggatcatctatttctaaagaactgagaaggctgaataaaagatggagaaagttggtttcaaaaactcaacttatgaacctgccactgatgataaaaaaacaggatcagcccacttttgacaattctggaaatattctatctaaagaagagaaagcaactgttgagttttcaacagatatgtcagtagaacttcctgaaaattataatcaaaatataaaggctggagagaaacatgaaaaagaaaatgaagaattcacagggcaactaaaagtggctaaagatgttgaaaaactcattggacaagtggaaatctgggaggcagaagccaaatctgttttggatcaagatgatgtggacacctcaatggaagaatctttgaagcatcttattgccaaaggctctatgtttgatgagcttatggcaagaagtgaagatatgttacaaatggatatacaaaatatttcaagccaggagtcctttcaacatgttctcacaactgggcttcaggcaaagattcaagaagctaaagagaaagtccagatcaatgtggtaaaactcattgcagcgttgaagaacttaactgacgtttcaccagatttggacatcaggctgaagatggaagaatcccagaaggaacttgaatcatatatgatgagggctcagcagttactggggcaaagagagagccccggtgaactcatttcaaaacacaaggaagcactaataatttctaatacaaaaagtctggccaagtatttgaaagctgttgaagaactaaaaaataatgtaactgaggacataaagatgtctttagaagaaaagagtagagatgtctgtgccaaatgggagtctcttcatcatgaactgtctttatatgttcaacaactaaaaatagatattgaaaaaggaaagcttagtgacaatattttaaaacttgaaaagcaaataaataaagaaaagaaacttatccgtagaggaaggaccaagggtctcatcaaagaacatgaggcctgcttttctgaggaaggctgcctgtaccagcttaatcaccacatggaagtcctgagggagctgtgtgaagagctgccttcacagaagagtcaacaagaagtgaagagactactcaaagattatgaacaaaagatagaaagacttctgaaatgtgcttccgagattcatatgacactgcagcccacagcgggaggcacgtcgaaaaacgaggggaccatcaccacatctgagaatagaggaggggatccccacagtgaggcaccatttgcaaaatcagataatcagccatcaactgaaaaggcaatggaacccactatgaagtttagcctggcatcagtgttaaggcctctgcaagaagaaagcattatggaaaaggattacagtgcatctataaatagtttactagagaggtatgatacatacagagatattcttgaacaccacctgcaaaacaacaaattcaggattacttctgatttctctagtgaagaggacaggagtagttcttgtctgcaggctaaactgacagatctacaggtcataaaaaatgaaactgatgctcgctggaaagagtttgaaattatttcattgaagttagaaaatcatgtgaatgacataaaaaagccttttgtaattaaggaaagagacacactaaaggaaagagaaagagagcttcagatgactcttaataccagaatggaatctttagagacagcactgcggcttgtgttacctgtagagaaggcatcacttcttctctgtggctcggacctgcctctccataaaatggccatccagggatttcatctcattgatgctgatcgcatctatcaacacctaaggaatatccaagattccatagcaaaacagattgaaatatgtaaccgcttagaagagccaggcaactttgtattaaaggagttacacccatttgatctacacgcaatgcagaatattatactgaaatacaaaacacaatttgaaggaatgaaccacagggtgcagaggagtgaagatactctcaaagctctggaagactttttggcgtctctcagaacagctaaactctctgctgagcccgttacagacctttcagcctcagatacacaggtggcacaagaaaatacgttgacagtaaaaaataaagagggagaaattcatctgatgaaagacaaggccaaacatttggataaatgtttgaagatgctcgatatgagctttaaagatgctgaacggggtgatgacacctcctgtgaaaacctgcttgatgctttttcaataaagttatctgagacacatggctatggggtacaggaggaattcactgaggaaaacaaattactagaggcttgtattttcaaaaataatgaactccttaaaaatattcaagatgtgcagagtcaaatcagtaaaattggtcttaaggatcctactgttccagctgtgaaacatcggaaaaaatcattaatcagactggataaggttctagatgaatatgaagaagagaagagacatttacaagaaatggctaattctcttccacacttcaaagatggcagagaaaaaaccgtgaatcaacagtgccaaaatacagtagtcttgtgggagaataccaaagccttggtcaccgaatgtcttgaacaatgtgggagagttttggagctcttaaaacaatatcagaattttaaaagcatcttgacaactttgattcaaaaagaagagagtgtcatctccctgcaggcttcgtacatgggaaaggagaacctgaagaaaaggatagcagagattgaaattgtcaaagaagaatttaatgagcatttagaagttgtagacaagataaaccaggtctgcaaaaatctacaattttatctaaataaaatgaaaacttttgaagagcccccttttgaaaaagaggctaatattattgtggatagatggcttgatataaatgagaagacagaagattactatgaaaatcttggtcgagctctagctttgtgggacaaactttttaacttaaaaaatgtcattgatgagtggacagaaaaggcccttcaaaaaatggaattacatcaattgactgaagaggacagagaaaggctgaaggaagaattacaagtccatgaacaaaaaacttcagaattttctagaagagtggctgaaatacagtttttgctccaaagcagtgaaatacctcttgaattgcaggtcatggagtcctctattttgaacaagatggaacatgtacagaagtgcttaacaggagaatccaactgccatgcactcagtggcagcactgctgagctaagggaggatctcgaccaagccaagacccagatcgggatgactgaatccctcttaaaagccctgtctccttctgacagcttggagatcttcactaaactagaggagatacaacagcagattctacagcaaaaacacagtatgatattacttgagaatcaaataggttgtctgactcctgaactctctgaattgaaaaagcaatatgaaagtgtcagtgatttatttaataccaaaaaaagtgttttgcaagatcacttttctaagttattgaatgatcaatgcaagaactttaatgactggttcagcaacattaaagtgaaccttaaggagtgttttgaatcatcagaaacaaaaaagagtgtggaacaaaagctacaaaaactttctgatttcttgactcttgaaggaagaaacagtaaaataaagcaggtggacagcgtactgaagcatgtgaagaagcatctgcccaaagcacatgtgaaggagcttatcagttggctcgtgggtcaggaattcgaattagaaaaaatggagtccatatgccaggctcgagcaaaggagcttgaagactccttgcagcagctactgagactccaggatgaccatagaaacctgaggaagtggttgactaatcaagaagagaaatggaaaggaatggaagaaccaggggagaaaactgagctgttctgccaagctttagctagaaagagggaacagtttgaatctgtggcccaattgaacaactctttgaaggaatatgggtttactgaagaagaagaaataataatggaagcaacatgtttgatggatagataccagacattactgagacaactaagtgaaatcgaggaagaggataagttactacccacagaggaccagagctttaatgatcttgcacatgatgtaattcattggataaaagagattaaagagtcccttatggttttgaattcatccgaaggcaaaatgccacttgaggaaagaatccaaaaaatcaaggaaatcattttgctgaagcctgaaggggatgccagaatagagaccatcatgaagcaggctgagagcagcgaggccccgctggttcagaagaccctcactgacatcagcaaccagtgggacaacacactccatttagctagcacctacctaagccatcaagaaaagcttctactagaaggagagaaatatttacaaagtaaggaggatctgagattaatgctcatagaactaaagaagaaacaggaagcaggctttgctctacaacatggtctgcaggagaagaaagctcagttaaagatttataagaaattcctcaagaaagcccaagatttgacatccttgctaaaggagttaaaatctcagggaaactacctcttggagtgcactaaaaatcccagcttcagtgaagagccttggctggaaataaagcatctacacgaaagtcttcttcaacaactgcaggattctgtgcaaaacttggacggtcacgttcgagaacatgattcataccaggtttgcgtcacagacctgaatactacattggacaatttctccaaggaatttgtcagtttttctgataagcctgtggatcaaatagcggttgaggaaaaattgcagaaactgcaggaactagagaatagactcagtttacaagatggcacattaaagaagattttagctttagcaaaatccgtcaagcaaaatacatcttcagtggggcagaagattattaaagatgatataaaatcacttcagtgtaaacaaaaagatttggaaaacaggcttgcatctgctaagcaggagatggaatgttgtctcaacagcattctcaaatcaaaacgctcaacagaaaagaaaggaaagtttactctgccaggcagagagaagcaggccacttctgatgtgcaggagtctactcaggaatcagctgcagtggaaaagttggaggaagactgggaaataaacaaggattcagctgtggaaatggctatgtcaaaacaactttctcttaatgctcaagaaagcatgaaaaacactgaagatgagcggaaagtcaatgagctgcaaaatcaacctttagaattagatactatgttaagaaatgaacaattagaagagatagagaaattatatacccagttggaagcaaagaaagcagccattaagccactggaacaaacagaatgtcttaacaaaacagaaactggggccttggttctccacaatataggatattcggcacagcatttggacaatttgcttcaggcacttattactttgaagaaaaacaaagaaagccaatattgtgtcctcagagattttcaggaataccttgctgcagttgaatcttcaatgaaagccttgttgacagacaaggaaagtcttaaagtaggaccactggacagtgtaacgtatctggacaaaattaaaaaattcatagcatccatagaaaaagagaaagattctttaggcaacttgaaaatcaaatgggagaatttatcaaaccacgtgactgacatggataagaaattgttggaaagccagattaagcaacttgaacatggttgggaacaagtggaacagcagattcaaaagaagtattctcagcaggtagtggaatatgatgaatttacaaccctcatgaataaggtacaggacactgagatttctctgcaacagcagcagcaacatctacagttaaggctgaagtctccagaagaacgggcagggaaccaaagcatgattgccttgaccactgacctccaggctaccaagcatggattttctgttttaaaggggcaagctgaacttcagatgaagaggatttggggagaaaaagaaaagaagaatttggaggatggaataaataacttgaagaaacaatgggaaacattggagccattacacttagaagcagaaaatcagattaagaagtgtgacataaggaacaagatgaaagagactatcttatgggccaagaatttgttgggtgaacttaatccctccattccccttctcccagatgacattctttcacagatcagaaagtgcaaagtgacacatgatggcattctagctaggcagcagtctgtggaatcgttggctgaagaggtcaaagataaggttcctagccttacaacctatgagggcagtgatttaaataataccctagaggacttacggaatcaataccaaatgctggttttaaaatcaactcaaagatcacagcaattagaatttaagttggaagaaagaagcaatttttttgctataataaggaagtttcaacttatggttcaagaaagtgaaacactgataattcccagggtggagacagctgccacggaagctgaactaaaacatcaccatgttactttggaggcatctcagaaggaattgcaagaaattgacagtggaatctcaacacatcttcaggagctaacaaacatctatgaggagctgaatgtgtttgaaagattatttctggaagatcagttgaaaaatcttaagattaggaccaacagaatacaaagattcattcagaatacatgtaatgaagtggaacacaagataaagttttgcagacaattccatgaaaaaacatcagcgcttcaggaggaggctgacagtatacagcgcaatgaactattacttaatcaagaagtaaataaaggtgttaaagaggagatctataatcttaaagacagactcaccgctattaagtgttgcatcttacaggtattgaaacttaaaaaagtgtttgactatattggactaaactgggatttttcacaacttgaccaattacaaacccaagtatttgaaaaagaaaaggaacttgaagaaaaaattaagcagttggacacatttgaggaagaacatggcaaatatcaggcattattaagtaaaatgagagctattgatttgcaaattaagaaaatgactgaagtagtactaaaagctcctgatagctctccggaaagcagacggctcaatgcccaaattttaagtcagagaattgagaaagccaagtgtttatgtgatgagataataaagaaattaaatgaaaataagacctttgatgactcattcaaggagaaagaaatactacaaataaagctgaatgcagaagaaaatgataagttatacaaagttctccaaaacatggtattagaactctcaccaaaagaattggatgaaaagaattgtcaggacaaactagaaacttccttacatgttttaaatcagataaaatctcaattacagcagccattacttataaatttggaaattaaacatattcaaaatgaaaaggacaattgtgaagcatttcaggagcaagtttgggcagaaatgtgtagtattaaagctgtgactgctattgagaaacaaagagaagaaaactcttctgaagcgagtgatgtggagacaaaactacgtgagtttgaagatcttcagatgcagcttaacacaagcattgatttgcgcacaaatgtcttgaatgatgcttatgaaaatctaacacgctataaagaagcagtcaccagggcagtggagagcatcacttccctcgaagccatcattataccctacagagtagatgttggtaatccagaagaatctttagagatgcctcttcgaaaacaagaggaattggaatccacagtagcacgcatccaggacctcactgagaaactgggaatgatatccagccccgaagccaaactacaacttcagtatactttacaggaactagtttctaagaactcagcaatgaaggaagctttcaaagcacaggaaactgaggcagaaaggtatcttgagaattacaaatgctatagaaaaatggaagaggatatttacactaacctcagcaaaatggagacagttcttggacagtccatgtcctcgttgccactgtcttacagagaagctttagagcgcttggaacagagcaaggccttggtgtcaaatcttatatcaaccaaagaagagttaatgaaactacgacagatccttagactcttgagactcaggtgcacagaaaatgatggcatatgtttgctcaagattgtgtcggctctgtgggagaaatggctgagtttgctggaagctgctaaagagtgggagatgtggtgcgaagaactgaagcaggaatggaaatttgtcagtgaagaaattgaacgagaggcaattattttagataatcttcaggaagaactccctgaaatttccaaaacaaaagaggcagccaccacagaggaactctctgagctgctagactgtttatgccaatatggagagaacgtggagaagcaacagctgttactgactctacttcttcagcgcatcagaagtatccagaatgttcctgaaagctcaggggctgtggaaactgttccagcatttcaagaaattacttctatgaaagaacgatgcaacaagcttcttcagaaagttcagaaaaataaagaattggtgcagactgaaatccaagaaagacattccttcacaaaagagataattgctttgaagaatttctttcaacagaccacaacttcattccaaaatatggcattccaggatcacccagaaaagtcagaacaatttgaggagcttcaaagcatccttaagaaagggaaactaacttttgagaatattatggaaaaactgcgaatcaagtattccgaaatgtacaccatagtccctgcagagattgaatcccaggtggaagaatgcagaaaagctttagaagacatagatgagaagattagcaatgaagtcttaaaaagctcaccatcatatgcaatgaggagaaaaatagaagaaattaacaatgggcttcataatgttgaaaagatgttgcagcagaaaagcaaaaatattgagaaagctcaagaaattcaaaagaaaatgtgggacgagttagatctatggcattccaaactaaatgagctggattctgaagttcaggacattgttgaacaggacccaggacaggctcaagaatggatggataacttgatgattcctttccagcagtatcagcaagtatcacagagagcagagtgtagaacctcacagttgaataaggccacagttaagatggaggaatatagtgaccttctgaagagcactgaggcttggatagaaaataccagtcatttgctggccaatcctgctgactatgactctttgaggacactgagtcaccatgctagcactgtgcagatggctttggaagattcagaacagaagcacaatcttttacattcaatctttatggatctagaagacctgtcaataatttttgaaacagatgaattaacccaatccatacaagagttaagtaatcaagtaacagctttacaacaaaaaataatggaaagccttccacagattcagcgaatggctgatgatgtggttgctattgaatctgaagtaaaatcaatggaaaaaagagtttcaaaaatcaaaactatcctattatcaaaagaaatatttgatttttcacctgaagaacatctcaaacatggggaggtcatacttgaaaatatacgtcccatgaagaaaaccattgctgagatagtgtcttaccaagtggaactgaggttgccccaaacaggaatgaaacctctgcctgtgtttcagcggacaaatcagcttttacaagatataaaactattggaaaatgtgactcaagaacaaaatgagttattaaaggtagtcataaaacagaccaatgaatgggatgaagaaatagaaaatttgaaacagatcttaaataattattcagctcagttctcccttgaacatatgtcaccagaccaagctgacaagctgccacaactacagggagaaatcgaacgtatggagaaacagattctgagtttgaaccagagaaaagaagacctgttggtggacttgaaggccaccgtactaaaccttcaccagcatttgaagcaagaacaagaaggagtagaaagagataggctgccagctgtaacatcagaggaaggtggagtggcagagagggatgcttctgagcggaagttgaacagaagaggctccatgtcttacctggcagcagtcgaggaagaggtggaagaaagttccgtgaagagcgataatggagatgagaaggcagagccatcgcctcagtcttggtcttcactttggaagcatgacaaggacatggaagaagacagagcttcctcatcctctggaacaattgttcaggaagcatatgggaaaataagcacctctgataattccatggcacaaatcctcacaccagactcactaaacactgagcaaggcccagaatgttccctaaggcccaaccaaacagaagagggcaccacacctcctattgaggctgacactctggactcttctgacgcgcaaggaggtttggagcccagggtggagaaaactaggccggagcccacagaagtcctgcatgcctgcaagacccaggtggccgagctggagctgtggctgcaacaagccaacgtggcagttgagccggaaacattaaacgcagacatgcagcaggtgctggaacagcagctggtagggtgccaggctatgctaacagagattgagcacaaggttgcctttctgttagagacttgcaaagatcagggcctgggagataatggagccactcaacatgaggctgaagcgctttccctgaaactgaaaacagtgaagtgcaatttagaaaaagtccagatgatgcttcaggagaagcacagtgaagatcagcatcctaccattctaaagaaatcctcagagccagagcatcaagaagctctccaaccagttaacctttctgaattggaatccattgtaactgaaaggccacaattcagcagacaaaaagatttccagcagcaacaggttctggagttaaaaccaatggaacagaaagatttcatcaaattcatagaatttaatgctaagaaaatgtggccccagtattgccaacatgataacgatacaactcaggaatcatctgcaagcaaccaggcatccagccctgaaaatgacgttccagactcgatcttgtcaccccagggccaaaatggagataagtggcaatatctgcatcatgaactctcatcaaaaataaagctcccactccctcagcttgtggagcctcaggtttccacaaatatgggtattctacccagcgtgactatgtataactttagatacccaacaactgaagaactgaaaacctataccacccaacttgaagacctgcgccaagaagcaagtaaccttcagacacaggaaaatatgacagaagaagcatatatcaatttggataaaaaattgtttgaactattcctgaccctcagtcagtgcctcagcagtgtggaggagatgctggagatgcccagactttacagggaggatggttctggccagcaggtgcactacgagacgctggctcttgagttgaagaaactttatttagcgctaagtgacaagaagggtgatcttttgaaagccatgacttggcctggcgagaacaccaacttgctccttgaatgttttgacaaccttcaagtctgcctggagcacactcaggctgcagctgtctgtagaagcaagtccctgaaagctggcctcgattacaaccgcagttaccagaatgaaataaagagattatatcatcagctcattaagagtaagacatctttacaacagtctttgaatgaaatcagtgggcagagtgttgctgaacagcttcagaaagcagatgcatatacagtggagctggagaacgccgagagccgagtggccaaactaagagatgaaggggagaggcttcatttaccttatgctttactccaggaggtttacaaattagaggatgtacttgacagtatgtggggaatgctaagagccaggtacacagaactcagcagccctttcgtcactgagagccagcaagatgctttgttgcaaggcatggtggaactggtgaagattgggaaggaaaagcttgctcatggccacttaaaacaaaccaaaagtaaagtggcgttacaggctcaaatagaaaatcacaaggtttttttccagaagcttgttgctgacatgttgttgatccaagcatactctgccaaaatacttccttctttattgcaaaacagagagacattttgggcagaacaagtaacagaagttaaaatactagaagaaaagtcacgccaatgtggtatgaagctgcagagtttgttgcagaaatgggaagaatttgatgaaaactatgcatctcttgaaaaggacctggaaattcttatatctacattgccctctgtgagtttggtggaagaaacagaggaaagattagtggaaaggatttcattttaccagcaaataaaaagaaacattggtggaaaacacgcccggctttaccaaactctgaacgaaggcaaacagttggtggcgtctgtgagctgtcctgaattagagggccagatcgcaaaactggaagagcagtggttgtccctgaacaagaaaattgaccatgagctccacaggctgcaagctcttctcaagcatctgctcagttataacagagattcggatcagttaaccaagtggttggaatcttcccagcatactctgaattactggaaagaacagtccctcaatgtgtctcaggacttggatacaatcagaagcaacatcaacaatttttttgagttttcaaaagaagttgatgaaaaatcctccttgaagactgccgttatcagtatcgggaaccagcttcttcacctgaaagaaactgatacagctacactgagagcttctttagcacagtttgaacaaaaatggacaatgctcataactcaacttccagatattcaagaaaaacttcaccagcttcaaatggagaaattgccgtctcgtaaagcaatcacagaaatgattagctggatgaacaatgtggagcatcaaacttcagatgaagactccgtgcattcaccaagttctgcatctcaagttaaacatcttcttcagaagcacaaggagtttagaatggaaatggactataaacagtggatagttgacttcgttaaccagtcattacttcagctaagcacctgtgatgtagaaagcaagcgctatgaaagaacggagtttgcagagcacctgggggagatgaaccgccagtggcaccgtgtacatggaatgctgaatagaaagatacaacatttagaacaacttctagaaagtatcactgagagtgaaaataaaatacagatcttgaacaactggctggaagcacaagaagagagactgaaaactttacaaaaacctgaaagtgtgatctcagtgcagaagctgctcctggactgtcaggatatagaaaatcaacttgcaattaaatccaaagcactagatgagttgaaacaaagttatctgactttggagagtggggcagtgccattgttagaagatacagcatcccgaattgatgagttatttcaaaagagaagcagtgttctcactcaggtcaatcagctcaaaacctccatgcagtcagttttacaggagtggaagatttatgatcaactctatgatgaagtgaatatgatgacaatccgattctggtactgcatggaacacagcaagcctgtggtgttatcattggagaccttgagatgccaggtggagaaccttcagtctctgcaagatgaagctgagagcagtgaagggagttgggagaaactccaggaggttatcggcaaactcaaaggtctctgcccctctgttgctgaaataatcgaagagaaatgccaaaatactcataaaaggtggactcaggtgaaccaagccattgcagaccagttgcagaaggcccagagtctgctccagctctggaaggcctatagcaatgctcatggtgaagctgccgcaaggctgaagcagcaggaagcaaagtttcaacagctcgcaaacatcagcatgtctggaaacaacctggcagagatcctgcccccagccctgcaggacataaaggagctgcagcatgatgtgcagaaaacaaaagaagcctttctccaaaattccagtgtcctggatcgactcccacaacccgcagagtccagcacccacatgctcctcccgggccccctgcactctctccagagggctgcttatttggaaaagatgctgcttgtgaaagcaaatgaatttgagtttgttctctcacagtttaaggattttggagtccggctggaatctttaaaaggtcttattatgcatgaagaagagaatttggatagacttcaccaacaggaaaaagaaaatcctgactcattcctgaatcatgtgctggcactgacagcccaatcacctgatattgaacatttgaatgaagtgagcctcaagctcccacttagtgacgtagctgtgaagacgttacaaaatatgaaccggcaatggattcgggccacggccacggcactggagcgctgcagtgagcttcagggaattggattgaatgaaaagtttctttattgctgtgaaaagtggatccaacttttggagaagatagaagaagcactcaaagtggatgtggctaacagccttcctgagctcctggagcagcagaaaacctataagatgttagaagctgaagtttctataaaccagacaattgctgattcctatgtcacccagtccttacaactcctggacacaacagaaatagagaacagaccagaatttattacagaattctcaaagctgacggatcggtggcagaatgctgtccagggtgttcggcagaggaagggtgacgttgatgggctggtgaggcagtggcaagatttcactacttctgtggagaacttgtttcgcttcctcactgacaccagccacctgctatctgcagtgaagggccaggagcgcttcagcctctaccaaaccagaagtctgatccatgagctgaagaataaagaaattcattttcaaaggaggcgaactacctgtgccctaaccttggaagctggagaaaagttactgctcacaactgacctgaaaactaaagagtctgtgggtaggagaatcagtcaacttcaggacagctggaaagacatggagccccagctggcagagatgattaagcagttccagagcactgtagagacctgggaccagtgtgaaaagaaaatcaaggagttgaaaagcaggctgcaagttttaaaggcacaaagtgaagatcctcttccagagcttcacgaggacctccataacgaaaaagagctgattaaggaactagaacagtctttggctagctggactcagaacttgaaagaacttcaaactatgaaggcggacttaacccggcacgttctcgtggaagatgtgatggttttgaaggagcaaatagagcatttgcacagacaatgggaggacctctgcttaagggtggccatacgtaaacaggagattgaagacagactcaatacatgggttgtattcaatgaaaaaaataaagagttgtgtgcctggctggtgcagatggaaaacaaagttctacagacagcggacattagtattgaagaaatgattgaaaagttacagaaggactgcatggaagaaataaacttgtttagtgaaaacaagttacagttaaagcagatgggtgaccagttgatcaaggccagcaacaaatcaagagcagctgagatcgatgacaagctcaacaaaattaacgatcgttggcaacatctttttgatgtcatcggatcaagggtgaagaagctgaaggagacctttgcttttattcagcagttggacaaaaacatgagcaaccttcgcacctggttggctcgaattgagtctgagctttccaagcctgttgtttatgatgtctgcgatgatcaagagatccagaagaggctcgctgagcagcaggatctacagcgagatattgaacaacacagcgcaggggtggagtccgtgtttaacatctgtgacgtcctactgcacgactccgatgcctgtgcaaatgagaccgagtgtgactcgatccagcagaccaccaggagcctggacagacgctggaggaacatttgtgccatgtccatggagcggcgcatgaaaatcgaggagacgtggcgcctgtggcagaagtttttagacgactattctcgctttgaggactggctcaagtcagctgagaggacggcagcctgcccaaattcctcagaggtgttgtacacgagtgccaaagaggaactgaagaggtttgaggcctttcagcggcagattcatgagcggctcactcagctggagctcatcaacaagcagtaccggcggctggcccgggagaaccgcacagacacggccagcaggctgaagcagatggtccacgagggcaaccagcgctgggacaaccttcagaggcgggtcacagccgtcctgcggagactcaggcatttcaccaaccagagggaagaatttgagggcaccagggagagcattctggtgtggctcacagagatggacctgcagctgaccaacgtggagcacttctcagagagtgacgccgatgacaagatgcgccaactgaatggcttccaacaggaaattacattaaataccaacaagattgatcagctcattgtgtttggggagcagctgattcagaagagcgagcccctggatgctgtgctgattgaggatgagctggaggaactccaccgctactgccaggaggtgtttggaagggtctcccggttccaccggcggctcacctcctgcactccgggcttggaagatgaaaaggaggcctctgagaatgaaacagacatggaagaccccagagaaatccagactgattcttggcgtaaacggggagagagcgaggaaccgtcatctcctcagtccctgtgtcatctagtggccccagggcacgagcggtctggctgcgagacccctgtcagcgtggactccatccccctggagtgggaccacacaggcgacgtggggggctcctcctctcacgaagaggacgaggagggcccatactacagcgcactgtcaggtaaatccatttcggatggccactcgtggcatgttcccgacagcccttcctgtcccgagcatcactacaagcaaatggaaggtgacaggaatgttccacctgttccccctgcgtccagcaccccttataaaccaccctatggaaagctactattacctccaggcacggatggtggcaaagaaggcccgcgagtcctgaatggcaacccacagcaggaagacgggggactggccggtatcacagagcagcagtcaggtgccttcgacagatgggagatgattcaagcacaggagcttcacaataagctcaaaataaaacaaaatttgcaacagctgaactctgatatcagcgccatcactacttggctgaaaaaaactgaagcagagctggaaatgttaaagatggcaaagcctccctctgatatccaggaaatagaactgagagtgaagagactgcaggagatactgaaagcctttgacacttacaaggcattagtggtctctgtcaacgtgagcagcaaggaatttctgcaaaccgagagccccgaatccacagagctccaaagtagactccgccagctgagcctgctctgggaagcagcacagggcgcagtggacagctggagagggggcttacgacagtcgctcatgcagtgccaggacttccaccagttgagtcaaaatctgctgctgtggttagcgagtgccaagaaccggaggcagaaggctcatgtcaccgatccaaaggcagacccccgggctctcctagagtgtcggagggaactaatgcaactggaaaaggagctggtagaacgtcaacctcaagtggacatgttacaggagatttcaaacagccttctcattaagggacatggagaagactgtattgaagctgaagaaaaggtgcatgttattgagaagaaactcaaacagttacgggagcaagtgtcccaagatttaatggccttgcagggaacccagaacccagcctcacccctgcccagcttcgacgaggtagactcgggggaccagcctcctgcaacatccgtgccagctccccgagcaaagttcagagcagtgagaactacagaaggcgaggaggagacagagagcagggtccccggcagcacacggccacagcgctccttcctctcaagggtggtccgggcagccctacccctgcagctgctcctcctgctgctgctgctcctggcctgcctgctgccctcctccgaagaagactacagctgcactcaggccaacaactttgcccggtccttttaccccatgctgaggtacaccaatgggccaccccccacatagagggcatagctggccacagtgctacaccacctgcctgattgccaagggtgcccagcacgtggccccagaccaatctgagtgacttagtgttggcaaggtcccgggacctgtgcagacttcttctgggcttacccagcacgggctccctggagcccagggcagctttcagattgtgttcctccccaggagcagggaacctgtgtggcaggtgccccgggtattttggcagaactagttgattagtttagggatctctggaaatgtcagtttcctgaagagccaagcactttgtgaattctggtttgtttgtaaaacagcattattataatgtaggtatggtcaatgagcagtggtgtccatcacatatattatagaagcaagcgaggacattccaccctagaaatggttcagaaactcataggcacccttagctgatggaaacaatcaatcatatttaatacgcttagaatcagttttactccaatcagctggcaattttgagctgccggttatacaccaaaatgttctgttcagtacctagctctgctcttttatattgctttaaatttttaaagaaattgtattgcatggatgtggttatttgtgcatattttttaacaatgcccaatctgtatgaataatgtaaacttcgatttttttttaaaaaaattagattttagctggagcttttgactaatgtaaagtaaatgccaaactaccgacttgatagggatgtttttgtaagttaattttctaagactttttcacatccaaagtgatgctttgctttgggttttaactgtttggccacggcgggggtgggggcggggggttggtacagaaacttgaagctgtttgtgatatgtacaactcagatgtttctcattaaaaaacaaaattagccagaaaaaaaaaaaaaaaaaaaaaaaaaaaaaaaaaaaaaaaaaaa

SEQ ID NO: 12283 - DNA, 1534 bp, Homo sapiens
tcagtgggcgtcgcgcgaaggctaagggagtgtggcgggcggctccgggagccaacatgcctcggtatgcgcagctggtcatgggccccgcgggcagcgggaagagcacctactgtgccaccatggtccagcactgtgaagccctcaaccggtctgtccaagttgtaaacctggatccagcagcagaacacttcaactactccgtgatggctgacatccgggaactgatcgaggtggatgatgtaatggaggatgattctctgcgattcggtcccaacggaggattggtattttgcatggagtactttgccaataattttgactggctggagaactgtcttggccatgtagaggacgactatatcctttttgattgtccaggtcagattgagttgtacactcacctgcctgtgatgaaacagctggtccagcagctcgagcagtgggagttccgagtctgtggagtttttcttgttgattctcagttcatggtggagtcattcaagtttatttctggcatcttggcagccctgagtgccatgatctctctagaaattccgcaagtcaacatcatgacaaaaatggatctgctgagtaaaaaagcaaaaaaggaaattgagaaatttttagatccagacatgtattctttattagaagattctacaagtgacttaagaagcaaaaaattcaagaaactgactaaagctatatgtggactgattgatgactacagcatggttcgatttttaccttacgatcagtcagatgaagaaagcatgaacattgcattgcagcatattgattttgccattcaatatggagaagacctagaatttaaagaaccaaaggaacgtgaagatgagtcttcctctatgtttgacgaatattttcaagaatgccaggatgaatgaagagtttactaaaagtaaccatctaaagagcttgtggccaaaccagcagaacattcttctcttcaaaggatgcaatagtagaaagctacttattttaatgaaaaaaagtaaaacttcgttctttatcagcctcatgcctgaatcaaatttttaattattctgaaactgctgctgtttaaagtggaatcttttagtattataacagcatcactttagattttgtaagtcaaaattgaaatgaatgcacatagatttatatataaattagcacctgagctaaggttaaggctggtctaaacttattttcactttttgtattatttttgagatgcaggaattactgtaacaaaatatgtatgtccgaagggaaaaagctgcaaggatatatataagaccactgcttatctgtatcttcccattttcctatattgaaaatgtatattatttatataacttaaaaagtaaaaataactatgttttgagatatgtatgtgtatatataaaagaaacaaaggtttttaatgattcttggacctagataacaagtaaaaaaaaaaaaaaaaaaaaaaaaaaaaaaaaaaaaaaaaaaaaaaaaaaaaaaaaaaaaaaaaaaaaaaaaaaaa

SEQ ID NO: 12284 - DNA, 1775 bp, Homo sapiens
gcaggtttagcgccactctgctggctgaggctgcggagagtgtgcggctccaggtgggctcacgcggtcgtgatgtctcgggagtcggatgttgaggctcagcagtctcatggcagcagtgcctgttcacagccccatggcagcgttacccagtcccaaggctcctcctcacagtcccagggcatatccagctcctctaccagcacgatgccaaactccagccagtcctctcactccagctctgggacactgagctccttagagacagtgtccactcaggaactctattctattcctgaggaccaagaacctgaggaccaagaacctgaggagcctacccctgccccctgggctcgattatgggcccttcaggatggatttgccaatcttgaatgtgtgaatgacaactactggtttgggagggacaaaagctgtgaatattgctttgatgaaccactgctgaaaagaacagataaataccgaacatacagcaagaaacactttcggattttcagggaagtgggtcctaaaaactcttacattgcatacatagaagatcacagtggcaatggaacctttgtaaatacagagcttgtagggaaaggaaaacgccgtcctttgaataacaattctgaaattgcactgtcactaagcagaaataaagtttttgtcttttttgatctgactgtagatgatcagtcagtttatcctaaggcattaagagatgaatacatcatgtcaaaaactcttggaagtggtgcctgtggagaggtaaagctggctttcgagaggaaaacatgtaagaaagtagccataaagatcatcagcaaaaggaagtttgctattggttcagcaagagaggcagacccagctctcaatgttgaaacagaaatagaaattttgaaaaagctaaatcatccttgcatcatcaagattaaaaacttttttgatgcagaagattattatattgttttggaattgatggaagggggagagctgtttgacaaagtggtggggaataaacgcctgaaagaagctacctgcaagctctatttttaccagatgctcttggctgtgcagattactgattttgggcactccaagattttgggagagacctctctcatgagaaccttatgtggaacccccacctacttggcgcctgaagttcttgtttctgttgggactgctgggtataaccgtgctgtggactgctggagtttaggagttattctttttatctgccttagtgggtatccacctttctctgagcataggactcaagtgtcactgaaggatcagatcaccagtggaaaatacaacttcattcctgaagtctgggcagaagtctcagagaaagctctggaccttgtcaagaagttgttggtagtggatccaaaggcacgttttacgacagaagaagccttaagacacccgtggcttcaggatgaagacatgaagagaaagtttcaagatcttctgtctgaggaaaatgaatccacagctctaccccaggttctagcccagccttctactagtcgaaagcggccccgtgaaggggaagccgagggtgccgagaccacaaagcgcccagctgtgtgtgctgctgtgttgtgaactccgtggtttgaacacgaaagaaatgtaccttctttcactctgtcatctttcttttctttgagtctgtttttttatagtttgtattttaattatgggaataattgctttttcacagtcactgatgtacaattaaaaacctgatggaacctggaaaa

SEQ ID NO: 12285 - DNA, 1862 bp, Homo sapiens
gcaggtttagcgccactctgctggctgaggctgcggagagtgtgcggctccaggtgggctcacgcggtcgtgatgtctcgggagtcggatgttgaggctcagcagtctcatggcagcagtgcctgttcacagccccatggcagcgttacccagtcccaaggctcctcctcacagtcccagggcatatccagctcctctaccagcacgatgccaaactccagccagtcctctcactccagctctgggacactgagctccttagagacagtgtccactcaggaactctattctattcctgaggaccaagaacctgaggaccaagaacctgaggagcctacccctgccccctgggctcgattatgggcccttcaggatggatttgccaatcttgaatgtgtgaatgacaactactggtttgggagggacaaaagctgtgaatattgctttgatgaaccactgctgaaaagaacagataaataccgaacatacagcaagaaacactttcggattttcagggaagtgggtcctaaaaactcttacattgcatacatagaagatcacagtggcaatggaacctttgtaaatacagagcttgtagggaaaggaaaacgccgtcctttgaataacaattctgaaattgcactgtcactaagcagaaataaagtttttgtcttttttgatctgactgtagatgatcagtcagtttatcctaaggcattaagagatgaatacatcatgtcaaaaactcttggaagtggtgcctgtggagaggtaaagctggctttcgagaggaaaacatgtaagaaagtagccataaagatcatcagcaaaaggaagtttgctattggttcagcaagagaggcagacccagctctcaatgttgaaacagaaatagaaattttgaaaaagctaaatcatccttgcatcatcaagattaaaaacttttttgatgcagaagattattatattgttttggaattgatggaagggggagagctgtttgacaaagtggtggggaataaacgcctgaaagaagctacctgcaagctctatttttaccagatgctcttggctgtgcagtaccttcatgaaaacggtattatacaccgtgacttaaagccagagaatgttttactgtcatctcaagaagaggactgtcttataaagattactgattttgggcactccaagattttgggagagacctctctcatgagaaccttatgtggaacccccacctacttggcgcctgaagttcttgtttctgttgggactgctgggtataaccgtgctgtggactgctggagtttaggagttattctttttatctgccttagtgggtatccacctttctctgagcataggactcaagtgtcactgaaggatcagatcaccagtggaaaatacaacttcattcctgaagtctgggcagaagtctcagagaaagctctggaccttgtcaagaagttgttggtagtggatccaaaggcacgttttacgacagaagaagccttaagacacccgtggcttcaggatgaagacatgaagagaaagtttcaagatcttctgtctgaggaaaatgaatccacagctctaccccaggttctagcccagccttctactagtcgaaagcggccccgtgaaggggaagccgagggtgccgagaccacaaagcgcccagctgtgtgtgctgctgtgttgtgaactccgtggtttgaacacgaaagaaatgtaccttctttcactctgtcatctttcttttctttgagtctgtttttttatagtttgtattttaattatgggaataattgctttttcacagtcactgatgtacaattaaaaacctgatggaacctggaaaa

SEQ ID NO: 12286 - DNA, 4937 bp, Homo sapiens
acaggtcagagttgactccctgaaaagtgcagccggtttgaaatgcaagatggcggcggcgtggcgctgagaggcgcggcggcccctgcaggagaagacagactgctgctttggacctgttggtaatgatggcctgagctaaacatctaactagaagggatacccttccatttcaaagaacagaatgctaaggaagctgtggcaagtgattggagttgtgcttcaaaaatttcagaaattcagcagtattttatctgccaacaataagctctttacttgattgcaccatgagaaagctgctaatgagacttgttgagcacaaaaatggacttgaagaaccaaaagccattgttttcaaatgaagaacactgaacagttttaagcctcgatgctttttaatcaccactgagcttttcctcataacatcagaatggcaagcaggcgaaaatcaacaacaccttgcatggtccttgccagtgaacaagatccagaccttgagttgatatcagatttggatgaaggtcctcctgtgcttacacctgtagaaaacaccagagcagagagtatctcaagtgatgaagaggttcatgaatctgtggattcagacaatcagcaaaataaaaaagttgaaggtggatatgaatgtaaatattgtacttttcaaactccagatctaaatatgtttacttttcatgtggattcggaacatcccaatgtagtgctaaattcatcctatgtttgtgtcgaatgcaattttcttaccaaaaggtatgatgcactttctgagcataatctgaaatatcacccaggagaagagaattttaagttgactatggtgaaacgtaataaccagacaatctttgaacaaacaataaatgatctgacttttgatggtagttttgttaaagaggagaatgcagagcaagcagaatctacagaagtttcttcttcgggaatatctatcagtaaaactcctatcatgaaaatgatgaaaaataaagtggaaaataaacggattgcagttcatcataactcagttgaggacgttcctgaagagaaagagaatgaaatcaaaccagaccgtgaagaaattgtagaaaatccaagttcttcagcttctgaatctaatacaagtacttccattgtaaacagaatacatccaagtactgccagcacggtagtgacaccagcagcagttcttcctggattggcacaggtgataactgctgtatctgctcagcagaattctaatttgattcccaaagtcttaatccctgttaatagcattcccacctacaatgctgcattggataacaatccccttttacttaacacctacaacaagttcccttacccaacaatgtcagaaattacagttctttctgctcaagcaaaatatacagaggaacagatcaagatatggttttcagcccaacgtttaaaacatggtgttagttggactcccgaggaagtagaggaggcaagaaggaaacaattcaatggaacagtgcatactgtacctcagaccataactgttattcctacacacatttccacagggagtaatggtttaccatctattttacagacatgccaaatagttggtcagcctggtctggtccttactcaagtggctggaacaaacaccttgccagttacagcacctatagccttgacagtggcaggcgttccaagtcaaaataatatacagaaaagtcaggtacctgctgctcagcctactgcagaaacaaagccagcaacagcagcagttccaacttctcaaagtgtcaaacatgaaactgcattggtaaaccctgattcatttggcattcgggcaaaaaagacaaaagagcaactggcagaattaaaagttagctaccttaaaaatcagtttccccatgattcagaaattatcagacttatgaaaataacaggcctgacgaaaggagagattaaaaaatggtttagtgacacaaggtacaaccagagaaattcaaagagtaatcagtgcttacatctcaacaatgattcctctaccaccattattatagactccagtgatgaaaccacggaatccccaactgttggtactgcacagcctaagcaatcctggaatccttttcctgactttactccccaaaagtttaaagagaaaactgcagagcagcttcgtgtccttcaggcaagttttctcaacagctctgtacttacagatgaagaattaaataggttaagggcacaaaccaaacttaccagaagagaaatcgatgcttggtttacagagaagaagaaatcaaaagctttaaaggaagagaaaatggaaatagatgaaagtaatgcaggtagttccaaagaagaagctggagaaacttctcctgcagatgaatctggtgcacctaagtcagggagtacaggcaagatatgtaaaaaaacacctgagcagctgcacatgcttaagagtgcatttgtccggacacagtggccatcaccagaagagtatgacaagttggccaaagaaagcgggcttgctagaacagacatagttagttggtttggggacacccgttatgcttggaagaatggaaacttgaaatggtactactactatcagagcgccaattcaagtagtatgaatggtctgtcttcccttaggaaaagagggagagggagacccaaaggacggggaagaggaagaccgcgtgggcggcctagaggaagcaaaagaattaacaactgggacaggggaccatcactcataaaatttaaaactggaactgcaatacttaaggattattacctgaagcacaagtttcttaatgagcaagaccttgatgaacttgttaacaaatcacatatgggctatgagcaggtcagagagtggtttgcagaaagacagagaagatcagaattaggtatagaattatttgaggaaaatgaggaggaagatgaagttattgatgaccaggaagaggatgaagaagaaacagatgatagtgacacttgggaacctccacgacatgtgaaacggaagctgtctaaatcagatgactgaaatctgcctaaaacgttgaaggagaatcaattcttcaactcaagatgtctgatttactgtgaatttgcccaatctttgatgacattgaaaacgttttggggcatacacactcaaaaagcaggatccaatacccaaaagaaatggaacttaatgttgtgccaaagttaaactactgcagttggtggaagttctgcaatgtaaatagaacactaattaaaaaacaacttgtaaaaatgcaatttaaattttaatacagtacatttttcttctaatatgatggagacattctgaatcttagactttctgagggggtttaatgaccactagagcttgtcctcatattcagtccagtttaatactgtatgtctagtaagatgggctatatattgcctctattctttgagatgtgattaagcttagaactttgaccaaaaattttacagtaaaaattgttagaaatgggtaaaaaaaaaaaaaaaaaaaaaaccctgatttattactatgtcttatttatcagaccctgcactaagattaaaagttgtgcatgggcttatacaatttcaaatgtaaaaacagcctatttatatatgttgaaacaataagattttatggtttcactggcccttaataattggatccttcattaaacacatccatgaataccactgtttctactgttacttgttccattagaagctgatttgctttttattaaactgcaggaaattaattctgaagaaggaaaagaaactgacatggtaatttggatagggtgaagctttgaaataaatactgcaccaaaaatgtgaaaaagaatcacgtagtaaatgtatacttagtgttttcttacaatcgtggaaatcagaaatgtttatacaggtgtcagatcagaatttttaagagttatctttcagtgaaattttataacagtttcagtgaatagagaaaaaattctgaactgatcataatgagttaaaagttagcttttcacttatgaatcatgggagtgttaactgttaactcttgccgtatcaggagactgaaagttcatactaatttacaaactttgtaaagactggtgctgttcattcatattgggaagaaccctttcttttgtgaccataggaccatttttcaaaatgcgctttcttcgtagaagaaatgttcagtttaattagctttggattttaacatgtttttctgaatgaccagatgtaggcttagccagtttattttctctaatttaatggataataaatattaagctcttggttaaatgtttttcagccattgaaaatgttatgaaaaagccttgaatatgcatgctgctttcatttttataaactttttattttttaactatagctttattagtaattccaaaatgctgcaatgtagctgatttcctcactcagacagctggctttgtgggtggcttttttcatactactgttaacttttttaaaaaagaagcaatgtaaagaccgtaatgcactaagctttttttttttcttttacacgtttaaaaacttcttaaagcactctgtaatataatgattaaattgctcccttttataaacattgctaatgtggtctgagttttgtttgacaataattttaatgttctcaaaatttgaaatgtcaagtattagaaatgaagcctttgaatatagttgtttcccttgcaatatgttaactctgtgtagctgtatataactattaatttccctcatctcttttataggcctgataaaactcttctctgacgtttgctagcttttaaatatatttatttgacagagcaaaagaaccctcttctggttgattgtgaccttgaatacaaaataaaagtagtgattagtagtttaaaaaaaaaaaaaaaaaa

SEQ ID NO: 12287 - DNA, 660 bp, Homo sapiens
actataaagacagtaaaaagatcagtggttatctttgcagatgccaccatcactgtgagccctgtactatcagccatggtcaactccgtcgtcttttttgacatcaccgtcgacggcaagcccttgggccgcatctccatcaaactgtttgcagacaagattctaaagacagcggaaaactttcgtgctctgagcactggagagaaaggatttcgttataagggttcctgctttcacagaattattccagggtttatgtgtcagggtggtgacttcacacgccataatggcactggtgacaagtccatctatggggagaaatttgatgatgagaacctcatccgaaagcatacaggttctggcatcttgtccatggcaaatgctggacccaacacaaatggttcccagtttttcatctgtgctgccaagactgagtggttggatggcaagcatgtggcctttggcaaggtgaaagaacgtgtgaatattgtggaagccatggagcactttgggtacaggaatagcaagaccagcaagaagatcaccattgctgactgtggacaattctaatgagtttgacttgtgttttattttcaccaccagacccattccttctgtagctcaggagagcacccctccaccacatttgcttgcaatatc

SEQ ID NO: 12288 - DNA, 5377 bp, Homo sapiens
gggataatgctcccggagaaggattctgcagcagttctcaaaggctagacttgagtggtattgctgcatatgcgctgattcttcagcttgtctctaaccgaggaagcattgattgggagctactcattcagaaaattaaaagaaagaagccagaaaatattatcaaccctttgagaacacgacacaacgaactttatattttaccacttccttgaatagttgcaggagaaataacaaggcattgaagaatggcagatgaacggaaagatgaagcaaaggcacctcactggacctcagcaccgctaacagaggcatctgcacactcacatccacctgagattaaggatcaaggcggagcaggggaaggacttgtccgaagcgccaatggattcccatacagggaggatgaagagggtgcctttggagagcatgggtcacagggcacctattcaaataccaaagagaatgggatcaacggagagctgacctcagctgacagagaaacagcagaggaggtgtctgcaaggatagttcaagtagtcactgctgaggctgtagcagtcctgaaaggtgaacaagagaaagaagctcaacataaagaccagactgcagctctgcctttagcagctgaagaaacagctaatctgcctccttctccacccccatcacctgcctcagaacagactgtcacagtggaggaagcagcaggtggggaatcagctctggctcccagtgtatttaaacaggcaaaggacaaagtctctgacggagtaaccaagagcccagaaaagcgctcttctctcccaagaccttcctccattctccctcctcggcgaggtgtgtcaggagacagagatgagaattccttctctctcaacagttctatctcttcttcagcacggcggaccaccaggtcagagccaattcgcagagcagggaagagtggtacctcaacacccactacccctgggtctactgccatcactcctggcaccccaccaagttattcttcacgcacaccaggcactcctggaacccctagctatcccaggacccctcacacaccaggaacccccaagtctgccatcttggtgccgagtgagaagaaggtcgccatcatacgtactcctccaaaatctcctgcgactcccaagcagcttcggcttattaaccaaccactgccagacctgaagaatgtcaaatccaaaatcggatcaacagacaacatcaaataccagcctaaaggggggcaggtacaaattgttaccaagaaaatagacctaagccatgtgacatccaaatgtggctctctgaagaacatccgccacaggccaggtggcggacgtgtgaaaattgagagtgtaaaactagatttcaaagaaaaggcccaagctaaagttggttctcttgataatgctcatcatgtacctggaggtggtaatgtcaagattgacagccaaaagttgaacttcagagagcatgctaaagcccgtgtggaccatggggctgagatcattacacagtccccaggcagatccagcgtggcatcaccccgacgactcagcaatgtctcctcgtctggaagcatcaacctgctcgaatctcctcagcttgccactttggctgaggatgtcactgctgcactcgctaagcagggcttgtgaatatttctcatttagcattgaaataataatatttaggcatgagctcttggcaggagtgggctctgagcagttgttatattcattctttataaaccataaaataaataatctcatccccaaactgtagtaattgttacaattttctatttaaaaaatgaatagtacatgcagaaattgacctgatttccatttgcaacaggaagacactggctttacatgggttcaattggacaattatttttgctctgctctgttttgcatggagtattattattttaaaaattgcatttttacctttcatgtgcctgaaggctatccactacattctgaaggccttgttaaaatccaagctgctcatttcactattctgtttctgagtgagaagataaaaactgcccattgtaacttatttcaggttaaattaaaccaaggagtctgattgcaggaagggaagagcatgtaagaaataagtttttttaaagtgttattttgtataaatgggaagaaagattcaattaagttattaacatttgggacctggataattatatcagagtatgtcagtccaataaattatttaactaattaaaaaatagttgcaaagcatttgagctgtggttgaggaagtggtgtaaaagtgcatccattaggaatgatgcactttcattaggatggactcgtgtctgattagaatgtcagttgatcagctagatttgtgtccacactaccagtttcacaccccctttccatctgtttgatacagtattatagatataaatatatatatatttctctgtggccatttgtgatacttcctcatatacttgaatattatacttctttattcacagtatctgtgtctcctgcaccctttggtgttgcaattttagatatgtgaaagtagatgttagcagggttctctccctatttaaaaaaaatacattaaaaaagacaaaaaattttagcatgaagttgctttctgtaacaactcaaagccgtaaccctgttttagtgccagatacaagtctctcccgtgatgctagacaaaaaattatttttctttgctttcaccaacatggagtttgtgggggtgggtccagttatacatgaaagggtttacagattgttggtttaagattatggatttatctcatttttaatcacaggatagtttggggtttattcctattattattcatgaaaccgacttaagattttttctttatttttctttttttttccatttgctaaagttgaaagttgaaactaactataatagtttgaaacatgttttctcatttttccaaatagtatctgtttattaaattctctaatagaagatgtttgtctttcttacccaaagtaaagatcccctgatcagaaagaaaaaatacaatactttgggaagctatagctataaaacacttgagacacagatatctaaatcagtttttttccaagactccaacattgcactctgtaaagtaacacactgtgatctagtattatttatcagtagataatactgttctgactgtatatacagtctagaactcacaaatcaattagttcctctcacaaatcattcatcttagacttacaaataaggaatgaaatagtcaatggcctgattaaggcaaagagctaccaggctagatggacactttttaaaaattttatctgttctttttcttgctcagggctggtaggttggatctgaaccattaaaatcaaatggtccactaggcgtatgatctctttgagccaaatcagttcctgaatataaaggaggaaatgatgaggatgtactgaggcaacggggaagtatagaaacatccaagacaaaagccaagggatgcaaaggcagagacacaggtgctttttggtgacccagtggatatggcaaccagtgtaactgccatacaagaaaccctaggagcaaacccacaccactcattctcagctaagagattttacacaggcaaacgtgtcttaaaccatctataaatcagttattttatatgacagtcaaaaccttagaaaccttaggatcattatatctattttctgcctattaattgctgtgaggtttgatttgaccaatctgggcaatttattcatcagcttcccttgaagtgcaccagaaaatagaagaaaggtgtgtggagacttagggtattttattacatgttttcatagtcttaaatagtgattaaatttctctagaaagaagttaacagctcattagaaaagttttaacctgtgaaataagtatttttctcaacattctttaaagtttttatataagttaacactaggtaaacattctgcatactagaagtcagtttattacaaatacatgtcaaaaataaagattatacaaggcaccaaactactagatttggcattaaaacaaatgtttatttctaatcacaacaaaattataatgaataaatgttcttgctttgtatggaaatacaattctttattaaagttaacagaaaggaactgatcgtttgtaccagtaaaagagagaaacacacaggttaaatatcttcttgtggggttaaggggtagaacctatcttgccttcactctcaagataacgactcaaattaagctttttgagcaccactcttgtggggacacacatacgctgatctaggaatgaaatcttcgtggtctcaattctagatctactatgccagtttctctctggctttagcctttgagaacctgtataagaatacgtaagtaatccagagctgtgaagagtttaaaggccaacttctccagtgaactcaacctctgggtcacttgcaaccagaaattggatacctcataatgatgcaggaaagacccgagttcatgatgagtttcaaaggccacgttcatttaggaaccaactctctctggatttacctgctgagttccagcagcgtgatgggctgacatcccacctacaagtatgacacctgtgtaacaccagctaggtacggctggagaaggctgaagagagaatgccattaaatggaagaatgtactgattgtagtgaccttctccacacacacacacacacacacacacacacacacctacagtaatacagcaagcgtggaataatcagccaatatataacattccatcagtattttattaaggaaataacctgaatgtggttgattttgacatagctgcaattacagttttcttctatttttcaagccacaataaggaaaataaactactcatggtctaaatactagagataaagtagattcatggcttggtaaggaaattttaagcattccttcaaagattgacgtgctaaaataagcattgatgttttgagtttttttacacctaggatttttagcttgggtgtgtaggtgaaggccaagactctctgcaggaaaaagcttattttcaaactcagaaaataaaatgtcaatcataaaaatctacttcaactttagcaaaaagaaaaaaaaatcaacaaaaagtatactctgtatgctgggattccgaggttccaacacactgttacaaatctgtggggggtttctttcttctgataattctagagcctgttaccatagaaaggcatttcttcaatggctggttgtagttagttcatgtttttcaatcaaatttgcaaatgtatttgttgctgtatagtgattgttttgcaaaataaaattgcttgtcacct

SEQ ID NO: 12289 - DNA, 9445 bp, Homo sapiens
gggataatgctcccggagaaggattctgcagcagttctcaaaggctagacttgagtggtattgctgcatatgcgctgattcttcagcttgtctctaaccgaggaagcattgattgggagctactcattcagaaaattaaaagaaagaagccagaaaatattatcaaccctttgagaacacgacacaacgaactttatattttaccacttccttgaatagttgcaggagaaataacaaggcattgaagaatggcagatgaacggaaagatgaagcaaaggcacctcactggacctcagcaccgctaacagaggcatctgcacactcacatccacctgagattaaggatcaaggcggagcaggggaaggacttgtccgaagcgccaatggattcccatacagggaggatgaagagggtgcctttggagagcatgggtcacagggcacctattcaaataccaaagagaatgggatcaacggagagctgacctcagctgacagagaaacagcagaggaggtgtctgcaaggatagttcaagtagtcactgctgaggctgtagcagtcctgaaaggtgaacaagagaaagaagctcaacataaagaccagactgcagctctgcctttagcagctgaagaaacagctaatctgcctccttctccacccccatcacctgcctcagaacagactgtcacagtggaggaagatttacttacagcctcgaagatggagttccacgatcaacaggaattgactccctctacagctgagccttcagaccagaaggaaaaggagtcagagaagcaaagtaagcctggtgaagaccttaaacatgctgccttagtttctcagccagagacaactaaaacttaccctgataaaaaggacatgcaaggcacggaagaagaaaaagcacccctagctttgtttgggcacactcttgttgccagcctggaagacatgaaacagaagacagaaccaagccttgtagtacctggcattgacctccctaaagagcctccaactccaaaagaacaaaaggactggttcatcgaaatgccaacggaagcaaaaaaggatgagtggggtttagttgcccccatatctcctggccctctgactcccatgagggaaaaagatgtatttgatgatatcccaaaatgggaagggaaacagtttgattctcccatgccaagtccctttcaagggggaagcttcactcttcctttagatgtcatgaagaatgaaatagttacagaaacatcgccctttgcccctgcctttttacagccagatgacaaaaaatctctgcaacaaaccagtggcccagctactgccaaagatagttttaaaattgaagagccccatgaggctaaacctgacaaaatggcagaagcaccaccctcagaggcaatgaccttacccaaagatgctcacattccagttgtagaagaacatgttatggggaaagttttagaggaagaaaaggaggccataaatcaagagactgtgcagcaaagggatactttcacccccagtggacaggaacctatacttactgaaaaggaaactgagctgaagcttgaagaaaaaaccaccatttctgacaaagaagctgtgccaaaagagagtaaacccccaaaacctgcagatgaagaaataggcataattcagacctccacagagcacactttctcagaacagaaagaccaagagcctaccacagatatgttgaaacaggactcgttccctgtaagtttggagcaagcagttacagattcagccatgacctctaaaacactggagaaagccatgaccgaaccatctgcattaattgaaaagagctcaattcaggaactttttgaaatgagagttgatgacaaagataagattgaaggagttggagctgcaacatcagctgagcttgatatgccattttatgaagataaatcaggaatgtccaagtactttgaaacatctgccttgaaagaagaagcaacaaaaagcattgagccaggcagtgattactatgaactgagtgacactagagaaagtgtccatgagtctattgataccatgtctcccatgcataaaaatggtgacaaggagtttcaaacaggaaaagaatcccagcccagtcctccagcacaagaagcagggtacagcactctcgcacagagttatccatcagatttacctgaagaacccagttctcctcaagaaagaatgttcactattgatccaaaagtgtatggagagaaaagggacctccacagtaagaataaggatgatttgacccttagcaggagtttaggacttggtggtaggtctgcaatagaacaaagaagcatgtcaatcaatttgccgatgtcttgcctagattccatagcccttggatttaactttggtcggggacatgatctttctcctctggcttccgatattctaaccaacactagtggaagtatggatgaaggggatgattaccttccagccaccacacctgcactggagaaagccccttgcttccctgtagaaagcaaagaggaagaacagatagagaaagtaaaagctactggagaagaaagtactcaagcggagatatcatgtgagtctcctttcctagccaaagatttttacaaaaatggtactgtcatggcacctgaccttcctgaaatgctagatctggcaggcacaaggtcaagattggcttctgtgagtgcagatgctgaggttgccaggaggaaatcagtcccatcagagactgtggttgaggatagtcgtactggcttgcccccggtaactgatgaaaaccatgtcattgtaaaaacggacagtcagctcgaagacctgggctactgtgtgttcaataagtacacagtcccattgccatcacctgttcaagacagtgagaatttatcaggggagagtggtaccttttacgaaggcactgatgataaagttcgaagagatttggccacagacctttcactgattgaagtgaaactggcagcagccggaagagtcaaagatgagttcagtgttgacaaagaagcatccgcgcatatctctggtgacaaatcaggactgagtaaggagtttgaccaagagaagaaagctaatgataggttggatactgtactagaaaagagtgaagaacatgctgattcaaaagaacatgccaagaaaactgaagaggctggtgatgaaatagaaacattcggattaggagtaacctatgagcaagctttggccaaagatttgtcaataccaacagatgcatcctctgagaaagcagagaagggtcttagttcagtgccagagatagctgaggtagaaccatccaaaaaggtggaacaaggtctggattttgctgtccagggtcaactagatgttaaaattagtgactttggacagatggcttcagggctaaacatagatgatagaagggcaacagagctaaaacttgaggctacacaggacatgaccccctcatccaaagcaccgcaggaggcagatgcatttatgggtgttgagtctggccacatgaaagaaggcactaaagttagtgagacagaagtcaaagagaaggtggccaagcctgacttggtgcaccaggaggctgtagacaaggaggagtcctatgaatctagtggtgagcatgaaagtctcaccatggagtccttgaaagctgatgagggcaagaaggaaacatctccagaatcatctctaattcaagatgagattgccgtcaaattgtcagtggaaataccttgcccacctgctgtttcagaggctgatttagccacagatgagagagctgatgtccagatggaatttattcaggggccaaaagaagaaagcaaagagaccccagatatatccatcacgccttctgatgttgcagagccattgcatgaaacgatcgtatctgaaccagcagagattcagagtgaggaagaagagatagaagcccagggagaatatgataaactgctcttccgctcagacacccttcagataactgacctgggtgtctcaggtgccagggaggaatttgtggagacctgcccaagtgaacacaaaggagtgattgagtctgttgtgaccatcgaggatgatttcatcactgtagtgcaaaccacaactgatgaaggggagtcagggtcccacagcgtgcgttttgcagccctagagcagcctgaggtggaaaggagaccatctcctcatgatgaagaagagtttgaagtagaagaggcagctgaagcccaggcagaacccaaagatggttccccagaggctccagcttcccctgagagagaagaggttgcactttctgaatataagacagaaacctatgacgattacaaagatgagaccaccattgacgactccatcatggacgctgacagcctctgggtggacactcaagatgatgataggagcatcatgacagaacagttagaaactattcctaaagaggagaaagctgaaaaggaagctcggagatcatctcttgagaaacatagaaaagaaaagccttttaaaaccgggagaggcagaatttccactcctgaaagaaaagtagctaaaaaggaacctagcacagtctccagagatgaagtgagaaggaaaaaagcagtttataagaaggctgaacttgctaaaaaaacagaagttcaggcccactctccctccaggaaattcattttaaaacctgctatcaaatatactagaccaactcatctctcctgtgttaagcggaaaaccacagcagcaggtggggaatcagctctggctcccagtgtatttaaacaggcaaaggacaaagtctctgacggagtaaccaagagcccagaaaagcgctcttctctcccaagaccttcctccattctccctcctcggcgaggtgtgtcaggagacagagatgagaattccttctctctcaacagttctatctcttcttcagcacggcggaccaccaggtcagagccaattcgcagagcagggaagagtggtacctcaacacccactacccctgggtctactgccatcactcctggcaccccaccaagttattcttcacgcacaccaggcactcctggaacccctagctatcccaggacccctcacacaccaggaacccccaagtctgccatcttggtgccgagtgagaagaaggtcgccatcatacgtactcctccaaaatctcctgcgactcccaagcagcttcggcttattaaccaaccactgccagacctgaagaatgtcaaatccaaaatcggatcaacagacaacatcaaataccagcctaaaggggggcaggtacaaattgttaccaagaaaatagacctaagccatgtgacatccaaatgtggctctctgaagaacatccgccacaggccaggtggcggacgtgtgaaaattgagagtgtaaaactagatttcaaagaaaaggcccaagctaaagttggttctcttgataatgctcatcatgtacctggaggtggtaatgtcaagattgacagccaaaagttgaacttcagagagcatgctaaagcccgtgtggaccatggggctgagatcattacacagtccccaggcagatccagcgtggcatcaccccgacgactcagcaatgtctcctcgtctggaagcatcaacctgctcgaatctcctcagcttgccactttggctgaggatgtcactgctgcactcgctaagcagggcttgtgaatatttctcatttagcattgaaataataatatttaggcatgagctcttggcaggagtgggctctgagcagttgttatattcattctttataaaccataaaataaataatctcatccccaaactgtagtaattgttacaattttctatttaaaaaatgaatagtacatgcagaaattgacctgatttccatttgcaacaggaagacactggctttacatgggttcaattggacaattatttttgctctgctctgttttgcatggagtattattattttaaaaattgcatttttacctttcatgtgcctgaaggctatccactacattctgaaggccttgttaaaatccaagctgctcatttcactattctgtttctgagtgagaagataaaaactgcccattgtaacttatttcaggttaaattaaaccaaggagtctgattgcaggaagggaagagcatgtaagaaataagtttttttaaagtgttattttgtataaatgggaagaaagattcaattaagttattaacatttgggacctggataattatatcagagtatgtcagtccaataaattatttaactaattaaaaaatagttgcaaagcatttgagctgtggttgaggaagtggtgtaaaagtgcatccattaggaatgatgcactttcattaggatggactcgtgtctgattagaatgtcagttgatcagctagatttgtgtccacactaccagtttcacaccccctttccatctgtttgatacagtattatagatataaatatatatatatttctctgtggccatttgtgatacttcctcatatacttgaatattatacttctttattcacagtatctgtgtctcctgcaccctttggtgttgcaattttagatatgtgaaagtagatgttagcagggttctctccctatttaaaaaaaatacattaaaaaagacaaaaaattttagcatgaagttgctttctgtaacaactcaaagccgtaaccctgttttagtgccagatacaagtctctcccgtgatgctagacaaaaaattatttttctttgctttcaccaacatggagtttgtgggggtgggtccagttatacatgaaagggtttacagattgttggtttaagattatggatttatctcatttttaatcacaggatagtttggggtttattcctattattattcatgaaaccgacttaagattttttctttatttttctttttttttccatttgctaaagttgaaagttgaaactaactataatagtttgaaacatgttttctcatttttccaaatagtatctgtttattaaattctctaatagaagatgtttgtctttcttacccaaagtaaagatcccctgatcagaaagaaaaaatacaatactttgggaagctatagctataaaacacttgagacacagatatctaaatcagtttttttccaagactccaacattgcactctgtaaagtaacacactgtgatctagtattatttatcagtagataatactgttctgactgtatatacagtctagaactcacaaatcaattagttcctctcacaaatcattcatcttagacttacaaataaggaatgaaatagtcaatggcctgattaaggcaaagagctaccaggctagatggacactttttaaaaattttatctgttctttttcttgctcagggctggtaggttggatctgaaccattaaaatcaaatggtccactaggcgtatgatctctttgagccaaatcagttcctgaatataaaggaggaaatgatgaggatgtactgaggcaacggggaagtatagaaacatccaagacaaaagccaagggatgcaaaggcagagacacaggtgctttttggtgacccagtggatatggcaaccagtgtaactgccatacaagaaaccctaggagcaaacccacaccactcattctcagctaagagattttacacaggcaaacgtgtcttaaaccatctataaatcagttattttatatgacagtcaaaaccttagaaaccttaggatcattatatctattttctgcctattaattgctgtgaggtttgatttgaccaatctgggcaatttattcatcagcttcccttgaagtgcaccagaaaatagaagaaaggtgtgtggagacttagggtattttattacatgttttcatagtcttaaatagtgattaaatttctctagaaagaagttaacagctcattagaaaagttttaacctgtgaaataagtatttttctcaacattctttaaagtttttatataagttaacactaggtaaacattctgcatactagaagtcagtttattacaaatacatgtcaaaaataaagattatacaaggcaccaaactactagatttggcattaaaacaaatgtttatttctaatcacaacaaaattataatgaataaatgttcttgctttgtatggaaatacaattctttattaaagttaacagaaaggaactgatcgtttgtaccagtaaaagagagaaacacacaggttaaatatcttcttgtggggttaaggggtagaacctatcttgccttcactctcaagataacgactcaaattaagctttttgagcaccactcttgtggggacacacatacgctgatctaggaatgaaatcttcgtggtctcaattctagatctactatgccagtttctctctggctttagcctttgagaacctgtataagaatacgtaagtaatccagagctgtgaagagtttaaaggccaacttctccagtgaactcaacctctgggtcacttgcaaccagaaattggatacctcataatgatgcaggaaagacccgagttcatgatgagtttcaaaggccacgttcatttaggaaccaactctctctggatttacctgctgagttccagcagcgtgatgggctgacatcccacctacaagtatgacacctgtgtaacaccagctaggtacggctggagaaggctgaagagagaatgccattaaatggaagaatgtactgattgtagtgaccttctccacacacacacacacacacacacacacacacacctacagtaatacagcaagcgtggaataatcagccaatatataacattccatcagtattttattaaggaaataacctgaatgtggttgattttgacatagctgcaattacagttttcttctatttttcaagccacaataaggaaaataaactactcatggtctaaatactagagataaagtagattcatggcttggtaaggaaattttaagcattccttcaaagattgacgtgctaaaataagcattgatgttttgagtttttttacacctaggatttttagcttgggtgtgtaggtgaaggccaagactctctgcaggaaaaagcttattttcaaactcagaaaataaaatgtcaatcataaaaatctacttcaactttagcaaaaagaaaaaaaaatcaacaaaaagtatactctgtatgctgggattccgaggttccaacacactgttacaaatctgtggggggtttctttcttctgataattctagagcctgttaccatagaaaggcatttcttcaatggctggttgtagttagttcatgtttttcaatcaaatttgcaaatgtatttgttgctgtatagtgattgttttgcaaaataaaattgcttgtcacct

SEQ ID NO: 12290 - DNA, 5470 bp, Homo sapiens
gggataatgctcccggagaaggattctgcagcagttctcaaaggctagacttgagtggtattgctgcatatgcgctgattcttcagcttgtctctaaccgaggaagcattgattgggagctactcattcagaaaattaaaagaaagaagccagaaaatattatcaaccctttgagaacacgacacaacgaactttatattttaccacttccttgaatagttgcaggagaaataacaaggcattgaagaatggcagatgaacggaaagatgaagcaaaggcacctcactggacctcagcaccgctaacagaggcatctgcacactcacatccacctgagattaaggatcaaggcggagcaggggaaggacttgtccgaagcgccaatggattcccatacagggaggatgaagagggtgcctttggagagcatgggtcacagggcacctattcaaataccaaagagaatgggatcaacggagagctgacctcagctgacagagaaacagcagaggaggtgtctgcaaggatagttcaagtagtcactgctgaggctgtagcagtcctgaaaggtgaacaagagaaagaagctcaacataaagaccagactgcagctctgcctttagcagctgaagaaacagctaatctgcctccttctccacccccatcacctgcctcagaacagactgtcacagtggaggaagcagcaggtggggaatcagctctggctcccagtgtatttaaacaggcaaaggacaaagtctctgacggagtaaccaagagcccagaaaagcgctcttctctcccaagaccttcctccattctccctcctcggcgaggtgtgtcaggagacagagatgagaattccttctctctcaacagttctatctcttcttcagcacggcggaccaccaggtcagagccaattcgcagagcagggaagagtggtacctcaacacccactacccctgggtctactgccatcactcctggcaccccaccaagttattcttcacgcacaccaggcactcctggaacccctagctatcccaggacccctcacacaccaggaacccccaagtctgccatcttggtgccgagtgagaagaaggtcgccatcatacgtactcctccaaaatctcctgcgactcccaagcagcttcggcttattaaccaaccactgccagacctgaagaatgtcaaatccaaaatcggatcaacagacaacatcaaataccagcctaaaggggggcaggttaggattttaaacaagaagatcgattttagcaaagttcagtccagatgtggttccaaggataacatcaaacattcggctgggggcggaaatgtacaaattgttaccaagaaaatagacctaagccatgtgacatccaaatgtggctctctgaagaacatccgccacaggccaggtggcggacgtgtgaaaattgagagtgtaaaactagatttcaaagaaaaggcccaagctaaagttggttctcttgataatgctcatcatgtacctggaggtggtaatgtcaagattgacagccaaaagttgaacttcagagagcatgctaaagcccgtgtggaccatggggctgagatcattacacagtccccaggcagatccagcgtggcatcaccccgacgactcagcaatgtctcctcgtctggaagcatcaacctgctcgaatctcctcagcttgccactttggctgaggatgtcactgctgcactcgctaagcagggcttgtgaatatttctcatttagcattgaaataataatatttaggcatgagctcttggcaggagtgggctctgagcagttgttatattcattctttataaaccataaaataaataatctcatccccaaactgtagtaattgttacaattttctatttaaaaaatgaatagtacatgcagaaattgacctgatttccatttgcaacaggaagacactggctttacatgggttcaattggacaattatttttgctctgctctgttttgcatggagtattattattttaaaaattgcatttttacctttcatgtgcctgaaggctatccactacattctgaaggccttgttaaaatccaagctgctcatttcactattctgtttctgagtgagaagataaaaactgcccattgtaacttatttcaggttaaattaaaccaaggagtctgattgcaggaagggaagagcatgtaagaaataagtttttttaaagtgttattttgtataaatgggaagaaagattcaattaagttattaacatttgggacctggataattatatcagagtatgtcagtccaataaattatttaactaattaaaaaatagttgcaaagcatttgagctgtggttgaggaagtggtgtaaaagtgcatccattaggaatgatgcactttcattaggatggactcgtgtctgattagaatgtcagttgatcagctagatttgtgtccacactaccagtttcacaccccctttccatctgtttgatacagtattatagatataaatatatatatatttctctgtggccatttgtgatacttcctcatatacttgaatattatacttctttattcacagtatctgtgtctcctgcaccctttggtgttgcaattttagatatgtgaaagtagatgttagcagggttctctccctatttaaaaaaaatacattaaaaaagacaaaaaattttagcatgaagttgctttctgtaacaactcaaagccgtaaccctgttttagtgccagatacaagtctctcccgtgatgctagacaaaaaattatttttctttgctttcaccaacatggagtttgtgggggtgggtccagttatacatgaaagggtttacagattgttggtttaagattatggatttatctcatttttaatcacaggatagtttggggtttattcctattattattcatgaaaccgacttaagattttttctttatttttctttttttttccatttgctaaagttgaaagttgaaactaactataatagtttgaaacatgttttctcatttttccaaatagtatctgtttattaaattctctaatagaagatgtttgtctttcttacccaaagtaaagatcccctgatcagaaagaaaaaatacaatactttgggaagctatagctataaaacacttgagacacagatatctaaatcagtttttttccaagactccaacattgcactctgtaaagtaacacactgtgatctagtattatttatcagtagataatactgttctgactgtatatacagtctagaactcacaaatcaattagttcctctcacaaatcattcatcttagacttacaaataaggaatgaaatagtcaatggcctgattaaggcaaagagctaccaggctagatggacactttttaaaaattttatctgttctttttcttgctcagggctggtaggttggatctgaaccattaaaatcaaatggtccactaggcgtatgatctctttgagccaaatcagttcctgaatataaaggaggaaatgatgaggatgtactgaggcaacggggaagtatagaaacatccaagacaaaagccaagggatgcaaaggcagagacacaggtgctttttggtgacccagtggatatggcaaccagtgtaactgccatacaagaaaccctaggagcaaacccacaccactcattctcagctaagagattttacacaggcaaacgtgtcttaaaccatctataaatcagttattttatatgacagtcaaaaccttagaaaccttaggatcattatatctattttctgcctattaattgctgtgaggtttgatttgaccaatctgggcaatttattcatcagcttcccttgaagtgcaccagaaaatagaagaaaggtgtgtggagacttagggtattttattacatgttttcatagtcttaaatagtgattaaatttctctagaaagaagttaacagctcattagaaaagttttaacctgtgaaataagtatttttctcaacattctttaaagtttttatataagttaacactaggtaaacattctgcatactagaagtcagtttattacaaatacatgtcaaaaataaagattatacaaggcaccaaactactagatttggcattaaaacaaatgtttatttctaatcacaacaaaattataatgaataaatgttcttgctttgtatggaaatacaattctttattaaagttaacagaaaggaactgatcgtttgtaccagtaaaagagagaaacacacaggttaaatatcttcttgtggggttaaggggtagaacctatcttgccttcactctcaagataacgactcaaattaagctttttgagcaccactcttgtggggacacacatacgctgatctaggaatgaaatcttcgtggtctcaattctagatctactatgccagtttctctctggctttagcctttgagaacctgtataagaatacgtaagtaatccagagctgtgaagagtttaaaggccaacttctccagtgaactcaacctctgggtcacttgcaaccagaaattggatacctcataatgatgcaggaaagacccgagttcatgatgagtttcaaaggccacgttcatttaggaaccaactctctctggatttacctgctgagttccagcagcgtgatgggctgacatcccacctacaagtatgacacctgtgtaacaccagctaggtacggctggagaaggctgaagagagaatgccattaaatggaagaatgtactgattgtagtgaccttctccacacacacacacacacacacacacacacacacctacagtaatacagcaagcgtggaataatcagccaatatataacattccatcagtattttattaaggaaataacctgaatgtggttgattttgacatagctgcaattacagttttcttctatttttcaagccacaataaggaaaataaactactcatggtctaaatactagagataaagtagattcatggcttggtaaggaaattttaagcattccttcaaagattgacgtgctaaaataagcattgatgttttgagtttttttacacctaggatttttagcttgggtgtgtaggtgaaggccaagactctctgcaggaaaaagcttattttcaaactcagaaaataaaatgtcaatcataaaaatctacttcaactttagcaaaaagaaaaaaaaatcaacaaaaagtatactctgtatgctgggattccgaggttccaacacactgttacaaatctgtggggggtttctttcttctgataattctagagcctgttaccatagaaaggcatttcttcaatggctggttgtagttagttcatgtttttcaatcaaatttgcaaatgtatttgttgctgtatagtgattgttttgcaaaataaaattgcttgtcacct

SEQ ID NO: 12291 - DNA, 3353 bp, Homo sapiens
gcggcgctggagtcggcgcgggtgctggcgccatggaggccgagcggggtcccgagcgccggcctgcggagcgtagcagcccgggccagacgccggaggagggcgcgcaggccttggccgagttcgcggcgctgcacggcccggcgctgcgcgcttcgggggtccccgaacgttactggggccgcctcctgcacaagctggagcacgaggttttcgacgctggggaagtgtttgggatcatgcaagtggaggaggtagaagaggaggaggacgaggcagcccgggaggtgcggaagcagcagcccaacccggggaacgagctgtgctacaaggtcatcgtgaccagggagagcgggctccaggcagcccaccccaacagcatcttcctcatcgaccacgcctggacgtgccgtgtggagcacgcgcgccagcagctgcagcaggtgcccgggctgctgcaccgcatggccaacctgatgggcattgagttccacggtgagctgcccagtacagaggctgtggccctggtgctggaggagatgtggaagttcaaccagacctaccagctggcccatgggacagctgaggagaagatgccggtgtggtatatcatggacgagttcggttcgcggatccagcacgcggacgtgcccagcttcgccacggcacccttcttctacatgccgcagcaggtggcctacacgctgctgtggcccctgagggacctggacactggcgaggaggtgacccgagactttgcctacggagagacggaccccctgatccggaagtgcatgctgctgccctgggcccccaccgacatgctggacctcagctcttgcacacccgagccgcccgccgagcactaccaggccattctggaggaaaacaaggagaagctgccacttgacatcaaccccgtggtgcacccccacggccacatcttcaaggtctacacggacgtgcagcaggtggccagcagcctcacccacccgcgcttcaccctcacccagagtgaggcggacgccgacatcctcttcaacttctcacacttcaaggactacaggaaactcagccaggagaggccaggcgtgctgctgaaccagttcccctgcgagaacctgctgactgtcaaggactgcctggcctccatcgcgcgccgggcaggtggccccgagggcccaccctggctgccccgaaccttcaacctgcgcactgagctgccccagtttgtcagctacttccagcagcgggaaaggtggggcgaggacaaccactggatctgcaagccctggaacctggcgcgcagcctggacacccacgtcaccaagagcctgcacagcatcatccggcaccgagagagcacccccaaggttgtgtccaagtacatcgaaagtcccgtgttgttccttcgagaagacgtgggaaaggtcaagttcgacatccgctacatcgtgctgctgcggtcagtgaggcccctacggttgttcgtgtatgatgtgttctggctgcggttctccaaccgggcctttgcactcaacgacctggatgactacgagaagcacttcacggtcatgaactatgacccggatgtggtgctgaagcaggtgcactgtgaagagttcatccccgagtttgagaagcaatacccagaatttccctggacggacgtccaggctgagatcttccgggccttcacggagctgttccaggtggcctgtgccaagccaccacccctgggcctctgcgactacccctcatcccgggccatgtatgccgtcgacctcatgctgaagtgggacaacggcccagatggaaggcgggtgatgcagccgcagatcctggaggtgaacttcaaccccgactgtgagcgagcctgcaggtaccaccccaccttcttcaacgacgtcttcagcaccttgtttctggaccagcccggtggctgccacgttacctgccttgtctaggcactcgctgtccccaaaacctgtgcttggggcaggattccaacctcagttctctgagctgcttctgcaaaggcccccatgtccctccccacaccggccctgggcatagcctcagccccaggcctctgtcctgccgagccatcctcccggcgccacactccgggagcacagcatcctcctctcacctgtgggtcagagcaggacagtgatggtgtccccagggctgagcaccaccccacgccctgccctcacccctcaccaccatctgtgcactgatgagtctccagtttagccaagggctttgttcctggcatggagaatttgttcctggctgctgtgtttccagggggtgctgggggaagggttccgtggagcgagacaaggtgtcctcgggagcagggttccaccgggaagcgtttgggagccctgtatcacacggggcaggcgggtttctcttccggggtctctgctcttatgcatcaggacgaccccgggacggctgtggggccccacactgcacccacagggctctatgcgacaggggcccaggaacagcctgaggccaccacccagcaagcccgccttatcacccattccagctcacccagaaccttcaccagcaaacctcctgctgaggtcctggcaggaggccaccgtcttgttaccgtttccttttcgtttgctgagggtcacagaccccaacagggaaatcagtatctgtcttcccagtggttgccctgctcgccgggcactccacggggtcccgcccttgtgtgagatgggccaggatccttcggcaaggggcgcctggggctggggctgattgtgggcggtggagcgccagacagaaaaggattccaatgagaacttcaggttaaagtcagatgccacctaccagggtctacagtcaaaatgttggctttttcttattttttaatgtatgggagaaaaatgtaaaattccagttcttttctaattgtgtttctgaaattaggagtcagctgccagcgtttttgtgtggctgcagtgtgcctgggcccagctcacgggcagtgggtggacctaactgcccaggcaggcgagagctacttccagagccttccagtgcatgggagggcagggctaggtgtagcggtgtctcctctttgaaattaagaactatctttcttgtagcaaagctgcacctgatgatgctgcctctcctctctgtgttgtctgggcccttgtttacaagcacgcgttacccttcctgaggggagccatgctctagcccctggagggcctgttgcaggggcagggcgggcccgtcgcctttggcagctcctggagagctgtggacatgcagtccccctcagttcgtgctgcaataaaggccatcttctctta

SEQ ID NO: 12292 - DNA, 3820 bp, Homo sapiens
cagcagtgagtcggagctctatggaggtggcagcgggtaccgagtggcggctgcagcagcgactcctctgagctgagtttgaggccgtccccgactccttcctcccccttccctcccccttttttttgttttccgttcccctttcccctcccttccctatccccgacgaccggatcctgaggaggcagctgcggtggcagctgctgagttctcggtgaaggtatttcatttctcctgtcccctcccctccccaccccatctattaatattattcttttgaagattcttcgttgtcaagccgccaaagtggagagtgcgattgcagaagggggtgcttctcgtttcagtgcttcttcgggcggaggaggaagtaggggtgcacctcagcactatcccaagactgctggcaacagcgagttcctggggaaaaccccagggcaaaacgctcagaaatggattcctgcacgaagcactagacgagatgacaactccgcagcaaacaactccgcaaacgaaaaagaacgacatgatgcaatcttcaggaaagtaagaggcatactaaataagcttactcctgaaaagtttgacaagctatgccttgagctcctcaatgtgggtgtagagtctaaactcatccttaaaggggtcatactgctgattgtggacaaagccctagaagagccaaagtatagctcactgtatgctcagctatgtctgcgattggcagaagatgcaccaaactttgatggcccagcagcagagggtcaaccaggacagaagcaaagcaccacattcagacgcctcctaatttccaaattacaagatgaatttgaaaaccgaactagaaatgttgatgtctatgataagcgtgaaaatcccctcctccccgaggaggaggaacagagagccattgctaagatcaagatgttgggaaacatcaaattcattggagagcttggcaagcttgatcttattcacgaatctatccttcataagtgcatcaaaacacttttggaaaagaagaagagagtccaactcaaagatatgggagaggatttggagtgcctctgtcagataatgaggacagtgggacctagattagaccatgaacgagccaagtccttaatggatcagtactttgcccgaatgtgctccttgatgttaagtaaggaattgccagcaaggattcgtttcctgctgcaggataccgtagagttgcgagaacaccattgggttcctcgcaaggcttttcttgacaatggaccaaagacgatcaatcaaattcgtcaagatgcagtaaaagatctaggggtgtttattcctgctcctatggctcaagggatgagaagtgacttctttctggagggaccgttcatgccacccaggatgaaaatggatagggacccacttggaggacttgctgatatgtttggacaaatgccaggtagcggaattggtactggtccaggagttatccaggatagattttcacccaccatgggacgtcatcgttcaaatcaactcttcaatggccatgggggacacatcatgcctcccacacaatcgcagtttggagagatgggaggcaagtttatgaaaagccaggggctaagccagctctaccataaccagagtcagggactcttatcccagctgcaaggacagtcgaaggatatgccacctcggttttctaagaaaggacagcttaatgcagatgagattagcctgaggcctgctcagtcgttcctaatgaataaaaatcaagtgccaaagcttcagccccagataactatgattcctcctagtgcacaaccaccacgcactcaaacaccacctctgggacagacacctcagcttggtctcaaaactaatccaccacttatccaggaaaagcctgccaagaccagcaaaaagccaccaccgtcaaaggaagaactccttaaactaactgaaactgttgtgactgaatatctaaatagtggaaatgcaaatgaggctgtcaatggtgtaagagaaatgagggctcctaaacactttcttcctgagatgttaagcaaagtaatcatcctgtcactagatagaagcgatgaagataaagaaaaagcaagttctttgatcagtttactcaaacaggaagggatagccacaagtgacaacttcatgcaggctttcctgaatgtattggaccagtgtcccaaactggaggttgacatccctttggtgaaatcctatttagcacagtttgcagctcgtgccatcatttcagagctggtgagcatttcagaactagctcaaccactagaaagtggcacccattttcctctcttcctactttgtcttcagcagttagctaaattacaagatcgagaatggttaacagaactttttcaacaaagcaaggtcaatatgcagaaaatgctcccagaaattgatcagaataaggaccgcatgttggagattttggaaggaaagggactgagtttcttattcccactcctcaaattggagaaggaactgttgaagcaaataaagttggatccatcccctcaaaccatatataaatggattaaagataacatctctcccaaacttcatgtagataaaggatttgtgaacatcttaatgactagcttcttacagtacatttctagtgaagtaaacccccccagcgatgaaacagattcatcctctgctccttccaaagaacagttagagcaggaaaaacaactactactatctttcaagccagtaatgcagaaatttcttcatgatcacgttgatctacaagtcagtgccctgtatgctctccaggtgcactgctataacagcaacttcccaaaaggcatgttacttcgcttttttgtgcacttctatgacatggaaattattgaagaagaagctttcttggcttggaaagaagatataacccaagagtttccgggaaaaggcaaggctttgttccaggtgaatcagtggctaacctggttagaaactgctgaagaagaagaatcagaggaagaagctgactaaagaaccagccaaagccttaaattgtgcaaaacatactgttgctatgatgtaactgcatttgacctaaccactgcgaaaattcattccgctgtaatgttttcacaatatttaaagcagaagcacgtcagttaggatttccttctgcataaggtttttttgtagtgtaatgtcttaatcatagtctaccatcaaatattttaggagtatctttaatgtttagatagtatattagcagcatgcaataattacatcataagttctcaagcagaggcagtctattgcaaggaccttctttgctgccagttatcataggctgttttaagttagaaaactgaatagcaacactgaatactgtagaaatgcactttgctcagtaatacttgagttgttgcaatatttgattatccatttggttgttacagaaaaattcttaactgtaattgatggttgttgccgtaatagtatattgcctgtatttctacctctagtaatgggctttatgtgctagattttaatatccttgagcctgggcaagtgcacaagtctttttaaaagaaacatggtttacttgcacaaaactgatcagttttgagagatcgttaatgcccttgaagtggtttttgtgggtgtgaaacaaatggtgagaatttgaattggtccctcctattatagtattgaaattaagtctacttaatttatcaagtcatgttcatgccctgattttatatacttgtatctatcaataaacattgtgatacttgaaaaaaaaaaaaaaaaaaaaaaaaaaaaa

SEQ ID NO: 12293 - DNA, 3398 bp, Homo sapiens
ccgcgcgcacagcccgcactgccccacgccgcgggctagggacacccggcccgccaccatgacttccagcaagatagagatgcccggcgaggtgaaggccgaccccgccgccctcatggcgtcgctgcacctcctgccgtcgcccacgcccaatctcgaaattaagtacaccaagatctttataaacaacgagtggcagaactcagagagtgggagagtgttccctgtctataatccagccacaggagaacaggtgtgtgaagttcaagaagcagacaaggcagatatagacaaagcagtgcaggcagcccgcctggctttctctcttggttcagtgtggagaaggatggatgcttcagaaaggggacgtctgttggataagcttgcagacttggtggaacgggacagggcagttcttgcaaccatggaatccctaaatggtggcaaaccattcctgcaagctttttatgtggatttgcagggcgtcatcaaaacctttcgatattacgcaggctgggctgataaaattcatgggatgaccattcctgtagatggagactattttacctttacaagacatgaacccattggagtgtgtggacagatcatcccatggaacttccccctgctgatgtttgcctggaaaatagctccagctttgtgctgtggcaatacagtagttattaagccagcagagcaaacaccactcagtgcactctacatgggagccctcatcaaggaggctggctttcctcccggggtcatcaatattttgccaggatatgggccaacggctggggcagcaatagcttctcacattggcatagacaagattgcattcacagggtctactgaggttggaaagcttatccaagaagcagctggaagaagtaatttgaagagagtaactctggaacttggaggcaaaagtcctaatattatttttgctgatgctgacttggactatgctgtggagcaggcccaccagggtgtgttcttcaatcaaggtcagtgctgcactgcaggctctcgcatcttcgtggaggagtccatctatgaggagtttgtgagaagaagcgtggagcgggccaagaggcgcgtagtggggagtccctttgaccccaccactgagcagggtccccagattgataagaaacagtacaacaagatcttggaactcatccagagtggtgtggctgagggcgccaagctggaatgtggaggcaaaggactgggccgaaaggggtttttcattgagcccacagtgttttccaacgtcactgatgatatgcggattgccaaggaggagatctttggccctgttcaggaaattttgagatttaagacgatggatgaagttatcgaaagagccaataactcagactttggactcgtagcagctgtctttactaatgacatcaacaaggccctcacagtgtcttctgcaatgcaagctgggactgtttggatcaattgttacaatgccttaaatgcccagagcccctttgggggattcaagatgtctggaaatgggagagaaatgggagaatttggcttgcgggagtactcagaagttaagacggtgacagtaaagatcccccagaagaactcctaagaaggccaagaaggaggatgaagcccagcctgcacgtctgtccctctctgctttctctgtagggcccagctctcaggaatacaaagttgagccacggtccttacttaaagattgaaaagataacatgtaggccaggcaggtcactgcacaactaaagcaaaccagctgggtacagtttcttggcactctgtaaggggccaccttaatcataccaaatattggggaaagtgggataaagggaggaggaggagctagcagacacatccagtatctccttctggagcacaggatgaaataagggagctgtattatttcatgtctttgtcacaaagaactttcctctcaaggaaaggtgacctttctcctgtcttcattttcctccttccaggccctcctcgctcacccacccctccctctcttccaaggagatgtcagctgagctcattctggggcagatgtttgggccgggaacaatttttcaaggttgtaaagccaaattatcatttcatgttatccatttcttcaaagcaaaacatgaaatggttttagctagagtcagaccagaatgaaaatgccaggagctggtacactacagatgtagtaagaacctgggatattcctgacccaatctggttttcttttacccataaataacatgaatgaaaaaagattgggacaatagagactggaagtcatcatgtgcagttcaccgcttctgagcttgctgcagttttggggtgtgtgtgtattagattccttctcagttattctggaataaggcaaggagtgggttgtttttcatagctagataagatcttttccaaagtttttcttagaaccaaccaaaaaacaatccgagtaggcccaagaatttgataatgctggatgccttgcagacatcattcagtttctaatattgggcaacaattattattaaatgaattatttctgtagttggaatctgtaccttctgaacctctacaccaataactgctgcaggtgtgattttggtctgtcacactgtacatctatcataatgtgccctgtatctattggcagtgaccttggaaaatctggccaagcctaggggtttccttttccatttgccaagttccattgtgccaggactgccgtgctccactgagctcctctgtcacaccccattcttgcccctcactgggcaggccatggcctacagcttgcagggagtaaagcaggcccgcctccctttcttcccatccacatactcctcttctgctttccagtgactccaccagtttgatgtgggaagtgttagcttcctttccttcttccatcccttcttccatctttccagctgtcaaatccaatccagtctctaacctaaatgcagatcatttatttaaaagtaccaaacataacccagagtatgtggaatatgggcaacatatatatagccttctgtatttaacgatcttctgcttcttaaccgtaccagttttctatttataactcttatctatccatgatgttttaaagtctccacttgctgttatttacaaacgacagtgcattcagcagcccagtgccgtgagccctgacagatgccgtatttctgagtgcttccatgtgaatgctgccctcctgtagcatgtgtccaagtggacatagccactaaccaactagttacctttggactgcaacaaaaaatgtgaaaatgaagatttatttcttttaatttacttaaaaagaaacctctgtgctagcaataaagcatttatattgtgtaaaaaaaaaaaaaaaa

SEQ ID NO: 12294 - DNA, 3142 bp, Homo sapiens
gagtgtttttcttcagttgtgcctcttcctctctaacaggcagatatagacaaagcagtgcaggcagcccgcctggctttctctcttggttcagtgtggagaaggatggatgcttcagaaaggggacgtctgttggataagcttgcagacttggtggaacgggacagggcagttcttgcaaccatggaatccctaaatggtggcaaaccattcctgcaagctttttatgtggatttgcagggcgtcatcaaaacctttcgatattacgcaggctgggctgataaaattcatgggatgaccattcctgtagatggagactattttacctttacaagacatgaacccattggagtgtgtggacagatcatcccatggaacttccccctgctgatgtttgcctggaaaatagctccagctttgtgctgtggcaatacagtagttattaagccagcagagcaaacaccactcagtgcactctacatgggagccctcatcaaggaggctggctttcctcccggggtcatcaatattttgccaggatatgggccaacggctggggcagcaatagcttctcacattggcatagacaagattgcattcacagggtctactgaggttggaaagcttatccaagaagcagctggaagaagtaatttgaagagagtaactctggaacttggaggcaaaagtcctaatattatttttgctgatgctgacttggactatgctgtggagcaggcccaccagggtgtgttcttcaatcaaggtcagtgctgcactgcaggctctcgcatcttcgtggaggagtccatctatgaggagtttgtgagaagaagcgtggagcgggccaagaggcgcgtagtggggagtccctttgaccccaccactgagcagggtccccagattgataagaaacagtacaacaagatcttggaactcatccagagtggtgtggctgagggcgccaagctggaatgtggaggcaaaggactgggccgaaaggggtttttcattgagcccacagtgttttccaacgtcactgatgatatgcggattgccaaggaggagatctttggccctgttcaggaaattttgagatttaagacgatggatgaagttatcgaaagagccaataactcagactttggactcgtagcagctgtctttactaatgacatcaacaaggccctcacagtgtcttctgcaatgcaagctgggactgtttggatcaattgttacaatgccttaaatgcccagagcccctttgggggattcaagatgtctggaaatgggagagaaatgggagaatttggcttgcgggagtactcagaagttaagacggtgacagtaaagatcccccagaagaactcctaagaaggccaagaaggaggatgaagcccagcctgcacgtctgtccctctctgctttctctgtagggcccagctctcaggaatacaaagttgagccacggtccttacttaaagattgaaaagataacatgtaggccaggcaggtcactgcacaactaaagcaaaccagctgggtacagtttcttggcactctgtaaggggccaccttaatcataccaaatattggggaaagtgggataaagggaggaggaggagctagcagacacatccagtatctccttctggagcacaggatgaaataagggagctgtattatttcatgtctttgtcacaaagaactttcctctcaaggaaaggtgacctttctcctgtcttcattttcctccttccaggccctcctcgctcacccacccctccctctcttccaaggagatgtcagctgagctcattctggggcagatgtttgggccgggaacaatttttcaaggttgtaaagccaaattatcatttcatgttatccatttcttcaaagcaaaacatgaaatggttttagctagagtcagaccagaatgaaaatgccaggagctggtacactacagatgtagtaagaacctgggatattcctgacccaatctggttttcttttacccataaataacatgaatgaaaaaagattgggacaatagagactggaagtcatcatgtgcagttcaccgcttctgagcttgctgcagttttggggtgtgtgtgtattagattccttctcagttattctggaataaggcaaggagtgggttgtttttcatagctagataagatcttttccaaagtttttcttagaaccaaccaaaaaacaatccgagtaggcccaagaatttgataatgctggatgccttgcagacatcattcagtttctaatattgggcaacaattattattaaatgaattatttctgtagttggaatctgtaccttctgaacctctacaccaataactgctgcaggtgtgattttggtctgtcacactgtacatctatcataatgtgccctgtatctattggcagtgaccttggaaaatctggccaagcctaggggtttccttttccatttgccaagttccattgtgccaggactgccgtgctccactgagctcctctgtcacaccccattcttgcccctcactgggcaggccatggcctacagcttgcagggagtaaagcaggcccgcctccctttcttcccatccacatactcctcttctgctttccagtgactccaccagtttgatgtgggaagtgttagcttcctttccttcttccatcccttcttccatctttccagctgtcaaatccaatccagtctctaacctaaatgcagatcatttatttaaaagtaccaaacataacccagagtatgtggaatatgggcaacatatatatagccttctgtatttaacgatcttctgcttcttaaccgtaccagttttctatttataactcttatctatccatgatgttttaaagtctccacttgctgttatttacaaacgacagtgcattcagcagcccagtgccgtgagccctgacagatgccgtatttctgagtgcttccatgtgaatgctgccctcctgtagcatgtgtccaagtggacatagccactaaccaactagttacctttggactgcaacaaaaaatgtgaaaatgaagatttatttcttttaatttacttaaaaagaaacctctgtgctagcaataaagcatttatattgtgta

SEQ ID NO: 12295 - DNA, 3284 bp, Homo sapiens
ccgcgcgcacagcccgcactgccccacgccgcgggctagggacacccggcccgccaccatgacttccagcaagatagagatgcccggcgaggtgaaggccgaccccgccgccctcatggcgtcgctgcacctcctgccgtcgcccacgcccaatctcgaaattaagtacaccaagatctttataaacaacgagtggcagaactcagagagtgggagagtgttccctgtctataatccagccacaggagaacaggtgtgtgaagttcaagaagcagacaaggcagatatagacaaagcagtgcaggcagcccgcctggctttctctcttggttcagtgtggagaaggatggatgcttcagaaaggggacgtctgttggataagcttgcagacttggtggaacgggacagggcagttcttgcaaccatggaatccctaaatggtggcaaaccattcctgcaagctttttatgtggatttgcagggcgtcatcaaaacctttcgatattacgcaggctgggctgataaaattcatgggatgaccattcctgtagatggagactattttacctttacaagacatgaacccattggagtgtgtggacagatcatcccatggaacttccccctgctgatgtttgcctggaaaatagctccagctttgtgctgtggcaatacagtagttattaagccagcagagcaaacaccactcagtgcactctacatgggagccctcatcaaggaggttggaaagcttatccaagaagcagctggaagaagtaatttgaagagagtaactctggaacttggaggcaaaagtcctaatattatttttgctgatgctgacttggactatgctgtggagcaggcccaccagggtgtgttcttcaatcaaggtcagtgctgcactgcaggctctcgcatcttcgtggaggagtccatctatgaggagtttgtgagaagaagcgtggagcgggccaagaggcgcgtagtggggagtccctttgaccccaccactgagcagggtccccagattgataagaaacagtacaacaagatcttggaactcatccagagtggtgtggctgagggcgccaagctggaatgtggaggcaaaggactgggccgaaaggggtttttcattgagcccacagtgttttccaacgtcactgatgatatgcggattgccaaggaggagatctttggccctgttcaggaaattttgagatttaagacgatggatgaagttatcgaaagagccaataactcagactttggactcgtagcagctgtctttactaatgacatcaacaaggccctcacagtgtcttctgcaatgcaagctgggactgtttggatcaattgttacaatgccttaaatgcccagagcccctttgggggattcaagatgtctggaaatgggagagaaatgggagaatttggcttgcgggagtactcagaagttaagacggtgacagtaaagatcccccagaagaactcctaagaaggccaagaaggaggatgaagcccagcctgcacgtctgtccctctctgctttctctgtagggcccagctctcaggaatacaaagttgagccacggtccttacttaaagattgaaaagataacatgtaggccaggcaggtcactgcacaactaaagcaaaccagctgggtacagtttcttggcactctgtaaggggccaccttaatcataccaaatattggggaaagtgggataaagggaggaggaggagctagcagacacatccagtatctccttctggagcacaggatgaaataagggagctgtattatttcatgtctttgtcacaaagaactttcctctcaaggaaaggtgacctttctcctgtcttcattttcctccttccaggccctcctcgctcacccacccctccctctcttccaaggagatgtcagctgagctcattctggggcagatgtttgggccgggaacaatttttcaaggttgtaaagccaaattatcatttcatgttatccatttcttcaaagcaaaacatgaaatggttttagctagagtcagaccagaatgaaaatgccaggagctggtacactacagatgtagtaagaacctgggatattcctgacccaatctggttttcttttacccataaataacatgaatgaaaaaagattgggacaatagagactggaagtcatcatgtgcagttcaccgcttctgagcttgctgcagttttggggtgtgtgtgtattagattccttctcagttattctggaataaggcaaggagtgggttgtttttcatagctagataagatcttttccaaagtttttcttagaaccaaccaaaaaacaatccgagtaggcccaagaatttgataatgctggatgccttgcagacatcattcagtttctaatattgggcaacaattattattaaatgaattatttctgtagttggaatctgtaccttctgaacctctacaccaataactgctgcaggtgtgattttggtctgtcacactgtacatctatcataatgtgccctgtatctattggcagtgaccttggaaaatctggccaagcctaggggtttccttttccatttgccaagttccattgtgccaggactgccgtgctccactgagctcctctgtcacaccccattcttgcccctcactgggcaggccatggcctacagcttgcagggagtaaagcaggcccgcctccctttcttcccatccacatactcctcttctgctttccagtgactccaccagtttgatgtgggaagtgttagcttcctttccttcttccatcccttcttccatctttccagctgtcaaatccaatccagtctctaacctaaatgcagatcatttatttaaaagtaccaaacataacccagagtatgtggaatatgggcaacatatatatagccttctgtatttaacgatcttctgcttcttaaccgtaccagttttctatttataactcttatctatccatgatgttttaaagtctccacttgctgttatttacaaacgacagtgcattcagcagcccagtgccgtgagccctgacagatgccgtatttctgagtgcttccatgtgaatgctgccctcctgtagcatgtgtccaagtggacatagccactaaccaactagttacctttggactgcaacaaaaaatgtgaaaatgaagatttatttcttttaatttacttaaaaagaaacctctgtgctagcaataaagcatttatattgtgtaaaaaaaaaaaaaaaa

SEQ ID NO: 12296 - DNA, 2233 bp, Homo sapiens
ataaaaacattgtatatagtagaccaaatggtcatagttactgtgagcctggcagagcagaaaaggcagttgaaggaggcagagaaggggttggtgatacggtgctataaatctgtggtccagtccacctcccttttaagacgtcctccccctatttctgttcttagttagagatgcagcagcttactcctgtagcgacctactaaaaagcaacaaggagaaagacatcgtctttttgaaaaaacgttctttcgtctcttttctttgttccttggtttgtttttcttgcccctttttgtttagttgaacggcaataggagggtagtctctccgtctttttaaactcttttttaagtttcccctcccctttcatatttttttgggccatttcttttagctttggactttgggggtcgaaagcgtttctttttatttgcttcttttaagccgagcacagtttaggtttcgtgctgtcttaagagaactatccagcagcttcttgctcatccttattgggagaactgcaccgttactttaaaaacacacatacacaaaaaccttaagggagaaaggtaattgctgccatggaaacacaactgtctaatgggccaacttgcaataacacagccaatggtccaaccaccataaacaacaactgttcgtcaccagttgactctgggaacacagaagacagcaagaccaacttaatagtcaactaccttcctcagaacatgacacaggaggaactaaagagtctctttgggagcattggtgaaatagagtcctgtaagcttgtaagagacaaaataacagggcagagcttgggatatggctttgtgaactacattgaccccaaggatgcagagaaagctatcaacaccctgaatggattgagacttcaaaccaaaacaataaaagtttcctatgctcgcccaagttcagcttctatcagagatgcaaatttatatgtcagcggacttccaaaaacaatgacccagaaggagttggaacagcttttttcacaatatggacgcattattacttctcgtattcttgtcgaccaggtcactggcatatcaaggggtgtagggtttattcgatttgacaagcgaattgaggcagaagaagctatcaaaggcctaaatggccagaaacctcccggtgccacggagccaatcactgtaaagtttgctaataacccaagccaaaaaaccaatcaggccatcctttcccagctgtaccagtctccaaacagaaggtatccaggaccgctagctcagcaggcacagcgttttaggttggacaatctgctcaatatggcttatggagtaaagaggttttctccaatgaccattgacggaatgaccagtttggctggaattaatatccctgggcaccctggaacagggtggtgtatatttgtgtacaacctggctcctgacgcagatgagagtatcctgtggcaaatgtttgggccttttggagctgtcaccaatgtgaaggtcatccgtgactttaacaccaataaatgcaaaggttttggatttgtgactatgacaaactatgatgaggctgccatggcgatacgtagcctcaatggataccgtctgggagacagagtactgcaggtctcctttaagacaaacaaaacgcacaaagcctaatgagctcttgtcctcagtccatttatatatgaaaactatacaacaaaggcaagttaagagaaactttatacattagtaaatgtctttgtaagtcagtgttgagatggggataaaatgactacttagcatcctaagaaatatgtgagattttttattgctagtatttgaattaaaacttcttaaatatcttttatgttgaatatggacaagaggtacagggttttacctgtcacattgcattctattgccttctttgaagaaggtggaccttttaaagtgtttcagctaagggaagacatttcttttctttttacataactgccttgaacctgtgagtaaatattgaggctttgtgttgtaattcttcagttggttgtgtcttttttttcccccctttttcctttttctgattagctttgtgtttggtttacatttaaagcattgctgttatgtctgtttaagaaaagtattttgaagtttacatttttatttatgaagtttaaaacagtatttattttgtaattatgatttgggttggggaagggggggctacattataaacgcttagg

SEQ ID NO: 12297 - DNA, 1679 bp, Homo sapiens
ggatcttcaaaccgtgggagtggtgcggcggctagagtccctggactcctcaacctagggagctactcgcgagatgcctacgacttgtaacgggctgcctggtaaaatgagtctatggaaacggttgccagggccggctaacagcggctcccggaagtcctttgatgctttgttaacagtgaagctactggaccaatgaggtgcttcttccggttttgtccgcgctcgcctaattcttctttatcaaggttgcctttgaccccggaaaagagatcttccgggttcctctctccccaagatggctgctgaggacgagttacagctgccgcggctccccgagctgttcgaaactggtagacagttactggacgaagtagaagtggcgactgaacccgccggttcccggatagtccaggagaaggtgttcaagggcttggacctccttgagaaggctgccgaaatgttatcgcagctcgacttgttcagccgaaatgaagatttggaagagattgcttccaccgacctgaagtaccttttggtgccagcgtttcaaggagccctcaccatgaaacaagtcaaccccagcaagcgtctagatcatttgcagcgggctcgagaacactttataaactacttaactcagtgccattgctatcatgtggcagagtttgagctgcccaaaaccatgaacaactctgctgaaaatcacactgccaattcctccatggcttatcctagtctcgttgctatggcatctcaaagacaggctaaaatacagagatacaagcagaagaaggagttggagcataggttgtctgcaatgaaatctgctgtggaaagtggtcaagcagatgatgagcgtgttcgtgaatattatcttcttcaccttcagaggtggattgatatcagcttagaagagattgagagcattgaccaggaaataaagatcctgagagaaagagactcttcaagagaggcatcaacttctaactcatctcgccaggagaggcctccagtgaaacccttcattctcactcggaacatggctcaagccaaagtatttggagctggttatccaagtctgccaactatgacggtgagtgactggtatgagcaacatcggaaatatggagcattaccggatcagggaatagccaaggcagcaccagaggaattcagaaaagcagctcagcaacaggaagaacaagaagaaaaggaggaagaggatgatgaacaaacactccacagagcccgggagtgggatgactggaaggacacccatcctaggggctatgggaaccgacagaacatgggctgatcttcccacaacaccacaggactgcagggtgcacaactcccctgccaaggaaaaccatgcagtcctcccctccctggtctcctgcttcagctctgtacaacgagggcaaagatgctaaatcttgctttgcattcagtaaagtgtcaagtgattaagtgtgtatttgtaccctagatgatatgaaccagcagtcttgttttggcatcatcctcatcatgttgtattccagcttcttaagtggaaggaaaagagtgctgagaaatggctctgtataatctatggctatccgaattctctgaaaaaataataaaagtcccctctattatatgagcctgtacagaaaaaaaaaaaaaaaaaaaaa

SEQ ID NO: 12298 - DNA, 3007 bp, Homo sapiens
aaggagagagggagggcggagggcggaggggcggcgggaggagggcggggaggagcgctcttcctggttgggccctgccctgagctgccaccgggaagccagcctcagggactgcagcgacccccaaacacccctcccccaggatgtcggaggagatcatcacgccggtgtactgcactggggtgtcagcccaagtgcagaagcagcgggccagggagctgggcctgggccgccatgagaatgccatcaagtacctgggccaggattatgagcagctgcgggtgcgatgcctgcagagtgggaccctcttccgtgatgaggccttccccccggtaccccagagcctgggttacaaggacctgggtcccaattcctccaagacctatggcatcaagtggaagcgtcccacggaactgctgtcaaacccccagttcattgtggatggagctacccgcacagacatctgccagggagcactgggggactgctggctcttggcggccattgcctccctcactctcaacgacaccctcctgcaccgagtggttccgcacggccagagcttccagaatggctatgccggcatcttccatttccagctgtggcaatttggggagtgggtggacgtggtcgtggatgacctgctgcccatcaaggacgggaagctagtgttcgtgcactctgccgaaggcaacgagttctggagcgccctgcttgagaaggcctatgccaaggtaaatggcagctacgaggccctgtcagggggcagcacctcagagggctttgaggacttcacaggcggggttaccgagtggtacgagttgcgcaaggctcccagtgacctctaccagatcatcctcaaggcgctggagcggggctccctgctgggctgctccatagacatctccagcgttctagacatggaggccatcactttcaagaagttggtgaagggccatgcctactctgtgaccggggccaagcaggtgaactaccgaggccaggtggtgagcctgatccggatgcggaacccctggggcgaggtggagtggacgggagcctggagcgacagctcctcagagtggaacaacgtggacccatatgaacgggaccagctccgggtcaagatggaggacggggagttctggatgtcattccgagacttcatgcgggagttcacccgcctggagatctgcaacctcacacccgacgccctcaagagccggaccatccgcaaatggaacaccacactctacgaaggcacctggcggcgggggagcaccgcggggggctgccgaaactacccagccaccttctgggtgaaccctcagttcaagatccggctggatgagacggatgacccggacgactacggggaccgcgagtcaggctgcagcttcgtgctcgcccttatgcagaagcaccgtcgccgcgagcgccgcttcggccgcgacatggagactattggcttcgcggtctacgaggtccctccggagctggtgggccagccggccgtacacttgaagcgtgacttcttcctggccaatgcgtctcgggcgcgctcagagcagttcatcaacctgcgagaggtcagcacccgcttccgcctgccacccggggagtatgtggtggtgccctccaccttcgagcccaacaaggagggcgacttcgtgctgcgcttcttctcagagaagagtgctgggactgtggagctggatgaccagatccaggccaatctccccgatgagcaagtgctctcagaagaggagattgacgagaacttcaaggccctcttcaggcagctggcaggggaggacatggagatcagcgtgaaggagttgcggacaatcctcaataggatcatcagcaaacacaaagacctgcggaccaagggcttcagcctagagtcgtgccgcagcatggtgaacctcatggatcgtgatggcaatgggaagctgggcctggtggagttcaacatcctgtggaaccgcatccggaattacctgtccatcttccggaagtttgacctggacaagtcgggcagcatgagtgcctacgagatgcggatggccattgagtcggcaggcttcaagctcaacaagaagctgtacgagctcatcatcacccgctactcggagcccgacctggcggtcgactttgacaatttcgtttgctgcctggtgcggctagagaccatgttccgatttttcaaaactctggacacagatctggatggagttgtgacctttgacttgtttaagtggttgcagctgaccatgtttgcatgaggcagggactcggtcccccttgccgtgctcccctccctcctcgtctgccaagcctcgcctcctaccacaccacaccaggccaccccagctgcaagtgccttccttggagcagagaggcagcctcgtcctcctgtcccctctcctcccagccaccatcgttcatctgctccgggcagaactgtgtggcccctgcctgtgccagccatgggctcgggatggactccctgggccccacccattgccaagccaggaaggcagctttcgcttgttcctgcctcgggacagccccgggtttccccagcatcctgatgtgtcccctctccccacttcagaggccacccactcagcaccaccggcctggccttgcctgcagactataaactataaccactagctcgacacagtctgcagtccaggcgtgtggagccgcctcccggctcggggaggccccggggctgggaacgcctgtgccttcctgcgccgaagccaacgccccctctgtccttccctggccctgctgccgaccaggagctgcccagcctgtgggcggtcggccttccctccttcgctccttttttatattagtgattttaaaggggactcttcagggacttgtgtactggttatgggggtgccagaggcactaggcttggggtggggaggtcccgtgttccatatagaggaaccccaaataataaaaggccccacatctgtctgtg

SEQ ID NO: 12299 - DNA, 3300 bp, Homo sapiens
atggcagtagccccgcgactgtttggggggctctgcttccgtttccgggaccagaatccggaagtggctgttgaggggcgtcttccaatctcgcacagctgcgttggctgtagaagagaacggacggcgatggcgacggtcgcagcaaatccagctgctgctgcggcggctgtggcggcggcagcggcggtgactgaggatagagagccacagcacgaggagctgccaggcctggacagccagtggcgccagatagaaaacggcgagagtgggcgagaacgtccactgcgggccggcgaaagctggttccttgtggagaagcactggtataagcagtgggaggcatacgtgcagggaggggaccaggactccagcaccttccctggctgcatcaacaatgccacactctttcaagatgagataaactggcgcctcaaggagggactggtggaaggcgaggattatgtgctgctcccagcagctgcttggcattacctggtcagctggtatggtctagagcatggccagccacccattgaacgcaaggtcatagagctgcccaacatccagaaggtcgaagtgtacccagtagaactgctgcttgtccggcacaatgatttgggcaaatctcacactgttcagttcagccataccgattctattggcctagtattgcgcacagctcgggagcggtttctggtggagccccaggaagacactcggctttgggccaagaactcagaaggctctttggataggttgtatgacacacacatcacggttctcgatgcggcccttgagactgggcagttgatcatcatggagacccgcaagaaagatggcacttggcccagcgcacagctgcatgtcatgaacaacaacatgtcggaagaggatgaggacttcaagggtcagccaggcatctgtggcctcaccaatctgggcaacacgtgcttcatgaactcggccctgcagtgcctcagcaatgtgccacagctcaccgagtacttcctcaacaactgctacctggaggagctcaacttccgcaacccactgggcatgaagggtgagatcgcagaggcctatgcagacctggtgaagcaggcgtggtctggccaccaccgctccattgtgccacatgtgttcaagaacaaggttggccattttgcatcccaatttctgggctaccagcagcatgactctcaggagctgctgtcattcctcctggacgggctgcatgaggaccttaatcgggtgaagaagaaggagtatgtggagctgtgcgatgctgctgggcgaccggatcaggaggtggcacaggaggcatggcaaaaccacaaacggcggaacgattctgtgatcgtggacactttccacggcctcttcaagtccacgctggtgtgccccgattgtggcaatgtatctgtgaccttcgaccccttctgctacctcagtgttccactgcctatcagccacaagagggtcttggaggtcttctttatccccatggatccgcgccgcaagccagagcagcaccggctcgtggtccccaagaaaggcaagatctcggatctatgtgtggctctgtccaaacacacgggcatctcgccagagaggatgatggtggctgatgtcttcagtcaccgcttctataagctctatcagctagaggagcctctgagcagcatcttggaccgtgatgatatcttcgtctatgaggtgtcaggtcgcattgaggccattgagggctcaagagaggacatcgtggttcctgtctacctgcgggagcgcacccctgcccgtgactacaacaactcctactacggcctgatgctttttggacaccccctcctggtatcagtgccccgggaccgcttcacctgggagggcctgtataacgtcctgatgtaccggctctcacgctacgtgaccaaacccaactcagatgatgaggacgatggggatgagaaagaagatgacgaggaggataaagatgacgtccctgggccctcaactgggggcagcctccgagaccctgagccagagcaggctgggcccagctctggagtcacgaacaggtgcccgttcctcctggacaattgccttggcacatctcagtggcccccaaggcgacgacgcaagcagctgttcaccctgcagacggtgaactccaatgggaccagcgaccgcacaacctcccctgaagaagtccatgcccagccgtacattgctatcgactgggagccagagatgaagaagcgttactatgacgaggtagaggctgagggctacgtgaagcatgactgcgtcgggtacgtgatgaagaaggctcccgtgcggctgcaggagtgcattgagctcttcaccactgtggagaccctggagaaggaaaacccctggtactgcccttcctgcaagcagcaccagctggcaaccaagaagctggacctgtggatgctgccggagattctcatcatccacctgaaacgcttttcctacaccaagttctcccgagagaagctggacaccctcgtggagtttcctatccgggacctggacttctctgagtttgtcatccagccacagaatgagtcgaatccggagctgtacaaatatgacctcatcgcggtttccaaccattatgggggcatgcgtgatggacactacacaacatttgcctgcaacaaggacagcggccagtggcactactttgatgacaacagcgtctcccctgtcaatgagaatcagatcgagtccaaggcagcctatgtcctcttctaccaacgccaggacgtggcgcgacgcctgctgtccccggccggctcatctggcgccccagcctcccctgcctgcagctccccacccagctctgagttcatggatgttaattgagagccctgggtcctgccacagaaaaaaaaaaaaaaaagccctctctgcaatctcgcttctcgtgtccgccccgcttctcttattcgtgttaggtgcccccgccaggcattgcaggcttagtcgtggctactgttctcctgtgccgctgcatcgctctctcccgggaaagaacaggtcgtgtctcctcctagcagtgcgcgccccgcctgtgtttgcccttccagcagtgaccctcccttctagtctttatttatggtcgtgcccttccctctcctcagcccagagtgttctgcgtgggtggtgatgggggttcacctgaacacagagtgtattttcttattgaggccctgtaccttctgctgtgtgtgtgtatatataaagcaccagtctgctccccaaaaaaaaaaa

SEQ ID NO: 12300 - DNA, 2150 bp, Homo sapiens
ctcgagccacgaaggccccgctgtcctgtctagcagatacttgcacggtttacagaaattcggtccctgggtcgtgtcaggaaactggaaaaaaggtcataagcatgaagcgcagttcagtttccagcggtggtgctggccgcctctccatgcaggagttaagatcccaggatgtaaataaacaaggcctctatacccctcaaaccaaagagaaaccaacctttggaaagttgagtataaacaaaccgacatctgaaagaaaagtctcgctatttggcaaaagaactagtggacatggatcccggaatagtcaacttggtatattttccagttctgagaaaatcaaggacccgagaccacttaatgacaaagcattcattcagcagtgtattcgacaactctgtgagtttcttacagaaaatggttatgcacataatgtgtccatgaaatctctacaagctccctctgttaaagacttcctgaagatcttcacatttctttatggcttcctgtgcccctcatacgaacttcctgacacaaagtttgaagaagaggttccaagaatctttaaagaccttgggtatccttttgcactatccaaaagctccatgtacacagtgggggctcctcatacatggcctcacattgtggcagccttagtttggctaatagactgcatcaagatacatactgccatgaaagaaagctcacctttatttgatgatgggcagccttggggagaagaaactgaagatggaattatgcataataagttgtttttggactacaccataaaatgctatgagagttttatgagtggtgccgacagctttgatgagatgaatgcagagctgcagtcaaaactgaaggatttatttaatgtggatgcttttaagctggaatcattagaagcaaaaaacagagcattgaatgaacagattgcaagattggaacaagaaagagaaaaagaaccgaatcgtctagagtcgttgagaaaactgaaggcttccttacaaggagatgttcaaaagtatcaggcatacatgagcaatttggagtctcattcagccattcttgaccagaaattaaatggtctcaatgaggaaattgctagagtagaactagaatgtgaaacaataaaacaggagaacactcgactacagaatatcattgacaaccagaagtactcagttgcagacattgagcgaataaatcatgaaagaaatgaattgcagcagactattaataaattaaccaaggacctggaagctgaacaacagaagttgtggaatgaggagttaaaatatgccagaggcaaagaagcgattgaaacacaattagcagagtatcacaaattggctagaaaattaaaacttattcctaaaggtgctgagaattccaaaggttatgactttgaaattaagtttaatcccgaggctggtgccaactgccttgtcaaatacagggctcaagtttatgtacctcttaaggaactcctgaatgaaactgaagaagaaattaataaagccctaaataaaaaaatgggtttggaggatactttagaacaattgaatgcaatgataacagaaagcaagagaagtgtgagaactctgaaagaagaagttcaaaagctggatgatctttaccaacaaaaaattaaggaagcagaggaagaggatgaaaaatgtgccagtgagcttgagtccttggagaaacacaagcacctgctagaaagtactgttaaccaggggctcagtgaagctatgaatgaattagatgctgttcagcgggaataccaactagttgtgcaaaccacgactgaagaaagacgaaaagtgggaaataacttgcaacgtctgttagagatggttgctacacatgttgggtctgtagagaaacatcttgaggagcagattgctaaagttgatagagaatatgaagaatgcatgtcagaagatctctcggaaaatattaaagagattagagataagtatgagaagaaagctactctaattaagtcttctgaagaatgaagataaaatgttgatcatgtatatatatccatagtgaataaaattgtctcagtaaaaaaaaaaaaaaaaaaaaaaaaaaaaaaaaaaaaaaaaaaaaaaaaaaaaaaaaaaaaaaaa

SEQ ID NO: 12301 - DNA, 8449 bp, Homo sapiens
gcgacctccggcgccattttgtagagaaacaagcggagttaaccgaagagggggtcgaggagagccggagtcggggacccaggagtttcctgtgtccagcgctgccggagccgcctgaggtgccatgtttcagaacagagtaagacccctggtaaagaagaactgaagatattatacagataccagatatagcctaattacaaagaaagcattaacctgcctctgaggtgactaaaggggaataatggtgattttgcgccgggctcggccgcctgcttccgccccaaccagcaatgaatcttgactcgctctcgctggccttgtctcaaatcagctacctggtggacaatttaaccaagaaaaattaccgagccagccagcaggaaatacagcatattgtgaatcggcacggtcctgaggcagacaggcatttattacgctgcctattttcgcatgtggatttcagtggcgatggtaaaagcagtggcaaagatttccatcagactcagtttctgattcaggagtgtgcgttgctgattacaaagccaaattttatctcgacgctgtcctatgccattgataatccattgcactatcagaagagtttaaagcctgcaccccacttatttgcccagctgagtaaagtgctcaaattaagcaaagtacaagaggtaatttttggccttgccctgttgaattcttccagctcagatcttagaggtttcgctgcccagtttatcaaacagaagcttccagatcttctgcgttcttacattgacgcagacgtcagtggaaatcaagaaggtggcttccaagatatagcaatagaggtcctacacctcctcctctcccatctcctctttgggcagaagggagcctttggagttggacaagaacagatagacgcttttcttaagacgctgcgcagagattttccccaagaacgctgtcccgtggtgctcgcaccacttttataccctgaaaaacgggacattctaatggacaggatcctgcctgattccggaggggtagctaaaaccatgatggagagctctttggctgatttcatgcaagaagtaggctatggcttttgtgcaagtattgaagaatgtcgcaatataatcgtgcagtttggtgttcgggaggtcacagctgcccaggttgcaagggttttgggaatgatggctcgaactcattcaggattaacagatggcattccattacagagtatttctgctccgggcagtgggatctggagtgatgggaaagataaaagtgatggagcacaggcacacacatggaatgtagaagtcttgattgacgttcttaaagaactgaatccaagtttgaatttcaaggaagtaacttatgaactggaccatcctggatttcaaattcgtgacagtaaaggacttcataatgtggtttatggcattcagaggggtttgggtatggaagtgttcccagtagacctcatatatagaccttggaaacatgctgaaggccagctctccttcattcaacattcccttataaatccagagatcttctgttttgctgactatccctgtcatactgttgccactgatattctgaaagcaccaccagaggatgacaatcgagaaattgccacatggaagagcttggatttgattgaatctctgctgaggcttgcagaggttgggcagtatgagcaagtcaaacagctcttcagcttccctatcaaacactgtccagacatgctggtattggccttactacaaattaacacctcttggcataccttgcgccatgaacttatctccactctgatgccaattttccttggaaaccatcctaactcagctattattttgcactatgcatggcatgggcagggacagtctccctcaattcgccaacttatcatgcatgcaatggcagaatggtacatgagaggggagcagtatgatcaggccaaattgtctcgaatacttgatgtggcccaggacttgaaggccttgtcaatgctgctaaatggtactccatttgcctttgttattgaccttgctgcacttgcttcacgtcgtgaatacctcaaacttgataagtggctcacagataaaattcgagagcatggggagccttttatccaggcgtgtatgacttttttaaagagacggtgtccttctattttgggcggacttgccccagaaaaagaccagcccaaaagtgctcaacttcctccagaaactttggcgacaatgttggcctgtctgcaagcttgtgcagggagtgtttctcaggagctatcagaaactatcctcaccatggtagccaattgcagtaatgttatgaataaggccagacaaccaccacctggagttatgccaaaaggacgtcctcctagtgctagcagcttagatgccatttctcctgttcagattgaccctcttgctggaatgacatctcttagtataggtggttcagctgcccctcacacccagagtatgcagggttttcctccaaatttgggttctgcattcagtacccctcagtcaccagcaaaagcatttccacccctttcaacccccaatcagaccactgcattcagtggtattggaggactttcatcacagcttccagtaggtggtcttggcacaggcagcctgactggtataggaactggtgctcttggactccctgcagtgaataacgacccttttgtacagaggaaactgggcacctctggactgaatcagcctacattccagcagagtaagatgaaaccttcggacttgtctcaggtgtggccagaggcaaaccagcactttagtaaagagatagatgatgaagcaaacagctatttccagcgaatatataatcatccaccacatccaaccatgtctgttgatgaggtattagaaatgctgcagagatttaaagactctactataaagagggaacgagaagtatttaactgtatgctaaggaacttgtttgaagaatatcgtttttttccccagtatcctgataaagagttacatataacagcctgcctatttggtggtataattgagaaaggactggtcacttacatggcactaggtctggctctacgatatgttcttgaagccttacgcaagccttttggatccaaaatgtattatttcgggattgctgcactagatagatttaaaaacagattgaaggactatccccagtattgtcagcatttggcttctatcagtcactttatgcaatttccacatcatttacaggagtatattgagtatggacagcagtctagagatcctcctgtgaaaatgcaaggctctatcacaacccctggaagtattgcactggctcaggcccaggctcaggcccaggttccagcaaaagctcctcttgctggtcaagttagcactatggtaaccacctcaacaactaccactgttgctaaaacggttacggtcaccaggccaactggagtcagctttaagaaagatgtgccaccttctattaatactacaaatatagatacgttgcttgtggccacagatcaaactgagagaattgtggagcccccagaaaatatccaggagaaaattgcttttattttcaataatctctcacagtcaaatatgacacaaaaggttgaagagctaaaggaaacggtgaaagaagaatttatgccttgggtttcacagtatctggttatgaagagagtcagtattgagccaaactttcatagcctgtattcaaacttccttgacacgctgaagaatcctgaatttaacaagatggttctgaatgagacctacagaaacattaaagtgctcctgacctctgataaagctgcagccaatttctcagatcgttctttgctgaagaacttgggacattggctaggaatgatcacattagctaaaaacaaacccatcttacacactgacttggatgtgaaatcattgctgctagaggcttatgttaaaggacaacaagaattgctctatgtagtgccctttgttgccaaagtcttagaatctagcattcgtagtgtggtttttaggccaccaaacccttggacaatggcaattatgaatgtattagctgagctacatcaggagcatgacttaaagttaaacttgaagtttgaaatcgaggttctctgcaagaaccttgcattagacatcaatgagctaaaacctggaaacctcctaaaggataaagatcgcctgaagaatttagatgagcaactctctgctccaaagaaagatgtcaagcagccagaagaactccctcccatcacaaccacaacaacttctactacaccagctaccaacaccacttgtacagccacggttccaccacagccacagtacagctaccacgacatcaatgtctattcccttgcgggcttggcaccacacattactctgaatccaacaattcccttgtttcaggcccatccacagttgaagcagtgtgtgcgtcaggcaattgaacgggctgtccaggagctggtccatcctgtggtggatcgatcaattaagattgccatgactacttgtgagcaaatagtcaggaaggattttgccctggattcggaggaatctcgaatgcgaatagcagctcatcacatgatgcgtaacttgacagctggaatggctatgattacatgcagggaacctttgctcatgagcatatctaccaacttaaaaaacagttttgcctcagcccttcgtactgcttccccacaacaaagagaaatgatggatcaggcagctgctcaattagctcaggacaattgtgagttggcttgctgttttattcagaagactgcagtagaaaaagcaggccctgagatggacaagagattagcaactgaatttgagctgagaaaacatgctaggcaagaaggacgcagatactgtgatcctgttgttttaacatatcaagctgaacggatgccagagcaaatcaggctgaaagttggtggtgtggacccaaagcagttggctgtttacgaagagtttgcacgcaatgttcctggcttcttacctacaaatgacttaagtcagcccacgggatttttagcccagcccatgaagcaagcttgggcaacagatgatgtagctcagatttatgataagtgtattacagaactggagcaacatctacatgccatcccaccaactttggccatgaaccctcaagctcaggctcttcgaagtctcttggaggttgtagttttatctcgaaactctcgggatgccatagctgctcttggattgctccaaaaggctgtagagggcttactagatgccacaagtggtgctgatgctgaccttctgctgcgctacagggaatgccacctcttggtcctaaaagctctgcaggatggccgggcatatgggtctccatggtgcaacaaacagatcacaaggtgcctaattgaatgtcgagatgaatataaatataatgtggaggctgtggagctgctaattcgcaatcatttggttaatatgcagcagtatgatcttcacctagcgcagtcaatggagaatggcttaaactacatggctgtggcatttgctatgcagttagtaaaaatcctgctggtggatgaaaggagtgttgctcatgttactgaggcagatctgttccacaccattgaaaccctcatgaggattaatgctcattccagaggcaatgctccagaaggattgccccagctgatggaagtagtgcgatccaactatgaagcaatgattgatcgtgctcatggaggcccaaactttatgatgcattctgggatctctcaagcctcagagtatgatgaccctccaggcctgagggagaaggcagagtatcttctgagggaatgggtgaatctctaccattcagcagcagctggccgcgacagtaccaaagctttctctgcatttgttggacagatgcaccagcaaggaatactgaagaccgatgatctcataacaaggttctttcgtctgtgtactgaaatgtgtgttgaaatcagttaccgtgctcaggctgagcagcagcacaatcctgctgccaatcccaccatgatccgagccaagtgctatcacaacctggatgcctttgttcgactcattgcactgctcgtgaaacactcaggggaggccaccaacactgtcacaaagattaatctgctgaacaaggtccttggtatagtagtgggagttctccttcaggatcatgatgttcgtcagagtgaatttcagcaacttccctaccatcgaatttttatcatgcttctcttggaactcaatgcacctgagcatgtgttggaaaccattaatttccagacacttacagctttctgcaatacattccacatcttgaggcctaccaaagctcctggctttgtatatgcctggcttgaactgatttcccatcggatatttattgcaagaatgctggcacatacgccacagcagaaggggtggcctatgtatgcacagctactgattgatttattcaaatatttagcgcctttccttagaaatgtggaactcaccaaacctatgcaaatcctctacaagggcactttaagagtgctgctggttcttttgcatgatttcccagagttcctttgtgattaccattatgggttctgtgatgtgatcccacctaattgtatccagttaagaaatttgatcctgagtgcctttccaagaaacatgaggctccccgacccattcactcctaatctaaaggtggacatgttgagtgaaattaacattgctccccggattctcaccaatttcactggagtaatgccacctcagttcaaaaaggatttggattcctatcttaaaactcgatcaccagtcactttcctgtctgatctgcgcagcaacctacaggtatccaatgaacctgggaatcgctacaacctccagctcatcaatgcactggtgctctatgtcgggactcaggccattgcgcacatccacaacaagggcagcacaccttcaatgagcaccatcactcactcagcacacatggatatcttccagaatttggctgtggacttggacactgagggtcgctatctctttttgaatgcaattgcaaatcagctccggtacccaaatagccacactcactacttcagttgcaccatgctgtacctttttgcagaggccaatacggaagccatccaagaacagatcacaagagttctcttggaacggttgattgtaaataggccacatccttggggtcttcttattaccttcattgagctgattaaaaacccagcgtttaagttctggaaccatgaatttgtacactgtgccccagaaatcgaaaagttattccagtcggtcgcacagtgctgcatgggacagaagcaggcccagcaagtaatggaagggacaggtgccagttagacgaaactgcatctctgttgtacgtgtcagtctagaggtctcactgcaccgagttcataaactgactgaagaatcctttcagctcttcctgactttcccagccctttggtttgtgggtatctgccccaactactgttgggatcagcctcctgtcttatgtgggcacgttccaaagtttaaatgcatttttttgactcttggccaaaatttagaagatgctgtgaatatcattttgaacttgtgtaaatacatgaaagagaaaacctttgtctggaacttcttggctttgtgcaagctgtgtccaaggcaagtacataaactggtaccttgtaatgaagaggcagctgatgccatgcacttgtctgagggcatagctccatgtcttctgacattcctggtgtcccaaagaatagcaaaaagccagtttgaatattatgtaacttatttttttaatgtggacaggggaccttgaaaatcactaagttattaaaaatgtggatgtgctagaattggatatgtccaggaacatgggaagggctcactattggaatcccatgagtttccattttgtctctacccaaacgtattccaaagctgactgcatttgtaccatcttatttcttttggggattatacacctcagccgcctgagatgggggtcagctctttatataaagggaaaccagaccaggcctaaagcccacccctaccctcacccccccaatcctctcctgaaacttaaaaacagtgggaatataggaaagggaaccaaatctcattaattaattgttctcccccattaccccactgaatgaatggccatacaggctaagctgaataatgacaaagttgaaaggaccaatacagccccttttataaggattttgaatgttttgcaaatgtattggtccctgtgttgtattttgtagccttttcctgggcttcagctcccctacttcttgtatgtgtatgcatactgtagctaaccattaaagtcatgacacacaaaaaaaaaaaaaaaaaaa

SEQ ID NO: 12302 - DNA, 2316 bp, Homo sapiens
actatggcggcgcccatgcagcccagcgcgttgtgggctcccgccggggtcccccgcggctgtcgccgccgcctacgccgctgcctccgccttcctgccccgcgtcgggccgggcgccacctcccccctgcctccctctccgctgtggtcatttaggaaatcgtaaatcatgtgaagatgggactcttggtatttgtgcgcaatctgctgctagccctctgcctctttctggtactgggatttttgtattattctgcgtggaagctacacttactccagtgggaggaggactccagtaagtatagtcactctagctcaccccaggagaagcctgttgcagattcagtggttctttcctttgactccgctggacaaacactaggctcagagtatgatcggttgggcttcctcctgaatctggactctaaactgcctgctgaattagccaccaagtacgcaaacttttcagagggagcttgcaagcctggctatgcttcagccttgatgacggccatcttcccccggttctccaagccagcacccatgttcctggatgactcctttcgcaagtgggctagaatccgggagttcgtgccgccttttgggatcaaaggtcaagacaatctgatcaaagccatcttgtcagtcaccaaagagtaccgcctgacccctgccttggacagcctccgctgccgccgctgcatcatcgtgggcaatggaggcgttcttgccaacaagtctctggggtcacgaattgacgactatgacattgtggtgagactgaattcagcaccagtgaaaggctttgagaaggacgtgggcagcaaaacgacactgcgcatcacctaccccgagggcgccatgcagcggcctgagcagtacgagcgcgattctctctttgtcctcgccggcttcaagtggcaggactttaagtggttgaaatacatcgtctacaaggagagagtgagtgcatcggatggcttctggaaatctgtggccactcgagtgcccaaggagccccctgagattcgaatcctcaacccatatttcatccaggaggccgccttcaccctcattggcctgcccttcaacaatggcctcatgggccgggggaacatccctacccttggcagtgtggcagtgaccatggcactacacggctgtgacgaggtggcagtcgcaggatttggctatgacatgagcacacccaacgcacccctgcactactatgagaccgttcgcatggcagccatcaaagagtcctggacgcacaatatccagcgagagaaagagtttctgcggaagctggtgaaagctcgcgtcatcactgatctaagcagtggcatctgagtgggcccagcacatggccatagaggcccaggcaccaccaggagcagcagccagcaccacctacacaggagtcttcagacccagagaaggacggtgccaagggccccaggggcagcaaggccttggtggagcagccagagctgtgcctgctcagcagccagtctcagagaccagcactcagcctcattcagcatgggtccttgatgccagagggccagcaggctcctggctgtgcccagcaggcccagcatgcaggtggtgggacactgggcagcaaggctgctgccggaatcacttctccaatcagtgtttggtgtattatcattttgtgaatttgggtaggggggagggtagggataatttatttttaaataaggttggagatgtcaagttgggttcacttgccatgcaggaagaggcccactagagggcccatcaggcagtgttacctgttagctccctgtggggcaggagtgccaggaccagcctgtaccttgctgtggggctacaggatggtgggcaggatctcaagccagccccctccagctcatgacactgtttggcctttcttggggagaaggcggggtattcccactcaccagccctagctgtcccatggggaaaccctggagccatcccttcggagccaacaagaccgccccagggctatagcagaaagaactttaaagctcaggagggtgacgcccagctccgcctgctgggaagagctcccctccacagctgcagctgatccataggactaccgcaggcccggactcaccaacttgccacatgttctaggtttcagcaacaagactgccaggtggttgggttctgcctttagcctggaccaaagggaagtgaggcccaaggagcttacccaagctgtggcagccgtcccaggccacccccatggaagcaataaagctcttccctgaaaaaaaaaaaaaaaaaaaaaaaaaaaaa

SEQ ID NO: 12303 - DNA, 2478 bp, Homo sapiens
actatggcggcgcccatgcagcccagcgcgttgtgggctcccgccggggtcccccgcggctgtcgccgccgcctacgccgctgcctccgccttcctgccccgcgtcgggccgggcgccacctcccccctgcctccctctccgctgtggtcatttaggaaatcgtaaatcatgtgaagatgggactcttggtatttgtgcgcaatctgctgctagccctctgcctctttctggtactgggatttttgtattattctgcgtggaagctacacttactccagtgggaggaggactccagtaagtatagtcactctagctcaccccaggagaagcctgttgcagattcagtggttctttcctttgactccgctggacaaacactaggctcagagtatgatcggttgggcttcctcctgaatctggactctaaactctcaccgaggactctctgcacggtggtttttggccttgactgcatattggaatcacctggagagcctaaaaaattactgatgcctgcatcccaccctctagagattttgaagtcactgagcgaggacgcagcctttgcattaggatttttaaagctgcccaggcctgctgaattagccaccaagtacgcaaacttttcagagggagcttgcaagcctggctatgcttcagccttgatgacggccatcttcccccggttctccaagccagcacccatgttcctggatgactcctttcgcaagtgggctagaatccgggagttcgtgccgccttttgggatcaaaggtcaagacaatctgatcaaagccatcttgtcagtcaccaaagagtaccgcctgacccctgccttggacagcctccgctgccgccgctgcatcatcgtgggcaatggaggcgttcttgccaacaagtctctggggtcacgaattgacgactatgacattgtggtgagactgaattcagcaccagtgaaaggctttgagaaggacgtgggcagcaaaacgacactgcgcatcacctaccccgagggcgccatgcagcggcctgagcagtacgagcgcgattctctctttgtcctcgccggcttcaagtggcaggactttaagtggttgaaatacatcgtctacaaggagagagtgagtgcatcggatggcttctggaaatctgtggccactcgagtgcccaaggagccccctgagattcgaatcctcaacccatatttcatccaggaggccgccttcaccctcattggcctgcccttcaacaatggcctcatgggccgggggaacatccctacccttggcagtgtggcagtgaccatggcactacacggctgtgacgaggtggcagtcgcaggatttggctatgacatgagcacacccaacgcacccctgcactactatgagaccgttcgcatggcagccatcaaagagtcctggacgcacaatatccagcgagagaaagagtttctgcggaagctggtgaaagctcgcgtcatcactgatctaagcagtggcatctgagtgggcccagcacatggccatagaggcccaggcaccaccaggagcagcagccagcaccacctacacaggagtcttcagacccagagaaggacggtgccaagggccccaggggcagcaaggccttggtggagcagccagagctgtgcctgctcagcagccagtctcagagaccagcactcagcctcattcagcatgggtccttgatgccagagggccagcaggctcctggctgtgcccagcaggcccagcatgcaggtggtgggacactgggcagcaaggctgctgccggaatcacttctccaatcagtgtttggtgtattatcattttgtgaatttgggtaggggggagggtagggataatttatttttaaataaggttggagatgtcaagttgggttcacttgccatgcaggaagaggcccactagagggcccatcaggcagtgttacctgttagctccctgtggggcaggagtgccaggaccagcctgtaccttgctgtggggctacaggatggtgggcaggatctcaagccagccccctccagctcatgacactgtttggcctttcttggggagaaggcggggtattcccactcaccagccctagctgtcccatggggaaaccctggagccatcccttcggagccaacaagaccgccccagggctatagcagaaagaactttaaagctcaggagggtgacgcccagctccgcctgctgggaagagctcccctccacagctgcagctgatccataggactaccgcaggcccggactcaccaacttgccacatgttctaggtttcagcaacaagactgccaggtggttgggttctgcctttagcctggaccaaagggaagtgaggcccaaggagcttacccaagctgtggcagccgtcccaggccacccccatggaagcaataaagctcttccctgaaaaaaaaaaaaaaaaaaaaaaaaaaaaa

SEQ ID NO: 12304 - DNA, 2433 bp, Homo sapiens
actatggcggcgcccatgcagcccagcgcgttgtgggctcccgccggggtcccccgcggctgtcgccgccgcctacgccgctgcctccgccttcctgccccgcgtcgggccgggcgccacctcccccctgcctccctctccgctgtggtcatttaggaaatcgtaaatcatgtgaagatgggactcttggtatttgtgcgcaatctgctgctagccctctgcctctttctggtactgggatttttgtattattctgcgtggaagctacacttactccagtgggaggaggactccaattcagtggttctttcctttgactccgctggacaaacactaggctcagagtatgatcggttgggcttcctcctgaatctggactctaaactctcaccgaggactctctgcacggtggtttttggccttgactgcatattggaatcacctggagagcctaaaaaattactgatgcctgcatcccaccctctagagattttgaagtcactgagcgaggacgcagcctttgcattaggatttttaaagctgcccaggcctgctgaattagccaccaagtacgcaaacttttcagagggagcttgcaagcctggctatgcttcagccttgatgacggccatcttcccccggttctccaagccagcacccatgttcctggatgactcctttcgcaagtgggctagaatccgggagttcgtgccgccttttgggatcaaaggtcaagacaatctgatcaaagccatcttgtcagtcaccaaagagtaccgcctgacccctgccttggacagcctccgctgccgccgctgcatcatcgtgggcaatggaggcgttcttgccaacaagtctctggggtcacgaattgacgactatgacattgtggtgagactgaattcagcaccagtgaaaggctttgagaaggacgtgggcagcaaaacgacactgcgcatcacctaccccgagggcgccatgcagcggcctgagcagtacgagcgcgattctctctttgtcctcgccggcttcaagtggcaggactttaagtggttgaaatacatcgtctacaaggagagagtgagtgcatcggatggcttctggaaatctgtggccactcgagtgcccaaggagccccctgagattcgaatcctcaacccatatttcatccaggaggccgccttcaccctcattggcctgcccttcaacaatggcctcatgggccgggggaacatccctacccttggcagtgtggcagtgaccatggcactacacggctgtgacgaggtggcagtcgcaggatttggctatgacatgagcacacccaacgcacccctgcactactatgagaccgttcgcatggcagccatcaaagagtcctggacgcacaatatccagcgagagaaagagtttctgcggaagctggtgaaagctcgcgtcatcactgatctaagcagtggcatctgagtgggcccagcacatggccatagaggcccaggcaccaccaggagcagcagccagcaccacctacacaggagtcttcagacccagagaaggacggtgccaagggccccaggggcagcaaggccttggtggagcagccagagctgtgcctgctcagcagccagtctcagagaccagcactcagcctcattcagcatgggtccttgatgccagagggccagcaggctcctggctgtgcccagcaggcccagcatgcaggtggtgggacactgggcagcaaggctgctgccggaatcacttctccaatcagtgtttggtgtattatcattttgtgaatttgggtaggggggagggtagggataatttatttttaaataaggttggagatgtcaagttgggttcacttgccatgcaggaagaggcccactagagggcccatcaggcagtgttacctgttagctccctgtggggcaggagtgccaggaccagcctgtaccttgctgtggggctacaggatggtgggcaggatctcaagccagccccctccagctcatgacactgtttggcctttcttggggagaaggcggggtattcccactcaccagccctagctgtcccatggggaaaccctggagccatcccttcggagccaacaagaccgccccagggctatagcagaaagaactttaaagctcaggagggtgacgcccagctccgcctgctgggaagagctcccctccacagctgcagctgatccataggactaccgcaggcccggactcaccaacttgccacatgttctaggtttcagcaacaagactgccaggtggttgggttctgcctttagcctggaccaaagggaagtgaggcccaaggagcttacccaagctgtggcagccgtcccaggccacccccatggaagcaataaagctcttccctgaaaaaaaaaaaaaaaaaaaaaaaaaaaaa

SEQ ID NO: 12305 - DNA, 2223 bp, Homo sapiens
actatggcggcgcccatgcagcccagcgcgttgtgggctcccgccggggtcccccgcggctgtcgccgccgcctacgccgctgcctccgccttcctgccccgcgtcgggccgggcgccacctcccccctgcctccctctccgctgtggtcatttaggaaatcgtaaatcatgtgaagatgggactcttggtatttgtgcgcaatctgctgctagccctctgcctctttctggtactgggatttttgtattattctgcgtggaagctacacttactccagtgggaggaggactccaagtatgatcggttgggcttcctcctgaatctggactctaaactgcctgctgaattagccaccaagtacgcaaacttttcagagggagcttgcaagcctggctatgcttcagccttgatgacggccatcttcccccggttctccaagccagcacccatgttcctggatgactcctttcgcaagtgggctagaatccgggagttcgtgccgccttttgggatcaaaggtcaagacaatctgatcaaagccatcttgtcagtcaccaaagagtaccgcctgacccctgccttggacagcctccgctgccgccgctgcatcatcgtgggcaatggaggcgttcttgccaacaagtctctggggtcacgaattgacgactatgacattgtggtgagactgaattcagcaccagtgaaaggctttgagaaggacgtgggcagcaaaacgacactgcgcatcacctaccccgagggcgccatgcagcggcctgagcagtacgagcgcgattctctctttgtcctcgccggcttcaagtggcaggactttaagtggttgaaatacatcgtctacaaggagagagtgagtgcatcggatggcttctggaaatctgtggccactcgagtgcccaaggagccccctgagattcgaatcctcaacccatatttcatccaggaggccgccttcaccctcattggcctgcccttcaacaatggcctcatgggccgggggaacatccctacccttggcagtgtggcagtgaccatggcactacacggctgtgacgaggtggcagtcgcaggatttggctatgacatgagcacacccaacgcacccctgcactactatgagaccgttcgcatggcagccatcaaagagtcctggacgcacaatatccagcgagagaaagagtttctgcggaagctggtgaaagctcgcgtcatcactgatctaagcagtggcatctgagtgggcccagcacatggccatagaggcccaggcaccaccaggagcagcagccagcaccacctacacaggagtcttcagacccagagaaggacggtgccaagggccccaggggcagcaaggccttggtggagcagccagagctgtgcctgctcagcagccagtctcagagaccagcactcagcctcattcagcatgggtccttgatgccagagggccagcaggctcctggctgtgcccagcaggcccagcatgcaggtggtgggacactgggcagcaaggctgctgccggaatcacttctccaatcagtgtttggtgtattatcattttgtgaatttgggtaggggggagggtagggataatttatttttaaataaggttggagatgtcaagttgggttcacttgccatgcaggaagaggcccactagagggcccatcaggcagtgttacctgttagctccctgtggggcaggagtgccaggaccagcctgtaccttgctgtggggctacaggatggtgggcaggatctcaagccagccccctccagctcatgacactgtttggcctttcttggggagaaggcggggtattcccactcaccagccctagctgtcccatggggaaaccctggagccatcccttcggagccaacaagaccgccccagggctatagcagaaagaactttaaagctcaggagggtgacgcccagctccgcctgctgggaagagctcccctccacagctgcagctgatccataggactaccgcaggcccggactcaccaacttgccacatgttctaggtttcagcaacaagactgccaggtggttgggttctgcctttagcctggaccaaagggaagtgaggcccaaggagcttacccaagctgtggcagccgtcccaggccacccccatggaagcaataaagctcttccctgaaaaaaaaaaaaaaaaaaaaaaaaaaaaa

SEQ ID NO: 12306 - DNA, 2271 bp, Homo sapiens
actatggcggcgcccatgcagcccagcgcgttgtgggctcccgccggggtcccccgcggctgtcgccgccgcctacgccgctgcctccgccttcctgccccgcgtcgggccgggcgccacctcccccctgcctccctctccgctgtggtcatttaggaaatcgtaaatcatgtgaagatgggactcttggtatttgtgcgcaatctgctgctagccctctgcctctttctggtactgggatttttgtattattctgcgtggaagctacacttactccagtgggaggaggactccaattcagtggttctttcctttgactccgctggacaaacactaggctcagagtatgatcggttgggcttcctcctgaatctggactctaaactgcctgctgaattagccaccaagtacgcaaacttttcagagggagcttgcaagcctggctatgcttcagccttgatgacggccatcttcccccggttctccaagccagcacccatgttcctggatgactcctttcgcaagtgggctagaatccgggagttcgtgccgccttttgggatcaaaggtcaagacaatctgatcaaagccatcttgtcagtcaccaaagagtaccgcctgacccctgccttggacagcctccgctgccgccgctgcatcatcgtgggcaatggaggcgttcttgccaacaagtctctggggtcacgaattgacgactatgacattgtggtgagactgaattcagcaccagtgaaaggctttgagaaggacgtgggcagcaaaacgacactgcgcatcacctaccccgagggcgccatgcagcggcctgagcagtacgagcgcgattctctctttgtcctcgccggcttcaagtggcaggactttaagtggttgaaatacatcgtctacaaggagagagtgagtgcatcggatggcttctggaaatctgtggccactcgagtgcccaaggagccccctgagattcgaatcctcaacccatatttcatccaggaggccgccttcaccctcattggcctgcccttcaacaatggcctcatgggccgggggaacatccctacccttggcagtgtggcagtgaccatggcactacacggctgtgacgaggtggcagtcgcaggatttggctatgacatgagcacacccaacgcacccctgcactactatgagaccgttcgcatggcagccatcaaagagtcctggacgcacaatatccagcgagagaaagagtttctgcggaagctggtgaaagctcgcgtcatcactgatctaagcagtggcatctgagtgggcccagcacatggccatagaggcccaggcaccaccaggagcagcagccagcaccacctacacaggagtcttcagacccagagaaggacggtgccaagggccccaggggcagcaaggccttggtggagcagccagagctgtgcctgctcagcagccagtctcagagaccagcactcagcctcattcagcatgggtccttgatgccagagggccagcaggctcctggctgtgcccagcaggcccagcatgcaggtggtgggacactgggcagcaaggctgctgccggaatcacttctccaatcagtgtttggtgtattatcattttgtgaatttgggtaggggggagggtagggataatttatttttaaataaggttggagatgtcaagttgggttcacttgccatgcaggaagaggcccactagagggcccatcaggcagtgttacctgttagctccctgtggggcaggagtgccaggaccagcctgtaccttgctgtggggctacaggatggtgggcaggatctcaagccagccccctccagctcatgacactgtttggcctttcttggggagaaggcggggtattcccactcaccagccctagctgtcccatggggaaaccctggagccatcccttcggagccaacaagaccgccccagggctatagcagaaagaactttaaagctcaggagggtgacgcccagctccgcctgctgggaagagctcccctccacagctgcagctgatccataggactaccgcaggcccggactcaccaacttgccacatgttctaggtttcagcaacaagactgccaggtggttgggttctgcctttagcctggaccaaagggaagtgaggcccaaggagcttacccaagctgtggcagccgtcccaggccacccccatggaagcaataaagctcttccctgaaaaaaaaaaaaaaaaaaaaaaaaaaaaa

SEQ ID NO: 12307 - DNA, 2385 bp, Homo sapiens
actatggcggcgcccatgcagcccagcgcgttgtgggctcccgccggggtcccccgcggctgtcgccgccgcctacgccgctgcctccgccttcctgccccgcgtcgggccgggcgccacctcccccctgcctccctctccgctgtggtcatttaggaaatcgtaaatcatgtgaagatgggactcttggtatttgtgcgcaatctgctgctagccctctgcctctttctggtactgggatttttgtattattctgcgtggaagctacacttactccagtgggaggaggactccaagtatgatcggttgggcttcctcctgaatctggactctaaactctcaccgaggactctctgcacggtggtttttggccttgactgcatattggaatcacctggagagcctaaaaaattactgatgcctgcatcccaccctctagagattttgaagtcactgagcgaggacgcagcctttgcattaggatttttaaagctgcccaggcctgctgaattagccaccaagtacgcaaacttttcagagggagcttgcaagcctggctatgcttcagccttgatgacggccatcttcccccggttctccaagccagcacccatgttcctggatgactcctttcgcaagtgggctagaatccgggagttcgtgccgccttttgggatcaaaggtcaagacaatctgatcaaagccatcttgtcagtcaccaaagagtaccgcctgacccctgccttggacagcctccgctgccgccgctgcatcatcgtgggcaatggaggcgttcttgccaacaagtctctggggtcacgaattgacgactatgacattgtggtgagactgaattcagcaccagtgaaaggctttgagaaggacgtgggcagcaaaacgacactgcgcatcacctaccccgagggcgccatgcagcggcctgagcagtacgagcgcgattctctctttgtcctcgccggcttcaagtggcaggactttaagtggttgaaatacatcgtctacaaggagagagtgagtgcatcggatggcttctggaaatctgtggccactcgagtgcccaaggagccccctgagattcgaatcctcaacccatatttcatccaggaggccgccttcaccctcattggcctgcccttcaacaatggcctcatgggccgggggaacatccctacccttggcagtgtggcagtgaccatggcactacacggctgtgacgaggtggcagtcgcaggatttggctatgacatgagcacacccaacgcacccctgcactactatgagaccgttcgcatggcagccatcaaagagtcctggacgcacaatatccagcgagagaaagagtttctgcggaagctggtgaaagctcgcgtcatcactgatctaagcagtggcatctgagtgggcccagcacatggccatagaggcccaggcaccaccaggagcagcagccagcaccacctacacaggagtcttcagacccagagaaggacggtgccaagggccccaggggcagcaaggccttggtggagcagccagagctgtgcctgctcagcagccagtctcagagaccagcactcagcctcattcagcatgggtccttgatgccagagggccagcaggctcctggctgtgcccagcaggcccagcatgcaggtggtgggacactgggcagcaaggctgctgccggaatcacttctccaatcagtgtttggtgtattatcattttgtgaatttgggtaggggggagggtagggataatttatttttaaataaggttggagatgtcaagttgggttcacttgccatgcaggaagaggcccactagagggcccatcaggcagtgttacctgttagctccctgtggggcaggagtgccaggaccagcctgtaccttgctgtggggctacaggatggtgggcaggatctcaagccagccccctccagctcatgacactgtttggcctttcttggggagaaggcggggtattcccactcaccagccctagctgtcccatggggaaaccctggagccatcccttcggagccaacaagaccgccccagggctatagcagaaagaactttaaagctcaggagggtgacgcccagctccgcctgctgggaagagctcccctccacagctgcagctgatccataggactaccgcaggcccggactcaccaacttgccacatgttctaggtttcagcaacaagactgccaggtggttgggttctgcctttagcctggaccaaagggaagtgaggcccaaggagcttacccaagctgtggcagccgtcccaggccacccccatggaagcaataaagctcttccctgaaaaaaaaaaaaaaaaaaaaaaaaaaaaa

SEQ ID NO: 12308 - DNA, 1977 bp, Homo sapiens
actatggcggcgcccatgcagcccagcgcgttgtgggctcccgccggggtcccccgcggctgtcgccgccgcctacgccgctgcctccgccttcctgccccgcgtcgggccgggcgccacctcccccctgcctccctctccgctgtggtcatttaggaaatcgtaaatcatgtgaagatgggactcttggtatttgtgcgcaatctgctgctagccctctgcctctttctggtactgggatttttgtattattctgcgtggaagctacacttactccagtgggaggaggactccaattcagtggttctttcctttgactccgctggacaaacactaggctcagagtatgatcggttgggcttcctcctgaatctggactctaaactgcctgctgaattagccaccaagtacgcaaacttttcagagggagcttgcaagcctggctatgcttcagccttgatgacggccatcttcccccggttctccaagccagcacccatgttcctggatgactcctttcgcaagtgggctagaatccgggagttcgtgccgccttttgggatcaaaggtcaagacaatctgatcaaagccatcttgtcagtcaccaaagagtaccgcctgacccctgccttggacagcctccgctgccgccgctgcatcatcgtgggcaatggaggcgttcttgccaacaagtctctggggtcacgaattgacgactatgacattgtggtgagactgaattcagcaccagtgaaaggctttgagaaggacgtgggcagcaaaacgacactgcgcatcacctaccccgagggcgccatgcagcggcctgagcagtacgagcgcgattctctctttgtcctcgccggcttcaagtggcaggactttaagtggttgaaatacatcgtctacaaggagagagtgtcctggacgcacaatatccagcgagagaaagagtttctgcggaagctggtgaaagctcgcgtcatcactgatctaagcagtggcatctgagtgggcccagcacatggccatagaggcccaggcaccaccaggagcagcagccagcaccacctacacaggagtcttcagacccagagaaggacggtgccaagggccccaggggcagcaaggccttggtggagcagccagagctgtgcctgctcagcagccagtctcagagaccagcactcagcctcattcagcatgggtccttgatgccagagggccagcaggctcctggctgtgcccagcaggcccagcatgcaggtggtgggacactgggcagcaaggctgctgccggaatcacttctccaatcagtgtttggtgtattatcattttgtgaatttgggtaggggggagggtagggataatttatttttaaataaggttggagatgtcaagttgggttcacttgccatgcaggaagaggcccactagagggcccatcaggcagtgttacctgttagctccctgtggggcaggagtgccaggaccagcctgtaccttgctgtggggctacaggatggtgggcaggatctcaagccagccccctccagctcatgacactgtttggcctttcttggggagaaggcggggtattcccactcaccagccctagctgtcccatggggaaaccctggagccatcccttcggagccaacaagaccgccccagggctatagcagaaagaactttaaagctcaggagggtgacgcccagctccgcctgctgggaagagctcccctccacagctgcagctgatccataggactaccgcaggcccggactcaccaacttgccacatgttctaggtttcagcaacaagactgccaggtggttgggttctgcctttagcctggaccaaagggaagtgaggcccaaggagcttacccaagctgtggcagccgtcccaggccacccccatggaagcaataaagctcttccctgaaaaaaaaaaaaaaaaaaaaaaaaaaaaa

SEQ ID NO: 12309 - DNA, 1774 bp, Homo sapiens
agatcttgaaaacacccgggccacacacgccgcgacctacagctctttctcagcgttggagtggagacggcgcccgcagcgccctgcgcgggtgaggtccgcgcagctgctggggaagagcccacctgtcaggctgcgctgggtcagcgcagcaagtggggctggccgctatctcgctgcacccggccgcgtcccgggctccgtgcgccctcgccccagctggtttggagttcaaccctcggctccgccgccggctccttgcgccttcggagtgtcccgcagcgacgccgggagccgacgcgccgcgcgggtacctagccatggctggggcgagcaggctgctctttctgtggctgggctgcttctgcgtgagcctggcgcagggagagagaccgaagccacctttcccggagctccgcaaagctgtgccaggtgaccgcacggcaggtggtggcccggactccgagctgcagccgcaagacaaggtctctgaacacatgctgcggctctatgacaggtacagcacggtccaggcggcccggacaccgggctccctggagggaggctcgcagccctggcgccctcggctcctgcgcgaaggcaacacggttcgcagctttcgggcggcagcagcagaaactcttgaaagaaaaggactgtatatcttcaatctgacatcgctaaccaagtctgaaaacattttgtctgccacactgtatttctgtattggagagctaggaaacatcagcctgagttgtccagtgtctggaggatgctcccatcatgctcagaggaaacacattcagattgatctttctgcatggaccctcaaattcagcagaaaccaaagtcaactccttggccatctgtcagtggatatggccaaatctcatcgagatattatgtcctggctgtctaaagatatcactcaattcttgaggaaggccaaagaaaatgaagagttcctcataggatttaacattacgtccaagggacgccagctgccaaagaggaggttaccttttccagagccttatatcttggtatatgccaatgatgccgccatttctgagccagaaagtgtggtatcaagcttacagggacaccggaattttcccactggaactgttcccaaatgggatagccacatcagagctgccctttccattgagcggaggaagaagcgctctactggggtcttgctgcctctgcagaacaacgagcttcctggggcagaataccagtataaaaaggatgaggtgtgggaggagagaaagccttacaagacccttcaggctcaggcccctgaaaagagtaagaataaaaagaaacagagaaaggggcctcatcggaagagccagacgctccaatttgatgagcagaccctgaaaaaggcaaggagaaagcagtggattgaacctcggaattgcgccaggagatacctcaaggtagactttgcagatattggctggagtgaatggattatctcccccaagtcctttgatgcctattattgctctggagcatgccagttccccatgccaaagtctttgaagccatcaaatcatgctaccatccagagtatagtgagagctgtgggggtcgttcctgggattcctgagccttgctgtgtaccagaaaagatgtcctcactcagtattttattctttgatgaaaataagaatgtagtgcttaaagtataccctaacatgacagtagagtcttgcgcttgcagataacctggcaaagaactcatttgaatgcttaattcaat

SEQ ID NO: 12310 - DNA, 7324 bp, Homo sapiens
ctcgcggccggcgaggggctgagctgacagggccgcatcggcttaccccaccttactttatcggaacgtgcctaagctgctgcagctggcacccggttgcgctcggcgaagagggctgggggcgggagatgacggtggtcttctccctgcttggcaccctgcgagcaccagctcccttctcctcgccactccaaggttgcagacgaagcagagatctggttggagttggagggtgagagaaaatgaattctaatttacctgcagagaacttaaccattgcagtcaatatgaccaagactttgcctacagcagtaacgcatggatttaattccactaatgacccaccttcaatgtcaattacaaggctttttccagccttactggaatgctttggcattgtcctttgtggctacatagcaggaagggccaatgtcataacatcaacccaggccaaaggactaggaaattttgtctccagatttgcacttccagctttattattcaaaaacatggttgtacttaatttttccaatgtggactggtccttcctatatagtatcttaattgccaaagcttctgtatttttcattgtatgtgtattaaccttattggttgccagtcctgatagtcgatttagcaaagctggactattccctatttttgctacacaaagtaatgactttgcattgggataccctatagttgaagctttatatcaaactacatacccagaatatctccagtacatttatttggtggcaccaatatctcttatgatgttaaaccctatagggtttattttctgtgaaatccaaaagtggaaagacactcaaaatgcttctcaaaataaaataaaaattgtgggactcggactcctgcgtgtattacagaacccaatagtatttatggtcttcattggcatcgccttcaattttattcttgatcgaaaggtacctgtatatgtcgaaaattttcttgatggacttggaaattctttttctggatcagccctattttatcttggtctcacgatggtgggaaaaataaagagactgaagaagtcggcatttgtagtactaattcttctcatcacagctaaacttctggtgctgccacttctgtgcagagaaatggtggaactcttggacaagggcgacagtgtggtgaaccatacaagtttatcaaattatgcatttctgtatggtgtatttcctgtagcaccaggagtggctatctttgcaacacaattcaacatggaagtagaaattataacctcagggatggtgataagcacatttgtgtctgctcccatcatgtacgtttctgcctggttactgacctttcccactatggaccctaagccattggcatatgccatccagaatgttagttttgatataagtattgtcagcctgatctccttgatctggtctctggctattcttcttttgagtaagaaatataaacagcttcctcatatgcttacaactaatttactcattgctcagtctattgtctgtgctggaatgatgatatggaattttgttaaagaaaaaaattttgttggacaaattttggtgtttgttctattgtacagctccctctatagcacctacctgtggacaggccttctagcaatttctttgtttcttttgaaaaagcgagagagggtacaaattcctgttggaataatcataatatctggctggggaattcctgctctccttgttggtgttcttttgataactggaaaacacaatggagatagcattgactcagccttcttttatggaaaagaacagatgatcaccacagcagtcaccctgttctgcagcatcctgatagctggcatatccctcatgtgcatgaaccagactgcccaagcaggaagctatgaaggtttcgatcagtctcagagccacaaagtggtggagcctggaaatactgcttttgaggagagtccagcaccagtaaatgaaccagaactttttacaagctctattccagaaacaagttgctgctcctgctccatgggaaatggtgaattacactgcccatcaatagagccaatagcaaacacaagcaccagtgagcctgtgattccttcgtttgagaaaaacaatcattgtgtgagtcgctgtaactcccagagctgcatattagcccaggaagaagaacagtatctacagagtggagaccagcaactgacccgacatgtgttgctgtgtttacttctcatcattggcctgttcgctaatctttccagttgtttatggtggctattcaaccaagagcctggaagactttatgttgagttacagtttttctgtgccgtgtttaactttggtcagggatttatttcctttggaatctttggattagataaacatttaatcatcctgcctttcaaaagaagacttgaattcctatggaacaataaagacacagcagaaaacagggattctcctgtttcagaggaaataaaaatgacctgtcaacaatttatccattatcaccgtgacctctgtatccgaaacattgtcaaagaaagaaggtgtggtgcaaagacttctgctggaactttctgtggctgtgacctggtgagctggctaattgaagtcggccttgcctccgaccgtggtgaagctgtgatatacggagacaggctggtacaagggggagtcatccaacatattaccaacgagtatgaattccgggatgagtacttgttttacagatttcttcaaaagagtcctgaacagagtcctcctgctattaatgcaaacactctccaacaggaaagatataaagaaattgagcattcatccccaccctcacattcccctaagacctaaattatgcaggggagaaccctacatggaatcatattctagccgcgtattcattagtttttagctgggtgaccttgggcaagttaacagaggcaacctctctgagcctcagttgtctcttctgtaaaatgtgaaaagatgtgctcccaccacatgcgcagggtctgtgattttacatgtatgtaaaacacataggaagctgacttaggaaaaagagaaaaccaaattaaagttctgataatgaatataatatagtcatcctttagtatccaaggggattggttccaggactcctgaagatcccaaaatctgaggatactcaagtcccttatataaaatggtgtaggccgggcatggtggctcacgcctgtaatcccagtactttgggaggccgagtcaggtggatcacctgaggtcaggagttcaagaccagcctggccaacatggcgaaaccccgtctctactataaaatacaaaaaattagttgggtgtggtggcgggtgcctgtaatcccagctactcaggaggctgaggcaggagaatcgcttgaatctgggaggcagaggttgctgtgagccgagatcgtgccactgcactccagcctgagcaacagagcaagactctatctcaaaaataaaataaaataaaataaaataattaataaaatggtgtagtatttgcatataacctatgcacattctcccatatagtttaatcatctttagatacttataatgcctaatacaatgtaaatgctatgtaaatagttgttgttatactgtattgtttagggaataacaataagaaaaacagtctgtacatgttcactacagatgcaaccattgttaagcctgactacatctttttatctgcggttgattgaatctatggatgtggaacctgtgcatatggagggtcaactgtactataaataatacgaatatgccaacattatataatcattgctttctgcaactgtttactataatttcaaaattaatatcctattaactgttcctataaattatcaaatttggcaagtgtattactagcaggagatggaccttaaattatgacaactttatattttttgatagcatctcttgaaaaagaattttaatgattctaataagaggttctttttcttttttccatttccttgacaaatagtactcatttaaaaactagagggctaggcttagtggctcacgcctgtaatctcagcactttgggaggctgaggcgggcagatcgcttgaggtcaggagttcaagaccagcccgggcaacgtggtgaaacccggtctgtactaaaaaaaaaaaaaaagaaaaagaaaaagaaaaaagaatacccaggtgtggtagtgcatgcctgtagtcccagctactttggagactgaggtgggagtaccccttgagcctgggaggcgcaggttgcagtgaaccaagatcacatcactgcacttcaacctgggtgacagagcaagaccctgtctcaaaaacaaaaaacaagcaaaaaaaacctagaggcactatttttttttaaagtttgtcttttcttttctacccaaattactaatctatgccattaaggaaaggaataagaacctccatatgtattattatctccacagtcctgcagaagtacaatctgatctttaactttcatgctacaaataataatttgagtagattaatttgaattttatcaacaaaattattgccatatgatgtatcatttctgtgtttgaacaaagcatcgtaatgcaggataacttctactttattccctgtagttaaaaaaaaaaaaactatatagttcaagccaatatttaaaaattctaaacctaggctgggcatggtgactcatacctgtaatcccagcactttgggaggccgaggcaggtgaattgcttcagcccaggagttcgagaccagcctggccaatgtggtgaaaccccatctctactaaaaaaaaaaaaaaaaaaaaaaattagccaggtgtggtggtgtgcacctgtaatcccagctacccaggaggctgaggcaggaaaattgcttgaaaccaggaggcagaggttgcagtgagctgagatcgtgccactgcactccagcctgagtgtcagagtgagactctgtctcagaaaaaaaaaaaaaaattctaaagattacatttagaatttagtctttttaaagtgtccatgtataaaaatatataatttttaaaattactaaatgttgccttttctcttagtctaatattttagctactaaaacaaaatataaactggatagcttataaacaacataaacttatttctcacagttttggaggctgtgaagtccaagattaaggcactaacagatctagtgtctggtaaggcaaatttctggctcatagatggtaccttcttgctgtgtccccacatggtagatgggaagaactggtctcattggccccttataaggacattaattccactcaataggctccaccctcatgatctaataacctctcaaaggccctacctcctaatactaacacattgaggatgtgacttcaactttacatttctacaggcagagaagtggggctgtgtaaattcttcccatcagtacttgaatgttcatttaacaaataacttatcgagcatctagcatgttccagacacaatctgaacactgagcacacaacagttggaacaaatatgattcctatcctcatggagcttctattctcctgtgaaaaacagatgttaaacatgattgaggattaggtttcaacataagaattctaggaggacacagacatttagaccatagcatcttcaggtaaactttatcttcagtaaattaaagagatctatttagatgacctttgagcatcttaattattagatgtcagtgctagtttaacttattttaaacgtttcagatatttatttaattatactttaagtgtctcatgtaaaaaagttatttataaaataatttatagggttagagtcattgcccttttaatgcaacaaataaacagttttttaaaaacctgcatgggggccaggcgcggtggttcatacctgcaatcccagcactttgggaggtcgaggctggcggatcacgaggtcaggagatcgagaccaccctgattaatgcggtgaaatcccgtctctactaaaaatacaaaaaattagccagacgtggtggtgggcacctatagtcccagctactcgggaggctgaggcaggagaatggcatgaacccggaaggcggagcttgcagtgaaccaagatcgcgccactgcactccagcctgggcgacagagtgagactccatcgcaaaaaaaaaaaaaaaaaaacctgcatggaagcctagtatatttattaataacaaataaattatactttagtgtactattaacctataccaattttaagttgtgattagggaatggggatgtttttaagctgaattgtcttgctgcggaactttccttttttaataagaccatattatgactctgaatgctcaagggtaagtctaaggcctcattgctgttaccaggagatttttctagttacagtaataaagatgttaattcacatgcatgcagacaactgaaactcaagtggagaatttgtttgtgaacaagtcatactacttctgttatttgcatgaatggaatctgcaatatctttttccatgggagaccctaaaagaaaaccctggatcagaatgatctgcagtttcagataataaaggcttttaagagacatttttagaattaaaaatatgctaattttattaaatgaaaatatttgtaactgttaactttctcactgacaaagcaagtttctcaataaaatacctattttaacttgcattactgacatcttttctttgagtaatctgaataatgcagaagccatcatagaggtcttttctatacattctcaatgttttcttaaatgggtttcctgagttctgttcttcatgactctgggctctgcaaacagggtttcccaattacgcattctataaacacttttatgaatgagtcaatatgacattgagtccttttcatacatttcatcatttccaatatgtagagtgacagctagaaaaatgataaaattttgattaaaacctatctctttttcttcagcatagtcaattgttttcttaactctcaatgagtaactccatgcctagcttgtgcttagctttcaatatttttagactaagacaaagtgtatttggcattttgagaacaacaattaatggtcagtaaatttctaaagcaagaaaaatgtgaaactagtgttttatatgtttgttacgcagcagaatgcggctcttagtgtttgccccttcatatctcatcatgtaaaatattaaattactttaggccactgcacataggtagtcctgtcatgagtgatggctggagaaaagttcaggatcataaatgtta

SEQ ID NO: 12311 - DNA, 3350 bp, Homo sapiens
ggagcggagcctccgcctggggggccccccatccctggctgtcccccagctgcgcgtccccgccccacccccgcggctgagccaccaccggtgcagtggtctccgcttggcggagcgagccttgagcttcgttccacagcttctttgcatcttggatttcggggcggccccctcccccacctctctctgcctttttgtaccccgctttttttctgcgttctgctcggtttttgtagccgtctgtttttgcaccccatttcgttttgtttctagacggtttggtggggggtgaagctgcattcataccccttcctcttgttattctcccctgctctgacagcaccccttttcatcgcagttggggggcctaggatcggtgcatcttccgccgcgctgccagcaccccgcagcgcgtggtcgtgcaccccggaatctgcagcagctgcatatctgaggggggtctcctttgcccgcgccgccttcgctccccgtgcttttgggtgtgtggagggcttcagcgcgcggcgcccccgcttctccgcaaccccccgccccgcgcccggactcgccccgcgccaccaagatggtcatccagaaagagaagaagagctgcgggcaggtggttgaggagtggaaggagttcgtgtggaacccgaggacgcaccagtttatgggccgcaccgggaccagctgggcctttatcctcctcttctacctcgttttttatgggttcctcaccgccatgttcaccctcaccatgtgggtgatgctgcagactgtctccgaccatacccccaagtaccaggaccgactggccacaccgggcttgatgattcgccccaagactgagaaccttgatgtcattgtcaatgtcagtgacactgaaagctgggaccagcatgttcagaagctcaacaagttcttggagccttacaacgactctatccaagcccaaaagaatgatgtctgccgccctgggcgctattacgaacagccagataatggagtcctcaactaccccaaacgtgcctgccaattcaaccggacccagctgggcaactgctccggcattggggactccacccactatggttacagcactgggcagccctgtgtcttcatcaagatgaaccgggtcatcaacttctatgcaggagcaaaccagagcatgaatgttacctgtgctgggaagcgagatgaagatgctgagaatctcggcaacttcgtcatgttccccgccaacggcaacatcgacctcatgtacttcccctactatggcaaaaagttccacgtgaactacacacagcccctggtggctgtgaagttcctgaatgtgacccccaacgtggaggtgaatgtagaatgtcgcatcaacgccgccaacatcgccacagacgatgagcgagacaagttcgccggccgcgtggccttcaaactccgcatcaacaaaacctgaggccccttcctcccaccccatctctctcctgtggatgctcctggaatgtccctgaccctgcctgatccctccctcacccaccccaaaggtatttttgataacagagctatgacttgtctgagcctcacatccttttccttgacttctcaacccagcctgaagtccattgcggttccgtcactcgcctttcccaccaacttctcccaacctcagatcagtcagacagggagctgggctaagatggccacggaggagttaggagcctttctagttctggtttagctgtgagagctatccactctcctgcctgcatatcccctgagagttataggaagtgcccactgacccacccacccacctacaccccccgccacacacacacacaaacgtgcacacgcgtctcatttgacccctttgcttccagagatgaatgtggcactccctccttccattcctaagctctagccaccgtcccttgatctctcatactttctccctgtctacacagtcgccatcttggtgactttgaatttatctggctcctgggcaggtcttctcctcctctccatccctattccctcctctgaaatgcacccctttgtaattgaggacaaggtggttctgtggccttttccctctttgctggcacgttctgcttctcaccctctggtgactctgtgagctgggaaatgagggactggaagtgaggcctgtgttgacccttcctgaaaatcctctagcagcccccgacttcagcagtttctttctttgtttttttgagatggagtttcgctcttgttgcccaggctggagtgcaatggtgcaatctcagctcactgcaacttccgcatcccaggttcaagcgattctcccgcctcaggttcccgagtagctgggactacaggcatgtgccaccatgcccggctaatttctttctttctttttttttttttttgcattttttagtagagatgggggtttctccttgttggtcaggctggtctcgaactcccgacctcaggtgatccacctgcctcggcctcccaaagtgttgggattacaggcgtgagccaccgcgcccggccttcagtttcttcctaggccgttctgtcacccaaatagctgctacccagaggggcggggttgacctaggctgaatatccactttgtttttatggatggctcccttcccccattcgccttcccagaatatccttcaagttccacttcccagggagctctgggggaggggcggccattctggctccgtccccagtggccaccttggaaacatcggctggctttgggactattccacctccttcccctgagcccagatctgcccccaccatcctttctctggcttcttttagcaagttatcaactaatcactaactccttccttttcctctgcatgccagcctgaaaattccaaatctagcctctgaatgtcttggctccatctcttcagacccctttgcctttaaaaaaaaaacaaaaacaaaaacaaaaaaacccataatgcccacagaatgtcaaatgaggggcctcctgcctcctgctctgaatattctgtagctgtagaggcattttaaccctttgtcctccagcatcccttcacttcctcatcctctctaacctcctttttctttttttaatgctgcagcctccacactccacccacaggtggacccttccctttttctctagctggatctgtgtttcttcccttcgggcccccatgttttcctgcacccgccctaccatggtctctctctgcagttatttaatgcctgtgtcagatctactgtaaaaagaggattaagtaaaataaaatgagagcaattatatatataaatatatatcatacacagagaaaaaaaaaaaaaaaaaa

SEQ ID NO: 12312 - DNA, 4320 bp, Homo sapiens
acagatcaacagtacaaattctgaagtttgtaaacttgctgatggtggtggtaagccatggcagatgataaagttgctatcttaacggatgatgaagaggaacagaagagaaagtatgtgcttgcagatccctttaatggtatttccagggaaccagaaccaccttcgaatgaaacaccttcctccacagaaacatctgctattcctgaggaggaaatagactggatagagaaacattgtgttaagataaacaacgatcttctaatttccaaggtcttttattttttcttttactctgcctatggctctctctatccccttttgcctgtgtattacaaacagctgggaatgtctccaagccagagtggactactagtaggtattcgttacttcattgaattctgcagtgcccccttttggggtgtagttgcagaccgctttaaaaaaggcaaaattgtcctcctcttttctcttttgtgttgggttttattcaacctgggcattggatttgtcaaacctgctaccttgagatgtgtaccaaagattcgcccaacaactcaccccaccaatgcaagtcaccagttaactatcctgccaacaaattcttcctttacctctttcctcaccatatcaccaaaaatgcgtgagaaaagaaaccttttggaaacagggctcaatgtctcagacaccgttactttgccaacagctccaaacatgaacagtgaacccactctgcagccccagacaggtgaaattactaaccgtatgatggacttgactttgaactcaagcacagcaacccctgtctccccaggaagcgtaaccaaggagacaaccactgttattgttaccaccaccaaatctttaccttctgaccaagtcatgcttgtttatgatcaacaagaagttgaagctatattcttggtgatcttggtagttgtcataataggagaatttttcagtgcctcttctgtcacaatcgtagacacggtcacactccagtatctgggaaaacacagagatcgctatgggttgcagcgcatgtggggctccctgggctggggcctggcgatgctgtctgtgggcatcgggatcgactacacccacatcgaagtgctcatcgatggaaaggggtgtaagccccccgagtacaggaattaccagatcgtcttcatcgtcttcggcgttctcatgaccatggccttgatcgttgccactcagttccggttccgctacaaccatttcaaaaacgatgattctaaagggaaagaggtggagatcccgcaggtggaaaggaacaactctacagagtcctctgaggagacaccaaccaccacaagccactcgcaggccttcaacttttgggacttaatcaagctgctctgcagcgtgcagtatggctcagtgctgtttgtggcttggttcatgggttttggatatggcttcgtgttcacctttctctactggcatttggaagacctcaatggaactacaaccctctttggggtctgttcagtcctgagtcatgtgtctgagctgacagcatatttttttagtcacaagcttattgaattgatcggccacatcagggttctgtacattggcctggcctgcaatacggctcgctatatttatatttcctacctggagaatgcctggactgttctccccatggaagttcttcaaggagtgacacacgcggccatctgggcagcatgcatttcttacctcagtgcagccgttccccctgagctgaggacatctgctcagggcatcctgcagggccttcacctgggtttgggaagaggatgtggtgccatgatcggaggcgtgttagtcaattattttggggctgctgcaaccttccgaggaattggcatggcctgcttggtgatcctactgctctttgccctgatccagtggctggcagtgccagatgaggaagaagacaagacaatgttggcagaaagaattcctgttccctccagtcccgttcctatagcaaccatcgacttggtacagcaacagacagaagatgtcatgccacgcattgagcccagacttccacccaagaaaactaagcaccaggaagaacaggaagatgtgaacaaaccagcctggggagtcagctcttctccctgggtgacctttgtctatgcactctaccaaattaaagagatgatgcaactcacaagagacaaccgtgcttctgagatacagcctttacaggggaccaatgagaatagggaaaattctcctgctggtagagcccagcctgtcccatgtgagactcactctgacccatctagaaaccagccatcccctgacgcagcagcatctcagacgcagaccagccccgctcaccccagtgtggacccgtgcacagaggagagtgaagagcagcaggctcagctggccgcgggaggacactgagggcatcctgctcatctcacaccctgcatggaatcaggctcctcagccaggacacagggtgaggccccccagccaggatatgcctcccctggaggagcacagcactgcatatgcttctaaatatctaaactcattaacatggaaacacacacacaggagctacagtacatattggcaggaaaaggtaaactttcgtaatctcattggaattacaacagggaaatggagttcaatgaggactttcagttctttgcttggttaggttaaggatgatagaatttctctgccagtgcagtaagagttgaaaccggcagttacactaagtaagtggagggaatgaaagtgtttcgaggtgaatgtggatataatttccctcttctgattatttattcttatttggttcctaacacaaactgggaagagatagaattcatctatactttcttttttcttggagagaaccgtttaaaaaattacaagatatatttaaaaagtaaccagataaaagtagcacatgtgcttttgttaaaaataaagttaaaagttaaagttaaaaaatgaagttaaaagtttcatcagaaactttacatatctttagcaaatatatttttatatgtgtatggcatataatggaaataattctttgagcaacagaagctattattaactactgcaagctaagccgagcttaaaaatgccttttgttttaaatgggctttgagaaaaaaaacagaaacaagcgattatttcaaatcaaccaaccaactcagtatcctgtgttttgatagacaagagtttactaaatatattgatactgtaaatagcctctctcgctatttactatcttatagtaattcaggctctaattagctgagggaatgaaacacacaaaaatcactgaattcctaagagttccttaaataagcagtactagttacaaatcacagtataagatttaagtgcctgggggaaggatacaatttttagaaattacatattgggtcagttttgttttgtttttggtgaggaaaaggtggtaaataggaaaccatgaatgggaaggatggcaataagtagcaactatactttccaatgactaaagaaagaaaatctcagtatattcgttctcatgaagacacagtcagacactggacaatgtaatgtatgcaactgcaaacgttacaactgcagccagaacaatggctgggtggatcgcacgtaaagcttgccactaaaaatcaaagcagaggttaacaggaaacctggggggagtgtggaaaagggaaaactgttttagctgaataaaggtgaattatataatttataatagctgtggatgagcacaggagagagaggaaagaaaagaacagtcgaaatgagcaactcaccttaccctctgaccctgattagacaggatcaattgtaaagtgagggcttctccatgacaccatagttctgcccaatactgcatttgggataagaaattctacacttggatgtctcgcttcacaataaaacacagcttaaaaataaaataactgaaagaaatagaattcagcaaatagttattttttgcacttgaactgaaacgtactgtactgtaaattatgactcattttaagtgacctttaaaatcagatgtatttattatgcttgtgtaattatagaaataaagaaatgggtgacaggcttaacctcacctatgaatgtacagtatgtggatttgtgaaactgactgtaggaagtcaaaaacttgtactgtatcttgtgtttacagttctgatttattcctttgaaaagcctgctgttttggaaatgcacagttgacatgttgaaataaaaatgaataccatttttaaaaaaaaaaaaaaaaaaaaaaaaaaaaaa

SEQ ID NO: 12313 - DNA, 1836 bp, Homo sapiens
ggggaacctccctgaagagtgccctggtcacagcacccttgaagacagccattggccatggggacccaaccagagcctggcctgggagccaggatggccatccacaaagccttggtgatgtgcctgggactgcctctcttcctgttcccaggggcctgggcccagggccatgtcccacccggctgcagccaaggcctcaaccccctgtactacaacctgtgtgaccgctctggggcgtggggcatcgtcctggaggccgtggctggggcgggcattgtcaccacgtttgtgctcaccatcatcctggtggccagcctcccctttgtgcaggacaccaagaaacggagcctgctggggacccaggtattcttccttctggggaccctgggcctcttctgcctcgtgtttgcctgtgtggtgaagcccgacttctccacctgtgcctctcggcgcttcctctttggggttctgttcgccatctgcttctcttgtctggcggctcacgtctttgccctcaacttcctggcccggaagaaccacgggccccggggctgggtgatcttcactgtggctctgctgctgaccctggtagaggtcatcatcaatacagagtggctgatcatcaccctggttcggggcagtggcgagggcggccctcagggcaacagcagcgcaggctgggccgtggcctccccctgtgccatcgccaacatggactttgtcatggcactcatctacgtcatgctgctgctgctgggtgccttcctgggggcctggcccgccctgtgtggccgctacaagcgctggcgtaagcatggggtctttgtgctcctcaccacagccacctccgttgccatatgggtggtgtggatcgtcatgtatacttacggcaacaagcagcacaacagtcccacctgggatgaccccacgctggccatcgccctcgccgccaatgcctgggccttcgtcctcttctacgtcatccccgaggtctcccaggtgaccaagtccagcccagagcaaagctaccagggggacatgtaccccacccggggcgtgggctatgagaccatcctgaaagagcagaagggtcagagcatgttcgtggagaacaaggccttttccatggatgagccggttgcagctaagaggccggtgtcaccatacagcgggtacaatgggcagctgctgaccagtgtgtaccagcccactgagatggccctgatgcacaaagttccgtccgaaggagcttacgacatcatcctcccacgggccaccgccaacagccaggtgatgggcagtgccaactcgaccctgcgggctgaagacatgtactcggcccagagccaccaggcggccacaccgccgaaagacggcaagaactctcaggtctttagaaacccctacgtgtgggactgagtcagcggtggcgaggagaggcgggcggatttggggagggccctgaggacctggccccgggcaagggactctccaggctcctcctccccctggcaggcccagcaacatgtgccccagatctggaagggcctccctctctgccagtgtttgggtgggtgtcatgggtgtccccacccactcctcagtgtttgtggagtcgaggagccaaccccagcctcctgccaggatcacctcggcggtcacactccagccaaatagtgttctcggggtggtggctgggcagcgcctatgtttctctggagattcctgcaacctcaagagacttcccaggcgctcaggcctggatcttgctcctctgtgaggaacaagggtgcctaataaatacatttctgctttattaaaaaaaaaaaaaaaaaa

SEQ ID NO: 12314 - DNA, 2389 bp, Homo sapiens
agaacctggaacggtcacaggaaacccgggcgcggggtagtcgggccgagggggacctttgcccacggtccagagtggtctggactcggcccacgcgtgagaggagcgcttggtgacgatcccacgtacgcttggtgactggtggaggtcccagagaaggaccgtgcgtgcaaaaggcgaacctcggtgtgcggtgtgtccacgtgtgcaagctggggaggggagggggcgcagaaggcgtgacaaagacggactctgtcttgagtgtgcgcctcgctccggcccgctcccagcgaactgtgcctgaagtgtgtctcacgggagggccaggacgaaggtgacaaaggctaggtgtcccccacggagacgcgccaaggtagccccgcgcgtgtccgtaggcgcgctctctggaagacgcggtggggggtgcgcagggctgcaccctcacaccaattgccccggcgaaggccgagcccagaaagtgagtgcgcgtgagtgtgcgcgcgcccgcatgcgggggcgtggcagtcaacagcaacaacccacacgccggcagggccagaaactcccatctccctcaccagccggaaagtacgagtcggctcagcctggagggacccaaccagagcctggcctgggagccaggatggccatccacaaagccttggtgatgtgcctgggactgcctctcttcctgttcccaggggcctgggcccagggccatgtcccacccggctgcagccaaggcctcaaccccctgtactacaacctgtgtgaccgctctggggcgtggggcatcgtcctggaggccgtggctggggcgggcattgtcaccacgtttgtgctcaccatcatcctggtggccagcctcccctttgtgcaggacaccaagaaacggagcctgctggggacccaggtattcttccttctggggaccctgggcctcttctgcctcgtgtttgcctgtgtggtgaagcccgacttctccacctgtgcctctcggcgcttcctctttggggttctgttcgccatctgcttctcttgtctggcggctcacgtctttgccctcaacttcctggcccggaagaaccacgggccccggggctgggtgatcttcactgtggctctgctgctgaccctggtagaggtcatcatcaatacagagtggctgatcatcaccctggttcggggcagtggcgagggcggccctcagggcaacagcagcgcaggctgggccgtggcctccccctgtgccatcgccaacatggactttgtcatggcactcatctacgtcatgctgctgctgctgggtgccttcctgggggcctggcccgccctgtgtggccgctacaagcgctggcgtaagcatggggtctttgtgctcctcaccacagccacctccgttgccatatgggtggtgtggatcgtcatgtatacttacggcaacaagcagcacaacagtcccacctgggatgaccccacgctggccatcgccctcgccgccaatgcctgggccttcgtcctcttctacgtcatccccgaggtctcccaggtgaccaagtccagcccagagcaaagctaccagggggacatgtaccccacccggggcgtgggctatgagaccatcctgaaagagcagaagggtcagagcatgttcgtggagaacaaggccttttccatggatgagccggttgcagctaagaggccggtgtcaccatacagcgggtacaatgggcagctgctgaccagtgtgtaccagcccactgagatggccctgatgcacaaagttccgtccgaaggagcttacgacatcatcctcccacgggccaccgccaacagccaggtgatgggcagtgccaactcgaccctgcgggctgaagacatgtactcggcccagagccaccaggcggccacaccgccgaaagacggcaagaactctcaggtctttagaaacccctacgtgtgggactgagtcagcggtggcgaggagaggcgggcggatttggggagggccctgaggacctggccccgggcaagggactctccaggctcctcctccccctggcaggcccagcaacatgtgccccagatctggaagggcctccctctctgccagtgtttgggtgggtgtcatgggtgtccccacccactcctcagtgtttgtggagtcgaggagccaaccccagcctcctgccaggatcacctcggcggtcacactccagccaaatagtgttctcggggtggtggctgggcagcgcctatgtttctctggagattcctgcaacctcaagagacttcccaggcgctcaggcctggatcttgctcctctgtgaggaacaagggtgcctaataaatacatttctgctttattaaaaaaaaaaaaaaaaaa

SEQ ID NO: 12315 - DNA, 5871 bp, Homo sapiens
ggacaggcgtggcggccggagccccagcatccctgcttgaggtccaggagcggagcccgcggccaccgccgcctgatcagcgcgaccccggcccgcgcccgccccgcccggcaagatgctgcccgtgtaccaggaggtgaagcccaacccgctgcaggacgcgaacatctgctcacgcgtgttcttctggtggctcaatcccttgtttaaaattggccataaacggagattagaggaagatgatatgtattcagtgctgccagaagaccgctcacagcaccttggagaggagttgcaagggttctgggataaagaagttttaagagctgagaatgacgcacagaagccttctttaacaagagcaatcataaagtgttactggaaatcttatttagttttgggaatttttacgttaattgaggaaagtgccaaagtaatccagcccatatttttgggaaaaattattaattattttgaaaattatgatcccatggattctgtggctttgaacacagcgtacgcctatgccacggtgctgactttttgcacgctcattttggctatactgcatcacttatatttttatcacgttcagtgtgctgggatgaggttacgagtagccatgtgccatatgatttatcggaaggcacttcgtcttagtaacatggccatggggaagacaaccacaggccagatagtcaatctgctgtccaatgatgtgaacaagtttgatcaggtgacagtgttcttacacttcctgtgggcaggaccactgcaggcgatcgcagtgactgccctactctggatggagataggaatatcgtgccttgctgggatggcagttctaatcattctcctgcccttgcaaagctgttttgggaagttgttctcatcactgaggagtaaaactgcaactttcacggatgccaggatcaggaccatgaatgaagttataactggtataaggataataaaaatgtacgcctgggaaaagtcattttcaaatcttattaccaatttgagaaagaaggagatttccaagattctgagaagttcctgcctcagggggatgaatttggcttcgtttttcagtgcaagcaaaatcatcgtgtttgtgaccttcaccacctacgtgctcctcggcagtgtgatcacagccagccgcgtgttcgtggcagtgacgctgtatggggctgtgcggctgacggttaccctcttcttcccctcagccattgagagggtgtcagaggcaatcgtcagcatccgaagaatccagacctttttgctacttgatgagatatcacagcgcaaccgtcagctgccgtcagatggtaaaaagatggtgcatgtgcaggattttactgctttttgggataaggcatcagagaccccaactctacaaggcctttcctttactgtcagacctggcgaattgttagctgtggtcggccccgtgggagcagggaagtcatcactgttaagtgccgtgctcggggaattggccccaagtcacgggctggtcagcgtgcatggaagaattgcctatgtgtctcagcagccctgggtgttctcgggaactctgaggagtaatattttatttgggaagaaatatgaaaaggaacgatatgaaaaagtcataaaggcttgtgctctgaaaaaggatttacagctgttggaggatggtgatctgactgtgataggagatcggggaaccacgctgagtggagggcagaaagcacgggtaaaccttgcaagagcagtgtatcaagatgctgacatctatctcctggacgatcctctcagtgcagtagatgcggaagttagcagacacttgttcgaactgtgtatttgtcaaattttgcatgagaagatcacaattttagtgactcatcagttgcagtacctcaaagctgcaagtcagattctgatattgaaagatggtaaaatggtgcagaaggggacttacactgagttcctaaaatctggtatagattttggctcccttttaaagaaggataatgaggaaagtgaacaacctccagttccaggaactcccacactaaggaatcgtaccttctcagagtcttcggtttggtctcaacaatcttctagaccctccttgaaagatggtgctctggagagccaagatacagagaatgtcccagttacactatcagaggagaaccgttctgaaggaaaagttggttttcaggcctataagaattacttcagagctggtgctcactggattgtcttcattttccttattctcctaaacactgcagctcaggttgcctatgtgcttcaagattggtggctttcatactgggcaaacaaacaaagtatgctaaatgtcactgtaaatggaggaggaaatgtaaccgagaagctagatcttaactggtacttaggaatttattcaggtttaactgtagctaccgttctttttggcatagcaagatctctattggtattctacgtccttgttaactcttcacaaactttgcacaacaaaatgtttgagtcaattctgaaagctccggtattattctttgatagaaatccaataggaagaattttaaatcgtttctccaaagacattggacacttggatgatttgctgccgctgacgtttttagatttcatccagacattgctacaagtggttggtgtggtctctgtggctgtggccgtgattccttggatcgcaatacccttggttccccttggaatcattttcatttttcttcggcgatattttttggaaacgtcaagagatgtgaagcgcctggaatctacaactcggagtccagtgttttcccacttgtcatcttctctccaggggctctggaccatccgggcatacaaagcagaagagaggtgtcaggaactgtttgatgcacaccaggatttacattcagaggcttggttcttgtttttgacaacgtcccgctggttcgccgtccgtctggatgccatctgtgccatgtttgtcatcatcgttgcctttgggtccctgattctggcaaaaactctggatgccgggcaggttggtttggcactgtcctatgccctcacgctcatggggatgtttcagtggtgtgttcgacaaagtgctgaagttgagaatatgatgatctcagtagaaagggtcattgaatacacagaccttgaaaaagaagcaccttgggaatatcagaaacgcccaccaccagcctggccccatgaaggagtgataatctttgacaatgtgaacttcatgtacagtccaggtgggcctctggtactgaagcatctgacagcactcattaaatcacaagaaaaggttggcattgtgggaagaaccggagctggaaaaagttccctcatctcagccctttttagattgtcagaacccgaaggtaaaatttggattgataagatcttgacaactgaaattggacttcacgatttaaggaagaaaatgtcaatcatacctcaggaacctgttttgttcactggaacaatgaggaaaaacctggatccctttaaggagcacacggatgaggaactgtggaatgccttacaagaggtacaacttaaagaaaccattgaagatcttcctggtaaaatggatactgaattagcagaatcaggatccaattttagtgttggacaaagacaactggtgtgccttgccagggcaattctcaggaaaaatcagatattgattattgatgaagcgacggcaaatgtggatccaagaactgatgagttaatacaaaaaaaaatccgggagaaatttgcccactgcaccgtgctaaccattgcacacagattgaacaccattattgacagcgacaagataatggttttagattcaggaagactgaaagaatatgatgagccgtatgttttgctgcaaaataaagagagcctattttacaagatggtgcaacaactgggcaaggcagaagccgctgccctcactgaaacagcaaaacaggtatacttcaaaagaaattatccacatattggtcacactgaccacatggttacaaacacttccaatggacagccctcgaccttaactattttcgagacagcactgtgaatccaaccaaaatgtcaagtccgttccgaaggcattttccactagtttttggactatgtaaaccacattgtacttttttttactttggcaacaaatatttatacatacaagatgctagttcatttgaatatttctcccaacttatccaaggatctccagctctaacaaaatggtttatttttatttaaatgtcaatagttgttttttaaaatccaaatcagaggtgcaggccaccagttaaatgccgtctatcaggttttgtgccttaagagactacagagtcaaagctcatttttaaaggagtaggacaaagttgtcacaggtttttgttgttgtttttattgcccccaaaattacatgttaatttccatttatatcagggattctatttacttgaagactgtgaagttgccattttgtctcattgttttctttgacataactaggatccattatttcccctgaaggcttcttgttagaaaatagtacagttacaaccaataggaacaacaaaaagaaaaagtttgtgacattgtagtagggagtgtgtaccccttactccccatcaaaaaaaaaaatggatacatggttaaaggatagaagggcaatattttatcatatgttctaaaagagaaggaagagaaaatactactttctcaaaatggaagcccttaaaggtgctttgatactgaaggacacaaatgtgaccgtccatcctcctttagagttgcatgacttggacacggtaactgttgcagttttagactcagcattgtgacacttcccaagaaggccaaacctctaaccgacattcctgaaatacgtggcattattcttttttggatttctcatttatggaaggctaaccctctgttgactgtaagccttttggtttgggctgtattgaaatcctttctaaattgcatgaataggctctgctaacgtgatgagacaaactgaaaattattgcaagcattgactataattatgcagtacgttctcaggatgcatccaggggttcattttcatgagcctgtccaggttagtttactcctgaccactaatagcattgtcatttgggctttctgttgaatgaatcaacaaaccacaatacttcctgggaccttttgtactttatttgaactatgagtctttaatttttcctgatgatggtggctgtaatatgttgagttcagtttactaaaggttttactattatggtttgaagtggagtctcatgacctctcagaataaggtgtcacctccctgaaattgcatatatgtatatagacatgcacacgtgtgcatttgtttgtatacatatatttgtccttcgtatagcaagttttttgctcatcagcagagagcaacagatgttttattgagtgaagccttaaaaagcacacaccacacacagctaactgccaaaatacattgaccgtagtagctgttcaactcctagtacttagaaatacacgtatggttaatgttcagtccaacaaaccacacacagtaaatgtttattaatagtcatggttcgtattttaggtgactgaaattgcatcagtgatcataatgaggtttgttaaaacgatagctatattcaaaatgtctatatgtttatttggacttttgaggttaaagacagtcatataaacgtcctgtttctgttttaatgttatcatagaattttttaatgaaactaaattcaattgaaataaatgatagttttcatctccaaaaaaaaaaaaaaaaaaaaaaaaaaaaaaaaaaaaaaa

SEQ ID NO: 12316 - DNA, 3468 bp, Homo sapiens
ctcctgcatagagggtaccattctgcgctgctgcaagttacggaatgaaaaattagaacaacagaaacatggttctcttgacacttcagtgttagggaacatcagcaagacccatcccaggagaccttgaaggaagcctttgaaagggagaatgaaggagtcatctttgcaaaatagctcctgcagcctgggaaaggagactaaaaaggaaaacatgttccttcagtcgtcaatgctgacctgcattttcctgctaatatctggttcctgtgagttatgcgccgaagaaaatttttctagaagctatccttgtgatgagaaaaagcaaaatgactcagttattgcagagtgcagcaatcgtcgactacaggaagttccccaaacggtgggcaaatatgtgacagaactagacctgtctgataatttcatcacacacataacgaatgaatcatttcaagggctgcaaaatctcactaaaataaatctaaaccacaaccccaatgtacagcaccagaacggaaatcccggtatacaatcaaatggcttgaatatcacagacggggcattcctcaacctaaaaaacctaagggagttactgcttgaagacaaccagttaccccaaataccctctggtttgccagagtctttgacagaacttagtctaattcaaaacaatatatacaacataactaaagagggcatttcaagacttataaacttgaaaaatctctatttggcctggaactgctattttaacaaagtttgcgagaaaactaacatagaagatggagtatttgaaacgctgacaaatttggagttgctatcactatctttcaattctctttcacacgtgccacccaaactgccaagctccctacgcaaactttttctgagcaacacccagatcaaatacattagtgaagaagatttcaagggattgataaatttaacattactagatttaagcgggaactgtccgaggtgcttcaatgccccatttccatgcgtgccttgtgatggtggtgcttcaattaatatagatcgttttgcttttcaaaacttgacccaacttcgatacctaaacctctctagcacttccctcaggaagattaatgctgcctggtttaaaaatatgcctcatctgaaggtgctggatcttgaattcaactatttagtgggagaaatagcctctggggcatttttaacgatgctgccccgcttagaaatacttgacttgtcttttaactatataaaggggagttatccacagcatattaatatttccagaaacttctctaaacttttgtctctacgggcattgcatttaagaggttatgtgttccaggaactcagagaagatgatttccagcccctgatgcagcttccaaacttatcgactatcaacttgggtattaattttattaagcaaatcgatttcaaacttttccaaaatttctccaatctggaaattatttacttgtcagaaaacagaatatcaccgttggtaaaagatacccggcagagttatgcaaatagttcctcttttcaacgtcatatccggaaacgacgctcaacagattttgagtttgacccacattcgaacttttatcatttcacccgtcctttaataaagccacaatgtgctgcttatggaaaagccttagatttaagcctcaacagtattttcttcattgggccaaaccaatttgaaaatcttcctgacattgcctgtttaaatctgtctgcaaatagcaatgctcaagtgttaagtggaactgaattttcagccattcctcatgtcaaatatttggatttgacaaacaatagactagactttgataatgctagtgctcttactgaattgtccgacttggaagttctagatctcagctataattcacactatttcagaatagcaggcgtaacacatcatctagaatttattcaaaatttcacaaatctaaaagttttaaacttgagccacaacaacatttatactttaacagataagtataacctggaaagcaagtccctggtagaattagttttcagtggcaatcgccttgacattttgtggaatgatgatgacaacaggtatatctccattttcaaaggtctcaagaatctgacacgtctggatttatcccttaataggctgaagcacatcccaaatgaagcattccttaatttgccagcgagtctcactgaactacatataaatgataatatgttaaagttttttaactggacattactccagcagtttcctcgtctcgagttgcttgacttacgtggaaacaaactactctttttaactgatagcctatctgactttacatcttcccttcggacactgctgctgagtcataacaggatttcccacctaccctctggctttctttctgaagtcagtagtctgaagcacctcgatttaagttccaatctgctaaaaacaatcaacaaatccgcacttgaaactaagaccaccaccaaattatctatgttggaactacacggaaacccctttgaatgcacctgtgacattggagatttccgaagatggatggatgaacatctgaatgtcaaaattcccagactggtagatgtcatttgtgccagtcctggggatcaaagagggaagagtattgtgagtctggagctaacaacttgtgtttcagatgtcactgcagtgatattatttttcttcacgttctttatcaccaccatggttatgttggctgccctggctcaccatttgttttactgggatgtttggtttatatataatgtgtgtttagctaaggtaaaaggctacaggtctctttccacatcccaaactttctatgatgcttacatttcttatgacaccaaagatgcctctgttactgactgggtgataaatgagctgcgctaccaccttgaagagagccgagacaaaaacgttctcctttgtctagaggagagggattgggatccgggattggccatcatcgacaacctcatgcagagcatcaaccaaagcaagaaaacagtatttgttttaaccaaaaaatatgcaaaaagctggaactttaaaacagctttttacttggctttgcagaggctaatggatgagaacatggatgtgattatatttatcctgctggagccagtgttacagcattctcagtatttgaggctacggcagcggatctgtaagagctccatcctccagtggcctgacaacccgaaggcagaaggcttgttttggcaaactctgagaaatgtggtcttgactgaaaatgattcacggtataacaatatgtatgtcgattccattaagcaatactaactgacgttaagtcatgatttcgcgccataataaagatgcaaaggaatgacatttctgtattagttatctattgctatgtaacaaattatcccaaaacttagtggtttaaaacaacacatttgctggcccacagtttt

SEQ ID NO: 12317 - DNA, 4211 bp, Homo sapiens
ctcctgcatagagggtaccattctgcgctgctgcaagttacggaatgaaaaattagaacaacagaaacatggaaaacatgttccttcagtcgtcaatgctgacctgcattttcctgctaatatctggttcctgtgagttatgcgccgaagaaaatttttctagaagctatccttgtgatgagaaaaagcaaaatgactcagttattgcagagtgcagcaatcgtcgactacaggaagttccccaaacggtgggcaaatatgtgacagaactagacctgtctgataatttcatcacacacataacgaatgaatcatttcaagggctgcaaaatctcactaaaataaatctaaaccacaaccccaatgtacagcaccagaacggaaatcccggtatacaatcaaatggcttgaatatcacagacggggcattcctcaacctaaaaaacctaagggagttactgcttgaagacaaccagttaccccaaataccctctggtttgccagagtctttgacagaacttagtctaattcaaaacaatatatacaacataactaaagagggcatttcaagacttataaacttgaaaaatctctatttggcctggaactgctattttaacaaagtttgcgagaaaactaacatagaagatggagtatttgaaacgctgacaaatttggagttgctatcactatctttcaattctctttcacacgtgccacccaaactgccaagctccctacgcaaactttttctgagcaacacccagatcaaatacattagtgaagaagatttcaagggattgataaatttaacattactagatttaagcgggaactgtccgaggtgcttcaatgccccatttccatgcgtgccttgtgatggtggtgcttcaattaatatagatcgttttgcttttcaaaacttgacccaacttcgatacctaaacctctctagcacttccctcaggaagattaatgctgcctggtttaaaaatatgcctcatctgaaggtgctggatcttgaattcaactatttagtgggagaaatagcctctggggcatttttaacgatgctgccccgcttagaaatacttgacttgtcttttaactatataaaggggagttatccacagcatattaatatttccagaaacttctctaaacttttgtctctacgggcattgcatttaagaggttatgtgttccaggaactcagagaagatgatttccagcccctgatgcagcttccaaacttatcgactatcaacttgggtattaattttattaagcaaatcgatttcaaacttttccaaaatttctccaatctggaaattatttacttgtcagaaaacagaatatcaccgttggtaaaagatacccggcagagttatgcaaatagttcctcttttcaacgtcatatccggaaacgacgctcaacagattttgagtttgacccacattcgaacttttatcatttcacccgtcctttaataaagccacaatgtgctgcttatggaaaagccttagatttaagcctcaacagtattttcttcattgggccaaaccaatttgaaaatcttcctgacattgcctgtttaaatctgtctgcaaatagcaatgctcaagtgttaagtggaactgaattttcagccattcctcatgtcaaatatttggatttgacaaacaatagactagactttgataatgctagtgctcttactgaattgtccgacttggaagttctagatctcagctataattcacactatttcagaatagcaggcgtaacacatcatctagaatttattcaaaatttcacaaatctaaaagttttaaacttgagccacaacaacatttatactttaacagataagtataacctggaaagcaagtccctggtagaattagttttcagtggcaatcgccttgacattttgtggaatgatgatgacaacaggtatatctccattttcaaaggtctcaagaatctgacacgtctggatttatcccttaataggctgaagcacatcccaaatgaagcattccttaatttgccagcgagtctcactgaactacatataaatgataatatgttaaagttttttaactggacattactccagcagtttcctcgtctcgagttgcttgacttacgtggaaacaaactactctttttaactgatagcctatctgactttacatcttcccttcggacactgctgctgagtcataacaggatttcccacctaccctctggctttctttctgaagtcagtagtctgaagcacctcgatttaagttccaatctgctaaaaacaatcaacaaatccgcacttgaaactaagaccaccaccaaattatctatgttggaactacacggaaacccctttgaatgcacctgtgacattggagatttccgaagatggatggatgaacatctgaatgtcaaaattcccagactggtagatgtcatttgtgccagtcctggggatcaaagagggaagagtattgtgagtctggagctaacaacttgtgtttcagatgtcactgcagtgatattatttttcttcacgttctttatcaccaccatggttatgttggctgccctggctcaccatttgttttactgggatgtttggtttatatataatgtgtgtttagctaaggtaaaaggctacaggtctctttccacatcccaaactttctatgatgcttacatttcttatgacaccaaagatgcctctgttactgactgggtgataaatgagctgcgctaccaccttgaagagagccgagacaaaaacgttctcctttgtctagaggagagggattgggatccgggattggccatcatcgacaacctcatgcagagcatcaaccaaagcaagaaaacagtatttgttttaaccaaaaaatatgcaaaaagctggaactttaaaacagctttttacttggctttgcagaggctaatggatgagaacatggatgtgattatatttatcctgctggagccagtgttacagcattctcagtatttgaggctacggcagcggatctgtaagagctccatcctccagtggcctgacaacccgaaggcagaaggcttgttttggcaaactctgagaaatgtggtcttgactgaaaatgattcacggtataacaatatgtatgtcgattccattaagcaatactaactgacgttaagtcatgatttcgcgccataataaagatgcaaaggaatgacatttctgtattagttatctattgctatgtaacaaattatcccaaaacttagtggtttaaaacaacacatttgctggcccacagtttttgagggtcaggagtccaggcccagcataactgggtcctctgctcagggtgtctcagaggctgcaatgtaggtgttcaccagagacataggcatcactggggtcacactcatgtggttgttttctggattcaattcctcctgggctattggccaaaggctatactcatgtaagccatgcgagcctctcccacaaggcagcttgcttcatcagagctagcaaaaaagagaggttgctagcaagatgaagtcacaatcttttgtaatcgaatcaaaaaagtgatatctcatcactttggccatattctatttgttagaagtaaaccacaggtcccaccagctccatgggagtgaccacctcagtccagggaaaacagctgaagaccaagatggtgagctctgattgcttcagttggtcatcaactattttcccttgactgctgtcctgggatggcctgctatcttgatgatagattgtgaatatcaggaggcagggatcactgtggaccatcttagcagttgacctaacacatcttcttttcaatatctaagaacttttgccactgtgactaatggtcctaatattaagctgttgtttatatttatcatatatctatggctacatggttatattatgctgtggttgcgttcggttttatttacagttgcttttacaaatatttgctgtaacatttgacttctaaggtttagatgccatttaagaactgagatggatagcttttaaagcatcttttacttcttaccattttttaaaagtatgcagctaaattcgaagcttttggtctatattgttaattgccattgctgtaaatcttaaaatgaatgaataaaaatgtttcattttacaaaaaaaaaaaaaaaa

SEQ ID NO: 12318 - DNA, 3440 bp, Homo sapiens
gctttcagagcatcctcactccgcccagttcggtgccagctgcgtgggctccagcttcgatcgttttccttggaatgctccaaaactcagcagcgactaagggaattccattggaatttgccgggcgtgctctcaccccgcacggcacccgcgccgtcagtcctcggatcccatcacttcagcccgaagattgcaactttgcagagacgaagaaatagcatggcatgaaatatggctcagttctattacaaaagaaatgttaatgctccctatagagaccgcatccctctaaggatagtaagagcagaatcagaactctcgccatcagaaaaagcctacttgaatgctgtggaaaagggagattatgccagtgtcaagaaatccctagaggaagctgaaatttattttaaaatcaatattaattgcattgatcctctcggaagaactgctctcctcattgcaattgaaaatgagaacttggagctcatcgaactactcttaagctttaatgtctatgttggagatgctctattacatgctatcagaaaagaagtcgtcggagctgttgagctgttattgaaccacaaaaaacctagtggagaaaaacaggtgcctcctatactccttgataagcagttctctgaattcactccagacattacaccaatcattttggcagcccatacaaataattatgagataataaaactcttggttcagaaaggagtctcagtgcctcgaccccacgaggtccgctgtaactgtgtggaatgcgtgtccagttcagatgtggacagcctccgtcactcacgctccagactcaacatctacaaggccttggccagtccctctctcattgcactgtcaagcgaagatccttttctcacagcctttcagttaagttgggaacttcaggaactgagcaaggtggaaaatgaattcaagtcggagtatgaagagctgtcacggcagtgcaaacaatttgctaaggacctactggatcagacgagaagttccagagaactggaaatcattcttaattaccgagatgacaatagtctcatagaagaacaaagtggaaatgatcttgcaagactaaaattggccattaagtaccgtcaaaaagagtttgttgcccagcccaattgtcaacagctgctggcatctcgctggtacgatgagtttccaggctggaggagaagacactgggcagtgaagatggtgacatgtttcataataggacttctttttcctgtcttctctgtgtgctacctgatagctcccaaaagcccacttggactgttcatcaggaagccatttatcaagtttatctgccacacagcctcctatttgacttttttgttcctgctgctgcttgcctctcagcacatcgacaggtcagacttgaacaggcaaggtccaccaccaaccatcgtcgagtggatgatattaccgtgggtcctgggcttcatatggggagaaattaaacagatgtgggatggcggacttcaggactacatccatgattggtggaatctaatggactttgtaatgaactccttatatttagcaacaatctccttgaaaattgttgcatttgtaaagtacagtgcccttaatccacgagaatcatgggacatgtggcatcccactctggtggcagaggctttatttgctattgcaaacatcttcagttctctgcgtctgatctcactgtttactgcaaattctcacctgggacctctgcaaatatctctgggaagaatgctcctggacattttgaagtttctattcatatactgccttgtgttgctagcatttgcaaatggcctaaatcaattgtacttctattatgaagaaacgaaagggttaacctgcaaaggcataagatgtgaaaagcagaataatgcattttcaacgttatttgagacactgcagtccctgttttggtcaatatttgggctcatcaatttatatgtgaccaatgtcaaagcacagcatgaatttactgagtttgttggtgccaccatgtttgggacatacaatgtcatctctctggttgttctactcaacatgttaatagctatgatgaataattcttaccaactgattgctgaccatgcagatatagaatggaaatttgcacgaacaaagctttggatgagttattttgaagaaggaggtactctgcctactcccttcaatgtcatcccgagccccaagtctctctggtacctgatcaaatggatctggacacacttgtgcaagaaaaagatgagaagaaagccagaaagttttggaacaatagggaggcgagctgctgataacttgagaagacatcaccaataccaagaagttatgaggaacctggtgaagcgatacgttgctgcaatgattagagatgctaaaactgaagaaggcctgaccgaagagaactttaaggaactaaagcaagacatttctagtttccgctttgaagtcctgggattactaagaggaagcaaactttccacaatacaatctgcgaatgcctcgaaggagtcttcaaattcggcagactcagatgaaaagagtgatagcgaaggtaatagcaaggacaagaaaaagaatttcagcctttttgatttaaccaccctgattcatccgagatcagcagcaattgcctctgaaagacataacataagcaatggctctgccctggtggttcaggagccgcccagggagaagcagagaaaagtgaattttgtgaccgatatcaaaaactttgggttatttcatagacgatcaaaacaaaatgctgctgagcaaaatgcaaaccaaatcttctctgtttcagaagaagttgctcgtcaacaggctgcaggaccacttgagagaaatattcaactggaatctcgaggattagcttcacggggtgacctgagcattcccggtctcagtgaacaatgtgtgttagtagaccatagagaaaggaatacggacacactggggttacaggtaggaaagagagtgtgtccattcaagtcagagaaggtggtggtggaggacacggttcctataataccaaaggagaaacatgcaaaagaagaggactctagtatagactatgatctaaacctcccagacacagtcacccacgaagattacgtgaccacaagattgtgatacttgaaggaggaagcgtttaccatacacatacgtattttccgtagtgctctgggtgggggaaaatgtttaaattgtattagcaaatgctaacttacactttatagcatttatcagctgtggcatattacctgtaacatgtttaaattaaggcaaaggcaatcaaaaacctttttgttttgtagcctgcttttgctttcacaatttgtcttacaattgtttttgttaataaataaatgcaccttgaaaaaaaaaaaaaaaaaaaaaaaaaaaaa

SEQ ID NO: 12319 - DNA, 6193 bp, Homo sapiens
gtttcagatttgggatattggtgtttctgttttggagaaattattctttttctttttaatttgaagaaaaatcatcagtcttggaatacagaagagaaactagaaatatacgtattttgtttcacatttgaacagtcattcttgaggaatactccatacctgagtagacagccatgtggccatcgcagctactaattttcatgatgctcttagctccaataattcatgctttcagccgtgccccaattccaatggctgtggtccgcagagagctatcctgtgagagctatcctatagagcttcgctgtccaggaacagacgtcatcatgatagaaagtgccaactatggcaggactgatgacaaaatttgtgactctgaccctgctcagatggagaatatccgatgttatctgccagatgcctataagattatgtctcaaagatgcaataacagaacccagtgtgcagtggtggcaggtcctgatgtttttccagacccgtgtccaggaacctataaataccttgaagtgcagtatgaatgtgtcccttacaaagtggaacaaaaagtttttctttgtcctggactactaaaaggagtataccagagtgaacatttgtttgagtccgaccaccaatctggggcgtggtgcaaagaccctctgcaggcatctgacaagatttattatatgccctggactccctacagaactgataccctgactgagtattcatccaaggatgacttcattgctggaagaccaactacaacctacaagctccctcacagggtggatggcacaggatttgtagtgtatgatggagctttgttcttcaacaaagagcgcaccaggaacatagtaaagtttgatttgcggactaggataaagagtggagaggctatcatagcaaatgccaattaccatgatacctccccttaccgatggggaggcaaatctgacatagacctggcagtagatgagaatgggctatgggtaatctatgcaacagaacaaaacaatggtaaaattgtcattagtcaattgaacccttacaccctacggatcgaaggaacatgggatactgcatatgataaaaggtcagcttccaatgcctttatgatttgtggaattctgtatgtggtcaaatctgtatatgaggatgatgacaatgaggctactggaaataagattgactacatttacaacactgaccaaagcaaggatagtttggtggatgtaccctttcctaattcataccagtacattgcagctgtggattacaaccccagggacaacctactttatgtatggaataactatcacgtcgtgaaatattctttggattttggacctctggatagtagatcagggcaggcacatcatggacaagtttcatacatttctccgccaattcaccttgactctgagctagaaagaccctctgttaaagatatctctaccacaggacctcttggcatgggaagcactaccaccagtaccacccttcggaccacaactttgagcccaggaaggagtaccaccccgtcagtgtcaggaagaagaaaccggagtactagtaccccatctccagctgtcgaggtacttgatgacatgaccacacaccttccatcagcatcgtcccaaatcccagctctcgaagagagctgtgaggctgtggaagcccgagaaatcatgtggtttaagactcgtcaaggacagatagcaaagcagccatgccctgcaggaactataggtgtatcaacttatctatgccttgctcctgatggaatttgggatccccaaggtccagatctcagcaactgttcttctccttgggtcaatcatataacacagaagttgaaatctggtgaaacagctgccaacattgctagagagctggctgaacagacaagaaatcacttgaatgctggggacatcacctactctgtccgggccatggaccagctggtaggcctcctagatgtacagcttcggaacttgaccccaggtggaaaagatagtgctgcccggagtttgaacaagcttcagaaaagagagcgctcttgcagagcctatgtccaggcaatggtcgagacagttaacaacctccttcagccacaagctttgaatgcatggagagacctgactacgagtgatcagctgcgtgcggccaccatgttgcttcatactgtggaggaaagtgcttttgtgctggctgataaccttttgaagactgacattgtcagggagaatacagacaatattaaattggaagttgcaagactgagcacagaaggaaacttagaagacctaaaatttccagaaaacatgggccatggaagcactatccagctgtctgcaaataccttaaagcaaaatggccgaaatggagagatcagagtggcctttgtcctgtataacaacttgggtccttatttatccacggagaatgccagtatgaagttgggaacggaagctttgtccacaaatcattctgttattgtcaattcccctgttattacggcagcaataaacaaagagttcagtaacaaggtttatttggctgatcctgtggtatttactgttaaacatatcaagcagtcagaggaaaatttcaaccctaactgttcattttggagctactccaagcgtacaatgacaggttattggtcaacacaaggctgtcggctcctgacaacaaataagacacatactacatgctcttgtaaccacctaacaaattttgcagtactgatggcacatgtggaagttaagcacagtgatgcggtccatgacctccttctggatgtgatcacgtgggttggaattttgctgtcccttgtttgtctcctgatttgcatcttcacattttgctttttccgggggctccagagtgaccgtaacaccatccacaagaacctctgcatcagtctctttgtagcagagctgctcttcctgattgggatcaaccgaactgaccaaccaattgcctgtgctgttttcgctgccctgttacatttcttcttcttggctgccttcacctggatgttcctggagggggtgcagctttatatcatgctggtggaggtttttgagagtgaacattcacgtaggaaatacttttatctggtcggctatgggatgcctgcactcattgtggctgtgtcagctgcagtagactacaggagttatggaacagataaagtatgttggctccgacttgacacctacttcatttggagttttataggaccagcaactttgataattatgcttaatgtaatcttccttgggattgctttatataaaatgtttcatcatactgctatactgaaacctgaatcaggctgtcttgataacatcaactatgaggataacagacccttcatcaagtcatgggttataggtgcaatagctcttctctgcctattaggattgacctgggcctttggactcatgtatattaatgaaagcacagtcatcatggcctatctcttcaccattttcaattctctacagggaatgtttatatttattttccattgtgtcctacagaagaaggtacgaaaagagtatgggaaatgcctgcgaacacattgctgtagtggcaaaagtacagagagttccattggttcagggaaaacatctggttctcgaactcctggacgctactccacaggctcacagagccgaatccgtagaatgtggaatgacacggttcgaaagcagtcagagtcttcctttattactggagacataaacagttcagcgtcactcaacagagagccctacagagagacaagtatgggagtaaagctaaacattgcatatcaaataggggcttctgaacaatgccagggatacaagtgtcatggatactctaccactgaatggtaaccatggcaatagttacagcattgccagcggcgaatacctgagcaactgtgtgcaaatcatagaccgtggctataaccataacgagaccgccctagagaaaaagattctgaaggaactcacttccaactatatcccttcttacctgaacaaccatgagcgctccagtgaacagaacaggaatctgatgaacaagctggtgaataaccttggcagtggaagggaagatgatgccattgtcctggatgatgccacctcgtttaaccacgaggagagtttgggcctggaactcattcatgaggaatctgatgctcctttgctgcccccaagagtatactccaccgagaaccaccagccacaccattataccagaaggcggatcccccaagaccacagtgagagctttttccctttgctaaccaacgagcacacagaagatctccagtcaccccatagagactctctctataccagcatgccgacactggctggtgtggccgccacagagagtgttaccaccagcacccagaccgaacccccaccggccaaatgtggtgatgccgaagatgtttactacaaaagcatgccaaacctaggctccagaaaccacgtccatcagctgcatacttactaccagctaggtcgcggcagcagtgatggatttatagttcctccaaacaaagatgggacccctcccgagggaagttcaaaaggaccggctcatttggtcactagtctatagaagatgacacagaaattggaaccaacaaaactgctaacaccttgttgactgttctgagttgatataagcagtggtaataatgtgtgtactcctaaatctttatgctgtcctctaaagacaaacacaaactctcagacttttttttttttaatgggatttttaggtcagcccaggggagaaagataactgctaaaattcccctgtaccccatcctttcttgtcctttccccttcagatggagacttcattatgttaatgaacaagatatgaagaaaatggcactcattgtggccttgttgaattatgttgtgtatgttttaacatctctgatgctgtgttactaaaattacaaggacctgctttttaaaaggccagaacaattgtctgaaattagtaacaatgctgcatctagattggagtgctgcacaaacaaacataagagcaaagcaaaactgtatcacatagggtttttggtcactcacaacctgaattcaccacagctggaatagctgtggaaaacaaaataaaacaacaaaattaataatgaaatggaggggaattctagaattatatgctaaatgcatattttatgatttgctgtattaactgatgataaaactaatggcagaaaaagaagttgagcaatttctatgtaatgtacagatactagcattgcacatatagtctgctttctgttcctccagaatttgagtcctgttaatgtagtagaaaaaaaaaaaagaaattttctttttcttttgtgctggtcttgcaagtttgtctaccagtaagagagcaaagtttccttcctttcttctctttcttcattttctttttttcttttttgccttttattcctttaaaatttcgcctggcaaaaaataaataaatggaactatcactttataagaatcattttctagtaatgcaaacaaattattttttacaaaaaaacaaaataaataaaattagacttccttccctcactatatatctttatgcagtcagaatatttccaacagtgttttttgcaaattagagcaggacaaacttttatgtttacagggcacgtctgttgtaatgcaaagcatatttggcaagcagttcatcaccaggacactagctatgattctagaagtcaaaaggtgtctatagaactagtggggcttctgcatgtgaaaaacggttttccataggcattaaagtgctgaatgctcagtctgatcaacaagtgggcacctgcactaccactttttagaggaaattcactccctcgtaagcattggaaggtcaaattattttgaagtgatttttttaaaaaaaagtcttctgtttattaacaggaaaatttatttatttgacaggattttgagtaatgtaggaatacaaaaggtaaattagcagcacatataatttttttttaatttatgatccattttgtatggtctcaaagttggatgacctcattactaatatttgttgtaaaagtgaaacttgtttgccaaccaataaacaactgattgagatttagaagatattgtaaaaaaaaaaaaaaaaa

SEQ ID NO: 12320 - DNA, 1720 bp, Homo sapiens
cccaggcccagacgcaggcttcttctcctcgggtcttggtcctgcatcctctctctcccagagcctccgttagggggtgggaaaggactttgccataggtcgctgaggccaccatctgctctcttactggccaagggcgtaaaaagatagtcctcccattagctagagagcaaaccccagaaagcctattggctgcgccgtccgcgggccttggtccgctttgaaggcgggctgcggctgcgagaggagggcgggcgggaggctagctgttgtcgtggttgctcggaggcacgtgtgcagtcccggaagcggcgaggggaaactgctccgcgcgcgccgcgggaggaggaaccgcccggtcctttagggtccgggcccggccgggccatggattcaatgcctgagcccgcgtcccgctgtcttctgcttcttcccttgctgctgctgctgctgctgctgctgccggccccggagctgggcccgagccaggccggagctgaggagaacgactgggttcgcctgcccagcaaatgcgaagtgtgtaaatatgttgctgtggagctgaagtcagcctttgaggaaaccggcaagaccaaggaggtgattggcacgggctatggcatcctggaccagaaggcctctggagtcaaatacaccaagtcggacttgcggttaatcgaagtcactgagaccatttgcaagaggctcctggattatagcctgcacaaggagaggaccggcagcaatcgatttgccaagggcatgtcagagacctttgagacattacacaacctggtacacaaaggggtcaaggtggtgatggacatcccctatgagctgtggaacgagacttctgcagaggtggctgacctcaagaagcagtgtgatgtgctggtggaagagtttgaggaggtgatcgaggactggtacaggaaccaccaggaggaagacctgactgaattcctctgcgccaaccacgtgctgaagggaaaagacaccagttgcctggcagagcagtggtccggcaagaagggagacacagctgccctgggagggaagaagtccaagaagaagagcagcagggccaaggcagcaggcggcaggagtagcagcagcaaacaaaggaaggagctgggtggccttgagggagaccccagccccgaggaggatgagggcatccagaaggcatcccctctcacacacagcccccctgatgagctctgagcccacccagcatcctctgtcctgagacccctgattttgaagctgaggagtcaggggcatggctctggcaggccgggatggccccgcagccttcagcccctccttgccttggctgtgccctcttctgccaaggaaagacacaagccccaggaagaactcagagccgtcatgggtagcccacgccgtcctttcccctccccaagtgtttctctcctgacccagggttcaggcaggccttgtggtttcaggactgcaaggactccagtgtgaactcaggaggggcaggtgtcagaactgggcaccaggactggagccccctccggagaccaaactcaccatccctcagtcctccccaacagggtactaggactgcagccccctgtagctcctctctgcttacccctcctgtggacaccttgcactctgcctggcccttcccagagcccaaagagtaaaaatgttctggttctgaaaaaaaaaaaaaaaaaaaaaaaaa

SEQ ID NO: 12321 - DNA, 2416 bp, Homo sapiens
gggggatgaagggtcgttggtgggaaagatggcggcgactctgggaccccttgggtcgtggcagcagtggcggcgatgtttgtcggctcgggatgggtccaggatgttactccttcttcttttgttggggtctgggcaggggccacagcaagtcggggcgggtcaaacgttcgagtacttgaaacgggagcactcgctgtcgaagccctaccagggtgtgggcacaggcagttcctcactgtggaatctgatgggcaatgccatggtgatgacccagtatatccgccttaccccagatatgcaaagtaaacagggtgccttgtggaaccgggtgccatgtttcctgagagactgggagttgcaggtgcacttcaaaatccatggacaaggaaagaagaatctgcatggggatggcttggcaatctggtacacaaaggatcggatgcagccagggcctgtgtttggaaacatggacaaatttgtggggctgggagtatttgtagacacctaccccaatgaggagaagcagcaagagcgggtattcccctacatctcagccatggtgaacaacggctccctcagctatgatcatgagcgggatgggcggcctacagagctgggaggctgcacagccattgtccgcaatcttcattacgacaccttcctggtgattcgctacgtcaagaggcatttgacgataatgatggatattgatggcaagcatgagtggagggactgcattgaagtgcccggagtccgcctgccccgcggctactacttcggcacctcctccatcactggggatctctcagataatcatgatgtcatttccttgaagttgtttgaactgacagtggagagaaccccagaagaggaaaagctccatcgagatgtgttcttgccctcagtggacaatatgaagctgcctgagatgacagctccactgccgcccctgagtggcctggccctcttcctcatcgtctttttctccctggtgttttctgtatttgccatagtcattggtatcatactctacaacaaatggcaggaacagagccgaaagcgcttctactgagccctcctgctgccaccacttttgtgactgtcacccatgaggtatggaaggagcgggcactggcctgagcatgcagcctggagagtgttcttgtctctagcagctggttggggactatattctgtcactggagttttgaatgcagggaccccgcattcccatggttgtgcatggggacatctaactctggtctgggaagccacccaccccagggcaatgctgctgtgatgtgcctttccctgcagtccttccatgtgggagcagaggtgtgaagagaatttacgtggttgtgatgccaaaatcacggaacagaatttcatagcccaggctgccgtgttgtttgactcagaaggcccttctacttcagttttgaatccacaaagaattaaaaactggtaacaccacaggctttctgaccatccattcgttgggttttgcatttgacccaaccctctgcctacctgaggagctttctttggaaaccaggatggaaacttcttccctgccttaccttcctttcactccattcattgtcctctctgtgtgcaacctgagctgggaaaggcatttggatgcctctctgttggggcctggggctgcagaacacacctgcgtttcgctggccttcattaggtggccctagggagatggctttctgctttggatcactgttccctagcatgggtcttgggtctattggcatgtccatggccttcccaatcaagtctcttcaggccctcagtgaagtttggctaaaggttggtgtaaaaatcaagagaagcctggaagacaccatggatgccatggattagctgtgcaactgaccagctccaggtttgatcaaaccaaaagcaacatttgtcatgtggtctgaccatgtggagatgtttctggacttgctagagcctgcttagctgcatgttttgtagttacgatttttggaatccctctttgagtgctgaaagtgtaaggaagctttcttcttacaccttgggcttggatattgcccagagaagaaatttggcttttttttcttaatggacaagggacagttgctgttctcatgttccaagtctgagagcaacagaccctcatcatctgtgcctggaagagttcactgtcattgagcagcacagcctgagtgctggcctctgtcaacccttattccactgccttatttgacaaggggttacatgctgctcaccttactgccctgggattaaatcagttacaggccagagtctccttggagggcctggaactctgagtcctcctatgaacctctgtagcctaaatgaaattcttaaaatcaccgatggaaccaaaaaaaaaaaaaaaaaa

SEQ ID NO: 12322 - DNA, 828 bp, Homo sapiens
catccctctggctccagagctcagagccacccacagccgcagccatgctgtgcctcctgctcaccctgggcgtggccctggtctgtggtgtcccggccatggacatcccccagaccaagcaggacctggagctcccaaagttggcagggacctggcactccatggccatggcgaccaacaacatctccctcatggcgacactgaaggcccctctgagggtccacatcacctcactgttgcccacccccgaggacaacctggagatcgttctgcacagatgggagaacaacagctgtgttgagaagaaggtccttggagagaagactgagaatccaaagaagttcaagatcaactatacggtggcgaacgaggccacgctgctcgatactgactacgacaatttcctgtttctctgcctacaggacaccaccacccccatccagagcatgatgtgccagtacctggccagagtcctggtggaggacgatgagatcatgcagggattcatcagggctttcaggcccctgcccaggcacctatggtacttgctggacttgaaacagatggaagagccgtgccgtttctagctcacctccgcctccaggaagaccagactcccacccttccacacctccagagcagtgggacttcctcctgccctttcaaagaataaccacagctcagaagacgatgacgtggtcatctgtgtcgccatccccttcctgctgcacacctgcaccacggccatggggaggctgctccctgggggcagagtctctggcagaggttattaataaacccttggagcatgaaaaaaaaaaaaaaaaa

SEQ ID NO: 12323 - DNA, 3098 bp, Homo sapiens
tcctgcttgtcggcatcgctccccacaggccgacgtcgagagggcctgctttactcctcctctttctcctccttctcccgcggcttctgcgcggagaggcgtcgcccgggatctgggttttggaagaaggatctttgtgggaagacagggtgaatttatcacagaggaataacgagggagaggagaaaggtttcctaaagacaaaaaaaaaaatggaggaatctgtaaaccaaatgcagccactgaatgagaagcagatagccaattctcaggatggatatgtatggcaagtcactgacatgaatcgactacaccggttcttatgtttcggttctgaaggtgggacttattatatcaaagaacagaagttgggccttgaaaatgctgaagctttaattagattgattgaagatggcagaggatgtgaagtgatacaagaaataaagtcatttagtcaagaaggcagaaccacaaagcaagagcctatgctctttgcacttgccatttgttcccagtgctccgacataagcacaaaacaagcagcatttaaagctgtttctgaagtttgtcgcattcctacccatctctttacttttatccagtttaagaaagatctgaaggaaagcatgaaatgtggcatgtggggtcgtgccctccggaaggctatagcggactggtacaatgagaaaggtggcatggcccttgctctggcagttacaaaatataaacagagaaatggctggtctcacaaagatctattaagattgtcacatcttaaaccttccagtgaaggacttgcaattgtgaccaaatatattacaaagggctggaaagaagttcatgaattgtataaagaaaaagcactctctgtggagactgaaaaattattaaagtatctggaggctgtagagaaagtgaagcgcacaagagatgagctagaagtcattcatctaatagaagaacatagattagttagagaacatcttttaacaaatcacttaaagtctaaagaggtatggaaggctttgttacaagaaatgccgcttactgcattactaaggaatctaggaaagatgactgctaattcagtacttgaaccaggaaattcagaagtatctttagtatgtgaaaaactgtgtaatgaaaaactattaaaaaaggctcgtatacatccatttcatattttgatcgcattagaaacttacaagacaggtcatggtctcagagggaaactgaagtggcgccctgatgaagaaattttgaaagcattggatgctgctttttataaaacatttaagacagttgaaccaactggaaaacgtttcttactagctgttgatgtcagtgcttctatgaaccaaagagttttgggtagtatactcaacgctagtacagttgctgcagcaatgtgcatggttgtcacacgaacagaaaaagattcttatgtagttgctttttccgatgaaatggtaccatgtccagtgactacagatatgaccttacaacaggttttaatggctatgagtcagatcccagcaggtggaactgattgctctcttccaatgatctgggctcagaagacaaacacacctgctgatgtcttcattgtattcactgataatgagacctttgctggaggtgtccatcctgctattgctctgagggagtatcgaaagaaaatggatattccagctaaattgattgtttgtggaatgacatcaaatggtttcaccattgcagacccagatgatagaggcatgttggatatgtgcggctttgatactggagctctggatgtaattcgaaatttcacattagatatgatttaaccataagcagcagcacgatccagagatccattgccatcagtgatctcactaaaaatatacagctacttcccagctaatctccacccaatgaatgatgatggtatagtatgtgcataatggaaagttaccttactgaaaaaaaaaaaagaaggaaaaataagatgggcccaaaggtctatctactaaactagctcttggggaaatagcttcaggatactgtagtttcctctatctaatagagaactttttgttaacagacactgtaaaatagttttgctttgttgaataatacatgtgtacctaaaagaggtaagagcaaaaagtgtaattccacatcatgttacttgagaagtgcttaacgttttcttaaatgttttcattgggaaaggacagctttgataatgtccaaatactctgaaatgcactagaccatataactgtgatgaaatatgaaactcatctgtaaacttttataccaagggggtaaaaaaaaaaactaaggcatttgattaaattatgaatgagttttacaaattcctttcagagttttactaagatcacacaaataacagctttcttattcagtgaaaaagatattttatttctgatgttttatttgcactcgtggaatatgttaccattaatcagaaacatcatggcaacccctaagaatagactaagtttgtgttggctgagggattctatttggtttgcttttttttttttgctttgttatattttattgctacaaggggtgtgacttgataatgatttcctctgaattataataacatagccagatgtagtctcacactgtttttcatactcttaagtgtaaataatataaaatgtttcaagcgcttaactccccctcattcacaaagtataacaattaaaatctcaactataaccagtttagctttttccttacttttaaaataaaattttttacttttaactatttttttagttaatatttttaaaagtatacatgtcaatggcctctttgtccattattcattttgtggcaaaatattcttctttgatagtgtaaacaaataataaagcaatctaggtcctttaggtttgaaaggcaatttttgagtagcatattaccagctagccagtcactaggaatttttttcagtattatttgtatgtattaaacttttcattacactaaagtgcattattttattgagcaagtatccttcattgtgaggtttgacattaaagcaatctgttgaaatgccaaaaaaaaaaaaaaaa

SEQ ID NO: 12324 - DNA, 2709 bp, Homo sapiens
gggtcctgtcccatccatcctgacctgttccatctcagccccaggactcagtactgcggttgccaacactgctgccaggcatgatggatgggccacgttccgatgtgggccgttggggtggcaaccccttgcagccccctaccacgccatctccagagccagagccagagccagacggacgctctcgcagaggaggaggccgttccttctgggctcgctgctgtggctgctgttcatgccgaaatgcggcagatgacgactggggacctgaaccctctgactccaggggtcgagggtccagctctggcactcgaagacctggctcccggggctcagactcccgccggcctgtatcccggggcagcggtgtcaatgcagctggagatggcaccatccgagagggcatgctagtagtgaacggtgtggacttgctgagctcgcgctcggaccagaaccgccgagagcaccacacagacgagtatgagtacgacgagctgatagtgcgccgcgggcagcctttccatatgctcctcctcctgtcccggacctatgaatcctctgatcgcatcacccttgagttactcatcggaaacaaccccgaggtgggcaagggcacgcacgtgatcatcccagtgggcaaggggggcagtggaggctggaaagcccaggtggtcaaggccagtgggcagaatctgaacctgcgggtccacacttcccccaacgccatcatcggcaagtttcagttcacagtccgcacacaatcagacgctggggagttccagttgccctttgacccccgcaatgagatctacatcctcttcaacccctggtgcccagaggacattgtgtacgtggaccatgaggattggcggcaggagtatgttcttaatgagtctgggagaatttactacgggaccgaagcacagattggtgagcggacctggaactacggccagtttgaccacggggtgctggatgcctgcttatacatcctggaccggcgggggatgccatatggaggccgtggagacccagtcaatgtctcccgggtcatctctgccatggtgaactccctggatgacaatggagtcctgattgggaactggtctggtgattactcccgaggcaccaacccatcagcgtgggtgggcagcgtggagatcctgcttagctacctacgcacgggatattccgtcccctatggccagtgctgggtctttgctggagtgaccaccacagtgctgcgctgcctgggtctggccacccgtactgtcaccaacttcaactccgcccacgacacagacacatcccttaccatggacatctacttcgacgagaacatgaagcccctggagcacctgaaccatgattctgtctggaacttccatgtgtggaacgactgctggatgaagaggccggatctgccctcgggctttgatgggtggcaggtggtggatgccacaccccaagagactagcagtggcatcttctgctgcggcccctgctctgtggagtccatcaagaatggcctggtctacatgaagtacgacacgcctttcatttttgctgaggtgaatagtgacaaggtgtactggcagcggcaggatgatggcagcttcaagattgtttatgtggaggagaaggccatcggcacactcattgtcacaaaggccatcagctccaacatgcgggaggacatcacctacctctataagcacccagaaggctcagacgcagagcggaaggcagtagagacagcagcagcccacggcagcaaacccaatgtgtatgccaaccggggctcagcggaggatgtggccatgcaggtggaggcacaggacgcggtgatggggcaggatctgatggtctctgtgatgctgatcaatcacagcagcagccgccgcacagtgaaactgcacctctacctctcagtcactttctatactggtgtcagtggtaccatcttcaaggagaccaagaaggaagtggagctggcaccaggggcctcggaccgtgtgaccatgccagtggcctacaaggaataccggccccatcttgtggaccagggggccatgctgctcaatgtctcaggccacgtcaaggagagcgggcaggtgctggccaagcagcacaccttccgtctgcgcaccccagacctctccctcacgttactgggagcagcagtggttggccaggagtgtgaagtacagattgtcttcaagaacccccttcccgtcaccctcaccaatgtcgtcttccggctcgaaggctctgggttacagaggcccaagatcctcaacgttggggacattggaggcaatgaaacagtgacactgcgccagtcgtttgtgcctgtgcgaccaggcccccgccagctcattgccagcttggacagcccacagctctcccaggtgcacggtgtcatccaggtggatgtggccccagcccctggggatgggggcttcttctcagacgctggaggtgacagtcacttaggagagaccatccctatggcatctcgaggtggagcttagccctgtgccaggagcaatgggactggagtcagatgagcaaggacattgccccaagataggggcacactacagagcagctccccaggagctcaggtggggagtccagggctcccggagagggagtcagtcttcacttgcactgggggaacagatgctaataaactgttttttaatg

SEQ ID NO: 12325 - DNA, 5556 bp, Homo sapiens
gtcgtgctctcctcggtaggggaggaattggttaggcggcggcggcggcgaagcggcggcggcggctgtaggggagcagcggcagtggcggcgacggcgaggaggtgttcggtttgcgcagcgtagaaacgcccgcagcttcagagaaggagttcttgtgggaccaaattaggcattctgaacccacgccggcttagctgggccgagtccaggcgctgccgcacgtacagttttggtggcggtgacagacactgttcttgactctaggggcctattaggccgacgtctgaggcgcagatcgctggctctcgacgcattactctttacgccttacatttctgtcttccttcctgggtcagtgattcccggaccctggaagagaagagggtggctaatgattaaggctttccttaaagtttcccatgtctcaatggactcctgaatataacgagctctacaccttaaaagtggatatgaagagtgagattccttctgatgcaccaaagacacaggagagtctgaaagggatccttttgcatccagagcccattggggcagccaaaagttttcctgcaggagttgagatgattaatagtaaagtggggaatgaattctctcacctgtgtgatgattctcaaaagcaagagaaggaaatgaatggtaaccagcaagaacaagaaaaaagtctcgttgtgaggaaaaaacgcaaaagccagcaggctggcccttcgtatgtgcagaattgtgttaaagaaaaccagggaatattaggactgaggcaacacctagggacaccaagtgatgaagataatgattcctcttttagtgattgtctttcttctccttcatctagtctgcattttggagattctgatactgtgacttcagatgaggataaagaagtctctgtaagacattcccagaccattttgaatgctaaaagtagaagccatagtgcacggtctcataagtggcctcggactgagacagaatctgtatcgggattgttaatgaaaagaccctgtttacatggcagttcgttacggagacttccatgcagaaagagatttgtaaaaaataattcctcacagaggacacagaaacaaaaagagaggatattaatgcagaggaagaaacgagaagtgttagctcgaagaaaatatgccttgctacctagttctagtagttccagtgagaatgacctcagcagtgaatcctcttctagctcatcaactgaaggagaagaagatttgtttgtttctgccagtgaaaaccaccaaaacaatccagctgttccctcaggaagtattgatgaagatgttgtggtgatagaagcttcctccactccccaggttactgccaatgaagaaattaatgttacctcaactgacagtgaagtggagattgtaacagttggagaaagctatcggtctcgttcaacccttggacactccagatctcattggagccagggttccagttctcatgcaagtcggccacaggagccacggaaccgcagtaggatttctactgttatacagcccttgaggcagaatgcagcagaagttgtggaccttaccgttgatgaagatgaacctactgtagtaccaaccacttctgcaagaatggaatcacaagctactagcgcttccattaacaattcaaatccatctacctctgagcaggcctctgatactgcttcagctgtcaccagtagccaaccttccacagtgtcagagacttcagctactcttacaagcaatagtaccactggcacttctataggagatgactcaaggagaactacatctagtgctgtaacggaaactggccctcctgcaatgccaaggttaccttcctgctgtccccagcactcaccatgtggagggtcgtcacagaaccaccatgcattaggacatcctcatacaagttgctttcagcagcatggtcaccattttcaacatcatcaccaccaccaccatactccccacccagctgtcccagtttctccttcctttagtgatcctgcttgccctgtggaaagacctccacaagtacaagcaccttgtggagcaaatagtagttctggtaccagctatcatgaacagcaggcattgccagtggacctgagcaacagtggtatcagaagtcatggaagtggcagttttcatggagcatctgcatttgacccctgctgccctgtttcttcctcccgagctgcaatctttggccatcaggccgctgctgctgccccaagtcaacctttatcatcaatagatggctatggatcaagcatggttgcgcagccccagccccagccccctccacagccctctctctcatcatgtcgacattacatgccacccccttatgcctctttgacaaggccacttcatcatcaagcttctgcctgcccgcattctcatggaaacccccctcctcagactcagcctccgcctcaagtggattatgttattcctcatcctgtacatgctttccattctcaaatatcttctcatgcaacatctcatcctgtggcacccccaccaccaactcacttagccagtacagctgcaccaatccctcagcatcttcctcctacacaccagccaatttcgcaccatattccagccacagcacctccagcacagagactgcatcctcatgaagtgatgcagaggatggaagttcaaaggaggaggatgatgcagcatccaacgcgggcacatgaacgccccccaccccatccacataggatgcacccaaactatggtcatgggcatcatattcatgtgcctcagactatgtcctcacatcctcgacaggctccagagaggtctgcctgggaactgggaattgaagctggagtgactgcagctacttatacacctggtgcattgcatcctcacttggcccattatcacgcacctcctcgacttcatcacttacaattaggagctcttcctttaatggttcctgatatggcaggctatcctcacatccgttacatttcatcaggattggatggaacatcattcagaggtcctttcaggggcaattttgaggaactgattcatttggaagaaagattaggcaatgtcaatcgtggagcatcccaggggacaattgaaagatgtacatatccacataaatacaaaaagaggaaactgcactgcaaacaagatggggaagaagggactgaggaagacacagaggaaaaatgtactatctgtttgtctattttagaggaaggtgaagatgtgagacgtcttccatgtatgcaccttttccaccaagtgtgtgttgaccaatggttgattaccaataagaagtgccccatatgcagagtggacattgaggcccagctgccaagtgaaagttgacaccatgtttcagaactcttgccctccctctcattcccatccttcctggtactgcagtcaaccaaagatggcatgacttacctgcgcagatttggaagcattgaacttagagtgctggctctgctatatggtacaactaatgctagacctacagtttatgtatacagttgattttgatgtatttataaaagcttttttttctagatttgacatttttctgtatcattttactgtatttttgcatggttccttgtattgcatttctttgcacatattatgggcttgtgaccctaaacttgcaggcaaggttagctgctttagtaagtagaattttgtggtctttttgttttttacatagtaccaagccttgataattatgaattttttatccattactaacctttaatttaatcaatcatgtactttagtttaatgtataaagatcctctagaaaatgataatattgtgtattaagacattccttaattaggacaaaatggctgctgtatatttactatatggagttctgagttaaataccatccttaatactgggaacagaatacaacccatataaatcagatgcaggtggtagtcacatcaccagagtgatcagtataaattttcttggtgtatccttttcctttcaacacagtgcagataagagttgaatattgatatcatacatttagactgctgttctgattgcatttatctttttcctacatcatttagaattttatttccctgattcagtttttgctgctgtgaaacagctctgatgaacactaaatattaatttcaattagctagattgtacatacttgcagatttaacaaaattttagggaaattgaaaaagacatgtagaatttgttgtcttctgctaagcacgaaaagttaagatatctgcttacattgattttgtagacacattaagtcaagatttggaatttaagtcactggcaggtatctgtgcattcatagaacttataaaggtcccaggatcacttttaagggatttttattagtttaaaggtaaataaagtcagctgaatctacatgtctcttgttttatttctctctaaacttgaaaacagtaaatctgcagatactgtgaggcacaaattatactgtcaacctactgttgctatggttatatactcccacttcatacattaccaagagtcgatcactgatttaaaatttttaatttctatagttaagatttactgcataatatagaatataaagttaagttaacatactaacatttctcctttggaggaagttttaatctacttcaggatgcatattattatcaagatactttcatatacaggatagcctaattttatttgtttaaatatgcttaatatgccccagattgcaaatgcatccagtcagtaatatcactgtctgtatgtggaggacatgttcccatggatcatatgtgaagatgtcaataagcttgcattaagccacctgctttgtaagtggattgattaataaataacttatatttctattgtctttgtgtttcataattagtttttataaaaacagtttacattaaacatcttggaattcaacaatagtgatctcactcaaattgacatttgcataatttgacatttatattcattcagttatgactacttgcccttttcttcatattagtaaatgttacactgtagtagttgtcaatgttaacaggcttcaacatagtatgtgtgcagatggacgatggatttaaagagcataccttatgattaaaccgaggttatagaaggtcaggggagagtgaaggagtcagtgacctatgtctgccatcttactggggaaaagagcaagtagcctgtcttcctttaagtaagtagcctgtaatggatgtactactttgccactggaataccccgggtctgtgccaagggactgaagaagtgtaagatggggagaactgtatgtcatggagtcctcttgacgttcccccagatacaagtaaagcacaggtggatttctctatttttgaatactacatcagatttagatgcacgactacctgttgacttgttttataattgctactgatttttttaatgtaggcaaagctttgttactttgaaatttatttaataaaagtatttgtgacataaaaaaaaaaaaaaaaaaaaa

SEQ ID NO: 12326 - DNA, 2332 bp, Homo sapiens
atgaaaagtcttgatttaaaaaaaaattttcaacaagagaaaaccaaggctgctaactgttgctgcagtcgttggaacaacaggatttctttgaatgttctctgtatcaacttatcccctcaaactctcacaagcggttaccaccggtgctccagccgcgcccgccggttggccgttcagccgttgccctggcgacgccgatgttgtggttccgcggcgcgctgggagtttgggtttggttggctgcagccagccagccgtgtaaaaactccaacgccgggcgccgcgggcagcacccacggagacccgcggggagctgctgcagctcctggcaactggtcaagcaggcagcgtccagcgcacccgcgaacaccaggtccggcagcatctgtcttttcccgcagcgtgcagcgcctgaccatgaggaacacaagcaaggaacttcagggcgccacgcaccgctacgctccctgcgattggtattaccacgtcccagtgaagcgctctgagaaggccgtggatgccccaccagcgtcccagatcccaggtctcagcaatttgggagactcacacagcgagaacctgcctgggactcggagatactggataaaagaaacagattcggaatatgtgaagctcgcgaaacaaggtggcaggcccgatttgttgaagcactttgcccctggaaccaggaaaggctctccagtggcctactccctgccagactggtatatccaccacagcaagccaccgacagccagccagcaagaagtgcgggctgtctccatgccggattacatggttcatgaagaatttaaccccgatcaagccaatggtagctatgcatccagaagagggcccttcgacttcgacatgaaaacagtttggcaaagagaggctgaggaacttgaaaaggagaaaaaaaagctgaggctaccggccattgactcaaagtatctgagcaaagcaggcaccccacttggccctaagaatcctgcaggaagtagactctccttcccccccgtgcctggtcaaaaaaacagttcacctaccaatttttccaaactcattagcaatggttataaggatgagtggttgcagcagcagcagcgagctgactcagacaagaggaccccgaagacctccagggcatcagtgttatctcagtccccacgagacctggaaggtccccaggatgcagccaggctccaggatgcagaggcttctgaaggtcctgaggacaccccagagtcttctcaaagcccagaagaatctgtatctgcatcaacaccagcagagctcaaataaatcctgatgcaatatgtatttaggataatttttaaatggctaaatatgacatgactgtattatagctatatttctgaggctttttttgtattttattaatatagactctcattgaataatttaccttgcagcagatttgacattgctgcatagaaggggcaggtgttggtttttgtttcttgcatttctctgggatgtgaaacacttggctaacaaacacaactaaggcctctggtaccctctgccctgctggcctggtgatgtcccagtgtctcagaactgatcacttgctcctcctattgtgtgaaccactcttagcaggcattgctactggattcttaactagagaaaacttacagaacaggtgttaagccttttccaatatttagtattgtagtcttcatagaaatcatttctagttacagaaaaatttaactccagaatatggtgatacagtttatgttaagaaacatattttaatttattatgccatgaatttataaacatttaatataaaacattataacatttgctgttttaaaatttttgctattttttcacaaactgatattcaaaatattaaacatttgttattttgtataaacctttaagtaaaaatatgctgttttaatatttaatttagtagaattaacaaaaactttttaatagtcaaactgaattaccttgttttataaatgttaaattgtttatatttaagtaattagcttaaaaatatagttttatgttttgtacattaattgattaataaaataataattttatgtgagaatgttttcaaaaagccaaataaagtcacagatattttagcttctttcccagaataaacttatcatgcatttgcttacctaaaatttaagtttcaaattagttctctatatgagatacttaatcgagcatatatatttatattcattgatcaaactgatatgctacaggagaatgtatgcaatgtgtaaaaaatgcaaatggctgtatgcattgaataaaaataatatacaattag

SEQ ID NO: 12327 - DNA, 5809 bp, Homo sapiens
gggaagatggcggcggcctcgagcacccttctcttcttgccgccggggacttcagattgatccttcccgggaagagtagggactgctggtgccctgcgtcccgggatcccgagccaacttgtttcctccgttagtggtggggaagggcttatccttttgtggcggatctagcttctcctcgccttcaggatgaaagctcagggggaaaccgaggagtcagaaaagctgagtaagatgagttctctcctggaacggctccatgcaaaatttaaccaaaatagaccctggagtgaaaccattaagcttgtgcgtcaagtcatggagaagagggttgtgatgagttctggagggcatcaacatttggtcagctgtttggagacattgcagaaggctctcaaagtaacatctttaccagcaatgactgatcgtttggagtccatagcaagacagaatggactgggctctcatctcagtgccagtggcactgaatgttacatcacgtcagatatgttctatgtggaagtgcagttagatcctgcaggacagctttgtgatgtaaaagtggctcaccatggggagaatcctgtgagctgtccggagcttgtacagcagctaagggaaaaaaattttgatgaattttctaagcaccttaagggccttgttaatctgtataaccttccaggggacaacaaactgaagactaaaatgtacttggctctccaatccttagaacaagatctttctaaaatggcaattatgtactggaaagcaactaatgctggtcccttggataagattcttcatggaagtgttggctatctcacaccaaggagtgggggtcatttaatgaacctgaagtactatgtctctccttctgacctactggatgacaagactgcatctcccatcattttgcatgagaataatgtttctcgatctttgggcatgaatgcatcagtgacaattgaaggaacatctgctgtgtacaaactcccaattgcaccattaattatggggtcacatccagttgacaataaatggaccccttccttctcctcaatcaccagtgccaacagtgttgatcttcctgcctgtttcttcttgaaatttccccagccaatcccagtatctagagcatttgttcagaaactgcagaactgcacaggaattccattgtttgaaactcaaccaacttatgcacccctgtatgaactgatcactcagtttgagctatcaaaggaccctgaccccatacctttgaatcacaacatgagattttatgctgctcttcctggtcagcagcactgctatttcctcaacaaggatgctcctcttccagatggccgaagtctacagggaacccttgttagcaaaatcacctttcagcaccctggccgagttcctcttatcctaaatctgatcagacaccaagtggcctataacaccctcattggaagctgtgtcaaaagaactattctgaaagaagattctcctgggcttctccaatttgaagtgtgtcctctctcagagtctcgtttcagcgtatcttttcagcaccctgtgaatgactccctggtgtgtgtggtaatggatgtgcaggactcaacacatgtgagctgtaaactctacaaagggctgtcggatgcactgatctgcacagatgacttcattgccaaagttgttcaaagatgtatgtccatccctgtgacgatgagggctattcggaggaaagctgaaaccattcaagccgacaccccagcactgtccctcattgcagagacagttgaagacatggtgaaaaagaacctgcccccggctagcagcccagggtatggcatgaccacaggcaacaacccaatgagtggtaccactacaccaaccaacacctttccggggggtcccattaccaccttgtttaatatgagcatgagcatcaaagatcggcatgagtcggtgggccatggggaggacttcagcaaggtgtctcagaacccaattcttaccagtttgttgcaaatcacagggaacggggggtctaccattggctcgagtccgacccctcctcatcacacgccgccacctgtctcttcgatggccggcaacaccaagaaccacccgatgctcatgaaccttcttaaagataatcctgcccaggatttctcaaccctttatggaagcagccctttagaaaggcagaactcctcttccggctcaccccgcatggaaatatgctcggggagcaacaagaccaagaaaaagaagtcatcaagattaccacctgagaaaccaaagcaccagactgaagatgactttcagagggagctattttcaatggatgttgactcacagaaccctatctttgatgtcaacatgacagctgacacgctggatacgccacacatcactccagctccaagccagtgtagcactcccccaacaacttacccacaaccagtacctcacccccaacccagtattcaaaggatggtccgactatccagttcagacagcattggcccagatgtaactgacatcctttcagacattgcagaagaagcttctaaacttcccagcactagtgatgattgcccagccattggcacccctcttcgagattcttcaagctctgggcattctcagagtaccctgtttgactctgatgtctttcaaactaacaataatgaaaatccatacactgatccagctgatcttattgcagatgctgctggaagccccagtagtgactctcctaccaatcatttttttcatgatggagtagatttcaatcctgatttattgaacagccagagccaaagtggttttggagaagaatattttgatgaaagcagccaaagtggggataatgatgatttcaaaggatttgcatctcaggcactaaatactttgggggtgccaatgcttggaggtgataatggggagaccaagtttaagggcaataaccaagccgacacagttgatttcagtattatttcagtagccggcaaagctttagctcctgcagatcttatggagcatcacagtggtagtcagggtcctttactgaccactggggacttagggaaagaaaagactcaaaagagggtaaaggaaggcaatggcaccagtaatagtactctctcggggcccggattagacagcaaaccagggaagcgcagtcggaccccttctaatgatgggaaaagcaaagataagcctccaaagcggaagaaggcagacactgagggaaagtctccatctcatagttcttctaacagaccttttaccccacctaccagtacaggtggatctaaatcgccaggcagtgcaggaagatctcagactcccccaggtgttgccacaccacccattcccaaaatcactattcagattcctaagggaacagtgatggtgggcaagccttcctctcacagtcagtataccagcagtggttctgtgtcttcctcaggcagcaaaagccaccatagccattcttcctcctcttcctcatctgcttccacctcagggaagatgaaaagcagtaaatcagaaggttcatcaagttccaagttaagtagcagtatgtattctagccaggggtcttctggatctagccagtccaaaaattcatcccagtctggggggaagccaggctcctctcccataaccaagcatggactgagcagtggctctagcagcaccaagatgaaacctcaaggaaagccatcatcacttatgaatccttctttaagtaaaccaaacatatccccttctcattcaaggccacctggaggctctgacaagcttgcctctccaatgaagcctgttcctggaactcctccatcctctaaagccaagtcccctatcagttcaggttctggtggttctcatatgtctggaactagttcaagctctggcatgaagtcatcttcagggttaggatcctcaggctcgttgtcccagaaaactcccccatcatctaattcctgtacggcatcttcctcctccttttcctcaagtggctcttccatgtcatcctctcagaaccagcatgggagttctaaaggaaaatctcccagcagaaacaagaagccgtccttgacagctgtcatagataaactgaagcatggggttgtcaccagtggccctgggggtgaagacccactggacggccagatgggggtgagcacaaattcttccagccatcctatgtcctccaaacataacatgtcaggaggagagtttcagggcaagcgtgagaaaagtgataaagacaaatcaaaggtttccacctccgggagttcagtggattcttctaagaagacctcagagtcaaaaaatgtggggagcacaggtgtggcaaaaattatcatcagtaagcatgatggaggctcccctagcattaaagccaaagtgactttgcagaaacctggggaaagtagtggagaagggcttaggcctcaaatggcttcttctaaaaactatggctctccactcatcagtggttccactccaaagcatgagcgtggctctcccagccatagtaagtcaccagcatataccccccagaatctggacagtgaaagtgagtcaggctcctccatagcagagaaatcttatcagaatagtcccagctcagacgatggtatccgaccacttccagaatacagcacagagaaacataagaagcacaaaaaggaaaagaagaaagtaaaagacaaagatagggaccgagaccgggacaaagaccgagacaagaaaaaatctcatagcatcaagccagagagttggtccaaatcacccatctcttcagaccagtccttgtctatgacaagtaacacaatcttatctgcagacagaccctcaaggctcagcccagactttatgattggggaggaagatgatgatcttatggatgtggccctgattgggaattaggaaccttatttcctaaaagaaacagggccagaggaaaaaaaactattgataagtttataggcaaaccaccataaggggtgagtcagacaggtctgatttggttaagaatcctaaatggcatggctttgacatcaagctgggtgaattagaaaggcatatccagaccctattaaagaaaccacagggtttgattctggttaccaggaagtcttctttgttcctgtgccagaaagaaagttaaaatacttgcttaagaaagggaggggggtgggaggggtgtagggagagggaagggagggaaacagttttgtgggaaatattcatatatattttcttctccctttttccatttttaggccatgttttaaactcattttagtgcatgtatatgaagggctgggcagaaaatgaaaaagcaatacattccttgatgcatttgcatgaaggttgttcaactttgtttgaggtagttgtccgtttgagtcatgggcaaatgaaggactttggtcattttggacacttaagtaatgtttggtgtctgtttcttaggagtgactgggggagggaagattattttagctatttatttgtaatattttaaccctttatctgtttgtttttatacagtgtttcgttctaaatctatgaggtttagggttcaaaatgatggaaggccgaagagcaaggcttatatggtggtagggagcttatagcttgtgctaatactgtagcatcaagcccaagcaaattagtcagagcccgcctttagagttaaatataatagaaaaaccaaaatgatatttttattttaggagggtttaaatagggttcagagatcataggaatattaggagttacctctctgtggaggtat

SEQ ID NO: 12328 - DNA, 1508 bp, Homo sapiens
gagagaccttggagcgcgcgggaaagagaccaatataaactgtggcgggatagttttcgggtccttgtccagtgaaacaccctcggctgggaagtcagttcgttctctcctctcctctcttcttgtttgaacatggtgcggactaaagcagacagtgttccaggcacttacagaaaagtggtggctgctcgagcccccagaaaggtgcttggttcttccacctctgccactaattcgacatcagtttcatcgaggaaagctgaaaataaatatgcaggagggaaccccgtttgcgtgcgcccaactcccaagtggcaaaaaggaattggagaattctttaggttgtcccctaaagattctgaaaaagagaatcagattcctgaagaggcaggaagcagtggcttaggaaaagcaaagagaaaagcatgtcctttgcaacctgatcacacaaatgatgaaaaagaatagaactttctcattcatctttgaataacgtctccttgtttaccctggtattctagaatgtaaatttacataaatgtgtttgttccaattagctttgttgaacaggcatttaattaaaaaatttaggtttaaatttagatgttcaaaagtagttgtgaaatttgagaatttgtaagactaattatggtaacttagcttagtattcaatataatgcattgtttggtttcttttaccaaattaagtgtctagttcttgctaaaatcaagtcattgcattgtgttctaattacaagtatgttgtatttgagatttgcttagattgttgtactgctgccatttttattggtgtttgattattggaatggtgccatattgtcactccttctacttgctttaaaaagcagagttagatttttgcacattaaaaaattcagtattaattaaacattacttattctaccctcttttttggcaaggaggacaaatacgcaatgttggaaaaccttggatggatatcttctctttaaaaaaatgtaaagataatttggtcttgagggtttaaacggttgataatgcctctacaacaacaagaaaaaagataaaatactaggatagaatcatggtgggcacagtggcttctcaggaggctgaggagggaggtttgcttgagtccaggagttggagaccagcccaggcaacatagcgtaaaccctatctctaaaacaatttttagccaggtgcggtggctcacgcctgtaatcccagcactctgggaggccgaggcgggtggatcatgaggtcaggagatcgagaccatcctgcctaacaaggtgaaaccccgtctctactaaaaatacaaaaaattagccgggcgcggtggcgggcgcctgtagtcccagctactcgggaggctgaggcaggagaatggcgtgaacccgggaagtggagcttgcagtgagccgagattgcgccactgcagtcggcagtccggcttgggcgacagagcgagactccgtctcaaaaaaaaaaaaaaaaaaaaaaaa

SEQ ID NO: 12329 - DNA, 9908 bp, Homo sapiens
caaccatgtaagcagcttcgcttcctgccgcaaccgtccgcggcctgaggagcccaccgccgctctcgggggccgacttccgggggctgagccgttgaagcggaggctggggcggggggcagccggcgcggccggggcaggaggcgcagactcatgaaatggccacagatgataagacgtccccaacactggactctgctaatgatttgcctcgatctcctactagtccttctcatctcacacactttaaacctttgactcctgatcaagatgagcccccttttaaatcagcttatagttcttttgtaaatctctttcgttttaacaaagagagagcagaaggaggccagggagaacagcagcctttgagtggaagttggaccagccctcagctcccttcgaggacacagtctgttaggtcacccacaccttataaaaagcagcttaatgaggaactccagcggcgctcttcagcattagacacaagaaggaaagcagaacctacctttggaggtcatgaccctcgtacagctgttcagcttcgaagcctcagcacagtattaaaacgcctcaaggaaatcatggaggggaaaagccaggatagtgacctgaaacaatactggatgccagatagccaatgtaaagagtgctatgactgtagtgagaaatttacaacctttaggcgcagacaccattgccgactatgtgggcagattttctgcagtcgttgctgtaatcaagaaatccctggaaaatttatgggctatacaggagacctccgagcttgcacatattgtagaaaaatagccttaagttatgctcattccacagacagtaattctattggggaagacttgaatgctctttcagattctgcttgctctgtgtctgtgcttgatccaagtgaaccccgaacacctgttgggagtaggaaagccagccgtaacatatttttagaggatgatttggcctggcaaagtttgattcatccagattcctcaaatactcctctttcaacaagacttgtatctgtgcaagaggatgctgggaaatctcctgctcgaaatagatcagccagcattactaacctgtcactggatagatctggttctcctatggtaccttcatatgagacatctgtcagtccccaggctaaccgaacatatgttaggacagagaccactgaggatgaacgcaaaattcttctggacagtgtgcagttaaaagacctgtggaaaaaaatctgccatcacagcagtggaatggagtttcaggatcaccgctactggttgagaacgcatcccaactgcattgtaggaaaggaattagtcaactggctaatccgaaatgggcatattgccacaagggcacaagctatagcaattggacaagcaatggttgatggacgttggctggattgtgttagtcatcacgaccagcttttcagagatgagtatgcgctgtatagaccactgcagagtacagaattttctgagacgccttctcccgacagtgactcagtgaactccgtggaaggacactctgagccatcctggtttaaagacataaagtttgatgacagtgacacagaacagatagctgaagaaggtgacgataatttggctaattctgccagtcctagcaagcgcacatcagtcagcagtttccagtccacagtggacagtgactcagccgcttctatcagcctgaacgtggagctggacaacgtgaacttccatatcaagaagccctccaagtacccacatgtgccccctcaccctgctgaccaaaaagagtatttgatttctgacactggaggacaacagctctcaataagtgacgctttcatcaaagaatccttatttaatcgccgagtagaggaaaaatccaaagagctgcctttcacacctttgggctggcatcataacaacctggagctcctgagggaggagaatggggagaaacaagccatggagaggttgctttcagctaatcataaccacatgatggcactactccagcagttgctccatagtgactcactgtcatcatcttggagggacatcatcgtgtcattggtctgccaggttgttcagacagtccgacctgatgtcaagaaccaggatgatgacatggatatccgtcagtttgtccacatcaaaaaaatcccaggtggaaagaagtttgattctgtggttgtcaatggctttgtttgtaccaagaacattgcacataaaaagatgaattcttgtattaaaaaccctaaaattcttctgttgaagtgttccattgagtatctctacagagaagaaactaagtttacttgcattgatcctattgtgcttcaggaaagggaattcttgaagaattatgtccagcgaatagttgatgttcgacccaccttggttcttgttgagaaaacagtgtctcggattgcccaggacatgttattggaacatggcattactttggtcattaatgtaaagtcacaagttttggaacgaatcagtcgaatgacccaaggtgatttagtgatgtcaatggaccagctgcttacgaaaccacacctgggcacttgtcacaaattttatatgcagatatttcagttgcctaatgaacaaaccaagacactgatgttttttgaaggttgtccacagcacctaggctgtacaatcaagctaagaggaggctctgattatgagctggctcgagttaaggagatcctaatatttatgatctgtgttgcttatcattctcaactagaaatatcctttctcatggatgaatttgctatgcctcccacattaatgcaaaacccttcattccattccctgattgagggacgagggcatgagggggctgtccaagagcagtacggtggaggttccatcccctgggatcctgacatccctcctgagtctctgccctgtgatgatagcagtttgctggaatcgaggattgtgtttgagaagggtgagcaggaaaataaaaatcttccgcaggctgttgcctctgtgaagcatcaagaacatagcacaacagcttgcccggcgggtctcccttgtgctttctttgcacctgtaccggaatcattgttgccactccctgtggatgaccaacaagatgctttaggcagcgagctgccagagagtttgcagcaaacagttgtgctgcaggatcccaaaagccagataagagcctttagagaccctctacaggatgacactggattatatgttactgaggaagtcacctcctctgaagataaacgaaagacttattctttggcctttaagcaggaattaaaagatgtgatcctctgtatctccccagtaatcacattccgagaaccctttcttttaactgaaaaggggatgagatgctctacccgagattattttgcagagcaggtttactggtctcctctcctcaataaagaattcaaagaaatggagaacaggaggaagaaacagctgctcagggatctctctggacttcagggcatgaatggaagtattcaggccaagtctattcaagtcttaccctcacatgagctagtgagcactagaattgctgagcatctgggcgatagccagagcttgggtagaatgctggccgattatcgagccagaggaggaagaattcagcccaaaaattcagacccttttgctcattcaaaggatgcatcaagtacttcaagtggcaaatcaggaagcaaaaatgagggtgatgaagagagagggcttattctgagtgatgctgtgtggtcaacaaaggtggactgtctgaatcccattaatcaccagagactttgtgtgctcttcagcagctcttctgcccagtccagcaatgctcctagtgcctgtgtcagtccttggattgtaacaatggaattttatggaaagaatgatcttacattaggaatatttttagagagatactgtttcaggccttcttatcagtgtccaagcatgttctgtgatacccccatggtacatcatattcggcgctttgttcatggccaaggctgtgtgcagataatcctgaaggagttggattctccagtacctggatatcagcatacaattcttacatattcctggtgtagaatctgcaaacaggtaacaccagttgttgctctttccaatgagtcctggtctatgtcatttgcaaaataccttgaacttaggttttatgggcaccagtatactcgcagagccaacgctgagccctgtggtcactccatccatcatgattatcaccagtatttctcctataaccagatggtggcgtctttcagttattctcccattcggcttcttgaagtatgtgttccactccccaaaatattcattaagcgtcaggccccattaaaagtgtcccttcttcaggatctgaaggacttctttcaaaaagtttcacaggtatatgttgccattgatgaaagacttgcatctttgaaaactgatacatttagtaaaacaagagaggaaaaaatggaagatatttttgcacagaaagagatggaagaaggtgagttcaagaactggattgagaagatgcaagcaaggctcatgtcttcctctgtagatacccctcagcaactgcagtcggtctttgagtcactcattgccaagaaacaaagtctctgtgaagtgctgcaagcttggaataacaggttgcaggaccttttccaacaggaaaagggtagaaagagaccttcagttcctccaagtcctggaagactgagacaaggggaagaaagcaagataagtgcgatggatgcatctccacggaatatttctccaggacttcagaatggagaaaaagaggatcgcttcttaacaactttgtccagccagagctccaccagttctactcatctccaattgcctacgccacctgaagtcatgtctgaacagtcagtgggagggccccctgagctagatacagccagcagttccgaagatgtgtttgatgggcatttgctgggatccacagacagccaagtgaaggaaaagtcaaccatgaaagccatctttgcaaatttgcttccaggaaatagctataatcctattccatttccttttgatccagataaacactacttaatgtatgaacatgaacgagtgcccattgcagtctgcgagaaggaacccagctccatcattgcttttgctctcagttgtaaagaataccgaaatgccttagaggaattgtctaaagcgactcagtggaacagtgccgaagaagggcttccaacaaatagtacttcagatagcagaccaaagagtagcagccctatcagattacctgaaatgagtggaggacagacaaatcgtacaacagaaacagaaccacaaccaaccaaaaaggcttctggaatgttgtccttcttcagagggacagcagggaaaagccccgatctctcttcccagaagagagagaccttacgtggagcagatagtgcttactaccaggttgggcagacgggcaaggaggggaccgagaatcaaggcgttgagcctcaagatgaagtagatggaggagatacacaaaagaagcaactcataaatcctcatgtggaacttcaattttcagatgctaatgccaagttttactgtcggctctactatgcgggagagtttcataagatgcgtgaagtgattctggacagcagtgaagaagatttcattcgttccctctcccactcatcaccctggcaggcccggggaggcaaatcaggagctgccttctatgcaactgaggatgatagatttattttgaagcaaatgcctcgtctggaagtccagtccttcctcgactttgcaccacattacttcaattatattacaaatgctgttcaacaaaagaggcccacggcgttggccaaaattcttggagtttacagaattggttataagaactctcagaacaacactgagaagaagttagatctccttgtcatggaaaatcttttctacgggagaaagatggcacaggtttttgatttgaagggctctcttaggaatcggaatgtaaaaactgacactggaaaagagagttgtgatgtggtcctgctagatgaaaatctcctaaagatggttcgagacaaccctctatatattcgttctcattccaaagctgtgctgagaacctcgatccatagtgactcccatttcctttctagccacctcattatagattattctttgctggttgggcgagatgatactagcaatgagctagtagttggaattatagattatattcgaacatttacatgggacaaaaagcttgagatggttgtgaaatcaacaggaattttaggtggacaaggtaaaatgccaacagtggtgtctccggagttgtacaggactaggttttgtgaggcaatggacaagtatttcctaatggtaccagaccactggacaggcttgggtctgaattgctgaaatcaagcacatattttgaaatggactgtgaaggaaaaggggacaggaacaaaggaccaaaaataagctacatgttttatttcttcatcgtgttcaccactgtatgccaaggcttttcagttctgtgtctgtttagactgtccgtaatggaatggtaaaactccatgaatttgcactttggtttttgatacctgtggagctgtctgtacgttgggaagtggcatgaaaattttcttaagctaaaatacagacatgtttcaaagggctaaagttggagatgagtagatagggtgaaaaatgggttaaatttgctagcttaattgttttaagaagaaaacagtgtctcataaattgactatcctggcatcacatttaacatgttatctacttagaaagcatttgtagagctgctgaatttgttttgtgtttttctgtaataatttaatgttacttattatcagaatttctgaaacctttacaaaaattctgatttattccattaatggccagttaaacacgtgggcatttattgttttattgaggaatttgacttaaactgggaatcctgtcatgttgtttatctttccagcttgcctgtttttgagtatgtttgatgtttttaaaattttgtcttctctgtggatgacaggaggctacagcaattaactttaagcctccttttagagatatttttaaagcttgtttaaaatttttgtgcaattcatatattaaattgcacttacttgcatacgctcatattctagggttttttctctatttttagggtatcatagtaaatcattagtaaatgagtctgtagttactaaaccctaatggaataattattaatgaaagatttttgaaatataaaaaataaattaggcccaatccaagaaattgagtgagaaggaaacacttgttttattcacagaggtaaagtgtcttttcaatataaccagcaatttaggtggcatctataaaataaaaaatttctactgtggacatccccttttccaactttctacataatggctagttctgactactaagaaatgttaagaaataggccaagtgcggtggctcacgcctataatcctatcactttgggaggcctaggcaggcagatcacctgaggtcaggagttcaagaccagcctggccaacatgaggaaaccccatctctactaaaaagacaaaaaattagctgggcatggtggcatatacctgtaaccccaactacttgggtggctgaggcaggagaattgtttgaacctgggaggcggaggctgcagtgagctgggattacaccattgcattccagcctgggcaacagagcaagactgtctcaaaaaacaaaacgaaacaaaaaaagaaagttattcttagtaaggaacttcttgtttaatagcatttttgtttattttaaaaagtgatcagaagtagtaaactatctttgaggaaatactgtaaccccagaatatttcctcttgacttctttttgtaacaaggataatttagggatttataaagttgtaaggatttcactgttttcggactgcctataataatagcacattaaccttcacataataagaaatctggacaagttcagttacacagtatgatgaatacttgaattaggaacattgtggaaaatttgctttagagaatcaaggcagtagtttggtatttggtgcttattaaaaatgtggtttgttttgaactggaagcaagttgaccaaggacttatgactaatgtgatgctaagttccacttggccccttttaaaaacgtgtatgtgccttttgaagatacacaaaacactgaggattttagttttgaaatcaaagactattaaaggagctgtacagaggtaaaaaaataaatgtggaacattattaacttattttgtgtctaggaacaatggattttgtatctgatttaaaatgccaacactgttttgtctctgttcattttttctgtgaggatacttaaggttattattcctgtctgtttcctgtactcccctagtcatgagcacttgaagtacaaggtgtctccccctaggtgcaattaggttgtttctttgtttttagtttcaattctatgtgcatagcaggaatgctccacaggaatggcttctgacaataatctgtcctgttgattttgttttccttgcccatgacttgaacaactgtgttttaaagtactgtagtctagtaggtaactttgtggcaaaaattttcaatataatacattctgaaacaatagttgctgccttgcaaaggtaatctctcattttaaaattggacagtattaatgaaggggaaatatacaatttatttctattgagtggtagaactatatgtctggtcccttgctgctcttgtttaggccactatcatagatatatttcaaatattgtactactcagtgttaagtattgaatgactgtttccctttccttcaaggcctagagtatattctgaaaatttaggaatgaggaagaaatcttaatacttccttccttaacatacaacatgagtcccgagaataattgatagtagcaagagaaaactatgtcagtaacatgttgctttgtataaaaatcttatttataaatgtgaagctttttgatgccatcaaaacttattaaaaaataggatttacttttttctaattctgacctaagaaaaataatgagaacaagctgttgcaagctcttttgtagtctattgaatattttatagatattcaaaatttcctacaaactataattttttccatgatttagcagtgagtgattttctagctttggctcttattaggtattgtaaatagtagggttatatcgatatcagcttttgtgatggcattgtggtcatcagcttcatgacattttacccatttgcagtgatcctgtgtaaaactgccaaggaaagtaattacctgtaggagtttgctgagcttgaagagtgaaaactgttgtgaatgagcctgatcataaaacggaccaggccattcattattcctcaagtgttaatatactgacttatgcagtattcaaaccatctagtgcaatgtttttgtttttgttttttttttttttggtaacacaggtgcagtgtattatagaaaaaataaaaactacaatcattagcagttttaatactgctgtgtcagttttgtaaaaaatgtacattatgtcttttgacatgttgaattttaaactagggaaatgacattgtaaatcatagtagcctcttttaatttaatatgaaaaatgccactatattgaaagtacttaatgtattgtatatatttctctactttggttctagctattttatatgattgacatgttatttaaaagataactgccttgaacttttggagacttgtactgtaaataaagaaatcttaacaataaactcagaatctacttactccaaaa

SEQ ID NO: 12330 - DNA, 1260 bp, Homo sapiens
atgcccgccgagaactctccagctcccgcttacaaagtttcctcgcatggtggtgatagtggactggatgggttaggaggaccaggtgtacaactaggaagcccagataagaaaaagcgcaaggcaaatacacagggaccttctttccctccattgtctgagtatgctccaccaccgaatccaaactctgaccatctagtggctgctaatccatttgatgacaactataatactatttcctataaaccactaccttcgtcaaatccatatcttggccctggttatcctggctttggaggctatagtacattcagaatgccacctcacgttcccccaagaatgtcttccccatactgtggtccttactcactcaggaaccagccacacccatttcctcagaatcctctgggcatgggttttaatcgacctcatgcttttaactttgggccacatgataattcaagtttcggtaatccatcttataataatgcactaagtcagaatgtcaacatgcctaatcaacattttagacaaaatcctgctgaaaatttcagtcaaattcctccacagaatgctagccaagtttctaaccccgatttggcatctaattttgttcctggaaataattcaaattttacttctccgttagaatctaatcattcttttattcctcccccaaacacttttggtcaagcaaaagcaccacccccaaaacaagactttactcaaggagcaaccaaaaacactaatcaaaattcctctgctcatccacctcacttgaatatggatgacacagtgaatcagagtaatattgaattaaaaaatgttaatcgaaacaatgcagtaaatcaggagaacagccgttcaagtagcactgaagccacaaacaataaccctgcaaatgggacgcagaataagccacgacaaccaagaggtgcagcagatgcctgcaccacagaaaaaagcaataaatcctctcttcacccaaaccgtcatggccattcgtcttctgacccagtgtatccttgtggaatttgtacaaacgaggtgaacgatgatcaggatgccatcttatgtgaggcctcttgtcagaaatggtttcatcggatctgtactggaatgactgaaacagcttatggcctcttaactgcagaagcatctgcagtatggggctgtgatacctgtatggctgacaaagatgtccagttaatgcgtactagagaaacttttggtccatctgcagtgggcagtgatgcttaa

SEQ ID NO: 12331 - DNA, 4877 bp, Homo sapiens
ggcggattggcgggcacgccccctcgcccgcggccccctccccgcctctctccaccgcctcctctggctccccggtcagagggccggagcgagaagatggcgaagacgtacgattatctcttcaagctcctgctgatcggcgactcgggggtaggcaagacctgcctcctgttccgcttctcagaggacgccttcaacaccaccttcatctccaccatcggaattgattttaaaattagaacgatagaactagatggaaagaaaattaagcttcagatatgggacacagcgggtcaggaaagattccgaacaatcacgacagcgtactacagaggagccatgggcattatgctggtctatgacatcacaaatgaaaaatcctttgacaatattaaaaattggatcagaaacattgaagagcatgcctcttccgatgtcgaaagaatgatcctgggtaacaaatgtgatatgaatgacaaaagacaagtgtcaaaagaaagaggggagaagctagcaattgactatgggattaaattcttggagacaagcgcaaaatccagtgcaaatgtagaagaggcattttttacacttgcacgagatataatgacaaaactcaacagaaaaatgaatgacagcaattcagcaggagcaggtggaccagtgaaaataacagaaaaccgatcaaagaagaccagtttctttcgttgctcgctactttgatgaactctttctgagagactgcagcacacctagagggccctttcctgcttctctgaaagcacaggtcacccagcctcagaatcacacctcccggctgctgctgagagcaccactgaacttagacctctcaacacagtatgccaagtggattccagcctcatggcctagcaaaagaacagactccctttttcaaacatggaagcaatgaagtggagacacatgcaggacctaactcgttttttccttgttttattacctgttgcagaagcggttatctttcttttttactttgcacatcagtgttagcctttccctatttcagcacaatcttagactcatatttgcacacttttgtgtcgtgaagttctagacaaatttgtacatgtggcaatgttaaaagagcatttacagcagaggttaatatactaaaattaaagggtatttggtctggttcatatggtcaaatattactgccttggtagcatttatttaagggctttttcttaaataagaatcattaaagtcattaaaaaaatttactgaaatgcccatcttgtcatcaaaggccacaatttctttatttcttcagattaagagctttgcctcatccccgacctgttttccagagtctgggtagctgaatgaatcactttaaaatgattacctctgcctaatctatagaaactgcatttggaaatcaccataatctcatttttccctggggtttgtatttgctattctttcccatgtttgacttaagtgtaatcactcttaagtaatatttgaacattattatctgtttctatttgtgaacttcttgagctgaaattttacgtgggctgagagatataccatttagggttttagtgcagcatctaactgtgattctgtcaataaggatatgtaatatattttttcttaggttcactccttagctggctggtttagttgtaataccaaattcctaccataatccctgtctacaaaagttaggtttagattttagtttgcggaaaccttccctatatagagacagattaacttgttgatataaatttaatagagctagctcttggtaatggtgaaaataatgagttttggttggttttatttggcagatgtttttagaaataaaagtacttagacctagtgcagcctctaggaaaagtcttgccttttcattagagaaaacaggaccaaggtttcagttttcaaacagctgttgttgattgtgtagaacccagttccatctgttttggttcattgttacagaacttagtccagtcatttgggctaaagccaaccaaaagcttagttgcctttctcaacaaacactggtactggtatacttttgtagatgaaaccatcacaaggtatttagtgttaacttgtgtgccaaattcagatcactatgtcgttgttgctctagccttcagtgtcataacacaggggggataaaacagaggggatgagggaaatgaattctgttaataattattcttcctggtatgcctgttttgcttcacaaaggctactatcatgctggatagataagaacaggagatggcagtggaaagggattgcttgttaccacagagaattctcttcaaattaagatatgtcattagaatgcttggaccagtcaatcttttgtacttatttgaaaatataggaacaatttagcagctgcaaatatgcccaagctatttttaatagatatactaaacttattgttgacaaatttcagcctccttaatttttttttttttggtaattacctataggcttaaaagtcattcgttgctgttctagtataattagtagttccgtgattgaaagtttattgtaattctactatcttcaaattagatacattttcaaaaggaaaagataattttttagaaacatcttaatattcactatttcctgaaaaaatccaagcagttaacgctttctggatggtaacaaagtaccttctaaaagataagtgctatgacaccatgtatgaatgtaattctcttagtaatttacctctgactatttggtgtcttaacgctttggtttatataatctcaggggttgtctgcaaaccaaaactgacatattctgtggttagcttttattacttttttttttaacagaatgctttgctttggttatatttcttctttcttcttttgtcttatatggattaataactagtctccatgaacttcacttgaaagagcctgtaaaagttagatgagtctaaaagtgctctttgaagtagcagcaaattgggagtatatgctctgttatatagaaataaattgtccttgctattttcttacatttagctttgctagattgtatatacattgagctaagaccttaggaaattcactttctgcatgataaaatgacccaataaatattccactttgcttaataatgtacatacagtgcattattttttctatttgtagatgaatttaatgacagataattgtctgttccccgctgaaactgaagaaatctagtttttttgtgaacatttttgtggtcttatggataaggtacatgaagatttttgcagcagtattagtggttcagtggctgcactttattaatcagtgtgttaatttttgacagtgattggactagaccttttcaaatagagtctgagggtatcagacagtgaaaatgtgctgtaactaagtagcatgtaaatcagttgattgtaaaacgtttcgctgggaacttattttagctatattttacttcagacagattatgatacaataatctacctgtgcatcagttagtaggtgctgcagggtttcttactatttacagaaacattttgtgcagtctttgttataaattttcagaagactatactctttactttgaaggtctattttttaattatacctcatttagctaactagtattctaatacctggtagaaaaacagtgagccagcctttaagcatctaacaaaatttagactctttgttttgttttgaactgaagacatcattgggaaaggtaggaaatattagtttaggatagagcatacatgtcatatccagtagcataaaaaaagtattatctccctgtctccattaataaatttagctgtgcaatataggtgcgtttttgcagaagtttctagtaagagattataactccattttacaggttctgaatgctcagagtctatattaaggcttataaagtttttcctgtgatcagtaagtgacacatttaagcagacattcttttcaagttcatgacttagattcctttacaaatttagttctcaatctttaaaaaccacatttcattatgttggttaattattataaattttaagcactcatttctgcaatcaggtttctcagaattttttttttttaaacagaagagacattcctttttccttgttacatccaaggggggcacaggggtgggtggaaaggaatgtctaaaaatgaaatcccttgatatagagggacctagacggacaggatatgctaaaataatttcaaattctagcacaattttagagtagaataagtcatttttttagactaataaaattaatggctgtcatgttcactctgaaaaaaatctaaatgactgaaatgtacagaaataaaaattagcaaacaattattctagggatattttcagattttacttcatttcttgaaatgcgtgtgccatatgcaattgcatttcttgtgccaagaaactaatagaacttatttcactttacctttttttaaaatgtgaatttagttattatagttcaattttatggccttacagatggcttttattttgtttgcagctgacactgcagttcctttcatgcaaaataccataaactgtttgatgaaaatcatgcccctaatggaaactctctagtttttccatataactatcctactgtacatgtttaaacatattttatttttgctccaatggcttaatgtgaaaagctcctgcagataagtggacctgtcatgtggttaatcttgtttaagccaattcattaactgtgtactgatactgatgctatgttttttttaaatggattttattccaggtgaactttttttttataataatgttcgtctaaaataaaaactacataatgaaaatgaaaa

SEQ ID NO: 12332 - DNA, 1535 bp, Homo sapiens
cgcgtcgggctgcaggagaagatggcggtctccacaggagttaaagttcctcgtaattttcgcttgttggaagaacttgaagaaggacaaaaaggagtaggcgacggtacagttagctggggccttgaagatgatgaagatatgacacttacaaggtggacaggcatgattattgggccaccaaggacaaattatgaaaacagaatatatagcctgaaagtagaatgtggacctaaatacccagaagctcctccgtcagttagatttgtaacaaaaattaatatgaacggaataaataattccagtgggatggtggatgcccggagcataccagtgttagcaaaatggcaaaattcatatagcattaaagttgtacttcaagagctaagacgtctaatgatgtccaaagaaaatatgaagcttccacagccaccagaaggacaaacatacaacaattaattttagtggatctcaaacttgtcttaaatcaacaaccttctactcatgttaatgtcttgattaaatatcacaatgcaaaatacacattaagtaaaagaattccagctggtaaacatgacctggacatttgtaagaatatatttaatatatgtacacccattatgttttcaggtaacaggaggaaaaatgcagcacaattttttttctcttgaaaggcactgtcatttaaacataaacctggagtactcgaaatagaattcaggtttacaagatgaaagcgtgtggagaagtgtcagatggcagtggaagcatgtgtgtttctaaaaagtaaaaatctcaagaaaacagaaatggcatgctttacccatcttacttagtgaaagagagctgcagttgaaattgtttaaaaagtagcaggtacaatgaatattgtcacagatgtgttaatttttgaagcaatgtgggtgctgactactagtagtatcaaaaatatgttcaggattgttttgatacctgtatttataataaaaaatgttggggggagttgatgaattcctgttaaaagctgttcttgtgtgttacatgtaacagacatggtaaatatttgtttacagtctttgtttaacaaaccatgcatttaagtttaagtgaagtcaacaaaaaggaaataggtgtatggatatgtgattttgagattaaagttagtcttaaaatgtaaataaaatgtgaaacgtgtcctcagagactgtgccatttctattatgttgatgtatatgtacagtaccttgccagggaagcaaaaattggaattattgtagcttttcatgtatacacacttttatttaccctattttgtgtacttcttgtgaattataatttgcagactatttcagaaaagaaattatctagtttaatttcttctttggacaaggagtcctaggtattatattttgagtttgatttcaccagaaataataatattaaaaagatctttgcattctggcagttcttttaggattataggttgcaaattatccaaatatatatcccattttttaaagcataaaaaaaaaaaa

SEQ ID NO: 12333 - DNA, 1561 bp, Homo sapiens
ggcccgctccaacatcagaatggtaacagctttcaggagcctaccacgcggcagctccggagctgccgcgtccatgtccgcgcacaatcggggcaccgagctcgaccttagctggatctccaaaatacaagtgaatcacccggcagttctgaggcgtgcggaacaaatccaggctcgcagaaccgtgaaaaaggagtggcaggctgcttggctcctgaaagctgttacctttatagatcttactacactttcaggtgatgatacatcttccaacattcaaaggctctgttataaagccaaatacccaatccgggaagatctcttaaaagctttaaatatgcatgataaaggcattactacagccgccgtttgtgtttatcccgcccgggtgtgtgatgctgtaaaagcactcaaggctgcaggctgtaatatccctgtggcatcagtggccgctggatttccagctggacagactcatttgaagacacgattagaagagatcagattggctgtggaagatggagctacagaaatcgacgtggtaattaacagaagcttggtgctgacaggccagtgggaagccctgtatgatgagattcgtcagtttcgcaaggcctgtggggaggctcatcttaaaactatattagcgacaggagaacttggaactcttactaatgtctataaagccagtatgatagcaatgatggcaggatcagattttattaagacctctactggaaaagaaacagtaaatgccaccttcccggtagctatagtaatgctgcgggccattagagatttcttctggaaaactggaaacaagatagggtttaaaccagcaggaggcatccgcagtgcaaaggattcccttgcttggctctctcttgtaaaggaggagcttggagatgagtggctgaagccagaactctttcgaataggtgccagtactctgctctcggacattgagaggcagatttaccatcatgtgactggaagatatgcagcttatcatgatcttccaatgtcttaaatcagtcaccagttccagaaaagttctttacgacaatgtttaaaaattatttttctacgtaattgctaaaattatttaattaaaaaattgggcagtaggtaactggcattcctctctttaaaatttctaccgaacttaatggaatggaaaaagcaaactcatccacatgtggtactcatttcaggcacatctgaaatgatcttaattactagaagatctgcactattaactttgtgaagagtttctcctaaaaactttaagtaaaatgttaatggtagctttgataacatcaaattctaagggagaaaaaaacaatattaaaccgcccaagcagtgtgccctagcagaggaaaatgcaacatctcgcaagcgctgctgtaacgacttcaggagtcactgattcagcactaatttcctgctgtgaaaactcatctttcatttttgccgtggataggcgcttttattaattgttgtcctaatgaaatttctgacattgtcatatacaacgatgaatatcattaaaatttttaa

SEQ ID NO: 12334 - DNA, 2578 bp, Homo sapiens
cggcgggcgaggggcagggcagggcggaccctggacgcgcgggcgcgcgcggaaggtagcgcggggccgcgttggcgcgcacgcgcctgagcgtgcgcccggtggggccggccgggactcgccgctcgcacgcccttgggccgcggccgggcgcccgctcttccttccgcttgcgctgtgagctgaggcggtgtatgtgcggcaataacatgtcaaccccgctgcccgccatcgtgcccgccgcccggaaggccaccgctgcggtgattttcctgcatggattgggagatactgggcacggatgggcagaagcctttgcaggtatcagaagttcacatatcaaatatatctgcccgcatgcgcctgttaggcctgttacattaaatatgaacgtggctatgccttcatggtttgatattattgggctttcaccagattcacaggaggatgaatctgggattaaacaggcagcagaaaatataaaagctttgattgatcaagaagtgaagaatggcattccttctaacagaattattttgggagggttttctcagggaggagctttatctttatatactgcccttaccacacagcagaaactggcaggtgtcactgcactcagttgctggcttccacttcgggcttcctttccacagggtcctatcggtggtgctaatagagatatttctattctccagtgccacggggattgtgaccctttggttcccctgatgtttggttctcttacggtggaaaaactaaaaacattggtgaatccagccaatgtgacctttaaaacctatgaaggtatgatgcacagttcgtgtcaacaggaaatgatggatgtcaagcaattcattgataaactcctacctccaattgattgacgtcactaagaggccttgtgtagaagtacaccagcatcattgtagtagagtgtaaaccttttcccatgcccagtcttcaaatttctaatgttttgcagtgttaaaatgttttgcaaatacatgccaataacacagatcaaataatatctcctcatgagaaatttatgatcttttaagtttctatacatgtattcttataagacgacccaggatctactatattagaatagatgaagcaggtagcttcttttttctcaaatgtaattcagcaaaataatacagtactgccaccagattttttattacatcatttgaaaattagcagtatgcttaatgaaaatttgttcaggtataaatgagcagttaagatataaacaatttatgcatgctgtgacttagtctatggatttattccaaaattgcttagtcaccatgcagtgtctgtatttttatatatgtgttcatatatacataatgattataatacataataagaatgaggtggtattacattattcctaataatagggataatgctgtttattgtcaagaaaaagtaaaatcgttctcttcaattaatggcccttttattttgggaccaggcttttattttccctgatattatttctatttaatactcttttctctcaagaaaaaaaaaaaagtttgttttttctttattgtccttcatagcaggccaagtattgcctctctgcaatagacagctactgtcaatacatgctgtaatttgacattctgggtcacagatataaggtatttaaaatctatttatgctttatagagaaaccagacattaaaacttcatgcactacttatttcgaattactgtaccttatccaaatttacacctagctattaggatcttcaacccaggtaacaggaataattctgtggtttcatttttctgtaaacaactgaaagaataattagatcatattctagtatgttctgaaatatctttaagactgatcttaaaaactaacttctaagatgatttcatcttctcatagtatagagtttactttgtacacgtttgaaaccaactactgtagaagatgaggaatctattgtaattttttgctttattttcatctgccagtggacttatttgaaattttcactttagtcaaattattttttgtattagtttttgatgcagacataaaaatagcaatcattttaaattgtcaaaatttccagattactggtaaaaattatttgaaaacaaacttatgggtaataaaggctagtcagaaccctataccataaagtgtagttaccatacagattaatatgtagcaaaaatgtatgcttgatatttctcaactgtgttaatttttctgctgtattccagctgaccaaaacaatattaagaatgcatctttataaatgggtgctaattgataatggaaataatttagtaatggactatacaggatgttaataatgaagccatatgtttatgtctggatttaaaaattttaaacaatcatttactatgtcatttttctttaccttgaagaacataaactgttatttcacttctacaaatcagcaagatattatttatggcaagaaatattccattgaaatattgtgctgtaacatgggaaagtgtaaatgtttttcatggtttctatcaatgtgaaataaaatttaattctgaaaaa

SEQ ID NO: 12335 - DNA, 2681 bp, Homo sapiens
tgttagaattctgatttcagctctcagcatccaccatgcatctcaagatagtcctggcgttcctggcactgtccctcattaccatctttgccctggcctatgttttgctgaccagcccaggtggttccagccagcctccccactgcccctctgtatcccatagggcccagccctggccacaccctggccagagccagctgtttgcagacctgagccgagaggagttgacagctgtgatgcgctttctgacccagcggctggggccagggctggtggacgcagcccaggctcagccctcggacaactgcatcttctcagtggagctgcagctgccccccaaggctgcagccctggcccacctggacagggggagccccccacctgcccgggaggcactggccatcgtcctctttggtggacaaccccaacccaatgtgagtgagctggtggtggggccgctgcctcacccctcgtacatgcgggatgtgactgtggagcgtcacggcgggcccctgccctatcaccgtcgcccggtgctgagagctgagtttacacagatgtggaggcatctgaaagaggtggagctacccaaggcacccatcttcctgtcgtccaccttcaactacaatggctctaccctggcagctgtgcatgccacccctcggggcttgcgctcaggggaccgagctacctggatggccctctaccataacatctcaggggttggtcttttccttcaccccgtggggctggagctactactggaccacagggccctggaccctgcccactggactgtccagcaggtcttctaccttgggcactactatgcagacttgggccagttggaacgggagtttaagtctggccggttggaagtggttagagtccctctacctccaccaaatggagcttcatccctgaggtctcggaactctccaggtcctcttccccctcttcagttctcgccccagggttcccagtacagtgtgcaaggaaacctggtggtatcctccctctggtcatttacctttggccatggggtgttcagcggcctgaggatttttgatgttcggttccagggtgagcgaatagcctatgaagtcagtgtccaggagtgtgtatctatctatggtgccgattcacccaagacgatgctgactcgctatttggatagcagctttggactcggccgtaacagccgaggcttggtgcggggagtggactgcccctatcaagccacgatggtggacatccatatattagtgggcaaaggggcagtccagctgcttccaggggctgtgtgtgtatttgaggaagcccagggactgccccttcgaaggcaccacaattaccttcaaaatcatttctatggtggtttggccagctcagcccttgtggtcaggtctgtgtcatctgtgggcaactatgactacatttgggactttgtgttgtacccaaatggggcacttgaagggcgggtccatgccacgggttatatcaacacagctttcctgaaagggggagaggagggcctcctctttgggaaccgtgtgggggaaagagtgctgggaacggtgcacacacatgccttccacttcaagctggacctggatgtggcagggctgaaaaactgggtggtagctgaagacgtggtgtttaaacctgtggctgccccctggaacccggagcactggctacagcgcccacagctgactcggcaggtcctgggaaaggaggacctgacagctttttccttgggaagccccctaccccgctacctctacctggctagcaaccagactaatgcgtggggtcaccagcgcgggtaccgaatccagatccacagcccccttggcatacacatacccctggagagtgacatggagagggccctcagctgggggagataccagcttgtggtgacccagagaaaggaggaggagtcacagagcagtagcatctatcaccagaatgacatctggacacccacagttacctttgctgacttcatcaacaatgaaaccctcttaggagaggatctggtggcttgggtcacagccagcttcctgcacattccccatgccgaggacatcccaaacacagtgactctggggaacagagttggcttcttgctccgaccctataacttctttgatgaggacccctccatcttctcccctggcagtgtctactttgagaagggccaggatgctgggctctgcagcatcaatcctgtggcctgcctccccgacctggcagcctgtgtcccggacttaccccctttctcttaccacggcttctagtcctgagggtgtggcgggcggcgtggttaggcacatgtacttttccctgtttctactttctattctccgtgtttttatcacacctgctccccagattcccaccccctcaatgttcctctcacacgaaacccccatcagtccctttggttaattcttacttcctgttcatctctaaagtgttaaattataaaaatgatttttaaatattcaaagaaaaatatcacaaatcctactactcagaaataggtggtcacattacatcagacatctctttatgcatgtgcattcaaaaggaagagtagatagaattttgtaaaacagatgttgtatgtaatttataataaaaagtattagaggaaaaaaaaaaaaaaaaaa

SEQ ID NO: 12336 - DNA, 2600 bp, Homo sapiens
tgttagaattctgatttcagctctcagcatccaccatgcatctcaagatagtcctggcgttcctggcactgtccctcattaccatctttgccctggcctatgttttgctgaccagcccaggtggttccagccagcctccccactgcccctctgtatcccatagggcccagccctggccacaccctggccagagccagctgtttgcagacctgagccgagaggagttgacagctgtgatgcgctttctgacccagcggctggggccagggctggtggacgcagcccaggctcagccctcggacaactgcatcttctcagtggagctgcagctgccccccaaggctgcagccctggcccacctggacagggggagccccccacctgcccgggaggcactggccatcgtcctctttggtggacaaccccaacccaatgtgagtgagctggtggtggggccgctgcctcacccctcgtacatgcgggatgtgactgtggagcgtcacggcgggcccctgccctatcaccgtcgcccggtgctgagagctgagtttacacagatgtggaggcatctgaaagaggtggagctacccaaggcacccatcttcctgtcgtccaccttcaactacaatggctctaccctggcagctgtgcatgccacccctcggggcttgcgctcaggggaccgagctacctggatggccctctaccataacatctcaggggttggtcttttccttcaccccgtggggctggagctactactggaccacagggccctggaccctgcccactggactgtccagcaggtcttctaccttgggcactactatgcagacttgggccagttggaacgggagtttaagtctggccggttggaagtggttagagtccctctacctccaccaaatggagcttcatccctgaggtctcggaactctccaggtcctcttccccctcttcagttctcgccccagggttcccagtacagtgtgcaaggaaacctggtggtatcctccctctggtcatttacctttggccatggggtgttcagcggcctgaggatttttgatgttcggttccagggtgagcgaatagcctatgaagtcagtgtccaggagtgtgtatctatctatggtgccgattcacccaagacgatgctgactcgctatttggatagcagctttggactcggccgtaacagccgaggcttggtgcggggagtggactgcccctatcaagccacgatggtggacatccatatattagtgggcaaaggggcagtccagctgcttccaggggctgtgtgtgtatttgaggaagcccagggactgccccttcgaaggcaccacaattaccttcaaaatcatttctatggtggtttggccagctcagcccttgtggtcaggtctgtgtcatctgtgggcaactatgactacatttgggactttgtgttgtacccaaatggggcacttgaagggcgggtccatgccacgggttatatcaacacagctttcctgaaagggggagaggagggcctcctctttgggaaccgtgtgggggaaagagtgctgggaacggtgcacacacatgccttccacttcaagctggacctggatgtggcagggctgaaaaactgggtggtagctgaagacgtggtgtttaaacctgtggctgccccctggaacccggagcactggctacagcgcccacagctgactcggcaggtcctgggaaaggaggacctgacagctttttccttgggaagccccctaccccgctacctctacctggctagcaaccagactaatgcgtggggtcaccagcgcggataccagcttgtggtgacccagagaaaggaggaggagtcacagagcagtagcatctatcaccagaatgacatctggacacccacagttacctttgctgacttcatcaacaatgaaaccctcttaggagaggatctggtggcttgggtcacagccagcttcctgcacattccccatgccgaggacatcccaaacacagtgactctggggaacagagttggcttcttgctccgaccctataacttctttgatgaggacccctccatcttctcccctggcagtgtctactttgagaagggccaggatgctgggctctgcagcatcaatcctgtggcctgcctccccgacctggcagcctgtgtcccggacttaccccctttctcttaccacggcttctagtcctgagggtgtggcgggcggcgtggttaggcacatgtacttttccctgtttctactttctattctccgtgtttttatcacacctgctccccagattcccaccccctcaatgttcctctcacacgaaacccccatcagtccctttggttaattcttacttcctgttcatctctaaagtgttaaattataaaaatgatttttaaatattcaaagaaaaatatcacaaatcctactactcagaaataggtggtcacattacatcagacatctctttatgcatgtgcattcaaaaggaagagtagatagaattttgtaaaacagatgttgtatgtaatttataataaaaagtattagaggaaaaaaaaaaaaaaaaaa

SEQ ID NO: 12337 - DNA, 1548 bp, Homo sapiens
cagggccgagccagccccttcaccaccagccggccgcgccccgggaagggaagtttgtggcggaggaggttcgtacgggaggagggggaggcgcccacgcatctggggctgactcgctctttcgcaaaacgtctgggaggagtccctggggccacaaaactgcctccttcctgaggccagaaggagagaagacgtgcagggaccccgcgcacaggagctgccctcgcgacatgggtcacccgccgctgctgccgctgctgctgctgctccacacctgcgtcccagcctcttggggcctgcggtgcatgcagtgtaagaccaacggggattgccgtgtggaagagtgcgccctgggacaggacctctgcaggaccacgatcgtgcgcttgtgggaagaaggagaagagctggagctggtggagaaaagctgtacccactcagagaagaccaacaggaccctgagctatcggactggcttgaagatcaccagccttaccgaggttgtgtgtgggttagacttgtgcaaccagggcaactctggccgggctgtcacctattcccgaagccgttacctcgaatgcatttcctgtggctcatcagacatgagctgtgagaggggccggcaccagagcctgcagtgccgcagccctgaagaacagtgcctggatgtggtgacccactggatccaggaaggtgaagaagggcgtccaaaggatgaccgccacctccgtggctgtggctaccttcccggctgcccgggctccaatggtttccacaacaacgacaccttccacttcctgaaatgctgcaacaccaccaaatgcaacgagggcccaatcctggagcttgaaaatctgccgcagaatggccgccagtgttacagctgcaaggggaacagcacccatggatgctcctctgaagagactttcctcattgactgccgaggccccatgaatcaatgtctggtagccaccggcactcacgaaccgaaaaaccaaagctatatggtaagaggctgtgcaaccgcctcaatgtgccaacatgcccacctgggtgacgccttcagcatgaaccacattgatgtctcctgctgtactaaaagtggctgtaaccacccagacctggatgtccagtaccgcagtggggctgctcctcagcctggccctgcccatctcagcctcaccatcaccctgctaatgactgccagactgtggggaggcactctcctctggacctaaacctgaaatccccctctctgccctggctggatccgggggacccctttgcccttccctcggctcccagccctacagacttgctgtgtgacctcaggccagtgtgccgacctctctgggcctcagttttcccagctatgaaaacagctatctcacaaagttgtgtgaagcagaagagaaaagctggaggaaggccgtgggccaatgggagagctcttgttattattaatattgttgccgctgttgtgttgttgttattaattaatattcatattatttattttatacttacataaagattttgtaccagtgg

SEQ ID NO: 12338 - DNA, 7885 bp, Homo sapiens
gcgaaggcgacagctctaggggttggcaccggccccgagaggaggatgcgggtccggatagggctgacgctgctgctgtgtgcggtgctgctgagcttggcctcggcgtcctcggatgaagaaggcagccaggatgaatccttagattccaagactactttgacatcagatgagtcagtaaaggaccatactactgcaggcagagtagttgctggtcaaatatttcttgattcagaagaatctgaattagaatcctctattcaagaagaggaagacagcctcaagagccaagagggggaaagtgtcacagaagatatcagctttctagagtctccaaatccagaaaacaaggactatgaagagccaaagaaagtacggaaaccagctttgaccgccattgaaggcacagcacatggggagccctgccacttcccttttcttttcctagataaggagtatgatgaatgtacatcagatgggagggaagatggcagactgtggtgtgctacaacctatgactacaaagcagatgaaaagtggggcttttgtgaaactgaagaagaggctgctaagagacggcagatgcaggaagcagaaatgatgtatcaaactggaatgaaaatccttaatggaagcaataagaaaagccaaaaaagagaagcatatcggtatctccaaaaggcagcaagcatgaaccataccaaagccctggagagagtgtcatatgctcttttatttggtgattacttgccacagaatatccaggcagcgagagagatgtttgagaagctgactgaggaaggctctcccaagggacagactgctcttggctttctgtatgcctctggacttggtgttaattcaagtcaggcaaaggctcttgtatattatacatttggagctcttgggggcaatctaatagcccacatggttttgggttacagatactgggctggcatcggcgtcctccagagttgtgaatctgccctgactcactatcgtcttgttgccaatcatgttgctagtgatatctcgctaacaggaggctcagtagtacagagaatacggctgcctgatgaagtggaaaatccaggaatgaacagtggaatgctagaagaagatttgattcaatattaccagttcctagctgaaaaaggtgatgtacaagcacaggttggtcttggacaactgcacctgcacggagggcgtggagtagaacagaatcatcagagagcatttgactacttcaatttagcagcaaatgctggcaattcacatgccatggcctttttgggaaagatgtattcggaaggaagtgacattgtacctcagagtaatgagacagctctccactactttaagaaagctgctgacatgggcaacccagttggacagagtgggcttggaatggcctacctctatgggagaggagttcaagttaattatgatctagcccttaagtatttccagaaagctgctgaacaaggctgggtggatgggcagctacagcttggttccatgtactataatggcattggagtcaagagagattataaacaggccttgaagtattttaatttagcttctcagggaggccatatcttggctttctataacctagctcagatgcatgccagtggcaccggcgtgatgcgatcatgtcacactgcagtggagttgtttaagaatgtatgtgaacgaggccgttggtctgaaaggcttatgactgcctataacagctataaagatggcgattacaatgctgcagtgatccagtacctcctcctggctgaacagggctatgaagtggcacaaagcaatgcagcctttattcttgatcagagagaagcaagcattgtaggtgagaatgaaacttatcccagagctttgctacattggaacagggccgcctctcaaggctatactgtggctagaattaagctcggagactaccatttctatgggtttggcaccgatgtagattatgaaactgcatttattcattaccgtctggcttctgagcagcaacacagtgcacaagctatgtttaatctgggatatatgcatgagaaaggactgggcattaaacaggatattcaccttgcgaaacgtttttatgacatggcagctgaagccagcccagatgcacaagttccagtcttcctagccctctgcaaattgggcgtcgtctatttcttgcagtacatacgggaaacaaacattcgagatatgttcacccaacttgatatggaccagcttttgggacctgagtgggacctttacctcatgaccatcattgcgctgctgttgggaacagtcatagcttacaggcaaaggcagcaccaagacatgcctgcacccaggcctccagggccacggccagctccaccccagcaggaggggccaccagagcagcagccaccacagtaataggcactgggtccagccttgatcagtgacagcgaaggaagttatctgctgggaacacttgcatttgatttaggaccttggatcagtggtcacctcccagaagaggcacggcacaaggaagcattgaattcctaaagctgcttagaatctgatgcctttattttcagggataagtaactcttacctaaactgagctgaatgtttgtttcagtgccatatggagtaacaactttcagtggcttttttttttcttttctggaaacatatgtgagacactcagagtaatgtctactgtatccagctatctttctttggatccttttggtcattatttcagtgtgcataagttcttaatgtcaaccatctttaaggtattgtgcatcgacactaaaaactgatcagtgttaaaaaggaaaacccagttgcaagtttaaacgtgttcgaaagtctgaaaatagaacttgccttttaagttaaaaaaaaaaaaaaagctatcttgaaaatgttttggaactgcgataactgagaaacttcttaccagtccacatgcaattaaacatattcagcatatttgttattttaaaagggagggttgggaggtttcttattggtgattgtcacacggtataccatactcctctccttcaaagaatgaaaggccttgttaaggagttttttgtgagctttacttctttggaatggaatatacttatgcaaaaccttgtgaactgactccttgcactaacgcgagtttgccccacctactctgtaatttgcttgtttgttttgaatataacagagccttgatccagaagccagaggatggactaagtgggagaaattagaaaacaaaacgaactctggttggggtactacgatcacagacacagacatacttttcctaaagttgaagcatttgttcccaggatttattttactttgcatttctttttgcacaaagaacacatcaccttcctgaattctttaaatatgaaatatcattgccagggtatggcttacagtgactactattatcaatactaaaactcagagaatcaaagatggattaaactcagtggttgatgaaagccaaaacctgtttgtactgttctatactattcaggtatctttttatttctgatagttttatattataatagaaagccagccactgcttagctatcatagtcaccattttctcactgttaacattaggaaaatcaaggctactatgcttcaggattgtctggttaaatagtatgggaaaaaaactgaagagtttcaacataattacacacgtgaaataattacagcttaaactgaatttgtatttcattttattgtcagatggtggtgttcaccagcctgtatcttgtctgagactgcattcgtatctgagcaggttttctatgcctactgatgtcagtatgtttatactaaccttcatgcttttttcccagaatccctcatctgccagaaaacttgaaaagtttattgcttgtagagttgtactgctttgatttttgaagttggggtagtagttagaactagatttaactagtctataatgaacatgaaggcttttatatatgaagttgtatacctttttgtgtttagagaattatgggaaacctggtaagcaaaactttcctcccagataattgcttccaaattcgaagagttagtcaccaagagagccatatgtatgaaagcgtatctgtgaaaggtaggaaacttaccccccctaagtgtaatgttgctttaggcaactcttgtaaatagtgagacttgtttggtctcttacatgtagagatttgagtgcagttggtacagtactttggtgtctccaccactgtcccttctccccgcttcaaaataagtgtaatccacggtagcagccacacttccttcagaaggaactgttataatttatttaaaagttgaaaaaccacccaagatgactaccaactttcactttttttcttctgccatccaccctcattttccctttagcaagatttttatatctaactttccttccctccattgagtacgtgctttgagaaaacatttcttaaaacagtgtgtgccacctaaggctggatgggaaagtgcagtcttgttgttcatataaaaaacacacttcttattagtttacccacttgcctttttctattgttaatgttctgaatttccttttcttggcttgtttctacttcattttaaccctgggtcacttgctgccagcagtttgtgaatggtgtctttcaaataacttagttcttatggcttcacttaaagactgtctcaaaaatactttgctctcttcttcttttttgttcatgggacatggtacctaagcaaataggagttgggtttggtttttctcctaaaataatgctcaatacttacctaatcaaatggcatccatttgaataaaatgacaataactaaagctagttaatgtcagtgacattaaactaactccaggattcaggagttttaatgttagaatttagatttaacagatagagtgtggcttcatttgtccatggtagcccatctctcctaagaccttttctagtctgtcttcctgccttcgaacttgatgacagtaaaaccctgtttagtattctcttgtgcatttggtttgttggttagccgactgtcttgaaactattcattttgcttctagttttattttacagaggtagcattggtgggtttttttttttttttctgtctctgtgtttgaagtttcagtttctgttttctaggtaaggcttatttttgattagcagtcaatggcaaagaaaaagtaaatcaaagatgacttcttttcaaaatgtatggcccttttattgcacttttaactcagatgaatttataaattattaatcttgatactaaggatttgttacttttttgcatattaggttaatttttaccttacatgtgagagtcttaccactaagccattctgtctctgtactgttgggaagttttggaaacccctgccagtgatctggtgatgatctgatgatttatttaaagagccgttgatgcctccaggaaacttaagtattttattaatatatatataggaatttttttttattttgctttgtctttctctcccttcttttatcctcatgttcattcttcaaaccagtgttttggaagtatgcatgcaggcctataaatgaaaaacacaattctttatgtgtatagcatgtgtattaatgtctaactacatacgcaaaaacttcctttacagaggttcggactaacatttcacatgcacatttcaaaacaagatgtgtcatgaaaacagcccctttacctgccaagacaagcagggctatatttcagtgacagctggatattttgtttctgaaagtgaatctcataatatatatatgtattacacattattatgactagaagtatgtaagaaatgatcagaacaaaagaaaatttctattttcatgcaaatatttttcatcagtcatcactctcaaatataaattaaaatataacactcctgaatgcctgaggcacgatctggattttaaatgtgtggtattcattgaaaagaagctctccacccacttggtatttcaagaaaatttaaaacgatcccaaggaaagatgatttgtatgttaaagtgactgcacaagtaaaagtccaatgttgtgtgcatgaaaaggattccttggttatgtgcagggaatcatctcacatgctgtttttcctatttggtttgagaaacaggctgacactattctctttgattagaaaataaactcataaaactcataatgttgatataatcaagatgttaaccactataaatatgtagaagaggaagttttaaatagaccttaagctggcattgtgaaggaacaccatggtagactctttttggtaatggtattttgtatttaatgaaatgcagtataaaggttggtgaagtgtaataataattgtgtaaacaaatcctgtttaatagaagagatgtacagaatcgttttggtactgtatcttgaaacttgtgaaataaagattccacttttggttatcctgtatgctgtaatataccacaaccaagcaccctttccagacagactttttttaagctgaatgaatccaattttttaatgttttttggaaattcagaagcttctgaaaacattcacttgtggcaatttgaatttatctttcattttaaactcctgaaattcagatttttacaagtccaatattgccctagggagaacatgaatttgctaagaaatgttatcttttaaatctctgatatctttgtcttgaagcagccttgatatgtagtaagcgtgattcactttagcctgattataatattatttatctaaagtttgtttatgcattgccttgtcccaggaattttttaagaggacttgcagagacacgtaccacacagtaacatttagactaaatatgctctgagtaaaggagaaatgaaaaaatattaaatcaagagtgaacatgtacacaaagtgcaattggaagtgggctacaaatttagcccccagcttcccagcaggcaactcaaagaggtaactgaggtaaaatgttccagctcagaagcattggatcttggataaaaagcctacatgatgcaaactgtggcaactgagatgtcagatctcaagatctcaaattgtacttgtgggagcacagtcagtgaccccagatgaccttgactgacctaaaagttgtgggggaagtcggatgtcagagccttaacaccagcaggtgaccatccaacctggggcaatgcctgcctgttcaccacttagcctctttctggcaagtcattagaatgtcctccatcttcattggctgcaacttgatgagctacagcctctttcctaacttcctttatgatgctagtttaggttggttataccagcttggaagtatgcttagattaagttacagcagatacacaaattagatgcaagtaaaaaaaatcagaatttctgtagtagaaactacgaaaaataaaaaggaaagtttttactttttgggtatttttttacgaataagaaaaagtgagcgttaatcagttcaaaaggaggtactgctgtgtaatgggctttgtacgttccttctcatgtcacttacgtcactacttcgccatcaaattgaacaagcttttaattagatcctgaaaattcactatgctagtagtttattggtagtattatattttgagtagaactctgattttccctagaggccaaattctttttatctgggttaatttcttttaaacataacaatgttaatgctgaattgtatattaaatcccatttctaaaaaccacacaattttttctcatgtaagttgagtggaatgtggttagttaactgaatttggaatgttcatataaataatttgttgctgctc

SEQ ID NO: 12339 - DNA, 3804 bp, Homo sapiens
taaagtcatcaaaacaacgttatatcctgtgtgaaatgctgcagtcaggatgccttgtggtttgagtgccttgatcatgtgccctaaggggatggtggcggtggtggtggccgtggatgacggagactctcaggccttggcaggtgcgtctttcagttcccctcacacttcgggttcctcggggaggaggggctggaaccctagcccatcgtcaggacaaagatgctcaggctgctcttggctctcaacttattcccttcaattcaagtaacaggaaacaagattttggtgaagcagtcgcccatgcttgtagcgtacgacaatgcggtcaaccttagctgcaagtattcctacaatctcttctcaagggagttccgggcatcccttcacaaaggactggatagtgctgtggaagtctgtgttgtatatgggaattactcccagcagcttcaggtttactcaaaaacggggttcaactgtgatgggaaattgggcaatgaatcagtgacattctacctccagaatttgtatgttaaccaaacagatatttacttctgcaaaattgaagttatgtatcctcctccttacctagacaatgagaagagcaatggaaccattatccatgtgaaagggaaacacctttgtccaagtcccctatttcccggaccttctaagcccttttgggtgctggtggtggttggtggagtcctggcttgctatagcttgctagtaacagtggcctttattattttctgggtgaggagtaagaggagcaggctcctgcacagtgactacatgaacatgactccccgccgccccgggcccacccgcaagcattaccagccctatgccccaccacgcgacttcgcagcctatcgctcctgacacggacgcctatccagaagccagccggctggcagcccccatctgctcaatatcactgctctggataggaaatgaccgccatctccagccggccacctcaggcccctgttgggccaccaatgccaatttttctcgagtgactagaccaaatatcaagatcattttgagactctgaaatgaagtaaaagagatttcctgtgacaggccaagtcttacagtgccatggcccacattccaacttaccatgtacttagtgacttgactgagaagttagggtagaaaacaaaaagggagtggattctgggagcctcttccctttctcactcacctgcacatctcagtcaagcaaagtgtggtatccacagacattttagttgcagaagaaaggctaggaaatcattccttttggttaaatgggtgtttaatcttttggttagtgggttaaacggggtaagttagagtagggggagggataggaagacatatttaaaaaccattaaaacactgtctcccactcatgaaatgagccacgtagttcctatttaatgctgttttcctttagtttagaaatacatagacattgtcttttatgaattctgatcatatttagtcattttgaccaaatgagggatttggtcaaatgagggattccctcaaagcaatatcaggtaaaccaagttgctttcctcactccctgtcatgagacttcagtgttaatgttcacaatatactttcgaaagaataaaatagttctcctacatgaagaaagaatatgtcaggaaataaggtcactttatgtcaaaattatttgagtactatgggacctggcgcagtggctcatgcttgtaatcccagcactttgggaggccgaggtgggcagatcacttgagatcaggaccagcctggtcaagatggtgaaactccgtctgtactaaaaatacaaaatttagcttggcctggtggcaggcacctgtaatcccagctgcccaggaggctgaggcatgagaatcgcttgaacctggcaggcggaggttgcagtgagccgagatagtgccacagctctccagcctgggcgacagagtgagactccatctcaaacaacaacaacaacaacaacaacaacaacaaaccacaaaattatttgagtactgtgaaggattatttgtctaacagttcattccaatcagaccaggtaggagctttcctgtttcatatgtttcagggttgcacagttggtctctttaatgtcggtgtggagatccaaagtgggttgtggaaagagcgtccataggagaagtgagaatactgtgaaaagggatgttagcattcattagagtatgaggatgagtcccaagaaggttctttggaaggaggacgaatagaatggagtaatgaaattcttgccatgtgctgaggagatagccagcattaggtgacaatcttccagaagtggtcaggcagaaggtgccctggtgagagctcctttacagggactttatgtggtttagggctcagagctccaaaactctgggctcagctgctcctgtaccttggaggtccattcacatgggaaagtattttggaatgtgtcttttgaagagagcatcagagttcttaagggactgggtaaggcctgaccctgaaatgaccatggatatttttctacctacagtttgagtcaactagaatatgcctggggaccttgaagaatgcccttcagtggccctcaccatttgttcatgcttcagttaattcaggtgttgaaggagcttaggttttagaggcacgtagacttggttcaagtctcgttagtagttgaatagcctcaggcaagtcactgcccacctaagatgatggttcttcaactataaatggagataatggttacaaatgtctcttcctatagtataatctccataagggcatggcccaagtctgtctttgactctgcctatccctgacgtttagtagcatgcccgacatacaatgttagctattggtattattgccatatagataaattatgtataaaaattaaactgggcaatagcctaagaaggggggaatattgtaacacaaatttaaacccactacgcagggatgaggtgctataatatgaggaccttttaacttccatcattttcctgtttcttgaaatagtttatcttgtaatgaaatataaggcacctcccacttttatgtatagaaagaggtcttttaatttttttttaatgtgagaaggaagggaggagtaggaatcttgagattccatatcgaaaatactgtactttggttgatttttaagtgggcttccattccatggatttaatcagtcccaagaagatcaaactcagcagtacttgggtgctgaagaactgttggatttaccctggcacgtgtgccacttgcccagcttcttgggcacacagagttcttcaatccaagttatcagattgtatttgaaaatgacagagctggagagttttttgaaatggcagtggcaaataaataaatacttttttttaaatggaaagacttgatctatggtaataaatgattttgttttctgactggaaaaataggcctactaaagatgaatcacacttgagatgtttcttactcactctgcacagaaacaaagaagaaatgttatacagggaagtccgttttcactattagtatgaaccaagaaatggttcaaaaacagtggtaggagcaatgctttcatagtttcagatatggtagttatgaagaaaacaatgtcatttgctgctattattgtaagagtcttataattaatggtactcctataatttttgattgtgagctcacctatttgggttaagcatgccaatttaaagagaccaagtgtatgtacattatgttctacatattcagtgataaaattactaaactact

SEQ ID NO: 12340 - DNA, 2788 bp, Homo sapiens
ggcgcagcggcagcggcagcagcggcaacaagtgccggaggctagcagagccaagccggagcagtccctgccgccgacaccgccgggccgcccgtccggggcgccgcgcatggagcgtgagctgcggcggtcgccgggctgagccgcgcggagcggccgggacgtggatgtggccgcgatctcccgcccttgcccccgccccgccgagctggagctgctcccggacaagatatgagaaatgagtgttggacgtcgaagaataaagttgttgggtatcctgatgatggcaaatgtcttcatttattttattatggaagtctccaaaagcagtagccaagaaaaaaatggaaaaggggaagtaataatacccaaagagaagttctggaagatatctacccctcccgaggcatactggaaccgagagcaagagaagctgaaccggcagtacaaccccatcctgagcatgctgaccaaccagacgggggaggcgggcaggctctccaatataagccatctgaactactgcgaacctgacctgagggtcacgtcggtggttacgggttttaacaacttgccggacagatttaaagactttctgctgtatttgagatgccgcaattattcactgcttatagatcagccggataagtgtgcaaagaaacctttcttgttgctggcgattaagtccctcactccacattttgccagaaggcaagcaatccgggaatcctggggccaagaaagcaacgcagggaaccaaacggtggtgcgagtcttcctgctgggccagacacccccagaggacaaccaccccgacctttcagatatgctgaaatttgagagtgagaagcaccaagacattcttatgtggaactacagagacactttcttcaacttgtctctgaaggaagtgctgtttctcaggtgggtaagtacttcctgcccagacactgagtttgttttcaagggcgatgacgatgtttttgtgaacacccatcacatcctgaattacttgaatagtttatccaagaccaaagccaaagatctcttcataggtgatgtgatccacaatgctggacctcatcgggataagaagctgaagtactacatcccagaagttgtttactctggcctctacccaccctatgcagggggaggggggttcctctactccggccacctggccctgaggctgtaccatatcactgaccaggtccatctctaccccattgatgacgtttatactggaatgtgccttcagaaactcggcctcgttccagagaaacacaaaggcttcaggacatttgatatcgaggagaaaaacaaaaataacatctgctcctatgtagatctgatgttagtacatagtagaaaacctcaagagatgattgatatttggtctcagttgcagagtgctcatttaaaatgctaaaatagatacaaactcaattttgcatagaaaggtgtattttgaatagttcccatgttgtgttctcacattagagtaatttctatattaaaccatgaaaattgcctttatgagtgatacccatttgagggcctctaaacccttcaatttggtactcacgtgaagagggaaagcggaagatggtaatttttttttatggatgatatggcaggatgattggttctgatcttaccggctagtggtcatttttaaaaaacttgtaccctcttatctgaaatcctgtttctggaatttggccattttaagtgattttgtttgccctcttctataatattcctacttcccataataatgactgatttatttgtaattcaggtatttataaacctattggctacaaagactttgttaaacattatccagtggttttcgtgaaatggaattatgtttatttttatgggatttgggtaaattttaaattgtctagaaaactgaaatttcagttgtcagttgtggaattcagtttttcaattgtggaaatttcctgccaccccaacagtatttttgtgtgttaattaattttgcaaaatgagaatcatggtgtgacactcatctaatttatcttgttgtgatgttatggtcataataaggagaaagagggtttaatttttcttgtatttggtttcctggtggtatcatagtgtaattttagtatttgaaaatcagtgtgattccttaatggccaactgaagattgaattgccgctaacaaccatatcgtgttagtgaattttcaatatggaccaggaaggcatatgtattttgaacttgagtgaaaaggttgaagttacagacttttgcatagatggtttgtcaatttaaaattccagaatttattattgccatattttcacatgctgcttatacaagattattattgagtagtaactgcttccctgtctatgtagaagtgcctgtgtttttatttattgttcagatcaaagaccaaaacattttcttaaatatattttatgtaatattttatttgtatacagtgttgttgatgaaatatttaactagagcatgatattttaaatgttaaggtgtaacatatgttaaataaaactgttatttttgaattttaaaatttgttttttgggggtatgaactactagagtttaaaattctgccaaactattacttatatgtactattgtgtaacatactttcttgaaatatttttgtttatagaattgaaggttcttatcagatgggatactggggactataaacaatggaaataaagccactgtatttttaaaaaaaaaaaaaaaaaaaaaaaaaaaaaaaaaaaaaaaaa

SEQ ID NO: 12341 - DNA, 4357 bp, Homo sapiens
atagtcaccagaagctggaagagtcaaaggacacattctcccctcaagccccagtgggagcacggcccagctggattttggacttctggcctccagaactagacagggcctcactgtgtcacccagggtggaatacagtggtgtgatcatagctcactgcagcctggaattcctgggctcaagcaaccctgccacctcagccttccaagtagctaggactacagaacatccatgatagcagtcttctgtaaatcgaacttttcaagaattctctgaaggaaccaagtaggatattcttacatcatgacttaatgtgaatgcaagaacaagaaataggttttatctctaaatataatgaagggctgtgtgtaaacactgaccctgtctcaattctaacaagcattttagacatgagtttacatcggcaaatgggttcagatcgagatcttcagtcctctgcttcatctgtgagcttgccttcagtcaaaaaggcacccaaaaaaagaagaatttcaataggctccctgtttcggaggaaaaaagataacaaacgtaaatcaagggagctaaatggcggggtggatggaattgcaagtattgaaagtatacattctgaaatgtgtactgataagaactccattttctctacaaatacctcttctgacaatggattaacttccatcagcaaacaaattggagacttcatagagtgccctttgtgccttttgcggcattctaaagacagatttcctgatataatgacttgtcatcacagatcttgtgtggattgcttacgacaatatttaaggatagaaatctctgaaagcagagttaatattagttgcccagaatgtactgaacggtttaatccccatgatattcgcttgatattaagtgatgatgtcttgatggaaaaatacgaagaatttatgcttagacggtggcttgttgcagatcctgattgtaggtggtgtccagctccagactgtggatatgctgtgatagcatttggatgtgccagctgtccaaaattaacttgtgggcgagagggctgtggaacagagttttgctaccactgtaaacagatttggcaccccaaccagacctgtgatgctgctcgacaagagagagcccagagcttacgtttgagaactatacgttcttcatccattagttatagtcaagagtctggagcagcagctgatgatataaagccatgtccacgatgtgctgcttatataataaagatgaatgatgggagctgcaatcacatgacatgtgctgtttgtggttgtgagttttgttggttgtgtatgaaagaaatctcagatttgcattatctaagtccatcaggatgtactttttgggggaagaaaccctggagccgaaagaagaaaatattgtggcaactgggaacactggttggtgctcctgtcggaatcgctttaatagctggcattgctattcctgcaatgattattggcattcctgtgtatgtgggccgcaagattcacaatcgctatgaaggcaaggatgtttcaaagcacaaacggaatttggccatagcaggtggtgtaacgttgtctgtaatcgtgtctccagtagtagctgcagtgactgtaggtatcggtgttcctattatgttagcttatgtctatggcgtagttccaatttctctttgtcgaagcggaggttgtggagtctcagcaggcaatggaaaaggagttaggattgaatttgatgatgaaaatgatataaatgttggtggaactaacacagctgtagacacaacatcagtagcagaagcaagacacaacccaagcataggggagggaagtgttggtgggctgactggcagtttgagtgcaagtggaagccacatggatcgaataggagccatccgagacaacctgagtgaaacggccagcaccatggcactagctggagccagtataacggggagtctgtcaggaagtgccatggtaaactgttttaacaggttggaagtacaagcagatgtacagaaagaacggtacagtctaagtggagaatctggcacagtcagcttgggaacagttagtgataatgccagcaccaaagcaatggcaggatccattctgaattcctacatcccattggacaaagaaggcaacagtatggaggtgcaagtagatattgagtcaaagccatccaaattcaggcacaacagtggaagcagtagtgtggatgatggcagtgccacccgaagtcatgctggcggttcatccagtggcttgcctgaaggtaaatctagtgccaccaagtggtccaaagaagcaacagcagggaaaaaatcaaaaagtggtaaactgaggaaaaagggtaacatgaagataaatgagacgagagaggacatggatgcacagttgttagaacaacaaagcacgaactcaagtgaatttgaggctccatccctcagtgacagtatgccttctgtagcagattctcactctagtcatttttctgaatttagttgttctgacctagaaagcatgaaaacttcttgtagtcatggttccagtgattatcacacccgctttgctactgttaacattcttcctgaggtagaaaatgaccgtctggaaaattccccacatcagtgtagcatttctgtggttacccaaactgcttcctgttcagaagtttcacagttgaatcatattgctgaagaacatggtaacaatggaataaaacctaatgttgatttatattttggcgatgcactaaaagaaacaaataacaaccactcacatcagacaatggaattaaaagttgcaattcagactgaaatttaggcccataaatgctgcagaataattaccactgtacaaccgtgtttggagctggttgaactacatgtgactacttaagtttcaggttaccagcaaaagccgggtttcattatcataatgcagatacattttctgtgttcagcaaggcattgtgtgtcatgtggatcttagttaccaaactatgaagtgaaggctttaaaagtgcattattttaaggataataaatttgaagagcaaagcatgttttgtgtgtttgccacaaaacattgcttgaagcacatacttagatagaaattggtcttaatttatataatcaatataaaatactaatgcaattctacagcattcaaatgaagaaaacttgaggctttagggataagtggttagtgatattttattgaaaccactaaagagataagtttaaaagaactgcataggttactctcagtatatgatactctgtaacatttctatttatatcggcataaatttcattttttttcttcatatgcaatgtggttatataaagcttaatgcagctcatttgctaccatttggatacttagacactttgagcaagattgtggcagtttttgcacaactttgaaatagaaatacctggtactctatcttgtttattgttgatgccatcttagaggaaaaaatgtaaaggtaagtaattaagcatatgacagcaacaaataagatacataaaactacaaaataaagtcccattaggttataagtattacaaaaaatccacctttctctaaggggaagtttgtaccccattgattcttggtgcctttgggatcgactgggttttaatggcctagttatttgaggattttgctgtgttgttttccatgtcttctctggtcaccttggattatatataaaaatacaggaaatagataaacatgaatgtgattaataatgctgaaaaagtattagcctaccaaagacacactcaggctttagtgaataactttacataacctcagtttttaacacatgcatatcttctccaaccatgaaatcaaagcacggtgcagaacttgtaccaagtacaaaaggtccatgtatgattagcattattttcttttgcttttgtttatggacaatgttcagctgacataagcagaagttggccaaaatactgcctgtactgttaatttcctgtataattcacttaaataaaagcaggttaacctcaatgatagcagttaaaatgttctatcttatgtatttcttttaagtattaccattatggtgctactgagcgttttcttttggtaaaaagaaaaatgccatgggctgcagtcttcttccatcacttttccctaccaggtccattaatatgcttataacactagtgccagttattttatttgataatgcttatggtatttgtatatttgtttgcattccaattttgtttaataatgagtgtgtaaactgcatacgttaaataaatgtaaatactaatgtactgctgcaaaaaaaaaaaaaaaaaaaaaaaaaaa

SEQ ID NO: 12342 - DNA, 4366 bp, Homo sapiens
ggtagttgcggcgctggttcccgggagcagccgtcgagccacaactgcggaggaggagttcgggaaagcggccgtcgggactcctcccctccgtcgtctccgccccggttgagaggcgcctcggcgcatcggagggaccctcccccgcgcttcctcaggctgctgtcgccgctgctgggagatgggcctactcgcccgccaccctgcgctgccgccgctctgaggagttaaagaacatccatgatagcagtcttctgtaaatcgaacttttcaagaattctctgaaggaaccaagtaggatattcttacatcatgacttaatgtgaatgcaagaacaagaaataggttttatctctaaatataatgaagggctgtgtgtaaacactgaccctgtctcaattctaacaagcattttagacatgagtttacatcggcaaatgggttcagatcgagatcttcagtcctctgcttcatctgtgagcttgccttcagtcaaaaaggcacccaaaaaaagaagaatttcaataggctccctgtttcggaggaaaaaagataacaaacgtaaatcaagggagctaaatggcggggtggatggaattgcaagtattgaaagtatacattctgaaatgtgtactgataagaactccattttctctacaaatacctcttctgacaatggattaacttccatcagcaaacaaattggagacttcatagagtgccctttgtgccttttgcggcattctaaagacagatttcctgatataatgacttgtcatcacagatcttgtgtggattgcttacgacaatatttaaggatagaaatctctgaaagcagagttaatattagttgcccagaatgtactgaacggtttaatccccatgatattcgcttgatattaagtgatgatgtcttgatggaaaaatacgaagaatttatgcttagacggtggcttgttgcagatcctgattgtaggtggtgtccagctccagactgtggatatgctgtgatagcatttggatgtgccagctgtccaaaattaacttgtgggcgagagggctgtggaacagagttttgctaccactgtaaacagatttggcaccccaaccagacctgtgatgctgctcgacaagagagagcccagagcttacgtttgagaactatacgttcttcatccattagttatagtcaagagtctggagcagcagctgatgatataaagccatgtccacgatgtgctgcttatataataaagatgaatgatgggagctgcaatcacatgacatgtgctgtttgtggttgtgagttttgttggttgtgtatgaaagaaatctcagatttgcattatctaagtccatcaggatgtactttttgggggaagaaaccctggagccgaaagaagaaaatattgtggcaactgggaacactggttggtgctcctgtcggaatcgctttaatagctggcattgctattcctgcaatgattattggcattcctgtgtatgtgggccgcaagattcacaatcgctatgaaggcaaggatgtttcaaagcacaaacggaatttggccatagcaggtggtgtaacgttgtctgtaatcgtgtctccagtagtagctgcagtgactgtaggtatcggtgttcctattatgttagcttatgtctatggcgtagttccaatttctctttgtcgaagcggaggttgtggagtctcagcaggcaatggaaaaggagttaggattgaatttgatgatgaaaatgatataaatgttggtggaactaacacagctgtagacacaacatcagtagcagaagcaagacacaacccaagcataggggagggaagtgttggtgggctgactggcagtttgagtgcaagtggaagccacatggatcgaataggagccatccgagacaacctgagtgaaacggccagcaccatggcactagctggagccagtataacggggagtctgtcaggaagtgccatggtaaactgttttaacaggttggaagtacaagcagatgtacagaaagaacggtacagtctaagtggagaatctggcacagtcagcttgggaacagttagtgataatgccagcaccaaagcaatggcaggatccattctgaattcctacatcccattggacaaagaaggcaacagtatggaggtgcaagtagatattgagtcaaagccatccaaattcaggcacaacagtggaagcagtagtgtggatgatggcagtgccacccgaagtcatgctggcggttcatccagtggcttgcctgaaggtaaatctagtgccaccaagtggtccaaagaagcaacagcagggaaaaaatcaaaaagtggtaaactgaggaaaaagggtaacatgaagataaatgagacgagagaggacatggatgcacagttgttagaacaacaaagcacgaactcaagtgaatttgaggctccatccctcagtgacagtatgccttctgtagcagattctcactctagtcatttttctgaatttagttgttctgacctagaaagcatgaaaacttcttgtagtcatggttccagtgattatcacacccgctttgctactgttaacattcttcctgaggtagaaaatgaccgtctggaaaattccccacatcagtgtagcatttctgtggttacccaaactgcttcctgttcagaagtttcacagttgaatcatattgctgaagaacatggtaacaatggaataaaacctaatgttgatttatattttggcgatgcactaaaagaaacaaataacaaccactcacatcagacaatggaattaaaagttgcaattcagactgaaatttaggcccataaatgctgcagaataattaccactgtacaaccgtgtttggagctggttgaactacatgtgactacttaagtttcaggttaccagcaaaagccgggtttcattatcataatgcagatacattttctgtgttcagcaaggcattgtgtgtcatgtggatcttagttaccaaactatgaagtgaaggctttaaaagtgcattattttaaggataataaatttgaagagcaaagcatgttttgtgtgtttgccacaaaacattgcttgaagcacatacttagatagaaattggtcttaatttatataatcaatataaaatactaatgcaattctacagcattcaaatgaagaaaacttgaggctttagggataagtggttagtgatattttattgaaaccactaaagagataagtttaaaagaactgcataggttactctcagtatatgatactctgtaacatttctatttatatcggcataaatttcattttttttcttcatatgcaatgtggttatataaagcttaatgcagctcatttgctaccatttggatacttagacactttgagcaagattgtggcagtttttgcacaactttgaaatagaaatacctggtactctatcttgtttattgttgatgccatcttagaggaaaaaatgtaaaggtaagtaattaagcatatgacagcaacaaataagatacataaaactacaaaataaagtcccattaggttataagtattacaaaaaatccacctttctctaaggggaagtttgtaccccattgattcttggtgcctttgggatcgactgggttttaatggcctagttatttgaggattttgctgtgttgttttccatgtcttctctggtcaccttggattatatataaaaatacaggaaatagataaacatgaatgtgattaataatgctgaaaaagtattagcctaccaaagacacactcaggctttagtgaataactttacataacctcagtttttaacacatgcatatcttctccaaccatgaaatcaaagcacggtgcagaacttgtaccaagtacaaaaggtccatgtatgattagcattattttcttttgcttttgtttatggacaatgttcagctgacataagcagaagttggccaaaatactgcctgtactgttaatttcctgtataattcacttaaataaaagcaggttaacctcaatgatagcagttaaaatgttctatcttatgtatttcttttaagtattaccattatggtgctactgagcgttttcttttggtaaaaagaaaaatgccatgggctgcagtcttcttccatcacttttccctaccaggtccattaatatgcttataacactagtgccagttattttatttgataatgcttatggtatttgtatatttgtttgcattccaattttgtttaataatgagtgtgtaaactgcatacgttaaataaatgtaaatactaatgtactgctgcaaaaaaaaaaaaaaaaaaaaaaaaaaa

SEQ ID NO: 12343 - DNA, 5092 bp, Homo sapiens
cttggctgttcctgaggcctggcctggctccccgctgaccccttcccagacctgggatggcggaggccggcctgaggggctggctgctgtgggccctgctcctgcgcttggcccagagtgagccttacacaaccatccaccagcctggctactgcgccttctatgacgaatgtgggaagaacccagagctgtctggaagcctcatgacactctccaacgtgtcctgcctgtccaacacgccggcccgcaagatcacaggtgatcacctgatcctattacagaagatctgcccccgcctctacaccggccccaacacccaagcctgctgctccgccaagcagctggtatcactggaagcgagtctgtcgatcaccaaggccctcctcacccgctgcccagcctgctctgacaattttgtgaacctgcactgccacaacacgtgcagccccaatcagagcctcttcatcaatgtgacccgcgtggcccagctaggggctggacaactcccagctgtggtggcctatgaggccttctaccagcatagctttgccgagcagagctatgactcctgcagccgtgtgcgcgtccctgcagctgccacgctggctgtgggcaccatgtgtggcgtgtatggctctgccctttgcaatgcccagcgctggctcaacttccagggagacacaggcaatggtctggccccactggacatcaccttccacctcttggagcctggccaggccgtggggagtgggattcagcctctgaatgagggggttgcacgttgcaatgagtcccaaggtgacgacgtggcgacctgctcctgccaagactgtgctgcatcctgtcctgccatagcccgcccccaggccctcgactccaccttctacctgggccagatgccgggcagtctggtcctcatcatcatcctctgctctgtcttcgctgtggtcaccatcctgcttgtgggattccgtgtggcccccgccagggacaaaagcaagatggtggaccccaagaagggcaccagcctctctgacaagctcagcttctccacccacaccctccttggccagttcttccagggctggggcacgtgggtggcttcgtggcctctgaccatcttggtgctatctgtcatcccggtggtggccttggcagcgggcctggtctttacagaactcactacggaccccgtggagctgtggtcggcccccaacagccaagcccggagtgagaaagctttccatgaccagcatttcggccccttcttccgaaccaaccaggtgatcctgacggctcctaaccggtccagctacaggtatgactctctgctgctggggcccaagaacttcagcggaatcctggacctggacttgctgctggagctgctagagctgcaggagaggctgcggcacctccaggtatggtcgcccgaagcacagcgcaacatctccctgcaggacatctgctacgcccccctcaatccggacaataccagtctctacgactgctgcatcaacagcctcctgcagtatttccagaacaaccgcacgctcctgctgctcacagccaaccagacactgatggggcagacctcccaagtcgactggaaggaccattttctgtactgtgccaatgccccgctcaccttcaaggatggcacagccctggccctgagctgcatggctgactacggggcccctgtcttccccttccttgccattggggggtacaaaggaaaggactattctgaggcagaggccctgatcatgacgttctccctcaacaattaccctgccggggacccccgtctggcccaggccaagctgtgggaggaggccttcttagaggaaatgcgagccttccagcgtcggatggctggcatgttccaggtcacgttcatggctgagcgctctctggaagacgagatcaatcgcaccacagctgaagacctgcccatctttgccaccagctacattgtcatattcctgtacatctctctggccctgggcagctattccagctggagccgagtgatggtggactccaaggccacgctgggcctcggcggggtggccgtggtcctgggagcagtcatggctgccatgggcttcttctcctacttgggtatccgctcctccctggtcatcctgcaagtggttcctttcctggtgctgtccgtgggggctgataacatcttcatctttgttctcgagtaccagaggctgccccggaggcctggggagccacgagaggtccacattgggcgagccctaggcagggtggctcccagcatgctgttgtgcagcctctctgaggccatctgcttcttcctaggggccctgacccccatgccagctgtgcggacctttgccctgacctctggccttgcagtgatccttgacttcctcctgcagatgtcagcctttgtggccctgctctccctggacagcaagaggcaggaggcctcccggttggacgtctgctgctgtgtcaagccccaggagctgcccccgcctggccagggagaggggctcctgcttggcttcttccaaaaggcttatgcccccttcctgctgcactggatcactcgaggtgttgtgctgctgctgtttctcgccctgttcggagtgagcctctactccatgtgccacatcagcgtgggactggaccaggagctggccctgcccaaggactcgtacctgcttgactatttcctctttctgaaccgctacttcgaggtgggggccccggtgtactttgttaccaccttgggctacaacttctccagcgaggctgggatgaatgccatctgctccagtgcaggctgcaacaacttctccttcacccagaagatccagtatgccacagagttccctgagcagtcttacctggccatccctgcctcctcctgggtggatgacttcattgactggctgaccccgtcctcctgctgccgcctttatatatctggccccaataaggacaagttctgcccctcgaccgtcaactctctgaactgcctaaagaactgcatgagcatcacgatgggctctgtgaggccctcggtggagcagttccataagtatcttccctggttcctgaacgaccggcccaacatcaaatgtcccaaaggcggcctggcagcatacagcacctctgtgaacttgacttcagatggccaggttttagacacagttgccattctgtcacccaggctggagtacagtggcacaatctcggctcactgcaacctctacctcctggattcagcctccaggttcatggcctatcacaagcccctgaaaaactcacaggattacacagaagctctgcgggcagctcgagagctggcagccaacatcactgctgacctgcggaaagtgcctggaacagacccggcttttgaggtcttcccctacacgatcaccaatgtgttttatgagcagtacctgaccatcctccctgaggggctcttcatgctcagcctctgccttgtgcccaccttcgctgtctcctgcctcctgctgggcctggacctgcgctccggcctcctcaacctgctctccattgtcatgatcctcgtggacactgtcggcttcatggccctgtggggcatcagttacaatgctgtgtccctcatcaacctggtctcggcggtgggcatgtctgtggagtttgtgtcccacattacccgctcctttgccatcagcaccaagcccacctggctggagagggccaaagaggccaccatctctatgggaagtgcggtgtttgcaggtgtggccatgaccaacctgcctggcatccttgtcctgggcctcgccaaggcccagctcattcagatcttcttcttccgcctcaacctcctgatcactctgctgggcctgctgcatggcttggtcttcctgcccgtcatcctcagctacgtggggcctgacgttaacccggctctggcactggagcagaagcgggctgaggaggcggtggcagcagtcatggtggcctcttgcccaaatcacccctcccgagtctccacagctgacaacatctatgtcaaccacagctttgaaggttctatcaaaggtgctggtgccatcagcaacttcttgcccaacaatgggcggcagttctgatacagccagaggccctgtctaggctctatggccctgaaccaaagggttatggggatcttccttgtgactgccccttgacacacgccctcctcaaatcctaggggaggccattcccatgagactgcctgtcactggaggatggcctgctcttgaggtatccaggcagcaccactgatggctcctctgctcccatagtgggtccccagtttccaagtcacctaggccttgggcagtgcctcctcctgggcctgggtctggaagttggcaggaacagacacactccatgtttgtcccacactcactcactttcctaggagcccacttctcatccaacttttcccttctcagttcctctctcgaaagtcttaattctgtgtcagtaagtctttaacacgtagcagtgtccctgagaacacagacaatgaccactaccctgggtgtgatatcacaggaggccagagagaggcaaaggctcaggccaagagccaacgctgtgggaggccggtcggcagccactccctccagggcgcacctgcaggtctgccatccacggccttttctggcaagagaagggcccaggaaggatgctctcataaggcccaggaaggatgctctcataagcaccttggtcatggattagcccctcctggaaaatggtgttgggtttggtctccagctccaatacttattaaggctgttgctgccagtcaaggccacccaggagtctgaaggctgggagctcttggggctgggctggtcctcccatcttcacctcgggcctggatcccaggcctcaaaccagcccaacccgagcttttggacagctctccagaagcatgaactgcagtggagatgaagatcctggctctgtgctgtgcacataggtgtttaataaacatttgttggcagaaaaaaaaaaaaaaaaaaaaaaaaaaaaaaaaaaaaaaaaaaaaaaa

SEQ ID NO: 12344 - DNA, 2476 bp, Homo sapiens
atttttagtttgttgaagttcgtgactgcttcactctctcattcttagcttgaatttggaaatgacttttgatgacctaaagatccagactgtgaaggaccagcctgatgagaagtcaaatggaaaaaaagctaaaggtcttcagtttctttactctccatggtggtgcctggctgctgcgactctaggggtcctttgcctgggattagtagtgaccattatggtgctgggcatgcaattatcccaggtgtctgacctcctaacacaagagcaagcaaacctaactcaccagaaaaagaaactggagggacagatctcagcccggcaacaagcagaagaagcttcacaggagtcagaaaacgaactcaaggaaatgatagaaacccttgctcggaagctgaatgagaaatccaaagagcaaatggaacttcaccaccagaatctgaatctccaagaaacactgaagagagtagcaaattgttcagctccttgtccgcaagactggatctggcatggagaaaactgttacctattttcctcgggctcatttaactgggaaaagagccaagagaagtgcttgtctttggatgccaagttgctgaaaattaatagcacagctgatctggacttcatccagcaagcaatttcctattccagttttccattctggatggggctgtctcggaggaaccccagctacccatggctctgggaggacggttctcctttgatgccccacttatttagagtccgaggcgctgtctcccagacatacccttcaggtacctgtgcatatatacaacgaggagctgtttatgcggaaaactgcattttagctgccttcagtatatgtcagaagaaggcaaacctaagagcacagtgaatttgaaggctctggaagaaaagaaaaaagtctttgagttttattctggaatttaagctattctttgtcacttgggtgccaaacatgagagcccagaaaactgtcatttagctggctgcagaactcctttgcagaaactggggttccaggtgcctggcacctttatgtcaacatttttgattctagctacctgtattatttcacctagcttgtcccaagcttccctgccagcctgaagtccattttcccctttttattttaaaatttgactcctcttcaagcttgaaaaccctctgaactcagtcttctttacctcattatcaccttcccctcacactcctaaaattgcatgaaagacagaacatggagaacttgctcaagtgcaggcagagagcaaaaaggggaaatatgtctgggaaaaagtgcacgtgaagaaacaaagaaggacagaggccattccgaaatcaagaaactcatgttcttaactttaaaaaaggtatcaatccttggtttttaaactgtggtccatctccagactctaccacttacggacagacagacagacagacacacacacacacacacacacacattttgggacaagtggggagcccaagaaagtaattagtaagtgagtggtcttttctgtaagctaatccacaacctgttaccacttcctgaatcagttattatttcttcatttttttttctaccagaggacagattaatagatttaacccttcacaacagttcttgttagaatcatgggatgtgtggcccagaggtaagaatagaatttctttccctaaagaacataccttttgtagatgaactcttctcaactctgttttgctatgctataattccgaaacatacaagacaaaaaaaatgaagacactcaatctagaacaaactaagccaggtatgcaaatatcgctgaatagaaacagatggaattagaaatatatcttctatttttaggcttctatttcctttccacccactcttcacaggctattctactttaaaggaagcctttttattttgctgcacacaatctagcaggaatctttttttttttttaagagctgtgtcatccttatgtaggcaagagatgtttgcttttgttaaaagctttattgagatataattaacataaaataaactgaacatatttaaagtgtactatttgataagttttcacaccttgtggagaacatgcatactacaattaagagagtgaacatatccatcatccctcaaagtgtcacaatgctcctcctgatgactcctccccagaaaaccaccaatcggctttcattttgcattttgtagttttatgtgaatggaatcatatagtatgtcttttttttttgtctggcttctttcactttgcataattattttgagattcatatgtctccatcttgatgctcgtatgaattcattcttttaaatgttgaatattcccttgtatggatataccacaattcatttacccatttacttgttgatgacatttgggttgttttagttttgggatattacaaataaagctgctgtgaacatttgtgtacaaaaaaaaaaaaaaaa

SEQ ID NO: 12345 - DNA, 12395 bp, Homo sapiens
cgctgcaagtcccggggccctgcctccatcgtcctaggggttccgcgggcaggagcaacccagaagcaccggtgaggccagcgcgtcctcgcagccatgagcagtgagcaggataaatcggccagcaaagaaaaatccaagaaaccagtaagatttctaccacagctgtctatggagaaattagccagcaaagaaaagttcaaggcaccagcaagagctttaccacagctgtctatggtgagtacaaagccccactggcagcaggcagctccatcattccatttgagtgtaaagcaggatgatgagagtccagaaccatttagtgttaaaaatgaacagtcccatgctgaatacatggaacgttttggaaaaaagggcaaattaccccaccaagttgatgatagttatgttggaccatctacttccaaatcaaagggcaaatctccacataaagaacgagaaaactttagaagtactcttgttaatgtcattatgcaacaagatgctgacttagactcagctgtccctgatggaagcacaattccaaaaccgaccgcttctgctatagagaaagacatcttgagatattactattatattcaccatggaattgatacagaccatgtagccccaatggaagattcttggctagaacacgtactggatttagttccacaacatctgaaagtcttcactgacagcatagttacattatctgatgaaatgagagaggattatcttcttagtgtaaggaaatccatagttgattttgttttaaaagatcctcgagagaaaggagatgataagaagacagatgaacttccagcccatcgtgctgaaatggaaattctgccaaaaccttggaggaaatcttttttagctgcaagcagttatattagggatcacttgaatgcaatgaaccccacaatgctggctgtactagatttgtggcacactaattttaaaaaattacgtttagttgatatcaaagaatttcataattgccaggatgcattagagctgtcaagttttcagaacattatcatgagacacatggactctgccaaagagactctacttaaaatgtggtttccagaagtgcagaatatttattaccaaggtaataaaaaaaagcaattgccaactggtgacagcagtgccaaattggaatcttttttcaactgtgctgctgcacttatgactttacagctgcaggacctcactttagtctccatgcaagatttcacggacttaattgcacaacccccagattctgttagagcttttgaacatccaggtttcatcatgaggctgattcttgataatgacaccattaagtttgaacctgagttgagtgactatatagatatctttctaaatgtttatgacgtcatgattaaagctgtcagttttgtgccaagagttgagacaaaattgtattccaagtgggaaagtaagtctaaaccaacaaccttgaagcccataattctgaatgaaattgtagatgctcacaaagaaaagatcaaggaagttattatgaaagagagtgtggcacctactgagcacctcagactctatgacaagtatgactttttaattaccagaaaagctgagcgagatgttgataacttcctcgcagaaaatcatagttatgaaaaaataatagatgaaatttgcaaataccagaaactaatagaggaaatacagtacacatccataaagactattcgtttaggaatgtttgaaatgcactgtgaggaattaatcagagctttggtgaagcgagcagatattatttgtgggaaacttctagctaaaatgttcagagatcatcaggaagtaaatacaagattatgcgatgaatttgagaggatagctgaaaaagctcttagcactcctccaaatacagcagaactaatggaaatgaaggcttacattcagaaagtggaggtaactgatatgattgaactagaacagagattagtggattccaaaaactgcctcgccttcctcatcgagtatgtcaacttttctccagcagacatgaggctaaataatagtgttttccagtggtatggaaggatgggagaaatttttgaagaacacaggaaaatcattaaagagaaaatagaacaatatcaagaaggtctgaagttacggtgtgaacggtttgtggaggaattggagagttatgctaagcaatcagaagaattttattcatttggagatcttcaggatgttcagcggtacctaaaaaaggctcaaatactgaatggaaagttggatttagctgcagataagattgagcagtttaatgctgaagaggaagcatttggttggctaccatctgtatatcctcaacgtaaaaaaatccaagatggcttgaacccttatcttcgtctttatgaaactgctgtcgaatttagcagcaactatagagcatggacagaagggccatatcataaagtgaatccagaccaagtagaagcagatattggaaattactggagaggattatataaactggagaaaacctttcatgattctccatatgcattggcaatgacaaaaaaagtaagatcaaaggtggaagatttcaagcagcacattcctctcattcaagtgatctgtaatcctggtttgcgccccaggcactgggaggccatgtctgccattgttggttaccctttgcagccatcagatgactccacagtctcctcttttttagacatgaatctggaaccatatatagaccgatttgaaggtattagtgaagcagctagcaaagaatattctcttgaaaaggcgatggagaagatgattactgagtgggatgcagtggaatttgtcatccattcttatagagaaactgggacatttattttggcatcagttgatgaaattcagatgttgttggatgaccatattattaaaacacaaactatgcgaggatctcctttcattaagccttatgaaaaacaaatgagagaatgggagggcaagctcctactgcttcaggagattctggatgaatggctcaaagtccaagccacgtggctgtatctggagcccattttcagctctccagacattatgtctcaaatgcctgaggaaggcagacgatttacagctgtggataagacatggagagatataatgagaagtgtcatgcaggataaacatgttctgacagttgtaaccattgacagaatgctggaaaggctgaaaaaatctaatgaacttttggagctcattcttaaaggacttaatgaatatttggaaaagaaacgcctctttttccccagattcttttttttgtccaatgatgaacttcttgagatactatctgagactaaagatcccactagggtgcaacctcacttgaagaaatgttttgaaggaatcgcaaaggtagaatttacggaaactttagacattactcacatgaagagcagcgaaggagaggttgtagaactcatagagattatttcaacagccaaagccagaggtcaagtggagaagtggttggttgaattagagagagttatgattaactccatccacaaggtaactggagatgcaacttttgcctatacaaaatatgaacgaattaactgggtaagggattggcctggacagactgttctctgtgtatcccaaatcttttggacaaaagaagtacaaacagctattccaatggggataaaggctcttgagcaatacttgaaaacatgtaacagacaaattgatgatattgtcactttggtgcgtggcaaattgtccatgcagaatcgcgtaactctgggagcacttgtggtactggatgtccatgctagagatgtcctctcatcacttgtaaaaaaaaatattagcgatgactctgactttgaatggttaagtcagcttaggtactactggcaagaaaatcatttagaaacaaaaatgatcaatgctggtttgcgatatggatatgaatatctgggtaattcccctaggctggttattacaccactcacggatagatgttacagaaccttatttggagcccttcatttgcaccttggaggagcacctgagggtccagctggcactgggaagactgaaactaccaaggatttggcaaaagctgtagccaaacaatgtgttgttttcaactgctctgatgggttggattatttggctttgggaaaattctttaagggactgttatcttgtggagcctgggcttgctttgatgagtttaacagaattgatttggaagtactctctgtggttgctcaacaaatccttactatccaaagaggtattaatgcaggtgctgatatactgatgtttgaaggaactgaactaaaacttgaccccacatgtgctgtctttataacaatgaaccctgggtatgctgggcgatcagaactgccagataacctgaaggctctctttcggacagtagcaatgatggtacctgactatgccatgattgctgaaatagtcctatactcctgtgggtttgtcactgctcgaccactgtctgtaaaaattgtggctacgtatcgcttgtgttcagagcagctgtcatctcaacatcactacgactatggaatgagagccgtgaagtcagttcttactgctgctgggaatctgaagctgaaatatccaaatgaaaatgaagaaattttgctgcttagatctatcattgatgtaaatctgccaaaatttttatcccatgatttaccactctttgagggaattacttcggatttgtttcctggggtaaaattaccaaaaccagattacaatgatttgctggcagctatcaaagacaattgtgcctccatgaatttgcaaatgactgcattcttttccgagaagattcttcaagtatatgaaatgatgattgtgcgtcatggttttatgattgttggagaaccatttggaggaaaaactagtgcatatcgtgtcttagctggagcactaaatgatatatgtgaaaaggggctaatggaagaaaacaaagttcaaataactgttttaaatcctaagtctgtcaccatgggccaactgtacggacagtttgattcagtgtcccatgaatggtctgatggggtccttgctgtcagttttagagcatttgcctcttcagtgactccagataggaaatggttaatttttgatggcccagtagatgcagtgtggattgagaatatgaacactgtgctggatgacaacaagaagctatgtctgatgagtggggagattattcagatgtcaccacaaatgaatctaatttttgagccaatggatttagaagttgcttcccctgccactgtttccagatgtggcatgatttacatggagcctcacatgttaggctggagaccactgatgttgtcctgggtgaatctgttacctgcgtcagtcagtgttattcaaaaggaattcataatgggcttatttgacagaatggtccctgtttcggttgaatttattagaaagcatacaaaggaattatctcctacttccgatacaaacttggtccggtccttaatgaatctaatagactgttttatggatgattttgctgatgaagtcaaactaaaggagagaaatgatcgagaaacttactctttgcttgagggcatttttctgttttcattgatctggtccgttggtgcttcttgtacagatgatgatcgattgaaatttaataagattcttcgagaactaatggaaagtccaatttcagatcgaactcgaaatacgtttaaattacagagtggtactgagcaaacatcctcaaaggcactaactgtcccatttcctgaaaaaggaacaatttatgattatcaatttgtcactgagggaataggaaaatgggaaccatggataaagaaattgaaagaagctcctccaattcctaaagatgtaatgtttaatgaaatcattgtgccaactctggacacaattcgatactctgcattaatggaattgctgaccacccatcaaaagccttcaatatttgtaggaccaacaggaactgggaaaagtgtttacattacgaattttcttttaaatcaactaaataaggaaatctacaaacctctgctaattaacttctcagcacaaactacagcagctcaaactcagaatattgtcatgtcaaaattggacaagagaagaaagggagtttttggtcctcctttgggcaagagaatggttgtctttgtagatgatgtcaatatgcctgctcgggaggtatatggggctcaacctcccattgagttacttagacagtggttagaccactggaactggtatgatctaaaagattgttccatgattaaactagtggacattcagatcatgtgtgctatgggacctccaggtggtggtcgaaatccagtaactcctcgatacatgcgacatttcaatattataacaatcaatgagtttagtgataaatccatgtatacaatcttctctagaatcttaacttggcatttagaaatctgttataaatttccagatgaatttctagatttgaccacacaaatcgtaaatggcacaatgactctgtataaagaagcaatgaagaatctcttgcctactccagctaaatctcactacttgttcaacctccgtgatttctcccgtgtcattcaaggtgtttgtttgtcaagaccagaaacaacagaaaccacagaagtgattaaacgtctttgggttcatgaggtccttcgagtgtattatgaccgccttctggacaatacagacagaagctggctcatcaactacattcaagaaattttgagaaactacatgtatgaagattttcatgagctttttcagcgtttggattttgataatgatggcatggtggaagcagatgacttacgcagcttaatgttttgtgatttccatgatcccaagagggaggataccaactacagagaaatcgcagatgtggataatcttcgaatgatagtagaaattcacctagaagaatacaacaatataagcaaaaaacccatgaaccttgtcttgtttcgatttgccatagagcacatcagcagaatttccaggatcctgaagcagcctcgcagccatgctctcctagtaggggttggagggagtggaaggcagtctgtcaccagattagctgcccacatggctgattattcagttttccaagttgaaatctctaaggggtatgatactactgaatggcatgaagatttaaaagtgatcttaaggaaatgtgcggaaggtgagatgcagggtgtcttcctgtttacagatactcaaattaaagaagagtcttttctggaagatgtcagtaatctgctaaatgctggggagattccaaatctctttgcattagatgagaagcaagagatatgtgataagatgcgtcagttagatcgccagcgggataaaaccaagcaaacagatggcagccccatagcccttttcaacatgtttattgatcattgccgcagccaactgcatgtggtccttgccatgagtcccattggagatgcatttcggaatcgtcttagaaagttccctgctcttgttaactgctgtaccattgactggtttcagtcatggcctgaagatgcactccaggcagttgcctcacgattcttggaagaaattgaaatgtcagaggaaatacgagatggctgtatcgacatgtgtaaaagcttccacacttctactatagatttatccaaatctttctttgttgaacttcaaagatacaattatgtgactcctacctcttacctcgaattaatctccaccttcaaactgttgttagaaaagaaaagaagtgaagtaatgaaaatgaaaaagagatatgaagtgggtttggagaaactggattctgcttcatctcaagtagccacaatgcagatggagttggaggcactacatcctcaattaaaagttgctagcaaagaggttgatgaaatgatgataatgattgagaaagagtctgtagaagttgccaaaactgaaaaaatagtgaaagctgatgaaacaatagcgaatgaacaagctatggcttccaaagccatcaaagatgagtgcgatgctgacctggcaggtgccttgccaatattagagtcagcactggccgcccttgatactcttactgcacaggatattacagtggtaaaatccatgaagagtcctcctgctggtgtcaagcttgttatggaagctatatgcatcttgaaaggaatcaaagctgacaaaatccctgacccaacaggttcagggaaaaaaattgaggatttctggggcccagctaagagacttcttggtgacatgaggtttctgcagtcacttcatgaatatgacaaggacaatattcctccagcttatatgaatatcataagaaaaaattatattccaaatccagattttgtaccagaaaaaatcagaaatgcttctacagcggccgaaggtctgtgcaaatgggtcatagcaatggattcatatgataaagtggcaaaaatagtagctcccaaaaagataaaactggctgcagctgaaggggagcttaaaattgccatggatggtcttagaaagaagcaggcagcccttaaggaagttcaggacaagctggccaggcttcaagacacacttgaattaaataaacaaaagaaggctgacctggaaaaccaggttgacctttgcagcaaaaaactagaacgagctgaacagttgattggaggccttggaggtgagaaaactcgatggagccacacagctctggagctaggtcagctgtacatcaacttgactggggatatcctcatttcctccggagtggttgcttacctcggagccttcacatccacctatagacagaatcaaactaaagagtggacaactttgtgcaaaggaagagatatcccctgctcagatgattgctctcttatgggtaccctgggagaagctgtgacaattcgaacttggaatattgctggattaccttctgactcattttccattgataatgggataatcataatgaatgcaagaaggtggcctctgatgatagatcctcaaagtcaggctaataaatggatcaagaacatggaaaaagccaatagtctttatgtgattaaacttagtgaacctgactatgtcaggactctggaaaattgcatccagtttggtactcctgtgttgctagaaaatgttggcgaagaactagatcctattttggaacctcttctactaaaacaaacctttaagcagggtgggagtacatgtatccggcttggggactccacaattgaatatgcacctgacttccgcttctatattactaccaagttaagaaatcctcattatcttcctgaaacatcagtaaaggtaacattattaaacttcatgataacccctgagggaatgcaagatcagcttctgggaattgtggtggcacaagaaaggccagaccttgaagaagaaaagcaagccttgatattacaaggagctgaaaataaaaggcagttaaaagaaatagaagacaagattttagaagttctttcatcttcggaaggcaatatattagaagatgaaactgctattaagatattatcttcctccaaggccttggctaatgagatttctcagaagcaggaagtagccgaagagacagagaaaaagattgacaccacccgcatgggctatcgtcctattgccatccattcttccatcctatttttttctcttgctgatttagccaacattgagcccatgtaccagtattcactgacctggtttattaaccttttcatcctgtctattgaaaattcagagaaatcagaaattttggcaaaaaggcttcagattctcaaggatcactttacttattcactgtatgttaatgtctgccggtcactctttgaaaaggataagctgctcttttccttttgtctaaccataaatctactgctgcatgagcgggcgattaataaagctgagtggagatttctgctaactggtggcattggactggataatccttatgccaacccttgtacatggcttcctcagaaatcctgggatgaaatatgtcgattagatgatttgcctgccttcaaaaccattcgtagagagtttatgcgcttaaaggatggatggaagaaagtatatgatagtttggaaccacaccatgaggttttccctgaagaatgggaagataaagcaaatgagtttcaaaggatgcttattattcgttgcttgaggccagacaaggttattccaatgttgcaggaatttataatcaacagattgggacgtgcattcattgaaccacccccctttgatttagccaaggcatttggagacagtaactgctgtgcaccactgattttcgtgctctctcctggagcagatcccatggctgcccttctaaaatttgctgatgaccagggatatgggggatcaaaacttagctctttatctcttggtcaaggccaagggcccattgctatgaagatgttagaaaaagctgtcaaggaaggaacatgggttgttcttcagaattgtcaccttgccacctcttggatgccaacccttgagaaagtctgtgaggagttaagcccagagtcaacacatccagatttccgaatgtggctaacgagttacccatctccaaatttccctgtgtcagtactgcagaatggagtgaaaatgaccaatgaagcaccaaaaggtttacgggctaatatcattcgatcatacctcatggacccgatctctgatccggagttctttggcagctgcaaaaagcctgaggaattcaagaaattgctttatggcctgtgtttctttcatgctttggtacaagaaagacggaaatttggacccctagggtggaatattccttatgagttcaatgagacagatctgagaatcagcgtacagcagctccacatgttcctgaaccagtatgaggaactgccgtatgaggctctgcggtacatgactggcgaatgcaattacggaggcagagtgaccgatgactgggaccggcgcacgctgcgcagcattctaaacaaattcttcaatcccgaattagttgaaaattcagactataagttcgactcaagtggcatctattttgttcctccttctggtgatcacaaaagctacatcgaatacacaaagactctgccactgaccccagcaccagaaatctttgggatgaatgccaatgcagatatcactaaggatcagtcagaaactcagctgctatttgataacattcttcttacacagtctcgttcagcaggtgctggtgcaaaatcatcagatgaagtagtgaatgaggtcgctagtgacatcttgggcaaacttccaaacaacttcgacatcgaggctgccatgaggaggtacccaacaacttatactcagagcatgaacactgtacttgtccaagagatgggacggttcaataagttactgaagaccataagagattcgtgcgtaaatattcaaaaagcaatcaaggggcttgcagtcatgtctacagatcttgaagaagtggttagcagcattttgaatgtcaaaattccagaaatgtggatgggtaaatcctacccaagccttaaaccacttggcagctatgtgaatgacttccttgcaagactaaaattcttgcagcaatggtatgaggttggtcctcctccagtcttctggctttctggcttcttcttcacacaagccttcctgaccggtgcccagcagaactacgccaggaaatacacaattcctattgatcttcttgggtttgactatgaagtgatggaagacaaagaatacaagcatcctcctgaggatggtgttttcattcacggattatttctggatggagcttcctggaatagaaagatcaagaaacttgcagaatcgcatcccaaaattctttatgatacagtgcctgtgatgtggctaaagccctgtaagagggcagatataccaaaacggccaagttatgttgctccattgtataagacaagtgagcggagaggagtattatccaccactggccattccacgaattttgtgattgccatgactcttccctctgaccaacccaaggaacactggattggacgaggtgtagcactgttatgtcaacttaattcataaccagaagacatcatttccttgttcctatttcttgttggctggctgagtagagaaagcatattattttactacttaaacctttttttttgtttgtttaaatacatttgactaaagttataattatgaatttacttatgagcaaatgcagctaaacttaatatgactcatacttaaatgtaaggaaatgttctgaaataaataaagactaaagaaaacacactggc

SEQ ID NO: 12346 - DNA, 20839 bp, Homo sapiens
gtgataaaactacaaagcagaatacgaagaagacagaggcaaaggcttcttccctcagaccataactcaagaatatgggggtctcgcagtaatttatgctctttgcttttgtcttttcatagttttccttgtatagtttgtcacttagggcatctcctgctgccttcagctgcctaagctgtgggttctctgaagcaggaagcacattataatctgcttttcctttattcttttcatagtcttctttgtattttgctgctgaggaaatttatttggtagattgaaggtttgaacgagagctacagaaacgaaagaaaaagtctgtataagccaatggtgttcgggaagaaaataaccccattgccttgagtttgtaggtgccactactactctgaaaaatggcagatgacgaagactatgaggaggtggtggagtactacacagaagaagtggtttacgaagaggtgccgggagagacaataacaaaaatttatgagactacgacaacaaggacatctgactatgagcaatcagaaacttccaaaccagctctggcacagccagcactggcacagccagcatcagcaaagccggtggagaggaggaaggtcatccggaagaaagtggatccttcaaagttcatgaccccctacattgcacacagtcagaaaatgcaggatctttttagcccaaataaatacaaggagaagtttgagaaaacaaaaggacagccatacgccagcacaacagatactccagaacttcgcagaatcaaaaaagtacaagatcaactcagtgaggttaagtatcgaatggatggtgatgttgctaagactatatgtcacgtagatgaaaaagcaaaggatattgaacatgcaaagaaagtgtcgcagcaagtcagtaaggttttatacaagcagaactgggaagacaccaaggataagtacctgcttcctcctgatgcccctgaacttgtccaggccgttaagaacaccgccatgttcagcaagaaactgtacactgaagactgggaagcagacaaaagtttgttttacccctataatgatagcccggaactgaggagagttgcccaggcccagaaagctctcagtgatgttgcctacaaaaaaggtctcgctgaacagcaagctcaattcacgcctctggccgatcctccagatatagaatttgccaagaaagtaaccaatcaagtgagcaagcaaaaatacaaagaagactatgaaaataaaatcaaaggcaaatggagtgagacaccttgctttgaagttgcaaatgccagaatgaatgctgataacattagcacaaggaaataccaggaagattttgaaaacatgaaagaccagatctacttcatgcagaccgaaacaccagagtataaaatgaataaaaaagctggtgtggcagctagcaaggtaaaatacaaagaagactatgaaaagaataaaggaaaagcagattataatgtgcttcctgcttcagagaacccacagcttaggcagctgaaggcagcaggagatgccctaagtgacaaactatacaaggaaaactatgaaaagacaaaagcaaagagcataaattactgcgagacccccaaattcaagctcgatactgttctgcagaacttcagtagtgataaaaaatataaagattcctacttaaaagatattttgggacattatgtaggcagcttcgaggatccataccattcacactgcatgaaagtcacagctcaaaacagtgataaaaactacaaagcagaatacgaagaagacagaggcaaaggcttcttccctcagaccataactcaagaatatgaagcaattaagaaactagatcagtgtaaagaccacacctacaaagtccatccagataagacaaaattcacccaagttacagactctcctgttctgctacaagcccaagtcaattccaaacaactgagtgacttaaattacaaagcaaaacatgaaagtgaaaagttcaagtgccatatcccccctgatactcctgcttttatccagcacaaagtcaatgcctataacttgagtgataatctttataagcaagactgggagaagagcaaagccaaaaagtttgacattaaagtggatgccattcccctgctggcagccaaagccaacaccaagaacaccagcgatgtgatgtacaagaaagactatgaaaaaaacaaagggaaaatgattggagtcctcagcattaatgacgatcccaagatgctgcactccttgaaggtggccaaaaaccagagtgatagattatacaaggaaaactatgagaagacaaaggcaaagagtatgaattactgtgagaccccaaaatatcaacttgatactcagctgaagaacttcagtgaggctagatataaagacttatatgtaaaggatgttttgggacattatgtaggcagcatggaggacccatatcacacacactgcatgaaagttgcagctcaaaacagtgataaaagttacaaagcagaatatgaagaagataaaggaaaatgctatttccctcagacaataacacaagaatatgacgcaatcaagaagctggaccagtgtaaagatcatacctacaaagttcatccagataagaccaaattcacggcagtcactgattctcctgtactgttgcaagcccagctcaacacgaaacagcttagtgatctgaattacaaagcaaaacatgaaggtgagaggttcaagtgccatataccagcagatgctccacagtttatccaacacagagtcaatgcctataatctgagtgataatgtttataagcaagactgggagaagagcaaagccaagaagtttgacattaaagtggacgccattcccctgttggcagccaaagccaacaccaagaacaccagcgatgtgatgtacaagaaagactatgaaaagagcaaagggaaaatgattggagccctcagcattaatgacgatccaaagatgctgcactccttgaagacagccaaaaaccagagtgatcgcgaatatcgaaaagattatgaaaagtcaaaaactatctacacggcacctcttgatatgctccaagtcactcaagctaagaaatctcaggcaattgccagcgacgttgattataagcacatcttacacagttacagctacccccctgatagcatcaatgtggaccttgccaagaaggcatatgcgctgcagagcgatgttgaatacaaagctgactacaatagctggatgaaaggttgtggctgggtgccttttgggtccttagaaatggaaaaggcaaagcgagcttcagacatcctcaatgagaaaaaatatcgccaacatccagacaccctcaagtttacctcgattgaagatgctccaattacagtacagtctaaaattaaccaggcccagaggagtgatatcgcttacaaagccaaaggagaggaaattattcacaattacaacctgccaccagacctgccccagttcatccaggctaaagttaatgcctacaatatcagtgagaatatgtacaaagcagacttgaaagacttgagcaagaagggatatgacctgagaactgatgcgattcccatcagagctgccaaagctgccaggcaggcggcgagtgacgttcagtacaaaaaagactatgaaaaggctaaagggaaaatggttggcttccaaagtcttcaagatgaccctaaactggttcattatatgaacgtggccaagatacaatcagatcgggagtataaaaaagactatgagaagacaaagtccaaatacaacacgccccatgatatgttcaatgtcgtggcggctaagaaagcccaggatgtggtcagcaatgtcaactataagcattctctccatcattacacctacttgcctgacgccatggacctggagctgtctaagaacatgatgcagatacagagtgataacgtctacaaggaagactacaacaactggatgaaaggcattggctggattcctattggcagtctcgacgtcgaaaaagttaaaaaggccggtgatgctctgaatgaaaagaagtacaggcaacatccagacaccctcaaatttaccagcattgtggactccccagttatggtccaggcaaaacagaacacgaagcaagtcagtgatatcttatacaaggctaaaggagaagatgtgaaacataaatacaccatgagtcctgatcttcctcagtttctccaggccaagtgcaatgcttacagtataagtgacgtctgttataaacgggattggcatgacttaatacgcaagggcaacaatgtgctgggcgatgctattcccatcactgcagccaaggcatcgagaaacattgccagtgattataaatacaaggaagcttatgagaagtcaaagggaaagcatgtgggtttcagaagcctccaggatgatcccaagctggtccactatatgaatgtggcaaagctgcagtctgatcgtgaatacaagaagaactatgagaacaccaaaaccagctaccatacccctggggacatggttacgatcacagctgcaaagatggcccaggatgtcgctaccaatgtcaactacaaacagccattgcatcattacacatacctacctgacgccatgagtcttgagcatacgaggaatgtcaatcaaattcagagtgataatgtgtataaagacgagtataacagcttcttgaagggcatcggatggatccctattggttccctggaggtggagaaggtcaagaaagcaggcgatgcattaaatgagaggaagtatcgacagcacccagataccgtcaagttcacaagtgtgcctgattccatgggcatgatgttggctcagcataacacaaagcagctaagtgatttgaactacaaggtagagggagagaaactgaagcacaagtatactattgaccctgaattgcctcagtttattcaagccaaagtcaacgccctcaacatgagtgatgctcattataaagcagattggaagaaaaccattcgcaagggctatgatttgagaccagatgccatcccaattgttgctgcaaaaagttcaaggaatattgctagtgattgcaaatataaggaggcctacgagaaagccaaaggcaagcaagttggatttctcagtcttcaggatgatcctaaactggttcactacatgaatgtggccaaaatccagtctgatcgtgagtacaaaaagggctatgaagccagcaagaccaagtaccacacacctctggatatggtcagtgtgacagctgcaaagaaatctcaggaggttgccaccaacgccaactacagacagtcataccaccactacactctcctgcccgatgccttgaatgtggagcactccaggaatgccatgcagattcagagtgataatctgtacaaatctgacttcaccaattggatgaaagggatcggctgggtgcccatagagtccctggaggtggagaaggcaaagaaagcaggagagattcttagtgagaagaagtatcgccagcaccccgagaagctgaagttcacttacgccatggacacaatggaacaggcacttaacaagagtaacaaactgaacatggacaagaggctctacactgaaaaatggaacaaggacaagaccaccattcatgtcatgcctgacacaccggatattttactctccagagtaaaccaaatcaccatgagtgataaactgtacaaagctggctgggaagaggaaaagaagaaaggatatgacctgaggcctgatgccattgcaataaaggctgcaagagcctctagagacattgccagtgattacaaatacaagaaagcctatgaacaagccaaagggaaacacattggcttccggagcctggaagatgaccccaagctggtgcacttcatgcaagtggccaagatgcagtcagaccgggaatacaagaagggatatgagaaatccaagacctccttccacaccccggtggacatgctcagtgtggtggcagccaagaagtctcaggaagtggccaccaatgccaactacaggaacgtgatccatacctacaacatgcttcctgatgccatgagctttgaattggccaaaaatatgatgcagattcaaagtgataatcagtacaaggctgactatgctgacttcatgaagggcattggatggctccctctgggctccctggaagcagagaaaaacaagaaagccatggagattattagtgaaaagaagtaccgccagcacccagacactttgaagtattccacactcatggactcgatgaacatggttttggcccagaataatgcaaaaattatgaacgaacatctctacaaacaagcatgggaggctgacaaaaccaaagtccacatcatgcctgatatcccccagattattttggcaaaggcaaatgcaattaatataagtgataaactctacaaactttccttggaagagtctaaaaagaaaggctatgatctcagacctgatgcaattcctatcaaagctgccaaggcttccagagatattgcaagtgattataaatacaagtacaattatgaaaaagggaaggggaaaatggttggtttccgcagtctcgaggatgatcccaaattagtccattccatgcaagtggctaagatgcaatctgatcgggagtacaagaaaaactatgagaacacaaagaccagctaccacacccctgccgacatgctcagtgtcacggctgcaaaggatgcccaagccaacatcaccaacactaactacaagcacctgattcacaagtacatcctccttccagatgcaatgaacattgagctgaccaggaatatgaatcgcatacagagtgataatgaatataagcaagattacaatgaatggtacaaagggcttggctggagtccagcaggttctctggaagtggagaaggccaagaaagcaactgaatatgccagtgatcagaaataccgccagcacccgagcaacttccagtttaagaagctgactgattccatggacatggtgcttgccaagcagaatgcacataccatgaacaagcatttatacaccattgattggaataaagataagaccaagattcatgtgatgcctgatacaccagatattttacaagccaagcagaatcaaacactgtatagtcagaaactctataaacttggatgggaagaagctttgaagaaaggctatgatctcccagttgatgcaatttctgtacagctagctaaagcttcaagagacattgctagtgattataaatacaaacaaggctaccgaaagcaacttggccaccatgttggattccggagtctgcaagatgacccaaaacttgtgttgtccatgaatgtagccaaaatgcagagtgaaagagaatacaagaaggactttgagaagtggaaaactaagttctccagcccagtggacatgttgggagtggtactggccaagaagtgtcaggagttggttagtgacgtggactacaagaactacctgcatcagtggacatgtctgcctgatcagaacgatgttgtgcaagctaagaaagtttatgaactgcaaagtgagaatctatataaatctgaccttgagtggctgagaggcataggatggagtcccttgggttctttagaggcagaaaagaacaagcgggcttcggaaatcatcagtgagaagaaatatcgtcagcctccagacagaaacaagttcaccagcattcctgatgccatggatatagttctggcaaagacaaatgccaaaaataggagtgatagactttatagagaagcttgggacaaagacaagactcagatccacatcatgcctgatacacctgacattgttctggctaaagcaaacttaatcaacacaagtgataaactctaccgaatgggttatgaggagctgaagagaaaaggttacgatcttcctgttgatgccataccaatcaaagcagcaaaagcctcccgggaaattgccagtgaatacaagtacaaggaaggctttcgcaagcagctcggccaccacattggtgcccggaacattgaagatgaccccaagatgatgtggtccatgcatgtggccaagatccagagtgacagggagtacaagaaggactttgagaagtggaagaccaagttcagcagcccagtggacatgctgggggtggtgttggcctataagtgccagaccttagtcagcgacgtggactacaagaactacctgcaccagtggacatgcctgcccgaccagagcgatgtcatccatgctcggcaggcctatgacctccagagcgataatttgtacaagtcagaccttcagtggctaaaaggcattggctggatgactagtggttctctcgaggatgagaaaaataaacgagccacccagattttgagtgaccatgtttaccgtcagcacccagatcaatttaagttttccagccttatggattccataccaatggttttggcaaaaaacaatgctattaccatgaatcatcgcctctatacagaagcttgggataaagataaaaccactgtccacattatgccagatacccctgaagttttattagctaaacaaaacaaagtaaattacagtgagaaattgtataagcttggcctagaagaagccaagaggaaaggttatgacatgcgggtagatgccattcctatcaaggcagccaaggcctccagagatattgcaagtgaattcaagtacaaagaaggctatcgtaagcagctcggccaccacattggtgcccgagctatacgtgatgaccccaagatgatgtggtccatgcacgtggccaagatccagagtgacagggagtacaagaaggactttgagaagtggaagaccaagttcagcagcccagtggacatgctgggggtggtgctggccaagaagtgccagaccttagtcagcgatgtggactacaagaactacctgcaccagtggacatgcctgcccgaccagagcgacgtcatccatgctcggcaggcctatgacctccagagcgataatatgtacaagtctgatctccagtggatgagaggcattggctgggtgtccattggctctttggatgtggaaaaatgcaaaagggcaactgaaattttgagtgataaaatctatcgccagcctccagacagattcaaatttaccagtgtgactgactctctggaacaagtgctggccaagaacaatgctctcaacatgaataagcgtttatacacagaggcctgggacaaagacaagactcaaattcacataatgcctgatacaccagagattatgttggcaaggcagaacaaaatcaactacagtgagactctatacaaacttgccaatgaagaagcaaaaaagaaaggctacgacttgcgaagtgacgccatccccatcgtggctgccaaggcctccagggacgttatcagtgattacaaatacaaagatggttaccgcaagcagctcggccaccacattggagcccggaacattgaagatgaccccaagatgatgtggtccatgcatgtggccaagatccagagtgacagggagtataagaaggactttgagaagtggaagaccaagttcagcagcccagtggacatgctgggagtggtgttagccaagaagtgccagaccttagtcagcgatgtggactacaagaactacctgcacgagtggacgtgcctgcccgaccagaatgatgtcatccatgctcggcaggcctatgacctccagagcgataacatttacaaatctgatctccagtggctgagaggcattggctgggtccccattgggtctatggatgtggtcaagtgcaagagagctgctgaaatactgagtgataacatctaccgccagcctccggacaagctgaaatttaccagtgtgactgactctctagagcaggtgctggccaagaacaatgctctcaatatgaacaagcgcttatacacagaagcctgggacaaagacaagacccaagtccatattatgcctgatacacctgaaatcatgttggcaagacaaaataaaataaattatagtgagagcctctatcgtcaggccatggaagaagccaagaaagaaggctatgacttgagaagtgatgccattcccattgtggctgccaaggcctctcgggatattgccagtgattacaaatacaaagaagcatatcgtaagcagttgggtcaccacattggcgcccgagcagtacacgatgaccccaagataatgtggtccctccacattgccaaagtgcagagtgaccgtgagtacaagaaagattttgagaaatacaagacaaggtacagcagcccagtggacatgcttggtatcgttttggccaagaagtgtcagaccttggtcagcgatgtggactataaacatcctctgcatgaatgcatctgcctgcccgaccagaatgacatcattcatgcacggaaagcctatgacctccagagtgacaatttgtataagtcagaccttgaatggatgaaaggcattggctgggttccgattgattccttggaagttgttagggccaagagagctggagaattacttagtgatactatctaccgtcagcgtccagaaacgctgaaatttaccagtataacggacactccggagcaggtgctggcaaaaaacaatgctttaaacatgaataagcgcttatatactgaagcctgggacaatgacaagaaaactattcatgtcatgcctgatacaccagaaatcatgttagccaaactcaaccgaataaactacagtgataaactctataaacttgctttggaagagtccaagaaggaaggctatgacttgcgtctggatgccattccaatccaagcagccaaggcttcaagagatattgctagtgattacaagtacaaggaaggctaccgcaaacagcttggccaccatattggggcccggaacattaaggatgacccgaagatgatgtggtccatccatgtggccaagatccagagtgacagggagtacaagaaggagtttgagaagtggaagaccaagttcagcagcccagtggacatgctgggggtggtgctggccaagaagtgtcagatccttgtaagcgacatagactacaagcatcccctgcatgaatggacctgcctgcctgatcagaatgacgtcattcaggctcggaaggcctatgacctgcagagtgatgctatttacaaatctgatcttgagtggctgagaggcataggatgggttcccattggctctgtagaggtcgagaaagtgaagagagctggagaaatcctgagtgacaggaagtatcgccagcctgcagaccagctcaaattcacatgcattaccgacactccggaaattgtcctagcaaagaataatgccctgacaatgagcaagcatttatacacagaagcttgggatgctgacaaaacctccatccacgtgatgccagacaccccagatatcctgctggccaagagtaattctgccaatatcagccaaaaactttacaccaagggatgggatgaatcaaagatgaaggactatgatctgagagcagatgctatttccatcaaaagtgccaaggcctccagggacatcgccagtgactacaaatacaaggaagcctatgagaaacagaaaggccaccacattggagcccagagcattgaagatgatcccaagattatgtgtgccatacatgcagaaaaaattcaaagtgaaagggagtacaagaaggaattccaaaagtggaaaaccaagttctctagcccagtggacatgttaagcatcttgctggccaagaaatgtcagactttggtcactgacatttattatcgcaattacctgcatgaatggacatgcatgccggatcaaaacgacattatccaagcaaaaaaggcctatgacctgcagagtgatgccctctacaaggctgacttggagtggttgcgtggcattggctggatgccccaagggtctcctgaagtgttgagagtcaaaaacgcccagaatatcttttgtgacagtgtctatcggacgcctgtggtgaaccttaagtacacaagcattgttgacacacctgaagtggtccttgctaaatcaaatgctgaaaatattagtattccaaagtacagagaggtttgggacaaggataaaacttcaatacacataatgccagatactccagaaattaatctcgctagagcaaatgctcttaatgtgagcaataaactttaccgtgagggctgggatgaaatgaaggcgggctgtgatgtccggctggatgccatccccatccaggctgccaaggcctccagggagattgccagtgactataaatataagcttgaccatgagaagcagaagggacactacgtgggcaccctcacagccagggatgacaacaagatccgctgggccctcatagctgacaagctccagaatgaacgagagtaccggctggactgggccaaatggaaggccaagatccagagccctgtggacatgctttccatcctgcactctaaaaattcccaggctctggtcagtgacatggattaccgcaattacctgcaccagtggacctgcatgcccgaccagaacgatgtgattcaggccaagaaggcctacgaactgcagagcgataatgtttacaaggctgacttggaatggttgcgtggaattgggtggatgccaaatgactccgtgtccgtcaatcatgccaaacatgccgcggacatcttcagtgagaaaaaatatcgcacaaaaatagaaactctcaactttacgcctgtggatgacagagttgattatgtgacagcgaaacaaagtggcgagatcctcgatgatattaaataccggaaagactggaatgccaccaaatcaaagtacaccctcacagaaacccccctgctgcacactgcccaggaggctgctaggatactggaccagtatctctacaaggaaggctgggagagacaaaaagccacaggttacattttgcctccagatgctgtgccatttgttcatgcccatcactgcaatgacgttcagagtgagctgaaatacaaagctgaacatgtgaagcaaaaaggtcattatgttggtgtcccgacgatgagagatgatcctaagctggtttggtttgagcatgcaggccagattcagaatgagagactatacaaagaggactatcacaaaacaaaggccaaaatcaatatacctgctgatatggtgtcagtcttggccgccaagcaggggcagacccttgtcagtgatattgattatcgtaattacttgcaccaatggatgtgtcatcctgaccagaacgatgttattcaggcaagaaaggcctatgacctacagagtgataatgtctacagagctgacctggagtggctccgaggcattggctggatcccactggattctgtggaccatgtaagggttactaagaaccaggaaatgatgagtcagatcaaatataagaaaaatgcccttgaaaactatcctaactttacaagtgtggtggatcctccagagattgttttagccaagattaattctgtcaatcaaagtgatgtaaaatataaagaaacatttaataaagcaaagggcaaatatacgttttcaccagatacaccacatatctcccactccaaagacatgggaaaactctacagtactatactgtataaaggggcgtgggagggcaccaaggcctatggctacaccctggatgagcgctacattcccattgttggagccaagcatgctgatctggtgaacagtgagcttaaatacaaagagacatatgagaagcagaaaggtcactacctggctggaaaagtgatcggtgaattccctggtgtggttcactgtctggatttccaaaagatgaggagtgcgttgaactacagaaaacattatgaggataccaaagcaaatgttcatatccccaatgacatgatgaatcacgtgctggctaaaaggtgccagtacatcctcagtgacctggagtatcgacactatttccaccagtggacgtctcttctggaagaacccaatgttatacgcgtccgaaacgcccaggagatcttgagtgataatgtgtataaagatgacctgaattggttgaaaggcattggttgctacgtttgggatacaccccaaatcctccatgccaagaaatcatacgaccttcagagtcagctacaatatacagcagcaggtaaagaaaatctacaaaactataatctggtcacagacacgcccctctatgtgactgctgttcagagtggcattaatgccagtgaggtaaaatataaagaaaattatcatcagattaaggacaaatacacaacagttctagaaacagtggattatgacagaaccagaaacctgaagaatctttacagcagtaacctgtacaaggaggcctgggatagagtgaaagccaccagctacatcctgccttccagcaccttgtccctgacacacgccaagaaccagaagcatctggccagccatatcaaatatcgggaagaatatgaaaagttcaaagctctttatacgttaccaagaagtgttgacgatgatccgaacacagcacggtgcctccgagttggcaagcttaacatcgatcgcctgtacagatcagtttatgaaaagaacaagatgaaaatccacatcgtgcccgacatggtagagatggttactgccaaggattcccagaagaaagtcagtgagattgattaccgcctgcgcctccacgaatggatttgccaccccgacttgcaagtcaatgatcacgtcaggaaagtcacagatcagatcagcgatattgtatacaaggatgacctcaactggctgaaaggcattggttgctacgtctgggacactcctgaaatcctccatgccaagcatgcttatgatctacgtgatgatatcaagtataaagctcacatgttgaaaacaaggaatgactacaagcttgtcacagatacaccagtctacgtgcaggctgtcaaaagtgggaaacagctaagtgacgctgtctaccactatgactatgtgcacagtgtcagaggcaaagtggctccaactaccaaaaccgtggatctggaccgggcccttcatgcatacaagctccagagttcgaatctatacaaaaccagcctgcgcaccctgcccactggatatagacttccaggtgacactcctcacttcaaacacatcaaggacacccgttacatgagcagttatttcaagtacaaagaagcctatgaacacaccaaggcatatgggtatacacttggccccaaagatgttccatttgtccacgtccggagagtcaacaatgttaccagcgagagactgtatcgggaattgtaccacaaactgaaagacaagatccatacaactcccgatccccctgagatccgccaagtcaagaagacacaagaggctgtcagtgagttgatctacaaatcagacttcttcaagatgcagggccacatgatctctctgccatacacaccccaagtgatccattgccgctatgtgggagacatcaccagtgatattaaatacaaagaggacttgcaggtcctgaagggatttggctgcttcctgtatgacactcctgacatggtccgctcccggcacctgcggaagctctggtctaattacctatacactgataaggcaagggagatgcgagacaaatacaaagtggtgcttgacactccagaatacagaaaagtgcaagaactgaagacacatctgagtgagctggtctacagagctgcaggcaagaagcagaagtcaatctttacttcagttcctgatactcctgatcttttaagagccaagcgagggcagaagcttcagagtcagtatctgtatgttgaacttgccaccaaagagagaccccatcatcacgctggaaaccagaccacagccttgaagcatgctaaagacgtgaaggacatggtcagtgagaaaaagtacaagattcaatatgaaaagatgaaagacaagtacactccggttccagatacgccaatcctcatcagagccaagagggcttactggaatgccagtgatctacgctacaaagaaacatttcaaaagaccaaagggaaataccacacggtgaaagatgccctagacattgtctatcatcgcaaagtcacagatgacatcagtaaaataaaatacaaggagaactacatgagccagttgggtatctggaggtccattcctgatcgtccagagcatttccaccaccgagcagtcactgacacagtcagtgatgtaaaatataaagaagacttgacttggcttaaaggcattggttgctatgcctatgatacccctgatttcactctggctgaaaagaacaagactctctacagcaagtataagtataaagaagtatttgaaaggacaaagtcagatttcaagtatgttgccgactctccgatcaataggcatttcaagtatgcaactcaattgatgaatgagaaaaaatacagagctgattatgagcagcggaaagataaataccacctggtagtcgatgagcctagacatctgctggctaagacccgcagcgaccagatcagtcagatcaaatacaggaaaaactatgaaaaatcaaaggacaaatttacctcaattgtggatactccagaacacctgcgtactacaaaagtcaacaaacaaatcagcgatatcctttataaattggaatacaacaaggccaaacccagaggctacaccacaatccacgacacgcccatgttgctgcatgtccgcaaggttaaagatgaagtcagtgatctgaaatacaaagaagtataccaaagaaataaatccaactgcaccattgagccagatgctgttcatatcaaagcagccaaggacgcctacaaagtcaacaccaatctggactataagaaacagtacgaagccaacaaagcccactggaagtggactcctgaccgaccggacttcctccaggctgccaagtcatccctgcagcaaagcgattttgaatataagctggaccgggagttcctcaagggttgcaagctttctgtcactgatgacaaaaacacggtgctcgccctcaggaatactttaatagaaagtgatctgaaatacaaagagaaacatgtcaaggaaagaggaacctgccatgccgtacctgacacgcctcagatcctgctggcgaagactgtcagcaacctggtgtctgagaacaagtacaaggaccatgtcaagaagcacttggcacagggctcatacacaacactaccagagacccgggacactgttcacgtcaaggaagtgaccaagcatgtcagtgatacaaattacaaaaagaagtttgtcaaggagaaaggaaaatccaactactccatcatgctggagccaccagaggtgaaacatgctatggaagtggccaagaagcaaagtgatgtcgcttacagaaaagatgccaaagagaacctgcattacaccacagtggctgatcgaccagacatcaagaaggccacacaggcagccaaacaggccagtgaggtggagtacagagccaagcaccgcaaggaaggcagccatggcttaagcatgctcggtcgcccagacatagaaatggccaagaaggcagccaagctgagcagccaggttaaataccgagaaaatttcgataaagaaaagggcaagacaccaaaatacaatccaaaagacagccagctctacaaagtcatgaaagatgctaataatcttgcaagtgaggttaaatacaaggctgacctgaagaaacttcacaaacccgtgactgacatgaaggagtctctgatcatgaatcatgtcctgaatacaagccaacttgccagttcttaccagtacaagaagaagtatgagaagagtaaaggccactaccacaccatacccgataatctggagcagcttcacctaaaagaggccacagaattacagagtatagtgaaatacaaagaaaagtatgaaaaggaacgaggaaaacccatgctggactttgaaacaccaacgtacatcactgccaaagagtctcagcagatgcagagtgggaaagaatataggaaagattatgaagagtccattaaaggcagaaacctgactggcctggaggtcacgccagctttgttacatgtcaaatatgcaactaaaatagcaagcgagaaagagtacaggaaagatctagaggaaagcatccgtgggaagggcctcactgaaatggaagatacacctgacatgctaagagcaaagaatgccactcaaatcctcaatgagaaagaatataagcgagacctggaactggaagtcaaaggaagaggcctgaatgccatggccaatgaaactccggattttatgagggccaggaatgctactgatattgccagtcagattaagtataagcaatcagcagaaatggagaaagccaatttcacttctgtggttgatactccagagatcattcatgcccaacaagtcaagaatctttcaagccagaaaaagtacaaggaagatgctgagaagtccatgtcgtattatgagactgttttggacaccccagagatacagagagtccgggagaaccaaaagaacttcagccttctccaataccagtgtgaccttaaaaacagtaaaggaaaaattacagttgttcaagacacgccagaaatactgcgtgtaaaagaaaatcagaagaatttcagctcggttttatataaagaggatgtctcaccaggaacggctatcggaaagacacctgagatgatgagagtgaaacaaacacaggaccacattagctcggtgaagtataaggaagcaataggacaaggaactccaatccctgacctgcctgaagtgaaacgtgtgaaggagacgcagaagcacattagctcggttatgtacaaagaaaacttgggaacaggcattccaaccactgtgactccagagattgagagagtcaaacgcaatcaagagaactttagctcggttttgtacaaagaaaatttggggaaaggaatcccaacacctatcactccagagatggagagagtcaaacgcaatcaagagaactttagctcggtgttatacaaagaaaacatgggcaagggaactcctttacctgtcactcccgagatggagcgagtcaaacacaatcaagaaaatattagctcggttttgtacaaagaaaatgtggggaaagccaccgcaacccctgtcactcctgagatgcagagagtcaaacgcaatcaagaaaacattagctcggtgttatacaaagagaacctggggaaagcaacccccacaccctttactcctgagatggaaagagtgaaacgcaatcaagaaaactttagctcggtattgtacaaagagaacatgagaaaagcaactccgacacctgttactccagagatggagagagctaagcgcaaccaagaaaacattagctcggttctttattctgatagtttccggaaacaaatacaaggcaaagctgcctatgtattggatacccccgagatgagacgggtgagggagacccaacggcacatctcaacggtgaaatatcatgaagactttgagaaacacaagggttgcttcacaccagtggtgacagatcctatcactgaacgagtaaagaagaacatgcaggacttcagtgacattaactaccgaggtattcagaggaaagtggtagaaatggaacaaaaacggaatgaccaagatcaggagactattacaggtttacgtgtctggcgtactaatcctggttcggtttttgactatgatccagcagaagacaacatccagtcccgaagcttacacatgattaatgtccaagctcagcgccggagccgggagcagtcacgatctgccagtgcactaagcgtcagtgggggtgaggagaagtctgagcattcagaagcaccagaccaccacctttcgacttacagcgacgggggtgtctttgcagtctcaacagcttacaaacatgcaaaaaccacagagctcccacaacaacgatcatcttcagttgctacccaacagacaacggtatcttccatcccatctcatccatctactgctggaaaaatcttccgtgccatgtatgactatatggctgctgatgcagatgaggtgtccttcaaggatggagatgccatcataaatgttcaagcaattgatgaaggctggatgtatggcactgtgcagaggactggcaggaccggaatgctcccagccaactacgttgaagctatttaggcatttcaaagcatcacacttgtctgcaggacttacagatcctgcagtcaatgtttcggtttagactctccactgttacctaagttctcaagctgcctatggtttttctgtgtcaatgtgatttatggtagtaccatcctttctcctttgggttttaaaataagttgcagaacagacactttaaaagcttctgcaatattatttctgtgcctagagtctttctccattataaacatgttttaacattatttcttttctaaaacagggattttgaatatgccaaacacattaaaggaaaaatagcagagatgttcaccttttccttgctgattgctaatgcttattatttctaattcagttctgaagttataaacttataatcaatacaaaccagcaactaataaaacctctaattctgcaaaaaaaaaaaa

SEQ ID NO: 12347 - DNA, 2452 bp, Homo sapiens
agctgcccgcgtcgcgtgtgtacccccgcgcactgaaggaggtccaccagccctcaccagcccccgcggaccgtgcaatggcccagcgtaagaatgccaagagcagcggcaacagcagcagcagcggctccggcagcggtagcacgagtgcgggcagcagcagccccggggcccggagagagacaaagcatggaggacacaagaatgggaggaaaggcggactctcaggaacttcattcttcacgtggtttatggtgattgcattgctgggcgtctggacatctgtagctgtcgtttggtttgatcttgttgactatgaggaagttctaggaaaactaggaatctatgatgctgatggtgatggagattttgatgtggatgatgccaaagttttattaggacttaaagagagatctacttcagagccagcagtcccgccagaagaggctgagccacacactgagcccgaggagcaggttcctgtggaggcagaaccccagaatatcgaagatgaagcaaaagaacaaattcagtcccttctccatgaaatggtacacgcagaacatgttgagggagaagacttgcaacaagaagatggacccacaggagaaccacaacaagaggatgatgagtttcttatggcgactgatgtagatgatagatttgagaccctggaacctgaagtatctcatgaagaaaccgagcatagttaccacgtggaagagacagtttcacaagactgtaatcaggatatggaagagatgatgtctgagcaggaaaatccagattccagtgaaccagtagtagaagatgaaagattgcaccatgatacagatgatgtaacataccaagtctatgaggaacaagcagtatatgaacctctagaaaatgaagggatagaaatcacagaagtaactgctccccctgaggataatcctgtagaagattcacaggtaattgtagaagaagtaagcatttttcctgtggaagaacagcaggaagtaccaccagaaacaaatagaaaaacagatgatccagaacaaaaagcaaaagttaagaaaaagaagcctaaacttttaaataaatttgataagactattaaagctgaacttgatgctgcagaaaaactccgtaaaaggggaaaaattgaggaagcagtgaatgcatttaaagaactagtacgcaaataccctcagagtccacgagcaagatatgggaaggcgcagtgtgaggatgatttggctgagaagaggagaagtaatgaggtgctacgtggagccatcgagacctaccaagaggtggccagcctacctgatgtccctgcagacctgctgaagctgagtttgaagcgtcgctcagacaggcaacaatttctaggtcatatgagaggttccctgcttaccctgcagagattagttcaactatttcccaatgatacttccttaaaaaatgaccttggcgtgggatacctcttgataggagataatgacaatgcaaagaaagtttatgaagaggtgctgagtgtgacacctaatgatggctttgctaaagtccattatggcttcatcctgaaggcacagaacaaaattgctgagagcatcccatatttaaaggaaggaatagaatccggagatcctggcactgatgatgggagattttatttccacctgggggatgccatgcagagggttgggaacaaagaggcatataagtggtatgagcttgggcacaagagaggacactttgcatctgtctggcaacgctcactctacaatgtgaatggactgaaagcacagccttggtggaccccaaaagaaacgggctacacagagttagtaaagtctttagaaagaaactggaagttaatccgagatgaaggccttgcagtgatggataaagccaaaggtctcttcctgcctgaggatgaaaacctgagggaaaaaggggactggagccagttcacgctgtggcagcaaggaagaagaaatgaaaatgcctgcaaaggagctcctaaaacctgtaccttactagaaaagttccccgagacaacaggatgcagaagaggacagatcaaatattccatcatgcaccccgggactcacgtgtggccgcacacagggcccacaaactgcaggctccgaatgcacctgggcttggtgattcccaaggaaggctgcaagattcgatgtgccaacgagaccaagacctgggaggaaggcaaggtgctcatctttgatgactcctttgagcacgaggtatggcaggatgcctcatctttccggctgatattcatcgtggatgtgtggcatccggaactgacaccacagcagagacgcagccttccagcaatttagcatgaattcatgcaagcttgggaaactctggagagaggctgcctttctggttccatctccttgggtgtgaggatagaatttcgaacaccaagagtcaa

SEQ ID NO: 12348 - DNA, 2680 bp, Homo sapiens
cggaccgtgcaatggcccagcgtaagaatgccaagagcagcggcaacagcagcagcagcggctccggcagcggtagcacgagtgcgggcagcagcagccccggggcccggagagagacaaagcatggaggacacaagaatgggaggaaaggcggactctcaggaacttcattcttcacgtggtttatggtgattgcattgctgggcgtctggacatctgtagctgtcgtttggtttgatcttgttgactatgaggaagttctaggaaaactaggaatctatgatgctgatggtgatggagattttgatgtggatgatgccaaagttttattaggacttaaagagagatctacttcagagccagcagtcccgccagaagaggctgagccacacactgagcccgaggagcaggttcctgtggaggcagaaccccagaatatcgaagatgaagcaaaagaacaaattcagtcccttctccatgaaatggtacacgcagaacatgttgagggagaagacttgcaacaagaagatggacccacaggagaaccacaacaagaggatgatgagtttcttatggcgactgatgtagatgatagatttgagaccctggaacctgaagtatctcatgaagaaaccgagcatagttaccacgtggaagagacagtttcacaagactgtaatcaggatatggaagagatgatgtctgagcaggaaaatccagattccagtgaaccagtagtagaagatgaaagattgcaccatgatacagatgatgtaacataccaagtctatgaggaacaagcagtatatgaacctctagaaaatgaagggatagaaatcacagaagtaactgctccccctgaggataatcctgtagaagattcacaggtaattgtagaagaagtaagcatttttcctgtggaagaacagcaggaagtaccaccagatacttaaagcttcaaaaagactgcccctaccaccacaggaggaccagcctaaccatacgctccaaaagatggctgtgatagatcttgtgaagcaattactgagcagatcaagatctttgggaaggaacactaaagatgttttgaatgaattatagtccactggcattttagtgtatttttttttctttttacaaacacacatttctaaaaatgtcatgttacattcctgcatgtcccttttgatagcattagtggatccattggatttcttttttctttttgtgagacagcttttagtcttacctgaatttatgtgtgtttttccgacagtggttaataattatattggtgatgtagcagcaattgtgttggcagggttttcatatattattagtaattaacactaactgttggactgacttgtgtacactgtgttaaacatgatttaaaagctattaagagtactttgtgttagcactcttaaaaacgctaacagagatcatcattagctgtgaagatttgagttgtatatacctgcactgatattcttatcaaaaatttctacattagctttaagtgttcagattaacacttttgaaatttttgtagcttttagctgattaattagaaaaattaatatttcagtgaaagttttaaattatcatttatttatttttttaaatgagaggggaaagctgaaattccttgttaagacacaaggaaaaagaatggccctactattatcatgcaaaaatgctttgttggcacctcagattaatcatataatagctatagtctcttcagcatttgtttaaattttagaaaacctgtataaattactggtgcataacttaaagattattctgcctttggctaattgagtaattcccctccagcactagagaccgctcagtgctcttactagatgaactcagtaacgccttgagctgggttgattgaggatgtgtgaaaagctcacagagcccgatgcctgctgctatttcacggcaatgagcctttttctttctacactgaagattttcttcttatttaatgtggtttattttgggctcagaaataattgctctgttgaaaataatcctttgtcagaaaagaaggtagctaccacatcattttgaaaggaccatgagcaactataagcaaagccataagaagtggtttgatcgatatattaggggtagctcttgattttgttaacattaagataaggtgactttttccccctgcttttaggattaaaatcaaagatacttctatatttttatcactatagatcatagttattatacaatgtagtgagtcctgcatgggtactcgatgtgtaatgaaacctgaaataataagataataagaaaagcaataattttctaaagctgtgctgtcggtgatacagagacgatactcaaattataataaaactcttcattttgtgaattatagaagctactttttataaagccatatttttttagggaaactaaggagtgacatagaactgatgaatgagcaaaagtaagttttgctggatttttgtagaactctggacgttgaggattcattatgctgtggttaactttaaatatttttgaattccaaatatctgaattaatgagccttgtgtttacaaatatgtgccattgtgcaacatcggtggattttctaaaaataatgtaaatgtcttctattaaatgttgagtgcaataaaatccagaa

SEQ ID NO: 12349 - DNA, 2921 bp, Homo sapiens
ctaggagctggcggtccgagctgtggcttgaaagaccgacgcgatgaagcccagacctgcagggttcgtggataataaactcaagcagcgagtcatccagtaccttaccagtaacaaatgtggcaaatatgtggacattggagtcttagcgtctgatttacaaagagtgtacagtatagactatggtcgaagaaaaagaaatgcttttaggattcaggtagaaaaagtatttagcataattagtagtgagaaggaacttaagaatttaacagaattagaagatgaacatttggcaaaaagggcaagacaaggtgaagaggataatgagtatactgaaagctattctgatgatgattcaagtatggaagactacccagatccacagtcagcaaatcacatgaacagttccctgctgtctttatatcggaaaggaaatcctgattctgtttcaaatactcctgagatggagcaaagagaaaccacctcttcaacaccacggataagttccaaaacaggctccattcccttgaagacccctgccaaagattctgaaggaggatggtttattgacaaaaccccaagtgtaaagaaagacagttttttcttggacctgtcatgtgagaaaagtaatcctaagaagccaataactgagatacaggattcaaaagattcttctcttttggagagtgatatgaaacggaaaggcaagctaaagaataaaggaagcaaaaggaagaaagaagatcttcaggaagtagatggagaaattgaagctgtcctgcaaaagaaagctaaagccagggggttagaattccagatctccaacgtgaagtttgaagatgtgggaggcaatgatatgacattaaaagaggtctgcaagatgctcatacacatgcgtcacccggaggtgtaccaccacctgggcgtcgtgccccctcgtggagttctccttcatggaccaccaggctgtgggaagacattacttgcacatgcaattgctggggaacttgacctgccaattttgaaagtggctgctccagagattgtgtctggagtatccggagagtctgagcagaagctgagagaactatttgagcaagctgtgtcaaatgcaccatgtatcattttcattgatgaaattgatgctattacccccaaaagagaagtggcttcaaaagatatggaacgaagaattgtagcccaactcctaacctgcatggatgatctgaataatgtggctgctacagcccgggtcctagttattggagctactaatcgaccagactcgttagaccctgctttgagacgtgcgggaaggttcgaccgagaaatatgcctaggtatcccagatgaagcatccagggaaagaatacttcaaacattgtgcagaaaactgaggcttcctcaagcttttgatttctgtcacttagcacacctaactccaggctttgttggtgctgatctcatggcactgtgccgagaggcagcaatgtgtgcagtcaatagagtcttaatgaagctacaggaacagcagaagaaaaatcctgaaatggaagatttgccatctaaaggagtccaggaggaaaggctgggaactgagcccacttctgaaacacaggatgaattacaaaggctgctggggttgctaagagaccaagatcccctctcagaggagcagatgcaaggactgtgcattgaactgaatgatttcattgttgctctatcctcagtccaaccctctgccaaaagggaaggctttgtcactgtccctaatgtgacatgggcagatattggtgccctggaagacattagagaggagctcaccatggcaatattggcaccagtacgcaacccagaccagttcaaagctcttggattggtgactccagctggggtcctccttgctggtcctcctggctgtgggaagactctgctggcgaaggctgttgcaaatgagtccggactaaattttatatctgtcaagggccccgaattactaaacatgtatgttggtgagagtgaacgtgctgtgcgacaagtttttcaacgagccaagaactcagcaccctgtgtgatattctttgatgaagtggatgctttatgtcctcgaagatcagaccgagagacaggggcaagtgtccgagtggtgaatcagctacttacagagatggatggtctggaagcacgccagcaggtttttattatggcagccactaacaggccagatataattgaccctgcaatcctgcgcccgggccgcctggacaaaacactgtttgtgggtttaccgccccctgcagatcgccttgccatcttaaaaactatcacaaaaaatggtaccaaaccaccactggatgcagatgtaaatttggaagcaattgctggtgaccttcgctgtgattgctatacgggcgcagatctctctgctttggtacgagaagcttctatctgtgccctgagacaggaaatggcaagacagaagagtggaaatgaaaaaggtgaactcaaggttagtcataagcattttgaagaagctttcaagaaagtaagatcatctatatcaaaaaaggatcaaatcatgtatgaacgtttgcaggagtccctcagccggtgatgtctccagcagccggcttagaggagctagcccatcaagccggcagagaatcccccacacgctctgaaggacccactttcagctggacacaggcgcggcctcatgtaaacattttattttcaaatgaatgaggccaagctgaagctgaagctgaagattcttcccatctggccagccttgtgtgaaaatgccttcttcctctttaagaaaaaggacaatttttaaactgctgaaataaaatgactgttacatttttcaaataaaacttttactttgaactattttgactataaaaaaaaaaaaaaaa

SEQ ID NO: 12350 - DNA, 3852 bp, Homo sapiens
cgctccctcccgaggggccgcgcgcacgggaggacggagaggcggaaaggatggcgctgtgacagccgggccggagccctcgcgtccccaccccgcgccctggccgctgggcccggcgagatggagtccacagcctaccctctcaatttgagcctgaaagaagaggaagaggaagaagagattcagagccgggaactagaggacggcccggcagacatgcagaaagtacgaatctgctctgagggcggatgggtaccggccctatttgatgaggtggccatatatttttccgatgaggaatgggaagttttgacggagcaacaaaaggccctctaccgggaagtcatgaggatgaattatgaaactgtcctgtccctggaattcccattccctaagccagacatgatcacccgtttggaaggggaggaggagtctcagaattctgacgagtggcagctccaaggaggcacctctgcagaaaatgaagaatctgacgtaaagcctccagactggccaaacccaatgaatgctacctcccagtttcctcagcctcagcactttgacagctttggcctccgtctgcctcgggatatcacagagctgcccgagtggagtgaggggtaccccttctacatggccatgggcttcccagggtatgacctctcggctgatgacatagctgggaagtttcagttcagccggggcatgcgccgcagttacgacgcagggttcaagctgatggtagtggaatatgctgagagtaccaacaactgccaggctgccaagcagtttggagtattggaaaaaaacgttcgagactggcgcaaagtgaagccacagcttcaaaacgcccacgccatgcggcgggcattccgaggccccaagaatgggaggtttgctctggtggaccagcgtgtggccgaatatgtcagatacatgcaggccaaaggggaccccatcacccgggaggcgatgcagctgaaagctctcgaaatcgcccaggaaatgaacattccagagaaagggttcaaggcaagcttgggttggtgtcgaagaatgatgagaaggtatgacctgtctctgaggcataaagtgcccgtgccccagcacctgccggaagacctgactgagaaactcgtcacttaccagcgcagtgtcctggctctgcgcagggcgcatgactatgaggtagctcagatggggaatgcagatgagacgcccatttgtttagaggtgccatcacgggtaactgttgataaccagggcgaaaagcctgtcttggtcaagacaccaggcagggaaaaactgaaaatcacagcaatgcttggtgtcttggctgatgggaggaagttaccaccgtacatcattttgaggggaacatatatccccccggggaagtttcccagtgggatggaaattcgctgccaccggtatgggtggatgactgaagacttgatgcaggactggttggaagtggtgtggagacggaggacaggagcagtgcccaagcagcgagggatgctgatcttgaatggcttccggggccatgccacagattccgtgaagaactccatggaaagcatgaacactgacatggtgatcatcccagggggtctgacctcacagcttcaggtgctggatgtcgtggtctacaagccactgaatgacagtgtgcgggcccagtactccaactggcttctggctgggaacctggcgctgagcccaaccgggaatgctaagaagccacccctgggcctctttctggagtgggtcatggtcgcgtggaatagcatctcaagtgagtccatcgtccaagggttcaagaagtgccatatctccagcaacttggaggaggaagacgatgtcctgtgggaaatcgagagtgagttgccaggaggaggagaaccaccaaaagattgtgacaccgaaagcatggctgagagcaactgaagggaaagggaaagcaaatggaactctgatttaaacagctggggatgaaattcctcaagatgattattcctgaaagtgtggatgcgctggatgcgcagggaacatcaggaaaaggccacggggctctgaacagccccggtccagacagcagcctgtacatccatcccaggacacagcccagcccctccccacaccatacaaggtatcagaaaagtctaggacctatcatttcatcagagacatgatcagaaaagaaactgcttctgccccatttcttgttttggagattactccatctgtccatcaaaagaaacctgtaaatatgaaagaacaaaggttatttcctggagaaaagacaatttattcaacaccaacgagggactcatcatatgggcacaactctggtgtccttctatggagaaaacctcaagtaaagttttattctgcctttgaaaatgcttccaaaagtagaccctgtccccacacaggtcaagactacagagaaggctttgtagaaatgtgtcacctatgtacacctgctacttacacatttcctcttttggaaaaatgagatacttagaataacaagaaaattaagacatactggcctggtgccagcagatggcttttctatagacaaactaggttagtgtggaagatataggttaaaataaactatgctgttttatttatcttcccaacctgattggcagctagacttttttagggtctcatttaatggccctgtttttttcattattatatttaatgatagggcaggatttcgtatgcaagctcttgtttctcaggctgcctgcagaagaagtcgctataaattatctgttgtctacatggtacaaggcccattgactcatctgatgcttgttttgttaatttctttaatatttttatcacggggcagtgggagggcttgggcttttagccacagctgttttaagacttctgatctcctgccctgcaggaataggtgggaagtcattgaatttttacactatagtaatttgcattcccacataagtttgagtgttacgaaaacattcctttaaagggatctgtgctacacaaaatatgccaggacctcacagacaaagccattgctagaaatgtcattccaatgatcagatctggaaacaggctgccataaccacttttccttcttgtagactcagctcacctgtatatttaaactgttcttggcatcttgaaacacctatttctactcaggtactcattgtcctgttactgattcacctttctgatccttttcaaccagttttcccccaaggggggaaattttacttaacctctagtatttgaacaactcaatatttgaattgttgccccatttgcttttacctgtactgtattcttggtcatctcaaatggcgtctaaacccagctactttgcattccagaagtttccattccctccaattccacctaatttttcatctgtcctagttactggctctttcttcatgtcttatttctcttgctttgggagcttaaaagattttacaagacctaattttgggttccttccttggagccatagttaccctgccaagaagagtagaaaatgggttcaactcctgtttcgctccaccaacacctctgtgagtctcatcatcagctgagcgatgatgccttacaggttgcatagcactggaactttcctagagtaacggctctgctgccagggtttctctgggctcattcttccactgacttaattatgatctatgcctaacagagccccagtacaactattttgcagaatggctgttaccctagaattactatagcacatattgagatatagttgtactccctagtagataggaactgaccccaacaataaactttgataataaagacaat

SEQ ID NO: 12351 - DNA, 1869 bp, Homo sapiens
gcacacactcatcgaaaaaaatttggattattagaagagagaggtctgcggcttccacaccgtacagcgtggtttttcttctcggtataaaagcaaagttgtttttgatacgtgacagtttcccacaagccaggctgatccttttctgtcagtccacttcaccaagcctgcccttggacaaggacccgatgcccaaccccaggcctggcaagccctcggccccttccttggcccttggcccatccccaggagcctcgcccagctggagggctgcacccaaagcctcagacctgctgggggcccggggcccagggggaaccttccagggccgagatcttcgaggcggggcccatgcctcctcttcttccttgaaccccatgccaccatcgcagctgcagctgcccacactgcccctagtcatggtggcaccctccggggcacggctgggccccttgccccacttacaggcactcctccaggacaggccacatttcatgcaccagctctcaacggtggatgcccacgcccggacccctgtgctgcaggtgcaccccctggagagcccagccatgatcagcctcacaccacccaccaccgccactggggtcttctccctcaaggcccggcctggcctcccacctgggatcaacgtggccagcctggaatgggtgtccagggagccggcactgctctgcaccttcccaaatcccagtgcacccaggaaggacagcaccctttcggctgtgccccagagctcctacccactgctggcaaatggtgtctgcaagtggcccggatgtgagaaggtcttcgaagagccagaggacttcctcaagcactgccaggcggaccatcttctggatgagaagggcagggcacaatgtctcctccagagagagatggtacagtctctggagcagcagctggtgctggagaaggagaagctgagtgccatgcaggcccacctggctgggaaaatggcactgaccaaggcttcatctgtggcatcatccgacaagggctcctgctgcatcgtagctgctggcagccaaggccctgtcgtcccagcctggtctggcccccgggaggcccctgacagcctgtttgctgtccggaggcacctgtggggtagccatggaaacagcacattcccagagttcctccacaacatggactacttcaagttccacaacatgcgaccccctttcacctacgccacgctcatccgctgggccatcctggaggctccagagaagcagcggacactcaatgagatctaccactggttcacacgcatgtttgccttcttcagaaaccatcctgccacctggaagaacgccatccgccacaacctgagtctgcacaagtgctttgtgcgggtggagagcgagaagggggctgtgtggaccgtggatgagctggagttccgcaagaaacggagccagaggcccagcaggtgttccaaccctacacctggcccctgacctcaagatcaaggaaaggaggatggacgaacaggggccaaactggtgggaggcagaggtggtgggggcagggatgataggccctggatgtgcccacagggaccaagaagtgaggtttccactgtcttgcctgccagggcccctgttcccccgctggcagccaccccctcccccatcatatcctttgccccaaggctgctcagaggggccccggtcctggccccagcccccacctccgccccagacacaccccccagtcgagccctgcagccaaacagagccttcacaaccagccacacagagcctgcctcagctgctcgcacagattacttcagggctggaaaagtcacacagacacacaaaatgtcacaatcctgtccctcac

SEQ ID NO: 12352 - DNA, 2950 bp, Homo sapiens
cctgggagagaggaagtgatcgctcccggagagccgagccgagcgccggcgcacggtgagacagcacatcctgcccgcgccggccccgcaccttcgggagccgcctgcaccaacgctgccgccgccaggagccgccgccgctcggggagccagttccgccgctgccgagcgcgtccaggaaaccaacatgtctgacaaaagtgacttaaaagctgagctagagcgcaaaaagcagcgcttagcacagataagagaagagaagaaacggaaggaagaggagaggaaaaagaaagaggctgatatgcagcagaagaaagaacccgttcaggacgactctgatctggatcgcaaacgacgagagacagaggctttgctgcaaagcattggtatctcaccggagccgcctctagtgcagccgctgcattttttaacatgggatacctgttattttcattatttagtcccaacccctatgtctccctcctcgaaatcagtgagcactcccagtgaagctggaagccaagactcaggcgatctggggccattaacaaggaccctgcagtgggacacagacccctcagtgctccagctgcagtcagactcagaacttggaagaagactgcataaactgggcgtgtcaaaggtcacccaagtggatttcctgccaagggaagtagtgtcctactcaaaggagacccagactcctcttgccacgcatcagtctgaagaggatgaggaagatgaggaaatggtggaatctaaagttggccaggactcagaactggaaaatcaggacaaaaaacaggaagtgaaggaagcccctccaagagagttgacagaggaagaaaaacagcagatccttcattcagaggaatttctcatcttttttgaccggacaatacgggtaattgaaagagccctggctgaagattccgacatcttttttgactacagcggccgagagttagaggaaaaagatggggatgttcaggctggagccaatctttctttcaatcgtcagttctatgatgaacattggtccaagcatcgagtggtcacttgtatggactggtccctccagtaccctgagctgatggtggcttcttacaacaacaatgaagatgctccccatgaaccagatggagtggccttggtttggaacatgaagtttaagaaaaccacaccagaatacgtcttccactgtcagtcctctgtgatgtcggtctgcttcgcccgtttccatcctaacttggtggttggtgggacttactcgggccagattgtcctctgggacaatcgcagtcatcgaaggactccagtgcagcggacacccttatcagctgctgcacacacgcatcccgtgtactgtgtaaatgttgttgggacccagaatgctcataacctcatcactgtctccactgatggcaaaatgtgttcctggagcctggacatgctctcaactccacaggagagcatggagctggtgtacaataagtccaagcctgtcgctgttaccggaatggctttcccaacgggagacgtcaataacttcgtggttggcagtgaggaaggtacagtctacacggcttgtcgtcatggaagcaaagcaggtattggtgaggtctttgaaggtcaccaagggccagtgacaggaattaactgccacatggcagtgggaccaatcgacttttctcacctgtttgtcacatcatcatttgactggactgtcaaactgtggaccaccaagcacaacaagccgctctactcctttgaagacaatgcagactatgtgtacgatgtcatgtggtcccccgtgcatcctgcgctttttgcctgcgtggacgggatggggcgcttggacctctggaacctcaacaatgacaccgaggtgccaacagcaagtgtggccattgagggggcatccgccctaaaccgtgttcgttgggcccaagctggcaaagaagttgctgttggggactcggaaggccgtatttgggtctatgacgttggagagcttgcagttccccacaatgatgaatggacccgatttgccaggacccttgtggaaattcgtgctaacagagctgatagcgaggaggaaggcactgttgagttatctgcctagtggaaatgagccacccccactgcagcccccacctttgtgtcctagagctcagcgtctgcagtcaagtctcttgtattcggtgtccattcagtatcagtattgctgtgacattttgggtgccatattgtgccagctttgctccaagtattctaaatgtgtcccatcatgctttccactgacccaaaattcaccacagcatttctatctttattatttctgtctcaaaaatgaagagaagggggttatgggttaagttgctgccttttaactactttgtagctgtatttaatagctggaaacctctggttgaatttgtgcttacatgcactcctggcatagtcctattaaatccatatgaagccagatatgattgggtgcagatgtggtgttcctcatattatggtacagggccaaagacttgagacgtggtgttttacatggtgactcacattatgaatggatttactagaagaacattgctgctccttatttattgtagtgtgctgcatggaacgtatttatttgaaagcattaaaataaatgatcctagagcatgtgcataatgagaggactgtattctctctgctgctgttgaggttatattaagttccacatagcaattacagtatgccagttccactgaagacatgaaatctttagaggtttcttgcagtgaacgaaatgaattttaagtccttattatcgggtactttaacaatatttcaaatatcattgaccactaatacttctcactgaagctaacacagtctgagaaaagtctatggttcctaaatatgacatcagtgttgccaataaaaccaaaaa

SEQ ID NO: 12353 - DNA, 1091 bp, Homo sapiens
attagagtctgtgcttcacttccgttccagcctcagcggcagctggatcgctcgacggagtgcctctggtagttggccaagacgccgaatatcaaaatcttcagcggcagctcccaccaggacttatcccagaaaattgctgaccgcctgggcctggagctaggcaaggtggtgactaagaaattcagcaaccaggagacctgcgtggaaattgatgagagtgtgcgtggagaggatgtctacatcgttcagagtggttgtggcgaaatcaacgacagtctaatggagcttttgatcatgattaatgcctgcaagattgcttcagctagccgagttactgcagtcatcccatgcttcccttatgcccgacaggataagaaggataagagccggtccccaatctctgccaagcttgttgcaaatatgctctctatagcaggtgcggatcatatcatcaccatggacctacatgcttctcaaattcagggcttttttgatatcccagtagacaacttgtatgcagagccaactgtcctgaagtggataagggagaatatccctgagtggaagaactgcattattgtctcgccagatgctggtggagctaaaagagtgacctccattgcagaccagttgaatgtggactttgctttgattcataaagaacggaagaaggccaatgaagtggactgcatagtgctagtgggagatgtgaatgatcgtgtggctatccttgtagatgacatggcagacacttgtgttacaatctgcctcgcagctgacaaacttctctcagctggagcaaccagagtttatgctatcttgactcatggaatcttttctggcccagccatttctcgcatcaacactgcatgctttgaagcagtggtagtcaccaataccatacctcaagatgagaagatgaagcattgctccaaaatacgagtaattgacatctccatgatccttgcagaagccataaggagaactcataatggggaatctgtttcctacctgttcagccatgttcctttataacagaataacttctaggttatgctattttaaaataaaataagattaataaaaaa

SEQ ID NO: 12354 - DNA, 5451 bp, Homo sapiens
gggtggtgcagggcaggggtggtatatcctgtctgacggagggcgggcctcgccagtgccagagagggacgaaccagggtggaagcgccaggagcagctgcagggagccctcacgcggacctcgcactctatggccgtagggagccgctgagagcgagaagagcacgctcctgcccgcccgctgcaccgcacctcgcctcgcctctctgctctcctaggccccggccgcgcgccacccgcctcccgccaccatgaaccactcgccgctcaagaccgccttggcgtacgaatgcttccaggaccaggacaactccacgttggctttgccgtcggaccaaaagatgaaaacaggcacgtctggcaggcagcgcgtgcaggagcaggtgatgatgaccgtcaagcggcagaagtccaagtcttcccagtcgtccaccctgagccactccaatcgaggttccatgtatgatggcttggctgacaattacaactatgggaccaccagcaggagcagctactactccaagttccaggcagggaatggctcatggggatatccgatctacaatggaaccctcaagcgggagcctgacaacaggcgcttcagctcctacagccagatggagaactggagccggcactacccccggggcagctgtaacaccaccggcgcaggcagcgacatctgcttcatgcagaaaatcaaggcgagccgcagtgagcccgacctctactgtgacccacggggcaccctgcgcaagggcacgctgggcagcaagggccagaagaccacccagaaccgctacagcttttacagcacctgcagtggtcagaaggccataaagaagtgccctgtgcgcccgccctcttgtgcctccaagcaggaccctgtgtatatcccgcccatctcctgcaacaaggacctgtcctttggccactctagggccagctccaagatctgcagtgaggacatcgagtgcagtgggctgaccatccccaaggctgtgcagtacctgagctcccaggatgagaagtaccaggccattggggcctattacatccagcatacctgcttccaggatgaatctgccaagcaacaggtctatcagctgggaggcatctgcaagctggtggacctcctccgcagccccaaccagaacgtccagcaggccgcggcaggggccctgcgcaacctggtgttcaggagcaccaccaacaagctggagacccggaggcagaatgggatccgcgaggcagtcagcctcctgaggagaaccgggaacgccgagatccagaagcagctgactgggctgctctggaacctgtcttccactgacgagctgaaggaggaactcattgccgacgccctgcctgttctggccgaccgcgtcatcattcccttctctggctggtgcgatggcaatagcaacatgtcccgggaagtggtggaccctgaggtcttcttcaatgccacaggctgcttgagaaagagactgggcatgcgggagcttctggctcttgttccgcaaagggccactagtagcagggtgaacctgagctcggccgatgcaggccgccagaccatgcgtaactactcagggctcattgattccctcatggcctatgtccagaactgtgtagcggccagccgctgtgacgacaagtctgtggaaaactgcatgtgtgttctgcacaacctctcctaccgcctggacgccgaggtgcccacccgctaccgccagctggagtataacgcccgcaacgcctacaccgagaagtcctccactggctgcttcagcaacaagagcgacaagatgatgaacaacaactatgactgccccctgcctgaggaagagaccaaccccaagggcagcggctggttgtaccattcagatgccatccgcacctacctgaacctcatgggcaagagcaagaaagatgctaccctggaggcctgtgctggtgccctgcagaacctgacagccagcaaggggctgatgtccagtggcatgagccagttgattgggctgaaggaaaagggcctgccacaaattgcccgcctcctgcaatctggcaactctgatgtggtgcggtccggagcctccctcctgagcaacatgtcccgccaccctctgctgcacagagtgatggggaaccaggtgttcccggaggtgaccaggctcctcaccagccacactggcaataccagcaactccgaagacatcttgtcctcggcctgctacactgtgaggaacctgatggcctcgcagccacaactggccaagcagtacttctccagcagcatgctcaacaacatcatcaacctgtgccgaagcagtgcctcacccaaggccgcagaagctgcccggcttctcctgtctgacatgtggtccagcaaggaactgcagggtgtcctcagacagcaaggtttcgataggaacatgctgggaaccttagctggggccaacagcctcaggaacttcacctcccgattctaagaagagactgtccaagcaagttaggcttgcaggaagatatgacccagctgagaagccctcaggcctcgctggatggggttttctgtccatcctatgcagtatttgggaaagttcacaagaaactgagaagaaacctaaaaactgtggatagtggaaagatttttagattttttttttccttggggaaactggcaggcaatgggggttagggaggttggggcggtgggggctttcttgagttaaaggggcttatatgtgatgtcaatatttcttcctctgagaaatggtatatatatgtgtataatgtaagtgtgtgcatgcatgtgcgcgtgcatgtgtgtgtgtgtgagtgtcttaaagcataaccacaaactgcaaaaagctaggtaagctattttgttgcagctcataaggtggtgaaaaggactctcctgtgtttcttactcataggcaaggacaacatgtgctttttggtgagctgctcataattcctgaaatgtgtggtgccagggcaagggggccatcactgcagtcaggccctcagaggagtcctgcaggcttcctaccagtggtctccaggggtgcaggagtaactggggctgggccagcctccccacttacaaggctgctttccaggaagggaggtctggtgtatctcatgggagaatctggggtgtctgtaatgtcacccctccagcagcgccacaaggactgaggttgggtaggtgtggggttccagaggacagcaggacactctcgcatactttgccaaatgaggcctgctcagaggagtaggagctgaaagatggtgccttccaccctcttgggctgtgtgcccatcagagcaggctcagcctgcaaaggccctgcattcagaggtcttgtaatctacttgttgcaggagaaagaaggtaaaaaatgatttttttaagaaaagctattttattgcagctctttcccaagagctgttctgggaatggctggtcttcatattcccagtggagaggggaacaagtggggctgggcatatacctattccggcttctagtgggatggagttggggtatagaaattaaccaggaagatgtttccaccaagcctgctgtgagtcaattgagggagtgtttggggtcccaggagacttggacggggggagtttgggtagactaggaaaggaaagtgccatatcagggtaccggtaccggcaagctcacatctcagccaggggccatgccccacttcccctgaccccagctgtcttgtctccactctgtgaaacccacaggggatgtgataaacagggctattaggggtatcagccacgtcgagcccccagactctgtgcacttcagaccagcagcagcaggagggctcccgagggccttatgagaaaacctgtgtggacatcccttggtgtacactaagacagagcagagcccagcgctcccaagccttcctccttccagcttctacctccatgctagcattgctggtgttagagaggaattaacttcctggtctgtgcccttctctagaagaatataagatgctcctcctcctcaccccttctcagcctcctcccaagtcttcctcttctgcaccacccccgagtccaaacccacctcttgccccagcattcaggctggaaaacactgatgtggactcagtatgataactgagatgggggacgccagacatgtgaggacgctgtcctccgagaggtgtccccggctgttagccagctgtgctgtggtgctgtgggtctgtcataccctcccttgcttctgttcacactgggaggcccactcctggctcacctctccctctcagggacccacgtgggagcctggatccctggactgtcctgggcataggtttcaggggcctcctttgttgtcatcagaacccagaggaattcttctcctaaaaaatacgtatggcataccaatctgtgcggggcagtgtcctaagcacttagactacatcagggaagaacacagaccacatccctgtcctcatgcggcttatgttttctggaggaaagtggagacacaagtccttggctttagggctcccccggctgggggctgtgcagtccggtcagggcgggaggggaaatgcaccgctgcatgtgaaccttaccagcccaggcggatgccccttccccttagcactaccctggcctcctgcatcccctcgcctcatgttcctcccaccttcaaagaatgaagagccccatgggcccagcccctgccctgggaaccaggcagccttccagacctcaggggctgaggcagactattagggcagggctgactttggtgacactgcccattccctctcaggccagctcaggtcacccgggcctctgacccaggcctgtcactttgagaggggcaaaactgagaggggcttttcctagagaaagagaacaaggagcttgccaggcttcatgtagccgacacacgtctcaggattttaagtccacattggcctcacactaccagggccaatgcccaaaataaggagttccaatttggggccaaatgaggaaggacacagactctgccctgggatctcctgtgctagcggccaatgacaaatccagtcattggccaccagccacctctgcagtggggaccacactagcagccctgactccacactcctcctggggacccaagaggcagtgttgctgtctgcatgtccaccttggaatctggctgaactggctggcaggaccaagactgcggctggggtgggcagggaagggaagccgggggctgctgtgagggatcttggagcttccctgtagcccaccttccccttgcttcatgtttgtagaggaaccttgtgccggccaggcccagtttccttgtgtgatacactaatgtatttgctttttttggaaatagagaaaatcaataaattgctagtgtttctttgaaaaaaaaaa

SEQ ID NO: 12355 - DNA, 6537 bp, Homo sapiens
gataatctccatttttgtcatgggactgttaaaaacgtttggaagttccaattctggtcttgatttcccagttaaagatgttctttcacccgaatgcagtctttcctgttggtaaaataagacaaccatcaacattgcctgtttgtctgcttttgaatctcttaaggatggatgtttgtaagatgttgcttaatacagtctggaatactctgtccatttgttgaattgtaaatgactttcaaatgtgcaagttctgttaaatacaaagagaacctctatgggtaacttttgtgttgaagaagtcatttgtcaaccatggtaaaacttgcaaacccactttatacagagtggattcttgaagctatacagaaaataaaaaagcaaaagcaaaggccctctgaagagagaatctgccatgcggtcagtacttcccatgggttggataagaagacagtctctgaacagctggaactcagtgttcaggatggctcagttctcaaagtcaccaacaaaggccttgcctcctataaggacccagacaaccctgggcgcttttcatcagttaaaccaggcacttttcctaagtcagccaaggggtctagaggatcatgtaatgatctccgcaatgtggattggaataaacttttaaggagagcaattgaaggacttgaggagccgaatggctcctccctgaagaacatagagaagtatctcagaagtcaaagtgatctcacaagcaccaccaacaacccagcctttcagcagcggctgcgactgggggccaaacgcgctgtgaataatgggaggttactgaaagacggaccgcagtacagggtcaattatgggagcttagatggcaaaggggcacctcagtatcccagtgcattcccatcctcgctcccacctgtcagccttctaccccatgagaaagaccagccccgtgctgatcccattccaatatgtagcttctgtttggggactaaagaatcaaatcgtgaaaagaaaccagaagaactcctctcttgtgcagattgtggcagtagtggacacccatcctgtttgaaattttgtcctgaattaacaacaaatgtaaaggccttaaggtggcagtgcatcgaatgcaagacatgcagtgcctgtagagtccaaggcagaaatgctgataatatgcttttttgtgattcctgtgatagaggatttcatatggaatgctgtgacccaccactttccagaatgccaaaagggatgtggatttgccaagtctgcagaccaaagaaaaagggaagaaaactacttcatgagaaagctgcacaaataaaacgacgatatgcaaaacccattggacgaccgaaaaataaattaaagcaacgattgttgtctgtaaccagtgatgaaggatccatgaatgcattcacaggaagggggtcacctggtaggggtcaaaagactaaagtctgtaccacaccttcatctggtcatgctgcatctgggaaggactcaagcagcagattggctgttacagaccccactcggcctggtgccaccaccaaaatcaccaccacctccacctacatttctgcctctacacttaaagttaacaagaaaaccaaagggctcattgatggccttactaagttttttacaccatcacctgatggtcgcagatcacgaggtgaaattatagacttttcaaagcactatcgtccaaggaaaaaggtctctcagaaacagtcatgcacttctcatgtgttggctacaggtaccacacaaaagctaaaacctccaccttcttcacttccacccccaacccccatctccggtcagagccccagttcacaaaagtccagcacggccacttcttctccctctccccagagttcttccagccagtgcagtgtgccctccctgagcagccttaccactaacagccagctgaaggcactctttgatgggctttctcatactataccactcagggacagtctcgcaaaaagggacaccccgagttatgcaccacccaaacgtatgcgtcgtaaaactgaattatcttccacggcaaaatctaaagcccacttctttggcaaaagagatattagaagtcggtttatttctcactcctcctcctctagctgggggatggctagaggaagtatttttaaagcaattgctcacttcaagcgaacaactttccttaaaaagcacaggatgctaggcagattaaaatataaagtgacccctcagatggggaccccctcaccagggaaggggagcttgacagacggaaggattaaacctgatcaggatgatgatactgaaataaaaataaacatcaaacaagaaagtgcagatgtaaatgtgattggaaacaaggatgtcgttactgaagaggatttggatgtttttaagcaggcccaggaactttcttgggagaaaatagagtgtgagagtggggtggaagactgtggccggtacccttctgtgattgaatttggtaaatatgaaatccaaacctggtactcctcgccttacccacaggaatatgcaagattaccaaagctttacctgtgtgaattctgtcttaaatatatgaaaagtaaaaatattttgctaagacactccaagaagtgtggatggtttcatcctccagcaaatgaaatttaccgaaggaaagacctttcagtatttgaggttgatgggaatatgagcaaaatttattgccaaaacctttgcttgttagccaagctcttcctggaccacaaaacgttgtattatgatgtcgagccattccttttttatgtccttacaaaaaatgatgaaaagggctgtcatctggttggatacctctctaaggaaaagctttgccagcagaagtataatgtctcctgcataatgatcatgccccagcaccaaaggcaaggatttggacggtttctcattgatttcagctatttgctttctagaagagaaggccaagcagggtctcctgaaaagcctctctccgatctgggccgtctctcctacctggcatattggaagagcgtcatcttggagtatctctaccaccaccatgagaggcacatcagcatcaaggcaattagcagagcgacgggcatgtgcccacatgacattgccaccactctgcagcacctccacatgatcgacaagagagatggcagatttgtcatcattagacgggaaaagttgatattgagccacatggaaaagctgaaaacctgttccagagccaatgaacttgatccagacagtctgaggtggaccccaattttaatttctaatgctgcagtgtctgaagaagagcgagaagctgagaaagaggctgagcggctaatggaacaagctagctgctgggagaaggaggaacaagaaatcctgtcaactagagctaacagtaggcaatcacctgcaaaagtacaatcgaaaaataaatatttgcattccccggagagccggccagtcacaggggagcgagggcagctgctggagctgtctaaagagagcagtgaagaagaagaggaggaggaggacgaggaggaggaagaagaggaggaagaagaggaagaggatgaagaggaggaagaagaggaagaagaagaagaagaagaagaaaatattcaaagctctcccccaagattgacgaaaccacagtcagttgccataaagagaaagaggccttttgtactaaagaagaaaaggggtcgtaaacgcaggaggatcaacagcagtgtaacaacagagaccatttcagagacgacagaagtactgaatgagccctttgacaactcagatgaagagaggccaatgccacagctggagcctacctgtgagattgaagtggaggaagatggcaggaagccagtcctgagaaaagcattccagcatcagcctgggaagaaaagacaaacagaggaagaggaaggaaaagacaatcattgcttcaagaatgctgacccttgtagaaacaatatgaatgatgattcaagtaacttgaaagaaggcagtaaagacaatcccgaacctctaaagtgcaaacaagtgtggccaaaaggaacaaagcgcggtctatctaagtggaggcaaaacaaagagaggaagaccggatttaaactgaatttgtacaccccgccagaaacacccatggagcctgacgagcaggtaacagtggaagaacagaaggagacttcagaaggaaaaaccagccccagtcccatcaggattgaggaggaggtcaaggaaactggggaagccctgttgcctcaagaggaaaacagaagggaagaaacatgtgcccctgtaagtccaaacacatcaccaggtgaaaaaccagaagatgatctcatcaaacctgaggaagaggaagaggaggaggaggaggaagaggaagaagaggaagaagaggaaggggaagaagaagaaggaggaggaaatgtagaaaaagatccagatggtgctaaaagccaagaaaaagaggaaccagaaatctccacggaaaaagaagactctgcacgtttggatgatcacgaagaggaggaggaagaggatgaagagccatcccacaacgaggaccatgatgccgatgacgaggatgacagccacatggagtctgccgaagtggagaaggaagagctgcccagagaaagcttcaaagaagtactggaaaaccaggagacttttttagaccttaatgtgcagcctggtcactcgaacccagaggtcttaatggactgtggcgtcgacctgacagcttcttgtaacagtgagcccaaggagcttgctggggaccctgaagctgtacccgaatctgacgaggagccacccccaggagaacaggcacagaagcaggaccaaaagaacagcaaggaagtcgatacagagttcaaagagggaaacccagcaaccatggaaatcgactctgagactgtccaggccgttcagtctttgacccaggagagcagcgaacaggacgacacctttcaggattgtgccgagactcaagaggcctgtagaagcctacagaactacacccgtgcagaccaaagtccacagattgccaccacgctcgacgattgccaacagtcggaccacagtagcccagtttcatccgtccactcccatcctggccagtccgtacgttctgtcaacagcccaagtgtccctgctctggaaaacagctacgcccaaatcagcccagatcaaagtgccatctcagtgccatctctgcagaacatggaaaccagtcccatgatggatgtcccatcagtttcagatcattcacagcaagtcgtagacagtggatttagtgacctgggcagtatcgagagcacaactgagaactacgaaaacccaagcagctacgattctactatgggaggcagcatctgtggaaacggctcttcacagaacagctgctcctatagcaacctcacctccagcagtctgacacagagcagctgtgctgtcacccagcagatgtccaacatcagcgggagctgcagcatgctgcagcaaaccagcatcagctcccctccgacctgcagcgtcaagtctcctcaaggctgtgtggtggagaggcctccgagcagcagccagcagctggctcagtgcagcatggctgctaacttcaccccacccatgcagctggctgaaatccccgagacgagcaacgccaacattggcttatacgagcgaatgggtcagagtgattttggggctgggcattacccgcagccgtcagccaccttcagccttgccaaactgcagcagttaactaatacacttattgatcattcattgccttacagccattccgctgctgtgacttcctatgcaaacagtgcctctttgtccacaccattaagtaacacagggcttgttcaactttctcagtctccacactccgtccctgggggaccccaagcacaagctaccatgaccccaccccccaacctgactcctcctccaatgaatctgccgccgcctcttttgcaacggaacatggctgcatcaaatattggcatctctcacagccaaagactgcaaacccagattgccagcaagggccacatctccatgagaaccaagtcagcgtctctgtcaccagccgctgccacccatcagtcacaaatctatgggcgctcccagactgtagccatgcagggtcctgcacggactttaacgatgcaaagaggcatgaacatgagtgtgaacctgatgccagcgccagcctacaatgtcaactctgtgaacatgaacatgaacactctcaacgccatgaatgggtacagcatgtcccagccaatgatgaacagtggctaccacagcaatcatggctatatgaatcaaacgccccaataccctatgcagatgcagatgggcatgatgggcacccagccatatgcccagcagccaatgcagaccccaccccacggtaacatgatgtacacggcccccggacatcacggctacatgaacacaggcatgtccaaacagtctctcaatggctcctacatgagaaggtag

SEQ ID NO: 12356 - DNA, 5252 bp, Homo sapiens
cggccgccccggccgacagcgcccgggaacacggctcgcaggccgggggcaaggggcggccgggcgcggccgagctgccatcagtcatgctcttaaacggggactgcccagagagcctgaagaaggaggcggcggcggccgagccacccagggaaaatgggcttgacgaggccggcccgggagatgagaccaccggccaggaagtcattgtcattcaggacacgggcttttctgtgaagatcctcgcccctgggatcgagcccttctccctgcaggtgtccccccaggagatggtgcaggagattcaccaggtgctcatggaccgggaggacacgtgtcaccgcacctgcttctcactgcacctggatggcaacgtgctggaccacttctcggagctgcgcagcgtcgaggggctgcaggagggctctgtgctgcgtgtggtggaagagccgtacacggtgcgtgaggcccgcatccacgtgcgccatgtccgagacctgctcaagagcctggacccatccgatgccttcaacggggttgactgcaactccttgtccttcctgagtgtcttcaccgacggcgacctgggagacagcgggaagcggaagaagggcttggagatggaccccatcgactgcacaccacccgagtacatcctgccagggagccgggagcggccactgtgtcccctgcagccccaaaaccgtgactggaagcccttgcagtgcctgaaagtactcaccatgagcggatggaacccgcccccggggaaccggaagatgcacggggacctcatgtacctgtttgtgatcacagccgaggaccggcaagtcagcatcaccgcgtccacacggggcttttacctgaatcagtccacagcttatcacttcaaccccaagcccgccagcccccgcttcctaagccattccctagtggagctgctcaaccagatcagcccgaccttcaagaagaacttcgctgtgctgcagaagaaaagggtccagcgccacccgttcgagaggatcgccaccccattccaggtgtacagctggacagccccccaggcggagcatgccatggattgcgtgcgtgcagaggacgcctacacctcgaggctgggctatgaggagcacattcctggacagacccgagactggaatgaggagctgcagacgacgagggagctgcctcgcaagaacctgcctgagcggctgctccgagaaagggccatattcaaggtgcacagcgacttcaccgcggcagccaccaggggcgccatggccgtcattgacggcaacgtgatggccatcaaccccagcgaggagaccaagatgcagatgttcatctggaacaacatcttcttcagcctgggcttcgacgtccgagaccactacaaggacttcgggggggacgtggcggcctacgtggcgcccaccaacgacctgaatggcgtccgcacgtacaacgcggtggacgtggaggggctgtacacgctgggcacggtggtggtggattaccgcggctaccgggtcacggcccagtccatcatccccggcatcctggagcgggaccaggagcagagcgtcatctacggctccatcgacttcggcaagaccgtggtgtcacacccgcggtacctggagctgctggagcgcacgagtcggcccctcaagatcctgcggcaccaggtgctcaacgaccgtgacgaggaggtggagctctgctcctcggtcgagtgcaagggcatcattggcaacgacgggcgccactacatcctcgacctgctgcgcaccttccccccggacctcaacttcctgcccgtgcctggcgaggagctgcctgaggaatgcgcccgcgccggcttcccccgcgcccaccggcacaagctctgctgcctgcgccaggagctggtggacgccttcgtggagcacaggtacctcctctttatgaagctggccgccttgcagctgatgcagcagaacgccagccagctggagaccccctcctccctggaaaatggtggtccttcctccttggagtccaagtctgaggatcctccaggacaggaggcgggaagtgaggaggagggtagcagcgccagcggcctggccaaggtgaaggagctggcagagaccatcgccgcagacgacggcacagaccctcggagccgggaggtgatccgcaacgcgtgcaaggcggtcggctccatcagcagcaccgccttcgacattcgcttcaatcctgacatcttctcaccaggggttcgtttccctgagtcctgccaggatgaagttcgggaccagaagcagctgctgaaggacgcggctgccttcctgctctcctgccagatccctggcttggtgaaggactgcatggagcacgcggtcctgcccgtggacggggcaacgctggcagaggtgatgcgccagcggggcatcaacatgcgctacctgggcaaggtgctggagctggtgctgcggagcccggcccgccaccagctggaccacgtctttaaaatcggcattggagaactcatcacccgctcggccaagcacatcttcaagacgtacttacagggagtcgagctctccggcctctcagccgccatcagccacttcctgaactgcttcctgagctcctacccaaaccccgtggcccacctgcccgccgacgagctggtctccaagaagcggaataagaggaggaaaaaccggcccccgggggctgcagataacacagcctgggctgtcatgaccccccaggagctctggaagaacatctgccaggaggccaagaactactttgacttcgacctcgagtgtgagaccgtggaccaggctgtggagacctacggcctgcagaagataacgctcctgcgggagatctcgctgaaaacagggatccaggtcctgctgaaggagtacagcttcgacagtcgccacaagcccgcgttcaccgaggaggacgtgctcaacatcttccccgtggtcaagcacgtcaaccccaaggcctcggatgccttccatttcttccagagcgggcaggccaaagtgcagcagggcttcctgaaggagggctgtgagctcatcaatgaggccctgaacctgtttaacaacgtctacggagccatgcacgtggagacctgcgcctgcctgcgcctcctcgcccgcctccactacatcatgggcgactacgcagaggccctgagtaaccagcagaaggcggtgctgatgagcgagcgggtgatgggcaccgagcaccccaacaccatccaggaatacatgcacctggccctgtactgcttcgccagcagccagctgtccaccgccctgagcctgctgtaccgcgcccgctacctcatgctgctggtgttcggggaagaccaccccgagatggcgctgctggacaacaacatcgggctggtgctgcacggggtgatggagtacgacctgtcgctgcgcttcctggagaacgcgctggccgtcagcaccaagtaccacgggcccaaggccctcaaggtggccctcagccaccaccttgtcgcccgagtctacgagagcaaagctgagttccggtcggccctgcagcacgagaaggagggttacaccatctacaagacgcagctgggcgaggaccatgagaagaccaaggaaagctccgagtacctcaagtgcctgacccagcaggccgtggccctgcagcgcaccatgaacgagatctaccgcaacggctccagcgccaacatcccgcccctcaagttcacggcccccagcatggccagcgtcttggagcagctgaacgtcattaacggcatcctcttcattcctctcagccaaaaagacctggagaatctgaaagccgaggtggcgcggcggcaccagctccaggaggccagcagaaacagggatagagccgaggagcccatggctaccgagcccgcgccagcgggggccccaggagacctgggctcccagcccccggctgccaaggacccttctccgagcgtgcagggatagagagggagccagacggacagccagccagcggccccgtcaccagggagcccgactgcgggagaagggggcgagcctgcgggcggaagaggaagcaaggccctcttcctccacgtctcaccccaccccacccccgtgtcctcctgggagcctggcctgcctgccccgcagaaggtgtttttgcgctggttcaatgaatagatgatgcagaggccccattggagacacgtgaatggcgtgtgcggccatcagttcccggctggggggcaggtgttgcttcggcccccgccctccggccggcgtgtgcgagtgcgcccctggctgtgagtgttgaccgttcctctcccctgtacatagcccgagccagtcctgagtgggtgactcctgagtgggtgacgcgcagacgggatttctcaggtcatttgtatggtcgacatgatggctgctgctttggctgccaccacccccgggcccagcctgtctgaaagttcagggtttaggccgaaaaacccggtggggaggggtggggagccggagctctgtggcggggctggagggctggggtgcactttagtttggggcgggacgggagccgccgttgtgactggcgtggtctggctgctgctcccgaacggaggggtcggggttggcttgctgggccctcagagcccagtgggtggctctgactcggctccctactccctgcacccagctgggcgcagccttggggcctgcggtctgaatgtatccctcccctcagttttaacctgagctgccgaacgcacagtgggccgggggcgaggctgggggaagcggggcccaattacggatcccgggagttacaggtgccgacgtgatgtcgcttctctggtgcccagctcccttcctggtctgagactagctctgggggtggcgggggcccccacacgctgctcccgctccaccctgcccgtgctgctgctctgtgcctgctgtcagagccctggtgggggaggatgtggccaccctgagacccggaggagacgggcgtctgcctgggtttgcggagagccgcttatgggtgtggtccgtccagacaccttgtttcaagggggatgggcgtgagcgggcaagcagagcatccccaccgctgagcaagaactttttcttgtttttaaaccatcacgtcctcatttcacattggaataaagtgagtttttgaaacctgcggcaaaaaaaaaaaaaaaaaaaaaaaaaaaa

SEQ ID NO: 12357 - DNA, 8473 bp, Homo sapiens
gcgtccgctcgcccggaccctgaggctgctgggcccaccctcccggaaccgtccgaccctcggtggcctcggctcgttctgccatctccggtcctaccctggggcggagggtggaaggcagcttccgtcgaagaggagggggctgcggtggccaccgcggcggagcccgagttattttaccaagaaaatggtttgcacgactttgaacatatactatccatgctgatgggacaggatccaatatgaatataaatgatggaggaagacgacgctttgaagataatgaacatacattacggatatatcctggggctatttcagaagggacaatctactgtccgattcctgccagaaaaaactccacagctgctgaggtgattgagtctcttataaacaaacttcatcttgacaaaacaaaatgttacgttctagcagaggtaaaggaatttggtggagaagaatggattctcaatccaacagattgtccagttcagcaaatgatgctgtggccccgaatggctctggaaaatcgcttaagtggagaagactaccgcttccttctgagagagaaaaaccttgatggatcaatccattatggtagcctgcagtcatggctacgggtaacagaagaacgtcgcaggatgatggaacggggttttcttccacagcctcaacagaaagactttgatgatttatgtagtttacctgatttgaatgagaaaactctcttagaaaacctacgagatcgctttaagcatgaaaaaatttatacctatgttggcagtattctaatagttattaacccattcaagtttcttcctatttataaccccaaatatgtcaaaatgtatgataaccaccaactgggaaaacctgagccccacatttatgctgtggctgatgtagcttatcatgccatgcttcagcgcaaaaagaatcagtgcatcgtgatttcaggagagagtggttctgggaagactcaaagcacaaactttcttattcaccaccttactgctctcagtcagaaaggatttgccagtggagtagaacagattattcttggagctggaccagtacttgaggcctttggaaatgcaaagacagctcataataacaattcaagtcgttttgggaagtttattcaagtaaattaccaggaaacaggcactgtacttggtgcctatgttgaaaaatatctactggagaagtccagactcgtttatcaggagcataatgaacggaactatcatgtattctattacctcctggcaggagcaagtgaagatgagagatcagcattccatcttaagcaaccagaggaatatcattatctcaatcagataacaaagaaacccctcagacagagctgggatgattattgctatgactctgagccggattgcttcacggtggaaggagaagatttgagacatgactttgagcgcctacaacttgccatggaaatggtaggatttcttcccaagacacgaagacagattttctctcttctctcagccatactacatttgggtaatatctgttacaaaaagaagacataccgggatgactccattgatatctgtaatcctgaagttctgcctattgtctcagaattattagaggttaaagaagagatgctatttgaagcattagttacaaggaagacggtgacagtgggagaaaagcttattttgccatacaagttggcagaggctgtgacagtgaggaactccatggctaagtctctgtatagtgccctgtttgactggatagtttttcgaattaatcatgcacttctgaatagtaaagatttagagcataataccaagacattgtctattggtgttcttgatatttttgggtttgaagattatgaaaataacagctttgaacagttctgtattaattttgctaatgaacgtttacagcactactttaatcagcatatctttaaattggaacaagaggaatatagaactgaaggtatcagctggcacaacatagattacattgataatacctgctgcataaatcttattagcaaaaaaccaacaggactgcttcatcttttggatgaagaaagcaactttccacaggctacaaatcaaacattgctagacaagtttaagcatcaacatgaagataattcttacatcgaatttccagccgtgatggagcctgctttcattataaaacattatgctggaaaagtaaaatatggggtaaaggatttccgggaaaaaaatacagatcatatgcgcccagacattgtagctcttctgagaagcagcaagaatgcatttatctctgggatgattggaattgatcctgtagctgttttccgatgggcaattctccgagcttttttcagagccatggttgctttcagggaagctgggaaaagaaacattcacagaaaaactggacatgatgatacagcgccatgtgcaattttgaaaagtatggatagttttagctttctccaacacccagtccaccagaggagcttagagattctgcagagatgcaaggaagagaagtacagtataacccggaaaaatcccagaacacctctttctgatctccagggcatgaatgctctaaatgaaaaaaaccaacatgatacatttgatattgcctggaatggcagaactgggattcgccagagcagactatcaagtggcacctccttgcttgataaagatggaatatttgctaattcaactagcagcaaactcctggagagagcccatggaattctcacgagaaacaaaaatttcaaatccaagcctgcccttccaaagcacttgctagaagtaaattctttaaagcacctgacaagactgacactacaagatcgcattaccaagtctcttcttcatttacacaagaagaaaaaacctcccagcatcagtgcccagtttcaggcatcattaagcaagctaatggaaacacttggtcaagcagaaccatattttgtaaaatgcattcgctctaatgctgaaaagctgcccttaaggttcagtgatgtcttggtacttagacagcttcgatacaccgggatgctggaaacagttcaaattcgccaatcaggatacagctccaaatattctttccaggattttgtgagccacttccatgtacttcttccccgaaatattattccatccaaatttaacattcaggatttcttcaggaaaataaatcttaatccagataattatcaagttggaaaaaccatggtctttctaaaggagcaggaacgacagcacttacaagatctgcttcaccaagaggtgctccgcagaatcatattgttgcagcgatggttcagggtcttgctgtgtaggcagcatttcctccatctgagacaagcatctgttattatccagagattctggaggaattacctaaatcagaagcaagtcagagatgcagctgtgcagaaggatgcttttgttatggctagtgcagctgctcttctccaagcttcctggcgtgctcacttagagaggcagcggtacttggagttacgggctgcagccatcgttatccagcagaaatggagagattactataggcgcaggcacatggctgctatttgcatacaagcaagatggaaagcctacagggaaagtaaaaggtaccaagaacaaaggaaaaaaattatccttttgcaatcaacatgtagaggattcagagcaagacaaagatttaaagctttaaaagaacaaaggctaagagaaacaaagccagaagttggattggtgaatattaagggatatggatctctggaaattcagggttcagacccttcagaatgggaggattgttcttttgacaacagaataaaagccatagaggaatgtaaatctgtaatagagagtaatcgaattagccgtgaaagttcagtggactgcttgaaggagtcaccaaacaagcagcaggagagagcccaaagccagagtggtgtggacttgcaggaagatgtgcttgtaagagagagacccaggtccttggaggatctccatcagaaaaaagtaggccgggctaagagagaaagtaggagaatgagagaactagagcaagctatatttagcttagaattgctgaaagttcgttctcttggtggtatttctccttcagaggatcgcagatggtctacagaattggtgcctgaaggccttcagtctccacggggtacacctgatagtgagagctctcaaggaagcttggaacttctgagctatgaggaaagccaaaagagcaaactagagtctgtcatttcagatgaaggagacttgcagtttccatcacctaagatatccagcagtccaaaatttgattcacgggacaatgccctcagtgcctcaaatgagactagcagtgcagagcatttgaaggatggaactatgaaggaaatggtggtctgcagttctgagtctattacctgtaaaccacagctgaaagactccttcatttcaaatagtctacctacttttttttatatcccccaacaagacccactgaaaacaaattcccaactagacacaagtatccaaagaaacaaactattggaaaatgaagacacagcgggggaagctcttactttggatatcaacagggaaactagaaggtatcactgctcaggaaaagatcagattgttccttctttgaatacagagtcttctaatcctgtgcttaagaagttagaaaagctaaacactgagaaggaagaaaggcaaaaacagttgcagcaacagaatgaaaaagagatgatggaacagattcgccagcaaacagatattttagagaaggagcgcaaagccttcaagacaattgaaaagccaagaattggagagtgtttggtggcaccatcttcctatcagtcaaagcaaagagtagagaggccatcctctctcctcagcttaaatacctcaaataagggagaacttaatgtactggggtccctatcattaaaagatgcagctcttgcccaaaaagacagttcctctgctcacttacccccaaaggaccgacctgtcaccgtgttctttgaaagaaaaggaagtccatgccaatctagtactgtcaaggaattatccaagacagacagaatgggcacccagctgaatgtagcctgtaaactctcaaataatcgcatttcaaaaagagaacactttaggccaactcagtcttacagccacaattctgatgacctttccagagagggaaatgctaggcccattttcttcactccaaaggataatatgagtattccccttgtcagcaaagaagccttaaacagtaaaaatcctcaactccataaagaagatgaaccagcatggaaacctgtgaagttagctgggccaggccaaagagagacatcacagcgattttcgtcagttgatgaacaagcaaaacttcataagactatgtctcaaggagagattaccaagttggcagtgagacagaaggcttcagattcagatataagacctcagagagctaagatgagattctgggccaaagggaaacaaggggagaagaagactaccagagtgaaacctactacccagtcagaggtttcgccactctttgcaggcacagatgtgattccagctcatcagtttccagatgaattagctgcatatcacccaacacctcctttgagcccagaactgcccggcagttgccggaaggaattcaaagagaacaaagaaccttctccaaaggctaagcgcaagcgaagtgtgaagattagcaacgtggctttggattctatgcattggcaaaatgactctgtccagatcatagcaagtgtcagtgatttaaaaagcatggatgaatttcttctgaaaaaggtgaatgacctagataatgaagacagcaagaaggatacactagtggatgttgtatttaaaaaagccctgaaggaatttcggcagaatatcttcagcttttattcatctgcattggcgatggatgatgggaaaagcatacggtataaagacctctatgcactatttgaacagattctggaaaagacgatgaggcttgagcagcgtgattcactgggtgaatctccagtgagagtttgggtcaacacttttaaagtgtttttagatgaatatatgaatgaattcaagacttcagattgcacagccacaaaggtgccaaaaacagaaagaaagaaaagaaggaaaaaggaaactgatttggtggaagaacacaatggtcacatctttaaagccacccaatatagcatccctacatactgtgaatactgttcttctttgatatggataatggaccgagcctctgtttgcaaattatgcaagtatgcttgccataagaagtgctgtctgaaaaccacagccaagtgctctaaaaagtatgatccagagctgtcatctcgacaatttggggttgaactgtcccgtttgaccagtgaagaccgaactgttcctttagtagtggaaaagctcataaactacattgaaatgcatggactgtatacagaaggtatttatcgaaagtctggttcgactaataaaatcaaggagcttcggcagggtctagatacagatgctgagagtgtaaatctagatgactataacatacacgtcattgcaagtgtattcaaacaatggcttcgagatttgcccaatcctctcatgacctttgaactctatgaggaatttcttcgagctatgggccttcaggagaggaaggagacaatccgtggtgtatactctgtgattgatcaactctcccgaactcatctcaatacactggaacgcctcatctttcatctagtcaggattgctctgcaggaagacactaatcgaatgtctgctaatgctttggccattgtgtttgcgccctgcattctccgctgccctgacaccactgacccactacaaagtgtacaggacatcagtaagactaccacttgtgtggaactgattgttgtggaacaaatgaataaatacaaggctcgtctcaaagatatcagtagcttggaatttgctgagaataaggcaaagaccaggttgtcactgattcgtagatcaatgggaaaggggcgtattcgtcgaggaaactatccaggtccatcgtctcctgttgtagttcggttgccttctgtgtctgatgtctcagaggagaccttgactagtgaggcagccatggagactgacatcacagaacagcagcaagcagctatgcagcaggaggagagagtactgactgagcagattgagaacctacagaaggagaaggaggagctaacatttgagatgcttgtactggaaccccgtgcctctgatgatgaaacccttgagtctgaggcctccattgggactgctgatagctcagagaatttgaatatggagtctgaatatgctatctctgagaaatcagaaagaagcttagcccttagctccctgaagacagctggcaagtctgaaccttccagcaagttgcgaaagcaacttaaaaagcagcaagactctttagatgtcgtggactcttcggtctcctctttatgtctgtctaacacggcatcatctcatgggaccagaaaactatttcagatttattccaaatctccattctaccgagctgcctcaggtaatgaggccctgggaatggaaggaccattgggccagaccaaattcctggaagacaagcctcagttcatcagcagaggaaccttcaacccggaaaagggcaaacaaaaattaaagaatgtgaaaaactcacctcagaaaaccaaagagaccccagaggggacagtcatgtctggccgcagaaaaactgtggacccagactgcacctccaaccaacagctagcactctttggaaataatgaatttatggtctgaaccggcagatgtgtgtccctccgtggctacagagtggtaaacaaatctcacctttggggctgcgtttcatcacctcgtccacaatagtcaatcctaattgtggtcctgcctcttttctaagcatatggctaagactgtatgtgctgaattcctgggcctcctgcagaagcagaaagcctgctggggatggtgccagctgtgccttggctgttgtatttgaattgagatttttactatacaaagccacctagggcctggggatttgggtcagttgtagttgcctctcccccaccctcttttcccttcccaaaggtgggtgttgaactaggggggatattgctgtcctgagggaccctctcatttctgacatttgaagaaaacgtataaatctttcttaaccgtgaaagcaaaagcctttgggtttattttgggatagttaggagctagggtagaatataatttttttccaaaaacttacttacaaacaaaaagcctaatccctctattttaagatttctgaaaaaacactccatgttatattctggggaaagcaaaaacaaaaaaaaaaaaaaaaaaaaaaaaaa

SEQ ID NO: 12358 - DNA, 7014 bp, Homo sapiens
cggggaccgcgacgagcccgggtcgccgttggcagcagcagcagcaacaccagcagcagcagcagccccggcggcggcgcggaccccgagcgcccgggcgcaccccggcttcccggagcgcgacgcggcggcagcagccccggtgcggccgcgcgcgccttaggctcggccccgcggctcggggaccccgactcccggcccagcgagcgcgtcccccggcgccgcccgagagcccgaggaggcagcggccgcaggcagccggggaggggggcggccaccgcccgcgccgggcatcctcaggagccccagagcgcggagggcgcggcgccgccgagcggtgctggcccccgcgggcctccccggaccttccccaccgcctgggcccgagggacgcgtgatcgggcgggcggccgggcgcaagggtgggagggagccgcccccgcccgcgccccctccgcccctcgccccaacccctgggcgccgggcccgggccgcgcggcctgaagcgcccgcgatggcgagcccgccgcggcacgggccgcccgggccggcgagcggagacggccccaacctcaacaacaacaacaacaacaacaaccacagcgtgcgcaagtgcggctacctgcgcaagcagaagcatggccacaagcgcttcttcgtgctgcgcggacccggcgcgggcggcgacgaggcgacggcgggcggggggtcggcgccgcaaccgccgcggctcgagtactacgagagcgagaaaaagtggcggagcaaggcaggcgcgccgaaacgggtgatcgctctcgactgctgcctgaacatcaacaagcgcgccgacgccaagcacaagtacctgatcgccctctacaccaaggacgagtacttcgccgtggccgccgagaacgagcaggagcaggagggctggtaccgcgcgctcaccgacctggtcagcgagggccgcgcggccgccggagacgcgccccccgccgccgcgcccgccgcgtcctgcagcgcctccctgcccggcgccctgggcggctctgccggcgccgccggggccgaggacagctacgggctggtggctcccgccacggccgcctaccgtgaggtgtggcaggtgaacctgaagcccaagggtctgggccagagcaagaacctgacgggggtgtaccgtctgtgcctgtctgcgcgcaccatcggcttcgtgaagctcaactgcgagcagccgtcggtgacgctgcagctcatgaacatccgccgctgcggccactcggacagcttcttcttcatcgaggtgggccgctcggccgtcacaggccccggcgagctgtggatgcaggcggacgactcggtggtggcgcagaacatccacgagaccatcctggaggccatgaaggcgctcaaggagctcttcgagttccggccgcgcagtaagagccaatcgtcggggtcgtcggccacgcaccccatcagcgtccccggcgcgcgccgccaccaccacctggtcaacctgccccccagccagacgggcctggtgcgccgctcgcgcaccgacagcctggccgccaccccgccggcggccaagtgcagctcgtgccgggtgcgcaccgccagcgagggcgacggcggcgcggcggcgggagcggcggccgcgggcgccaggccggtgtcggtggctgggagccccctgagccccgggccggtgcgcgcgcccctgagccgctcgcacaccctgagcggcggctgcggcggccgcgggagcaaggtggcgctgctgccggcagggggcgcgctgcaacacagccgctccatgtccatgcccgtggcgcactcgccgcccgccgccaccagccccggctccctgtcgtccagcagcggccacggctcgggctcctacccgccgccgcccggcccgcacccgcctctgccgcatccgctgcaccacggccccggccagcggccctccagcggcagcgcctccgcctcgggctcccccagcgaccccggcttcatgtccctggacgagtacggctccagcccaggcgacctgcgcgccttctgcagccaccgaagcaacacgcccgagtccatcgcggagacgcccccggcccgagacggcggcggcggcggtgagttctacgggtacatgaccatggacaggcccctgagccactgtggccgctcctaccgccgggtctcgggggacgcggcccaggacctggaccgagggctgcgcaagaggacctactccctgaccacgccagcccggcagcggccggtgccccagccctcctctgcctcgctggatgaatacaccctgatgcgggccaccttctcgggcagcgcgggccgcctctgcccgtcctgccccgcgtcctctcccaaggtggcctaccacccctacccagaggactacggagacatcgagatcggctcccacaggagctccagcagcaacctgggggcagacgacggctacatgcccatgacgcccggcgcggccctcgcgggcagtgggagcggcagctgcaggagcgacgactacatgcccatgagccccgccagcgtgtccgcccccaagcagatcttgcagcccagggccgccgccgccgccgccgccgccgtgccttctgcggggcctgcggggccagcacccacctctgcggcgggcaggacattcccggcgagcgggggcggctacaaggccagctcgcccgccgagagctcccccgaggacagtgggtacatgcgcatgtggtgcggttccaagctgtccatggagcatgcagatggcaagctgctgcccaacggggactacctcaacgtgtcccccagcgacgcggtcaccacgggcaccccgcccgacttcttctccgcagccctgcaccccggcggggagccgctcaggggcgttcccggctgctgctacagctccttgccccgctcctacaaggccccctacacctgtggcggggacagcgaccagtacgtgctcatgagctcccccgtggggcgcatcctggaggaggagcgtctggagcctcaggccacgccagggcccagccaggcggccagcgccttcggggccggccccacgcagccccctcaccctgtagtgccttcgcccgtgcggcctagcggcggccgcccggagggcttcttgggccagcgcggccgggcggtgaggcccacgcgcctgtccctggaggggctgcccagcctgcccagcatgcacgagtacccactgccaccggagcccaagagccccggcgagtacatcaacatcgactttggcgagcccggggcccgcctgtcgccgcccgcgcctcccctgctggcgtcggcggcctcgtcctcctcgctcttgtccgccagcagcccggcctcgtcgctgggctcaggcaccccgggcaccagcagcgacagccggcagcggtctccgctctccgactacatgaacctcgacttcagctcccccaagtctcctaagccgggcgccccgagcggccaccccgtgggctccttggacggcctcctgtcccccgaggcctcctccccgtatccgccgttgcccccgcgtccgtccgcgtccccgtcgtcgtctctgcagccgccgccaccgccgccggccccgggggagctgtaccgcctgccccccgcctcggccgttgccaccgcccagggcccgggcgccgcctcatcgttgtcctcggacaccggggacaatggtgactacaccgagatggcttttggtgtggccgccaccccgccgcaacctatcgcggcccccccgaagccagaagctgcccgcgtggccagcccgacgtcgggcgtgaagaggctgagcctcatggagcaggtgtcgggagtcgaggccttcctgcaggccagccagcccccggacccccaccgcggcgccaaggtcatccgcgcagacccgcaggggggccgccgccgccacagttccgagaccttctcctccaccacgacggtcacccccgtgtccccgtccttcgcccacaaccccaagcgccacaactcggcctccgtggaaaatgtctctctcaggaaaagcagcgagggcggcgtgggtgtcggccctggagggggcgacgagccgcccacctccccacgacagttgcagccggcgccccctttggcaccgcagggccggccgtggaccccgggtcagcccgggggcttggtcggttgtcctgggagcggtggatcgcccatgcgcagagagacctctgccggcttccagaatggtctcaactacatcgccatcgacgtgagggaggagcccgggctgccaccccagccgcagccgccgccgccgccgcttcctcagccgggagacaagagctcctggggccggacccgaagcctcgggggtctcatcagcgctgtgggcgtcggcagcaccggcggcgggtgcggggggccgggtcccggtgccctgccccctgccaacacctacgccagcattgacttcttgtcccaccacttgaaggaggccaccatcgtgaaagagtgaagatctgtctggctttatcaccaggatgtcacatgtcagagagtatcattaaaagaagacgctcagcactgtttcagcccgaagctgcttgcagttttcttttggatctgagcaatgactgtgtttggaaacatctgtggactctgttagatgaggcaccaacaaggcaaggtcacctgcctctttcccttgttcccggatggggcattcatcattgtgctgtttgcgttttgttttgttttgttttaacaaaattagctgaagaagttattctcaagaaaattggatgttttcattggccttcttaaattgtggccagtgtcttttaatttcttcttcttttccttttggcaaagcagatataaccctcagcatgctaggagagtgcacccgtacctatggaagtggtaaaatctggtatttactggcttacactcaaaacgaccacagtcctacctcagttcaaggtaaagccggatttccgtggcgggggtcccacaggacctcctgtagtagcccctgcgctgtgtgtctggagcgcggtcctcggccttattgaaatggtccaagtagacagctgcttgttggattccagtgcaggtacctgcgatgtttacgtccacaccgagcccagtgtgggactgacatttctcaatggaagtgaaatttgggattggactttgaagacggattactaaataataattattatatgtaactgaagcaacctacttttgaaaatcaactgtattgggtagtgggaggtgggagggaagggctttgggaaggggatgaatatctctttttacctttaacagacttgtttaatcttctcgatgtagatgtttatgtaggtacttcacattgcaaacgccttttattctatttacaagctcagatgtctctgctctcctgaatcttgggcatgcctttctgtaaccaaaaatccctgtaggcgtgctagcaattccagggtggtccgggtttggcagatttgatttttaaaaaacgtattatctttaataaaatgttattatgtcaaccagtgaggctgccctgaacaaaaaaaacaaaaagaaaaaaaaaaaaggaaagaaagaaactgataaaaagaggcattccagcccctatgttattgatggaaaaagaaaaagaagaaaagcaatctcgcagtacatgttacttgtcgaaaaaattccggacaagactacccttgttttatgttttcagtattctgaaaataccagtgtgtggcagttctcgcagatgttacctaaaactgctgaacttgaccggcagaatgttctgccgttttctgctccctcgacacttgattggagggctgtcgacctctcctcccgtgggggcttccccagtgcctatcttctctgatagtcatggagaggttacactaattcattggagatgtaagttgttggttttgttttgttttgtttttagaaaaatatatataaatatataatagatatctatcgctatagaataatgcattaataaaatgaggcttttttagaggaagaccaaaaaattcaatgtcttaaaaatatatttaatggcaatgcaaaagtcttcctgcttccgtgctgaactttagaacagaggattgtattgcaagacaaagttgaatgtaaagtgatctccctgaacatttttaaggttttacttttctgaaattatacatcacagcagtgcataggccatataatgttagctggaaggtcaatttcagtgtatgatatactttattaagatgtataaaaatcctgaagtttttatttagttttgggaataggcatcaatgggtggtatttgctttgtaactccccccaggtacgatagggactgaatatggaccctgctgaaagcagtgtattgacgcatatttaactcgccctctatccgtagagtagtcatgacactatacagatggttcgtgttcatactgcagcttaaaacaagcaaaatacacagatgataatatgctaaattttcctctatcctgtacatttcacaaaaaggcatatgcaatatttacatttttaatttagtttacagaatggaaccaaaatgtataaatgttatgtttgctaaaacttcacaatgtatattgggtctttgtacattttgcctgacttaccttaaatttaaaatattttttgctatataaactttaacagttattaaacagtgttttctttttgggtacgtattgtttctggatatcaagatgttaaatatatttcttgctattgtgatatgacaagagacttaacttatcttgctctgtcttccactgtacacgctgtatataggggtcaatgtgatgctgctggagacgagaataaactggactagaatagtgcattgtatttagtctgtattgatcatggatgccctccttaatagccatatgcaataaaataaagtacattatttatgaaatgaaaaaaaaaaaaaaaaaa

SEQ ID NO: 12359 - DNA, 14166 bp, Homo sapiens
tccaaactgttcaaaatgatgaacgaagatgcagctcagaaaagcgacagtggagagaagttcaacggcagtagtcagaggagaaaaagacccaagaagtctgacagcaatgcaagcttcctccgtgctgccagagcaggcaacctggacaaagttgtggaatatctgaaggggggcatagacatcaatacctgcaatcagaatggactcaacgctctccatctggctgccaaggaaggccacgtggggctggtgcaggagctgctgggaagagggtcctctgtggattctgccactaagaagggaaataccgctcttcacattgcatctttggctggacaagcagaagttgtcaaagttcttgttaaggaaggagccaatattaatgcacagtctcagaatggctttactcctttatacatggctgcccaagagaatcacattgatgttgtaaaatatttgctggaaaatggagctaatcagagcactgctacagaggatggctttactcctctagctgtggcactccagcaaggacacaaccaggcggtggccatcctcttggagaatgacaccaaagggaaagtgaggctgccagctctgcatattgccgctaggaaagacgacaccaaatctgccgcacttctgcttcagaatgaccacaatgctgacgtacaatccaagatgatggtgaataggacaactgagagtggttttacccctttgcacatagctgcacattacggaaatgtcaacgtggcaactcttcttctaaaccggggagctgctgtggacttcacagccaggaatggaatcactcctctgcatgtggcttccaaaagaggaaatacaaacatggtgaagctcttactggatcgaggcggtcagatcgatgccaaaactagggatgggttgacaccacttcactgtgctgcacgaagtgggcatgaccaagtggtggaacttctgttggaacggggtgcccccttgctggcaaggactaagaatgggctgtctccactacacatggctgcccagggagaccacgtggaatgtgtgaagcacctgttacagcacaaggcacctgttgatgatgtcaccctagactacctgacagccctccacgttgctgcgcactgtggccactaccgtgtaaccaaactccttttagacaagagagccaatccgaacgccagagccctgaatggttttactccactgcacattgcctgcaagaaaaaccgcatcaaagtcatggaactgctggtgaaatatggggcttcaatccaagctataacagagtctggcctcacaccaatacatgtggctgccttcatgggccacttgaacattgtcctccttctgctgcagaacggagcctctccagatgtcactaacattcgtggtgagacggcactacacatggcagcccgagccgggcaggtggaagtggtccgatgcctcctgagaaatggtgcccttgttgatgccagagccagggaggaacagacacctttacatattgcctcccgcctgggtaagacagaaattgtccagctgcttctacaacatatggctcatccagatgcggccactacaaatgggtacacaccactgcacatctctgcccgggagggccaggtggatgtggcatcagtcctattggaagcaggagcagcccactccttagctaccaagaagggttttactcccctgcatgtagcagccaagtatggaagcctggatgtggcaaaacttctcttgcaacgccgtgctgccgcagattctgcagggaagaacggccttaccccgctccatgttgctgctcattatgacaaccagaaggtggcgctgctgttactggagaagggtgcttcccctcatgccactgccaagaatggctatactccgttacatattgctgccaagaagaatcaaatgcagatagcttccacactcctgaactatggagcagagacaaacattgtgacaaagcaaggagtaactccactccatctggcctcgcaggaggggcacacagatatggttaccttgcttctggataagggagccaatatccacatgtcaactaagagtggactcacatccttacaccttgcagcccaggaagataaagtgaatgttgctgatattctcaccaagcatggagctgatcaggatgctcatacaaagcttggttacacacctttaattgtggcctgtcactatggaaatgtgaaaatggtcaactttcttctgaagcagggagcaaatgttaacgcaaaaaccaagaacggctacacgcctttgcaccaggccgctcagcagggtcacacgcacatcatcaacgtcctgctccagcatggggccaagcccaacgccaccactgcgaatggcaacactgccttggcgattgctaagcgtctgggctacatctccgtggtcgacaccctgaaggttgtgactgaggaggtcaccaccaccaccacaactattacagaaaaacacaaactaaatgtacctgagacgatgactgaggttcttgatgtttctgatgaagagggtgatgacacaatgactggtgatgggggagaataccttaggcctgaggacctaaaagaactgggtgatgactcactacccagcagtcagttcctggatggtatgaattacctgcgatacagcttggagggaggacgatctgacagccttcgatccttcagttccgacaggtctcacactctgagccatgcctcctacctgagggacagtgccgtgatggatgactcagttgtgattcccagtcaccaggtgtcaactctagccaaggaggcagaaaggaattcttatcgcctaagctggggcactgagaacttagacaacgtggctctttcttctagtcctattcattcaggtttcctggttagttttatggtggatgcccgaggtggtgctatgcgaggatgcagacacaatgggctccgaatcattattccacctcggaaatgtactgctccaacgcgagtcacctgccgactggtcaagcgccacagactggcaacaatgcctccaatggtggaaggagaaggcctggccagtcgcctgatcgaagttggaccttctggtgctcagttccttggtaaacttcacctgccaacggctcctcccccacttaatgagggagaaagtttggtcagccgcattcttcagctggggcctcctggaaccaaattccttgggcctgtgatcgtggagatccctcactttgcggcccttcgaggaaaggaaagggaactggtggtcctgcgcagtgagaatggggacagctggaaagagcatttctgtgactacactgaagatgaattgaatgaaattcttaacggcatggatgaagtactggatagcccagaagacctagaaaagaaacgaatctgccgcatcatcacccgagacttcccacagtactttgcagtggtgtctcgtatcaaacaggacagcaatctgattggcccagaaggaggtgtactgagcagcacagtggtgccccaggtgcaggccgtcttcccagagggggcactcaccaagcggatccgcgtaggcctgcaggctcaacctatgcacagtgagctggttaagaagatcctaggcaacaaagctaccttcagccctatagtcactttggaacctagaagaagaaaattccacaaaccaattaccatgaccattcctgtccccaaagcttcaagtgatgtcatgttgaatggttttgggggagatgcaccaaccttaagattactatgcagcataacaggtggaaccacccctgcccagtgggaagatattacaggaactacgccattaacatttgtcaatgaatgtgtttcctttacaacaaacgtgtctgccaggttctggctgatagattgtcgacagatccaggaatccgttacttttgcatcacaagtatacagagaaattatctgcgtaccttatatggccaaatttgtagtgtttgccaaatcacatgaccccattgaagccaggttgaggtgtttctgcatgactgatgataaagtggataagacccttgaacaacaagaaaattttgctgaggtggccagaagcagggatgtggaggtgttagaaggaaaacccatctacgttgattgtttcggcaacttggtaccattaactaaaagtggccagcatcatatattcagtttttttgccttcaaagaaaatagacttcctctatttgtcaaggtacgcgatacgactcaggaaccttgcggacgactatcatttatgaaggagccaaaatccacgagaggcctggtgcatcaagctatttgcaacttaaacatcactttgccgatttatacaaaggaatcagagtcagatcaagaacaggaggaagagatcgatatgacatcagaaaaaaatgatgagacagaatctacagaaacatctgtcctgaaaagtcacctggttaatgaagttcctgtcctagcaagtccggacttgctctctgaagtttctgagatgaaacaagatttgatcaaaatgaccgccatcttgaccacagatgtgtctgataaggcaggttctattaaagtgaaggagctggtgaaggctgctgaggaagagccaggagagccttttgaaatcgttgaaagagttaaagaggacttagagaaagtgaatgaaatcctgagaagtggaacctgcacaagagatgaaagcagtgtgcagagctctcggtctgagagaggattagttgaagaggaatgggttattgtcagtgatgaggaaatagaagaggctaggcaaaaagcacctttagaaatcactgaatatccatgtgtagaagttagaatagataaagagatcaaaggaaaagtagagaaagactcaactgggctagtgaactaccttactgatgatctgaatacctgtgtgcctcttcccaaagagcagctgcagacagttcaagataaggcagggaagaaatgtgaggctctggctgttggcaggagctctgaaaaggaagggaaagacatacccccagatgagacacagagtacacagaaacagcacaaaccaagcttgggaataaagaagccagtaagaaggaaattaaaagaaaagcagaaacaaaaagaggaaggtttacaagctagtgcagagaaagctgaacttaaaaaaggtagttcagaagagtcattaggtgaagacccaggtttagcccctgaaccccttcccactgtcaaggccacatctcctttgatagaagaaactcccattggttccataaaggacaaagtaaaggcccttcagaagcgagtggaagatgaacagaaaggtcgaagcaagttgcccatcagagtcaaaggcaaggaggacgtgccaaaaaagaccacccacaggccacatccagctgcgtcaccctctctgaagtcagagagacatgcgccagggtctccctcccctaaaacagaaagacactctactctttcctcttccgcaaaaactgaaaggcaccctccagtatcaccatcaagtaaaactgagaaacactcacctgtgtcaccctctgcaaaaacggaaagacattcacctgcgtcatcatcgagtaaaactgagaaacactcacctgtatcaccctcgacaaaaactgaaaggcactctcctgtgtcatctacaaaaacagaaagacacccacctgtttcgccttcaggcaaaacagacaaacgtccacctgtatcgccctccgggaggacagaaaaacacccgccagtatcgcctgggagaacagaaaaacgcttgcctgtttcaccctccggaagaacggacaagcaccaacctgtatcaacagctgggaaaactgagaagcacctgcctgtgtcaccttctggcaaaacagaaaagcaaccacctgtatcccccacttcaaaaacagagaggattgaggaaaccatgtctgttcgggagctgatgaaggctttccagtcaggtcaggacccttctaaacataaaactggactctttgagcacaaatcagcaaaacaaaagcagccacaagagaaaggtaaagttcgggtagaaaaagaaaaggggccgatactaacccagagagaagctcagaaaacagagaatcagacaatcaaacgaggccagagactcccggtaacgggcacagcagaatccaaaagaggagttcgtgtttcctccataggagttaagaaagaagatgcagctggaggaaaggagaaagttctcagccacaaaatacctgaacctgttcagtcagtgcctgaagaagaaagccacagagagagcgaagtgcccaaagaaaagatggctgatgagcagggagacatggatctacagatcagcccagataggaaaacctccactgacttctctgaggtcattaagcaagagttggaagacaatgacaaataccaacaattccgcctgagtgaggagacagaaaaggcacagcttcacttagaccaagtactcactagtcctttcaacacaacatttccactcgactacatgaaagatgagttccttccagctctgtctttacaaagcggtgctttagatggcagttctgaaagcctaaagaatgagggggtagccggctctccgtgtggcagcctgatggaggggacccctcagattagttcagaagaaagctataagcatgaaggcctagcagagacccctgagacgagcccagaaagcctttctttctcaccaaagaaaagtgaggagcaaactggggaaacaaaggaaagcaccaagacagaaaccaccacagaaattcgttcagaaaaagagcatcccacgaccaaagacattactggtggctctgaagagcgaggtgccacagtcactgaggactcagagacctctactgagagttttcagaaagaggccactctaggctctcccaaagacacaagccctaaaagacaagatgattgcacaggcagctgtagtgtagcattagctaaagagacacctacaggactgactgaggaggcagcctgtgatgaaggtcaacgtacctttggtagttcagcccacaagacacaaactgatagtgaggttcaagaatccacagccacctcagacgagacaaaggccttgccgctgcctgaggcttctgtaaagacagatacaggaactgaatcaaaacctcagggagtcattagaagtccccaagggttagaacttgcactccctagccgagatagcgaagtcctcagcgctgtggctgatgactcattagcagtgagccacaaagactctctggaagccagccctgtgctagaagataactcttcacacaaaacccctgattctctggagccaagtcctctgaaagaatccccttgccgtgactctctggaaagcagccctgttgaaccaaagatgaaggctggaatttttccaagtcactttcctcttcctgcagctgttgccaaaacagaactcttgacggaagtggcctctgtgcggtcccggctactccgagaccctgatggcagtgctgaggatgacagtcttgagcagacatcgctcatggagagctcagggaagagccccctttctcctgacacccccagctctgaagaagtcagctatgaggttacacccaaaaccacagatgtaagtacaccaaaaccagctgtgattcatgaatgtgcagaggaggatgattcagaaaacggggagaaaaagaggttcacacctgaagaggagatgtttaaaatggtaaccaaaatcaaaatgtttgatgaacttgaacaagaagcaaagcagaaaagggactacaaaaaagaacccaaacaagaagaatcttcttcatcttctgacccagatgctgactgttcagtagatgtggatgaaccaaaacatacaggcagtggggaggatgaaagtggtgtccctgtgttagtaacttcggagagcaggaaggtgtcttcctcctcagaaagtgaacctgagttggcacagcttaaaaaaggtgctgactcaggccttttaccagaaccagtgattcgagtacaacctccttctccacttccatcaagcatggactccaattccagtccagaagaagtacaattccagcctgtcgtttccaaacaatatactttcaagatgaatgaagatactcaggaagagccaggcaaatcagaagaagaaaaagattctgaatcccatttagctgaagaccgtcatgctgtttccactgaggctgaagacaggtcttatgataagctaaacagagacactgatcagccaaaaatctgtgatggccatggatgtgaggccatgagtcctagcagctcagctgctcctgtctcttcaggtctacagagtccgactggtgatgatgttgatgaacagccagtcatctataaagaatcattagctctccaaggcactcatgaaaaagacacagagggagaagagcttgatgtttctagagcagaatctccacaagcagattgccccagtgaaagcttttcatcttcatcctctttgcctcattgtttggtatctgaaggaaaagaattagatgaagacatatctgccacatcttctattcaaaaaacagaggtcacaaaaactgatgaaacatttgagaacttaccaaaggactgcccctctcaagactcatccattactactcaaacagatagattttccatggatgttcccgtgtctgacctagctgagaatgatgaaatctatgatccacaaatcactagcccttatgaaaatgtcccttcccaatcttttttctctagtgaagaaagcaaaacccaaacagatgcaaatcacaccacaagttttcactcttctgaagtgtattctgttaccatcacatcccctgttgaagacgttgtagtggcaagctcctctagtggaactgttttaagcaaagaatctaattttgagggccaggacataaaaatggaatcccaacaggaaagtaccttgtgggaaatgcaatcagacagtgtctcttcatctttcgagcctactatgtccgctacaacaacagttgttggtgaacaaataagcaaagtcatcatcacaaaaactgatgtggattctgattcttggagtgaaattcgggaagacgatgaagcctttgaggctcgtgtgaaagaggaagaacaaaagatatttggtttgatggtagacagacaatcacagggtaccacccctgacaccactcctgctaggaccccaactgaagaggggaccccaacaagtgagcaaaacccatttctgtttcaggaaggaaaattgtttgaaatgacccgaagtggtgccattgatatgaccaaaaggtcctatgcagatgaaagttttcactttttccaaattggtcaagaatccagggaagagactctctctgaagatgtgaaagaaggggctactggggctgatcccctaccgctggagacatcagctgaatcactagcactttcagaatcaaaagaaacagtggatgatgaggcagacttacttccagatgacgtgagtgaggaagtagaggaaatacctgcttcggatgctcaacttaactcccaaatggggatttcagcctccactgaaacacctacaaaagaggctgttagtgtagggaccaaggacctccccaccgtgcaaacgggtgatatacctcctctctctggtgtaaagcagatatcctgccccgactcttctgaaccagctgtacaagtccagttagatttttccacactcaccaggtctgtttattcagataggggtgatgattctcccgattcttccccagaagaacagaaatcagtaatcgagattcctactgcacccatggagaatgtgccttttactgaaagcaaatccaaaattcctgtaaggactatgcccacttccaccccagcacctccatctgcagagtatgagagttcagtttctgaagattttctatccagtgtagatgaggaaaataaggcggatgaagcaaaaccaaagtccaaactccctgtcaaagtacccctccaaagagttgaacagcagctctcagatctagacacctctgtccagaagacagtggctcctcagggacaggacatggcaagcatcgcaccagataatagaagcaaatctgaatctgatgctagttctttggattcaaagaccaaatgcccagtaaaaacccgaagttacactgagacagaaacagagagcagagagagggccgaggaacttgagttagaatcagaagaaggggccacaagaccaaagatacttacatcccgattgccagttaagagcagaagcactacatcttcctgcagggggggcacgagccccacaaaagaaagtaaggagcatttctttgacctttacagaaattccatagaattctttgaggagattagtgatgaggcttccaaattagtggataggctgacacagtcagagagggagcaggaaatagtttcagacgatgaaagtagtagtgccctggaagtatcagtaattgaaaatctgccacctgttgagaccgagcactcagttcctgaggacatctttgacacaaggcccatttgggatgagtctattgagactctgattgaacgcatccctgatgaaaatggccatgaccatgctgaagatccacaggatgagcaggaacggatcgaggaaaggctggcttatattgctgatcaccttggcttcagctggacagaattagcaagagaactggatttcactgaggagcaaattcatcaaattcgaattgaaaatcccaactctcttcaagaccagagtcatgcactgttgaagtactggctagagagggatgggaaacatgctacagataccaacctcgttgaatgtctcaccaagatcaaccgaatggatattgttcatctcatggagaccaacacagaacctctccaggagcgcatcagtcatagttatgcagaaattgaacagaccattacactggatcatagtgaagggttctcggtacttcaagaggagttatgcactgcacagcacaagcagaaagaggagcaagctgtttctaaagaaagtgagacctgcgatcaccctcctatcgtctcagaggaagacatttctgttggttattccacttttcaggatggcgtccccaaaactgagggggacagctcagcaacagcactctttccccaaactcacaaggagcaagttcaacaggatttctcagggaaaatgcaagacctgcctgaagagtcatctctggaatatcagcaggaatattttgtgacaactccaggaacagaaacatcagagactcagaaggctatgatagtacccagctctcccagcaagacacctgaggaagttagcacccctgcagaggaggagaagctgtacctccagaccccaacatccagcgagcggggaggctctcccatcatacaagaacccgaagagccctcagagcacagagaggagagctctccgcggaaaaccagcctcgtaatagtggagtctgccgataaccagcctgagacctgtgaaagactcgatgaagatgcagcttttgaaaagggagacgatatgcctgaaatacccccagaaacagtcacagaagaagaatacattgatgagcatggacacaccgtggtaaagaaggttactaggaaaatcattaggcggtatgtatcctctgaaggcacagagaaagaagagattatggtgcagggaatgccacaggaacctgtcaacatcgaggaaggggatggctattccaaagttataaagcgtgttgtattgaagagtgacaccgagcagtcagaggacaacaatgagtaaagccatcacacagaagagggctgtggtgaaggaccagcatggaaaacgcattgacttggagcacctggaggatgtaccagaagcactagaccaggacgacctccagcgcgatctccagcagctccttcggcatttctgcaaggaggacttgaagcaagaggccaagtgaggggctgcccagttctcacaccagaaaccacacattcactcaatatgcagcttcctgtttcagtaggggagtgacctaactggcctaattaatgggataccccgacatttccactgttagcaaatatacggcattttgctttagttttcccccatcctctttaactataaagctaatttgtgaccaaagatggcatccttcatactggatgctgtatccaatactttgttgtgtctgtgctaacctgggaactggccacctccattgttctttgcttctgcacaagatccatgaaaatccattgatcagaagaacttcacctgcagacctcttcaagtgacactatgtaggaatccttccaaggaatatctatgtacaatgtatatagctgaaatgctcagatgaacaacatattaaaattaaaaccactgcctattgtaactacactgggcatcagaataaaaggcctctagaaattgctgaacaatggttaattaagatattgctaacacaatcgagtgataatacagttttactgcaaaagaagcacttcaaacctattatgtccttagaacttccagagtagccactgctcccagttaaaggtgggtcagtagccttgcagaactgtcctgagaagttattgctggtgctggccagccatggcttaggactccaacagccactctgagggaggggagaagggagcagaggccacgcagaatgaaccgatggggtattcagttgctggcagctacattgtgtggcattctagcatcttcaggtctttagatcttggacaagttggcagggtattttaaaagctataactactgtagttttccagttttcattgctgctttagcaaaccacgctgtcttacagtggtactttcttctggccactgcactgtagataattcattggaaacaagatttacccactacataaaaggttaaactccttcagtatgttggagtggtttctttttttttttctttctttcttttttttcttcaggtttatatcttctctaatacctgcatgtggcgtttaaaaatcaagaccacggtcaaacccctcttctaatcacattaattgtttccattctttttaccctgagtgagcacttttcactttccagctaggtctgtttttcagcttgcagacaagattgagaaatccttgaaaatttggttttggttaaaatttttggtttatttatttgaaatccacactcccttggaaactcttaagtgcatttgtgcacttctgtttgtttgtctcaaagaagggactgtaacaatctgagtaatttccatgtcctcttccttattcctctagtggttgaagctgtgtagcattttaacatatatatattcacaaatatattcatataaacagtatacattttgaatcagtcatttgttaaagaaaagtatattcaatgaagatgaaatttaaataaaaaaggacagagtctatcctccagggattgaacattttccaattatctggtcttttcctgttgtgcaaaaatgactcattgctccgaatgtcaaaaacaaatgcgacaaacaatggcacttcatcatttaaagtaatgttgccaagagaaaaaatttcctgggagggaggtttcccacaagccaaatctcctaagcctcaaatgctagcactttttggcagttggataggaaatgagacattctttggcagccaaaataagagaggccgatggtgaaactttttgagacaccctatggccttcttgtcaaaaccttcactggagctcaagaaaagcatttctgttgtgttatttgcagtgcagatgatgtctgtgtaacaacataatggttattcacctttttttgattttgatttttgctgtgttatcaaaaacttgaatactgtgagaagaagtgaattttcagttgacgaatcagcatcttgttcccatggtgataacactaattgaatatatctatgagggcatgtattagttaatggaaaaaaaaatacaacactaacaatacatagctgcaatgtgtacaatggctgatttaattaaataaaatgtacaagtgttaaaaaaaaaaaaaaaaaaa

SEQ ID NO: 12360 - DNA, 2048 bp, Homo sapiens
cgtcaacatgagttgggcctggggcagatgaggctggctggcggggcgggcagcatggttcactccagcatgggggctccagaaataagaatgtctaagcccctggaggccgagaagcaaggtctggactccccatcagagcacacagacaccgaaagaaatggaccagacactaatcatcagaacccccaaaataagacctccccattctccgtgtccccaactggccccagtacaaagatcaaggctgaagaccccagtggcgattcagccccagcagcacccctgccccctcagccggcccagcctcatctgccccaggcccaactcatgttgacgggcagccagctagctggggacatacagcagctcctccagctccagcagctggtgcttgtgccaggccaccacctccagccacctgctcagttcctgctaccgcaggcccagcagagccagccaggcctgctaccgacaccaaatctattccagctacctcagcaaacccagggagctcttctgacctcccagccccgggccgggcttcccacacagccccccaaatgcttggagccaccatcccaccccgaggagcccagtgatctggaggagctggagcaattcgcccgcaccttcaagcaacgccgcatcaagctgggcttcacgcagggtgatgtgggcctggccatgggcaagctctacggcaacgacttcagccagacgaccatttcccgcttcgaggccctcaacctgagcttcaagaacatgtgcaaactcaagcccctcctggagaagtggctcaacgatgcagagactatgtctgtggactcaagcctgcccagccccaaccagctgagcagccccagcctgggtttcgacggcctgcccggccggagacgcaagaagaggaccagcatcgagacaaacgtccgcttcgccttagagaagagttttctagcgaaccagaagcctacctcagaggagatcctgctgatcgccgagcagctgcacatggagaaggaagtgatccgcgtctggttctgcaaccggcgccagaaggagaaacgcatcaacccctgcagtgcggcccccatgctgcccagcccagggaagccggccagctacagcccccatatggtcacaccccaagggggcgcggggaccttaccgttgtcccaagcttccagcagtctgagcacaacagttactaccttatcctcagctgtggggacgctccaccccagccggacagctggagggggtgggggcgggggcggggctgcgccccccctcaattccatcccctctgtcactcccccacccccggccaccaccaacagcacaaaccccagccctcaaggcagccactcggctatcggcttgtcaggcctgaaccccagcacgggccctggcctctggtggaaccctgccccttaccagccttgatggcagcgggaatctggtgctgggggcagccggtgcagccccggggagccctggcctggtgacctcgccgctcttcttgaatcatgctgggctgcccctgctcagcaccccgcctggtgtgggcctggtctcagcagcggctgcggctgtggcagcctccatctccagcaagtctcctggcctctcctcctcatcctcttcatcctcatcctcctcctcctccacttgcagcgagacggcagcacagacccctggaggtccaggggggcccgaggcagggtccaaacctgagtgagggccagccatgcctcccctcccattcctctggtccctgccttggtcccttgcctgggaagaggggcaggaggccagtggtggggacgcagagggtcctcagagcaggagtgacaagggaggaaagaccaaaaaaacaaccaaccaaaaaaaaaaaaaaaaaaggaaagaaactaaccaacaaaagagaaaaccaaaaataatcacaacagaaaccagctgccccaaaggaaccagaggtgaaaaacaaacaaaaaaaaccaaaaacaaaccaaaaaaaaaaaaaaacctctaccccctctagagcc

SEQ ID NO: 12361 - DNA, 6470 bp, Homo sapiens
cgcagaaccgaggtcgccgagtgatgatgttgtgaagtcgcccgcctgtccctgccacgcccgggcggttgctggcagtgggagcagcggcagcagcttcggctgctgctttcaggctgccgctgcattaggggcttcctgaggaaacgcgggcggacgacagaggatgccgaaccactccagtcatgactgtccaaagtatgataatcacatgagagtgctcgttgctacggatgtcatttgactcatcagagaaaatctgtctaaaagaaaatatccatgtgaccaaatccatttcattattgaatggcttgatggatttcctttactctgattcataccaaagctgtccttctcaaccaaagcaagaaaggatcctgcatgagtcaatcccagaatgcaatttttacatcaccaacaggtgaagaaaacctcatgaatagcaatcacagagactcggagagcatcactgatgtctgctccaatgaggatctccctgaagttgagctggtgagtctgctagaagaacaactaccacagtataggctaaaagtagacactctctttctatatgaaaatcaagactggactcagtctccacaccagcggcagcatgcatctgatgctctctctccagtccttgctgaagagactttccgttacatgattctaggcacagacagggtggagcagatgaccaaaacttacaatgacatcgacatggttacacatctcctggcagagagggatcgtgatctggaactcgctgctcgaattggacaagctctcttaaagcggaaccatatcttatctgagcagaacgaatccctggaggagcaattgggacaagcctttgatcaagttaatcagctgcagcatgagctatgcaagaaagatgagttacttcgaatcgtctccattgcttctgaagaaagtgaaactgattccagctgttctacacctcttcggttcaatgagtcctttagcttatctcaagggttgctgcagttggaaatgctgcaagaaaagctcaaggaactggaagaagagaatatggctcttcgatccaaggcttgtcacataaagacagaaactgttacctatgaagaaaaggaacaacagcttgtcagcgactgtgttaaagaacttcgtgaaacaaatgctcagatgtccagaatgactgaagaattgtcagggaagagtgatgagctgattcgataccaagaagagctttcctctcttttgtcacagattgtagaccttcagcataaacttaaagaacatgtgattgagaaggaagaactaaaacttcacctgcaagcttccaaagatgcccaacggcaactgacaatggagctgcacgagttacaagacaggaatatggagtgtctaggaatgttacatgaatcccaagaagaaataaaggaacttcgtagtagatctggccctactgctcatctctacttctcccaatcatatggagcttttactggggaatctttggcagctgagattgaggggactatgcgtaaaaagctgagtttggatgaggaatcttctctctttaaacaaaaagcccaacagaagcgggtatttgataccgtcaggattgccaatgacacacggggccgctctatctcattcccagctctgttacccattccaggctccaaccgttcaagtgtcatcatgacagcaaaaccttttgagtctggtcttcagcaaacagaggacaaatcactcctgaaccaggggagcagctcagaggaggttgcagggagctcccagaagatgggccaaccaggaccctcaggagatagtgatttggctacagcactgcatcgccttagcttgcgtcgacaaaactatttaagtgagaagcagttctttgctgaagaatggcagcggaagatccaggttctggcagaccagaaggaaggagttagtggctgtgtcaccccgacagagagccttgcctctctctgcaccacccagtcagagatcacagacctcagcagtgccagttgccttcgaggttttatgccagaaaaattacaaattgtcaagccccttgaaggatcacaaactctgtatcactggcagcagcttgctcaaccaaacttgggaaccatccttgatccacgaccaggtgtcattactaaaggctttacccagttgcccggggatgctatttatcacatctcagatttagaagaggatgaagaggagggtattacttttcaggttcagcaacctcttgaagtggaagagaaactttcaacatccaagccagtaacagggatcttcctgccacccattacttcagcaggtggaccagttacagttgcaaccgccaacccaggaaagtgcctgtcgtgcacaaactcaacattcactttcaccacctgtagaatattacatccctctgacatcactcaggttacccccagctctgggttcccttcattatcctgtggaagtagcggtagcagttcatccaacacggctgtgaattctcctgccttgtcctatagactcagcattggtgagtccatcaccaaccgacgagattccactacaaccttcagtagcaccatgagcttggccaaacttctacaagagcgaggcatctctgccaaagtgtaccacagcccaatttcagagaaccccctccagcctctccctaaatccctggctatcccttccacaccaccaaattcaccatctcactcaccttgcccttctcctttaccctttgagcctcgagtgcatctctctgaaaattttttggcctctcgaccagctgagacattcctccaggagatgtatggcttgagaccctcccggaaccctcctgatgttggccagttgaagatgaacttagtggacaggctgaagagactggggatagccagagtggtcaagaaccctggtgcccaagagaatggaagatgccaggaggcagaaattggtcctcaaaaaccagattctgctgtttatttaaattcaggtagcagtttattaggtggactaaggaggaatcagagtcttccagtcataatgggtagctttgctgccccagtttgcacatcctcacccaaaatgggtgtcctgaaggaggactgaggttcagcagttaactgaccttttatacaagttagcacatgaaggatagatatgcactgaaacatgtggtctggtctgacttgagagaaaaggaatgttgcacaagggttgtgaatgtgaaagggggaatggaggaatggaaataaaattgggatgagccctaatggaggaagtcgggcaaattgaaagtataaatgaatgggccatgagtgttcagagggagaaaagaaaggtttaatatactccttcagttgagttttcttgtcttgaacataaaaagtgaatacaaataaattcagtaatactaaaacatacagagatactgaacttgctggcacatttacttctggtaagcataaagcagagagaacccaggttagaaggatgggaagagaaaaggagcagttttattgcttatagaaagccgttctgaggggttggtggggtaagctcagtctattactgagacaatagtgagatggcttatatgtttcccctgttaatatctggttaaattatgtatccatcaaatggtatgctcgcagcattagcaaaattaggagtttcatctttttcattgaatcacaggtggagactcctattttcctttctgttttcaggcctttgagcccctgggagcccaaataccactcaattattttgtatttatgattaataaaagttcattttttaaatttgtatttttatacaacctccaaaaaaaaaaacaactgggtagagggtgggagggatttacttttaagaggcaaaatgtgagtaaattgaaaccaagaaaacttgtttttagaatatttcgtctgaataagtacagtagccaaggaatacaaacctaattgcatgtttttaaaaattccttggaggctggaaggggttaagccagaagtgcaatcaataggaattagggaatgttgtatatttatatatgtaaactttttttgtaagaaaagttggtgacaactaaaccaactttttccaaagtgcgctatgcatatttttaatgaaagatgacatgtatttgcacaaaaattctcaggcacattaaattattgtaaactgaagtaaaacccgggtgcttgctttgagattgtggttttttcttcctaatgtaaaataaaataaaacacatctgccttcttgatatttatagaattagagaataaactttttaatgggggagtcaaagctttttctttttctctaaggttcttttttttattcaaactgtatgaaatggcaaagtgaggctctggggttagatttcagcattcagcagttgacacaggctaagaaatggaaagaagtagatctgttttttctcaatgttgctgagcaaagtctgcttctcatcagatgacgtggctttgtctagacagcacgcagttcagaaagaaatgtctttatacaaaagacatgatagagaaaagatgagagaggggactaattattttgtttatgaaaatggcaagtaaattacttgatctttttggtgcttaatttgcaaatgttttgttcctttgtcctgacttaaaggcagttttctgaagaactcttgactcttgctcctatggttcccataggcacacctattcccaggccaaggagagtccttcctctccccttttgaggcatccccgccatccccccacttagagctatgtgctcaaaaagccaacatgaatgcagtggtaaaaatttgttagtttcttatactttttagaatctctcaataaaatttttctaaataaattccacaaaaacaaagggtgaagatggtctctccctttcgttccccttcactcagttgtgctgaggtcaatagagtgtagagtttcagaaaggattccagcaggtttatatgtgaatataagtgtccctgaatggggcaggcattaaatagaagaatccctgctgtttaaatttcccgcatattccaattcacttttaaaaaataccatttgaatttgtatttcataaagtgactctggggtgcttactttagtcaattcttaaaattttttatttgttccctaagaaagtaattactgtttctgttgcctggacagttacagtttccaggaaacatcaggaagtaggaaactgtagggccagagagtagtacaacgttaaattgtccgatttatgtgtattacttaaagctataaattgaactagatcttgccgtgctctgtattgagtataatttgtatacttttttataattaatgactaaatgatcactttggaggcagggtggtgggggtgtattagcagccaaataagcatatctgatcaaaaagaaccaggcttagattttttttaagtacattgatgttgatgttccaccagaaacaccttaagtgtatactgttgtgtaatgtctctagaaaggaatcctgtcttaaaactgggttttgctgttttttgaagtttctacctaaaatcatttttggtatatcctgataatctctataatactagaattgtctgcaaaatatagtaagaagaattggagcctaatagctgattcctcccaatttatctgttatgttttgtcactattcacattttagtcttttctacgataaaaattgtatgtgtactttcatgccagtataggaaacctcaatcttttttttttttcgcctttaagaaggttttcagtgattatacctcaggtatttctgagtgtcctattgtctaataggagaaatatcttcccgagctcagaattaaaagttctcctaaattatgaagatcccaaatcttatgtaaataaccttaggcatgagtccttagggagaagttaatgaccattgttaaagtgcttttttagaaaatgttgtgctgtatgttcttgatttgacataaatgaatagactttggcaagggaggaaataagttaaaaggcagcttacaagagcctattccctataaagggtataattttacacagtactcaaagcttgttatcttttctgaccattttagtacagaattagtacttggtggttactaacatcaacttgtgacatctagaactagggctcttagtgtttagtgggccacttctctgatgtcagatgcatgcagacctgtactccacatgcaacccaacagcagtgcagtgtgataactgagcggtcgcatggcagaggacatccccctcagagtgggcacaagtgccctctagggcagccaggggaatactattgttcgatacctgggatttgactttgtcaaacagctctttgtgcccctatctttgttttgtcaaatgtagatcagttaataaacatgagtagcttgaattttcaaaaaaaaaa

SEQ ID NO: 12362 - DNA, 1770 bp, Homo sapiens
tcagtggtagcgcggggactggctgggaagcggtcggtcgagtgtggcctgtgtggactcgcatcttgcccgaagccgggcggaggagagctcaagctaagggtgatcagcccatgacctaaacctccagacaaaataaaacggaaaatttgctagaatcaagaatgatggatccatgttcagttggagtccagcttcgtactacaaatgagtgccataaaacctactatactcgtcacacaggttttaagactttgcaagaattgtcatcaaatgatatgcttttacttcaacttagaactggaatgacactttctgggaacaatacaatttgctttcatcatgtaaaaatttacattgacagatttgaggatttacagaagtcatgttgtgacccatttaacatacacaagaaattagccaaaaaaaatttgcatgtaattgacttagatgatgccacttttctgagtgctaaatttggaagacagcttgtacctggttggaagctttgtccaaaatgcacacagataatcaatggaagtgtggatgttgatactgaagaccgccagaaaaggaaacctgagtcagatggaagaactgctaaagctttgaggtcattacaatttacgaatccaggaaggcaaactgaatttgctccagaaactggtaaaagagaaaaaagaaggcttacaaaaaatgcaaccgctggttcagacagacaagtgataccagcaaagagtaaggtctatgatagccagggtctcctgatttttagtgggatggacctctgtgactgcctggatgaagactgcttaggatgtttctatgcttgtcctgcctgtggttctaccaagtgtggagctgaatgccgctgtgaccgcaagtggctgtatgagcaaattgaaattgaaggaggagaaataattcataataaacatgctggataatctgcggtaccaaactatggagcctttaaaggtctttatttctaaaaatctgttactctaagatacattttaagcttgattatcatatgacaaagattttaaaaccatctcagtgtgccctaatttttcatcttgggtgctttaagattcactatttgatataaattcagataggctatttttcagtagtcagcgttaagcctgtctggatcaatataaacaagtagggtgtaggcagtcctctatttgcatgtttcccatgggcacaaatttcagtgacctagatttagtttaaataccagtttccttaccaggaaggaaagaaaactggtaaggaaactgttgttgttaaaatctaggttaaaattttagttagcacattgtaactgagtaattacatgaagtacaaacctctctgctagctcttcagtctacaaatcgctatgtaaataacagatatgcttcatgattgtgaccagtcatgttatttctttcaaattcttccagtggtttgtccctgtgcatctgttaattcagttcacgtacagcagagcatgtagttatgctgtctctctgtcatctacttgacattctatagaagtgaacactcgaaagaactggtcaacaaagatgaaagtgcagcaaagcaatgaaaaatgataacactggaagtgaaattttaatcaaacataaatgaatttgtagaagaagtcactgaccatgggaatgttgttcttgctgctgtgtattcataggagcttagtgaaggcaaacttaccaacacaaataagcaaagtggttgcaataaagacagatacgtccc

SEQ ID NO: 12363 - DNA, 2830 bp, Homo sapiens
gttgaaagctgctggcgcggcggggcggactccacccctgcccggcagcccagcgcctccggccgcacttccagctctctgcgcagcccgccgcgcagcccgccgccccagccatggcgaagcccctgacggaccaggagaagcggcggcagatcagcatccgcggcatcgtgggcgtggagaacgtggcagagctgaagaagagtttcaaccggcacctgcacttcacgctggtcaaggaccgcaacgtggccaccacccgcgactactacttcgcgctggcgcacacggtgcgcgaccacctggtggggcgctggatccgcacgcagcagcactactacgacaagtgccccaagagggtatattacctctctctggaattttacatgggccgaacattacagaacaccatgatcaacctcggtctgcaaaatgcctgtgatgaggccatttaccagcttggattggatatagaagagttagaagaaattgaagaagatgctggacttggcaatggtggtcttgggagacttgctgcctgcttcttggattccatggcaaccctgggacttgcagcctatggatacggcattcggtatgaatatgggattttcaatcagaagatccgagatggatggcaggtagaagaagcagatgattggctcagatatggaaacccttgggagaagtcccgcccagaattcatgctgcctgtgcacttctatggaaaagtagaacacaccaacaccgggaccaagtggattgacactcaagtggtcctggctctgccatatgacacccccgtgcccggctacatgaataacactgtcaacaccatgcgcctctggtctgctcgggcaccaaatgactttaacctcagagactttaatgttggagactacattcaggctgtgctggaccgaaacctggccgagaacatctcccgggtcctctatcccaatgacaatttttttgaagggaaggagctaagattgaagcaggaatactttgtggtggctgcaaccttgcaagatatcatccgccgtttcaaagcctccaagtttggctccacccgtggtgcaggaactgtgtttgatgccttcccggatcaggtggccatccagctgaatgacactcaccctgcactcgcgatccctgagctgatgaggatttttgtggatattgaaaaactgccctggtccaaggcatgggagctcacccagaagaccttcgcctacaccaaccacacagtgctcccggaagccctggagcgctggcccgtggacctggtggagaagctgctccctcgacatttggaaatcatttatgagataaatcagaagcatttagatagaattgtggccttgtttcctaaagatgtggaccgtctgagaaggatgtctctgatagaagaggaaggaagcaaaaggatcaacatggcccatctctgcattgtcggttcccatgctgtgaatggcgtggctaaaatccactcagacatcgtgaagactaaagtattcaaggacttcagtgagctagaacctgacaagtttcagaataaaaccaatgggatcactccaaggcgctggctcctactctgcaacccaggacttgcagagctcatagcagagaaaattggagaagactatgtgaaagacctgagccagctgacgaagctccacagcttcctgggtgatgatgtcttcctccgggaactcgccaaggtgaagcaggagaataagctgaagttttctcagttcctggagacggagtacaaagtgaagatcaacccatcctccatgtttgatgtccaggtgaagaggatacatgagtacaagcgacagctcttgaactgtctgcatgtgatcacgatgtacaaccgcattaagaaagaccctaagaagttattcgtgccaaggacagttatcattggtggtaaagctgccccaggatatcacatggccaaaatgatcataaagctgatcacttcagtggcagatgtggtgaacaatgaccctatggttggaagcaagttgaaagtcatcttcttggagaactacagagtatctcttgctgaaaaagtcattccagccacagatctgtcagagcagatttccactgcaggcaccgaagcctcggggacaggcaatatgaagttcatgctaaatggggccctaactatcgggaccatggatggggccaatgtggaaatggcagaagaagctggggaagagaacctgttcatctttggcatgaggatagatgatgtggctgctttggacaagaaagggtacgaggcaaaagaatactatgaggcacttccagagctgaagctggtcattgatcaaattgacaatggctttttttctcccaagcagcctgacctcttcaaagatatcatcaacatgctattttatcatgacaggtttaaagtctttgcagactacgaagcctatgtcaagtgtcaagataaagtgagtcagctgtacatgaatccaaaggcctggaacacaatggtactcaaaaacatagctgcctcggggaaattctccagtgaccgaacaattaaagaatatgcccaaaacatctggaacgtggaaccttcagatctaaagatttctctatccaatgaatctaacaaagtcaatggaaattgaactctagaattgtctctagaaaacatagcttcttactgaacttgaacatttttacaacattcactggtttttgttttgttagctaataatctataatagttgagtatctctgggaatggggagggaaattatatgtaatagagcttaaaaataaagtgtcaatttccaagggc

SEQ ID NO: 12364 - DNA, 4379 bp, Homo sapiens
gacggcgggagccgctgctctccggctgagggaatcagagacagctccgtccctagtggagcgcaggggaggcagaagtcatgacaggcgaggtgggttctgaggttcacctagaaatcaatgacccaaacgtcatttcacaagaggaagcagatagtccttcagatagtggacagggcagctatgaaacaattggacccttgagtgaaggagattcagatgaagagatatttgtaagtaagaagttgaaaaacaggaaggttctacaagacagtgattccgaaacagaggacacaaatgcctctccagagaaaactacctatgacagtgccgaggaggaaaataaagagaatttatatgctgggaaaaatacaaaaatcaaaaggatttacaaaactgtggcagacagtgatgaaagttacatggaaaagtctttgtatcaggaaaatcttgaagcgcaagtgaaaccttgcttagagctgagtcttcagtctggaaactctacagactttaccactgacagaaagagttccaaaaagcacatacatgataaagaaggaactgcaggaaaagcaaaagtaaaatcaaaaagaagacttgagaaagaggagagaaaaatggaaaaaattagacagctaaaaaagaaggaaacaaaaaaccaggaagatgatgtagaacagccatttaatgacagtggctgtcttcttgtggataaagacctttttgaaactgggttggaggatgaaaataactctccattggaagatgaagagtcattagaatcaataagagcagctgtaaaaaacaaagtaaaaaagcacaagaaaaaagaaccatctttggagagtggggtccattcatttgaggaaggaagtgagttatcaaaaggaaccacgaggaaggaaagaaaggcagccagattaagtaaagaagcattaaaacaactgcatagtgagactcagcgccttattcgagagtctgcactgaaccttccatatcatatgcctgagaataaaaccattcatgatttcttcaaacgtaaaccccggcccacttgccacggaaatgccatggcactattgaagtcatctaaatatcagtcaagccatcacaaagaaatcatagacactgcaaatactactgaaatgaacagtgatcaccatagtaaaggttctgagcagacaacaggtgcagaaaatgaagtggaaactaatgcactccctgtagtttcaaaggaaacccagatcattactggatcagatgagtcttgcaggaaggatttggtaaaaaatgaagagctagaaattcaggagaaacagaagcagagtgacattagaccttcacctggggacagctcagtgttgcaacaggaatccaacttcctcgggaacaatcacagtgaggaatgtcaggttggagggcttgtagcatttgaacctcatgccctggagggtgaaggcccccaaaatccagaagaaacagatgagaaagtggaagagcctgagcagcaaaataaatcatcagcagttgggccacctgaaaaagtgagacggtttactctggatagacttaagcaactgggagtagatgtttccattaaaccacggctaggtgctgatgaagattcctttgtgatacttgaacctgaaaccaacagagaactggaagccttgaagcagcgtttctggaagcatgctaatccagcagccaaacccagggctggtcagacagtgaatgtgaacgtcatagtgaaagacatgggcactgatggaaaggaagagctaaaagcagatgtggtacctgtgactttagcacctaagaagttggatggagcaagccacacaaaaccaggtgaaaagcttcaggtgttaaaagctaaactgcaagaagcaatgaaactccgaaggtttgaggagcgccagaagcgccaagcactgtttaaattagataatgaagatgggtttgaggaagaggaggaggaagaggaagaaatgacagatgagtctgaggaagatggagaagagaaggtagagaaagaagagaaagaggaagaactagaggaagaggaggagaaagaagaggaggaggaagaagaaggaaatcaggagactgcagaattccttcttagtagtgaagaaatagaaacaaaagatgaaaaagaaatggataaagaaaataatgatggcagtagtgaaattggcaaggcagttggcttcctctctgttcccaagtctctctcatcagattctactttacttctgtttaaggacagctcttccaagatgggttactttcctactgaagaaaaatcagaaacagatgaaaactcaggcaagcagcctagcaaactggatgaggatgattcatgttcattgctaacaaaggagagcagccacaatagcagctttgagctgattggctccacgattccatcctatcagccttgcaacagacaaacaggccgtgggaccagttttttccctacagcaggaggattcagatctccttcccctgggctatttcgagccagtttggtcagctcagcttctaagagttcagggaaactgtctgagccttcacttcccatagaggattcccaggatctgtataacgcctccccagagcctaagacacttttcctaggagcaggagacttccagttctgtttagaagatgacactcagagccaactgttggatgcagatgggttcttaaatgttagaaaccacaggaatcagtaccaagctttgaagcctcgattgccattggccagtatggatgagaatgccatggatgccaacatggatgagctgttggatttgtgtactggaaagttcacatctcaggctgaaaaacatctacccaggaagagtgacaagaaagagaacatggaggaacttctgaacctttgttcaggaaaattcacttctcaggatgcctccactccagcctcatcagagttaaataaacaggagaaggagagcagcatgggtgatccaatggaagaagcacttgctctttgctcaggctcttttcccacagacaaggaagaggaagacgaggaggaggaatttggagactttcggcttgtttcaaatgataatgagtttgatagtgatgaggatgaacacagtgactctggtaatgatctggcactggaagaccatgaagatgatgatgaagaagaactcctgaagcgatctgagaagttgaaaaggcaaatgaggttgaggaaatacctggaggatgaggcagaggtgtcaggaagtgatgtgggaagcgaagatgagtatgatggggaagaaattgatgaatatgaagaggacgtaattgatgaagtacttccttctgatgaggaactgcagagtcaaatcaagaaaatacacatgaaaactatgttggatgatgataagcgacagctacgtttataccaagagaggtaccttgctgatggggatctgcacagcgatggtcctgggcgaatgaggaagtttcgatggaaaaacatagatgatgcttcccagatggacttgttccacagagactctgatgatgatcagactgaagaacagcttgatgagtcagaagccaggtggaggaaggagcgaattgaacgagagcagtggcttcgggacatggcacagcaggggaaaattacagctgaagaagaagaagaaattggggaggacagtcagtttatgatactggccaagaaagttacagccaaagcactgcagaagaatgccagtcgccctatggttattcaggaatcaaagtctttgctcagaaatccttttgaagccatcagaccaggaagtgctcaacaggtgaagacaggctcactgctaaaccagcccaaagctgtgcttcagaaactggctgctctctctgaccataaccccagtgctcctcgaaattcaagaaactttgtctttcatacactttctcctgtcaaggctgaggcggcaaaggaatcgtctaagtctcaggtaaagaaaaggggtccatctttcatgacttctccttcacctaagcacctcaaaacagatgatagcacttcaggattgacgcgaagcatcttcaaatatttggagagctaacaccatcaaaggtgccaaaatctacattgagactgctttgagaagtttctagcactgaaagttggaattgacactccagccaatgatccttccttctttcataatcaatgcaataagattgcagacagaaattccagtgatttctactgcacagctctggacatctcttttcctagtattattccctgaattggccactgatttcaattctgcagtatttacaacatcaacaactcatggaatacttgggtgaggtttcctttttttttttttttttaa

SEQ ID NO: 12365 - DNA, 3470 bp, Homo sapiens
cgccattgccgcgccgcagctccaggacaggccctcgccccacgtcaacagcgtagggccggctgcccaggtttactcttacgccactgacgtaacgtcatcgtgcgggacgtggacggaagaaaaaagagagtgagcgagcgccggaatcagcccggcgtggagtgcggacccgcggtagtgccagggggcgaaggcggcggtggtgaggaagatactttggttagtgaccacatcgcagcatgttgagtcaagtttaccgctgtgggttccagcccttcaaccaacatcttctgccctgggtcaagtgtacaaccgtcttcagatctcattgtatccagccttcagtcatcagacatgttcgttcttggagcaacatcccgtttatcactgtacccctcagtcgtacacatggcaagtccttcgcccaccgcagtgagctgaagcatgccaagagaatcgtggtgaagctcggcagtgccgtggtgacccgaggggatgaatgtggcctggccctggggcgcttggcatctattgttgagcaggtatcagtgctgcagaatcagggcagagagatgatgctggtgaccagtggagccgtagcctttggcaaacaacgcttgcgccatgagatccttctgtctcagagcgtgcggcaggccctccactcggggcagaaccagctgaaagaaatggcaattccagtcttagaggcacgagcctgtgcagctgccggacagagtgggctgatggccttgtatgaggctatgtttacccagtacagcatctgtgctgcccagattttggtgaccaatttggatttccatgatgagcagaagcgccggaacctcaatggaacacttcatgaactccttagaatgaacattgtccccattgtcaacacaaatgatgctgttgtccccccagctgagcccaacagtgacctgcagggggtaaatgttattagtgttaaagataatgatagcctggctgcccgactggctgtggaaatgaaaactgatctcttgattgttctttcagatgtagaaggcctttttgacagccccccaggttcagatgatgcaaagcttattgatatattttatcccggagatcagcagtctgtgacatttggaaccaagtctagagtgggaatgggtggcatggaagccaaggtgaaagcagccctctgggctttgcaaggtggcacttctgttgttattgccaatggaacccacccaaaggtgtctgggcacgtcatcacagacattgtggaggggaagaaagttggtaccttcttttcagaagtaaagcctgcaggccctactgttgagcagcagggagaaatggcgcgatctggaggaaggatgttggccaccttggaacctgagcagagagcagaaattatccatcatctggctgatctgttgacggaccagcgtgatgagatcctgttagccaacaaaaaagacttggaggaggcagaggggagacttgcagctcctctgctgaaacgtttaagcctctccacatccaaattgaacagcctggccatcggtctgcgacagatcgcagcctcctcccaggacagcgtgggacgtgttttgcgccgcacccgaatcgccaaaaacttggaactggaacaagtgactgtcccaattggagttctgctggtgatctttgaatctcgtcctgactgtctaccccaggtggcagctttggctatcgcaagtggcaatggcttgttactcaaaggagggaaggaggctgcacacagcaaccggattctccacctcctgacccaggaggctctctcaatccatggagtcaaggaggccgtgcaactggtgaataccagagaagaagttgaagatctttgccgcctagacaaaatgatagatctgatcattccacgtggctcttcccagctggtcagagacatccagaaagctgctaaggggattccagtgatggggcacagcgaagggatctgtcacatgtatgtggattccgaggccagtgttgataaggtcaccaggctagtcagagactctaaatgtgaatatccagctgcctgtaatgctttggagactttgttaatccaccgggatctgctcaggacaccattatttgaccagatcattgatatgctgagagtggaacaggtaaaaattcatgcaggccccaaatttgcctcctatctgaccttcagcccctccgaagtgaagtcactccgaactgagtatggggacctggaattatgcattgaagtagtggacaacgttcaggatgccattgaccacatccacaagtatggcagctcccacacggatgtcatcgtcacagaggacgaaaacacagcggagttcttcctgcagcacgtagacagtgcctgtgtgttctggaatgccagcactcgcttttctgatggttaccgctttggactgggagctgaagtgggaatcagtacatcgagaatccacgcccggggaccagtaggacttgagggactgcttactactaagtggctgctgcgagggaaggaccacgtggtctcagatttctcagagcatggaagtttaaaatatcttcatgagaacctccctattcctcagagaaacaccaactgaaaagagccaggaaaacccgggaattttccaaaaggtcttcacgttaaacttgtcttatctcaggagagagcccgctcttgtctcccagttcctggtagggtctgcctgttggaaagtgtacctggatgcttctgggctccgtttggcaatagcagtcttggctgatgtgcacagtctggctcccagctcaccctttttttttaaagtaagaaaatagttgctaccgatagggactttgccaagtccaattatcttctaggattgaaaggtgcattttccccataaaaaaggcgaggaaaacccatggctgctttgtgtcacctcagtgacttacagtcccccttggcatttagttggtactagagccagtcatccttaacaaatcttttcacattttatttctttcacatgtagtcatcttcaaaaaggaaagatttggaattttagaaaaggggcaactcttctttttagcattctcatcagaaagtcacaaaaatcgatggaatcatttccactgggaagattgaccttttgtatttatttgtggggtaaattaataagcattccagatgcttgcagcttcctgcatccaggagatgctgtgttccccgtgatgcagctggaacccaagctgcagcaggagatgcaagtttcaggatgttccccactgagctggaggaatatctacagcagtgatgcttgaaatttttgtatgaattattttgtcgtcctacccttttcctccaaaacaaaaattagaggattattttaatactttggattcttcccccttttttgagaaataaagttttttatgaaaagcctgtgcgtgaaaaaaaa

SEQ ID NO: 12366 - DNA, 9069 bp, Homo sapiens
tttctttctctcagcatctccacccaaccagcagaaaaccggtctctgaggttccaccaaaatatggaacttgattttggacactttgacgaaagagataagacatccaggaacatgcgaggctcccggatgaatgggttgcctagccccactcacagcgcccactgtagcttctaccgaaccagaaccttgcaggcactgagtaatgagaagaaagccaagaaggtacgtttctaccgcaatggggaccgctacttcaaggggattgtgtacgctgtgtcctctgaccgttttcgcagctttgacgccttgctggctgacctgacgcgatctctgtctgacaacatcaacctgcctcagggagtgcgttacatttacaccattgatggatccaggaagatcggaagcatggatgaactggaggaaggggaaagctatgtctgttcctcagacaacttctttaaaaaggtggagtacaccaagaatgtcaatcccaactggtctgtcaacgtaaaaacatctgccaatatgaaagccccccagtccttggctagcagcaacagtgcacaggccagggagaacaaggactttgtgcgccccaagctggttaccatcatccgcagtggggtgaagcctcggaaggctgtgcgtgtgcttctgaacaagaagacagcccactcttttgagcaagtcctcactgatatcacagaagccatcaaactggagaccggggttgtcaaaaaactctacactctggatggaaaacaggtaacttgtctccatgatttctttggtgatgatgatgtgtttattgcctgtggtcctgaaaaatttcgctatgctcaggatgatttttctctggatgaaaatgaatgccgagtcatgaagggaaacccatcagccacagctggcccaaaggcatccccaacacctcagaagacttcagccaagagccctggtcctatgcgccgaagcaagtctccagctgactcaggtaacgaccaagacgcaaacggaacctccagcagccagctctctacccccaagtctaagcagtctcccatctctacgcccaccagtcctggcagcctccggaagcacaaggacctgtacctgcctctgtccttggatgactcggactcgcttggtgattccatgtaaaggaggggagagtgctcagagtccagagtacaaatccaagcctatcattgtagtagggtacttctgctcaagtgtccaacagggctattggtgctttcaagtttttattttgttgttgttgttattttgaaaaacacattgtaatatgttgggtttattttcctgtgatttctcctctgggccactgatccacagttaccaattatgagagatagattgataaccatcctttggggcagcattccagggatgcaaaatgtgctagtccatgacctttcaatggaaagcttaggtgcctgcgttatatttgccctgtctaattttgcccatacagtcttccttctgtagagggctgtttacatatacagcacttaaaatgtttgtgtgggaaaaaaaaaactcattggcagatccaagaatgacaaacacaagtgccccttttctctggatctcaagaatggtggaggaccctggaaggacagcaaggcagctccccagcctcactcttcactcctgattgaggcccgggtttgttgtccagcaccaattctggctgtcaatggggagaaataaaccaacaacttataattgtgacaccagatgcttaggatcctggtgctgggttagctaagagaatagacagaattggaaaatactgcagacatttccgaagagtttataaagcacagtgaattcctggtcaatctctccactgaggcaatttggaatcaataagcaattgataatagtttggagtaagggacttcatatacctgattcctctagaaggctgtctaacataccacatgattacatgaactgtatggtatccatctatctctgttctattgaatgccttgttaacagccaacactgaaaacactgtgagaatttgttttcaggtctgacacctttcagtctctttttatagcaagaaatcaatatcctttttataaaaattcatgtctgtatttcaggagcaaactcttcaggctccttttttataaactggtgatttttcttttgtctaaaaaacacatgaagaaaatttaccaaaaaaaaaaaaaaaagcagaagaataatgtagtttagaaattatgctgtcactgccaaacagtaacctccaggagaaaacaagatgaatagcagaggccaattcaatagaatcagttttttgatagctttttaacagttatgcttgcattaataatttcaatgtggaccagacattctaattatattttaaatgaaatgttacagcatattttaagcaactctttttatctataatcctaatatttcatactgaagacacagaaatctttcacttgtctttaacattagaaaggatttctctttactaaggactgatcatttgaaatagttttcagtcttttgagatacaggtttataacactgcttttttttttctgtaatcatagcccataatggcaaagacaactaaatttaagtgaaggtcatgcatgccaattctgtgtttgcttttagcagatatgaagatttccttatttctttgtaattgtgcagatattttgaaaggcacagcattcgaagccaagctgctgtttggctactgaatggcttgcagttgttcctccactctaaatggaatgagcttgctgtgtgtgtgtgtggtggtggtgggagggggtggtgcatgtgtgtgtgtgtgtgtgcatctgcagctgcttcaaaattaggaaatactacaggacacccctgtaatggattggtggcaactgggtggcactgctgatgtgcactgtgtaggggggaacccagtggtggtggggtagctcagatgcccctagacaagcttcagatgtctgtagctaccagaaacattttcggttcaggaaaagtgagatgatggtagtactggtttctggtgaaattgaagaaccccaaatgatgaggatctctttttgccccctctcctttttttgtagacccattcaaaaccattaataagcccattttactaagcccctatttctttctagaagctcagggttttcttagtgcctcccagaacattttgtagttaattgggaaaaagtgatacttggattagggggtgtgggcataaagaatggtgggaggcctgattttaaacttcaggccagaacccccaatgactccacccatagtctcactttaggtctcatttagtccatcacctttattttaagttgaggaagtggaggctggtaaagagcaggaccagaggaagaatccagatttccttatgcttgggcctcacactagctctctgagtatttccttgattgcggtatatgtactactagaaaataccaaatggatatattttctttaggataacctttgaaccaacaatcttcaataacaatagtacatcttccatcttacttttaatcgagtataaggaaatgtttctttatggccattttggagggagcaggggatgaggcttggcatagtccaaaatttaagtctccaataattaattgcattttaaattggcccactttcaaggcaattttttttgtgtgtctgtaactgagctcctccacccctgtcattcacttccaattttacccaatccaattttagcactcaagttccattgtgttaatttctgcacggtcaacaaacatcaagtcagcaagcatttgccaccactccctatacttctccctccttcttacacacacacacacacacacacacacaatccatctcttgcttgttcctacctcctgatttttcttccctacagaaatagaaatagggacaaagaaggggaaaatgtatatattggggctgggctgaacaactaacttcataagtagtattaactaggggtaaattgagagaaaagctccttttctcttcactgttttggaaaggatagccattagcatgactgctttgtgtccttatggactttagtattagcctagattgaattatagcgttttctagctggaaggaaccttaagatcacatcatctactcctctactccaaatttctcattcttcaggccaggaaaccgagacacagaggtaaagtaatttccccaaggtcacacagctggctggggcaggattgggtttacaacccacatctcctggctcttattccagggccttttcccactaagtagtattgccttccattaggctcctgagagttatttctcagggtcatgttgcatcttggagccacatgctgctgccctgatctcagtgggaaatccacccagcaacctaatacagccccttttccctgcattcacctggttcccatccacatgggttgcagatgtccttgaagagagtgaggcattgagggccaataggagcaatggggtccctggccttgtccatctgattcaggagatcactgctccatcgtgaggagccctctgaatagccccccactgaatgcttgccttgcccaaatggaatggaggaagattgattttctccatcagttcaccttgtgtcatctcataatggttggtctttccaggctgagggaaatgtttcttgtttccagagtagaaaaagaaagagtggaacaatagctttgttcatcctaactttctgagatggcttttcaacattttaaaaaaactagtgtggctaccattcactggcaatgatttcttttagaatatgggagtaagatgagctagagaaaataacctggtctcactgtggttgccctcatccacaatgtccccaaagccatcctgctctgatgaggacaatttccaggtataagcaaggggctttgtgacaaaaatgtaccctggctgatgttaaacattggctcctgtgtttgcaccaaaatagcaagctgtgtgctctatacactcttcccatcgtcttgtgtacactgctcctgtggccttccacagcagaaaccagggcaaaagggtccaaacacatggttttccttgctgcaaggctcttcctgggaactaagggggtatttattagttcagttctaagagacctccttctgggcttaccccactcctcaggtacttctctctccttcctccttctcctccacagtcacaagtaaccaaggaacctgaaagtggatgtgtagctatttgaagaaggcaaggaaccctgagattcttctttgaatcctctagtccaagtcttagaccagtgattggtgcttaccttgaacaaaattttgtctgtgttcctaatcccttcaatactctgggtacaatgctcccaatcaccctgcacatttgattctaaatggcttttattttttaaaaatccatatccctaggacaagagaacaggatgcctatatccccaaaatgagctccaggacactgatgggaatgatcccaaagatcaccccacctcagaaacgtctgtgccaagagacttccccagatagaaacactgggacagtggtttgaacgacttcttttatggttgtccagtttgctatggaaataaaaggcattgattttttaaaaagatgattggaacctgtctttggccacatagggccacttggatccatttccaggccttactcatatattgccttcactgaagggctttggctttaagtcccagactggtctcccaagtgaaccataagtgttttggagctcatctggggtgaggcatgagaatgttgccccatctatcccttcaggaaaaggtgccttccctccctttctcctaaagcctggtccccagaaattgtttttgtctccaaaagtctagtatggtctttatacacccagactcttagtgttgcgtcctgccttgtttccttgttaaggatctatgcagacctcccgctttggcttagctagcgtgacattggctatcatttgacaagactaacttttttttttttttttttttgactgagtctccctctgtcacctaggctggagtgcagtggcacaatcttggctcgctgcaaccttcacccttcacctcccaggtcgaagcgattctcctgcctcagtctcccgagtagctgggattacaggcgtgcgccaccaaatctggctatttttttattattattatttttagtagagatggggtttcaccatgttggccagactggtcttgaactcttggcctcaaattatctgcccacctcggcctcccaaagtgctgggattacaggcatgagccaccatgcccagctgacaagactaattttttatcccttggtttattggcttcaacatcttctggaatcagaggtgattttttcttaccttggatgcctgagactaggggagtatagaattccaattggtaattaaggcatctttctgctcctgatcagaagggcaggttagttgggagaggtcagatggcacaacagaagtcaccttgtaagtaaggcaaagacttgaaggcattagcgtttctcattactaggtcaataacctgagggaatcaatggctttttgccgctctacctcttgtgtatctctttgacttttctttctctgtctagtttcctctgttctcagtttatattctatgttatcagtctctctttccacagtacaaacatccatcctttctcctgtgcaattctgtctctccctcttattatctttatttgtactttttccttcctccctgtctaggcattgggcatgtgcctcttcttagcctgtgattttgccttgggactgatgataaattatttccagattcaatcagccctggtcctaccccagtccaatcagaagtatgttggtgggaatcaacctgatcctggccctttcttcttctccattttcattcgtaatccccctcagcagatctttacaagcagtttccttatagctcatgtatctttaggtctttgccttccaagcactgtacagaatactttgtggttcctttttagtctgacattttgtggagcagtgaagcgtgctcagagacataatcagctgaagagaaaaaatccacccatggatttatatcagctaaatactaataattgattttgtttgatgtgcccataatttttaaagctgcaatataatataatgagggaccacaggtaatttctcctgtcatttgttttggctggatgggggtgggggagtaattgcttaaagttttaccattacacattaaactctctataataatcttgtttggggcttgctaactgttgagctgttttaactaaactggtaggcaatcggagttgatttaaatgaaaagataatttaacaaatctatactataaaaagagacatttgcttaattgacatgtattttttccttctgagtcacctaaacatttactcttgacaccaactgttcatgatactgaatagacagtccatataagagaaattagtggacctaaagaagccagattgtaggtgttaatttattaaacagagtgcaaagcccttggaaatgtcactgcttggcaataccatatggaatgccaaaatttacaatgacttttctttataagttatccaaaagggatttgaacaagtaagaggttatgccaaaatgtctccaatgtatggtcctgtaatatattgcagcttgaagccaatgatcccttatgacttgtatacaactaatgcatgttttattgaattttgcatttcccacgtgtggtaagttctttaaaatgtttttgatcacctttttgtgccattaaacttgtacagaaaatgtttttatggccattttcaaagggagaaagtttaaaatggaaacagcccaccctttctgccctatagctgtagttagaattgagtacctgtagcaaaacagctgtaattggtggttgtagtgttagaggtgttagcttgctagtgactagctttggagagtaaatgcatggtattgtacatcacatttcttaactcgttttaacctctgaaaagaatatattcttctttgtagtccttcttcccacccccttgccctctccctctccctgctcccagttgtcttacagttgtaaatatctgatttgaggcccaataactcttgccaagtaaagtcagcaaacaacaaacaaaccaaaatgtggggaaaaggcatttctcaaccatctctcagcagttattgatcatttcttaaggaacagcattgtgatcaaagactcaactttacgtaaaaatcagtggtaaattggggttgtatttggccatttgattacatttcaggattgaatagttttcagaatcacatgtaatccaaagacagtaggtagtgatgtcccttatccctgcagctgttttaagatagagacctcagaagactctgcttgaccgatgaccaataattatttgaaaaaaaaagaaaaaatgagagaaataaaacagatatttaagaactttagccacctatttagaatagttatagccagaaaaaaaaacaagggcatgagttcaaatgcattactatcagtgtcctaggcaatacctaacctactctgaaattgtgattcaaaagcagtatttcaagaggcattctccttttttggtttgctgaccccacttggactggtaggtttggtgaggcccccataaaccagctggagcagacccttttcatctcctgtgcctgtaacacccctcttcccccaccccctccgcaattcaatgagggctttcttgggtcagaggacttcaaggttgtctagagaagtttgccatgtgtgtaaggtgctgtgaactgtgagtgctgaagattcgcagcattcaataccaggcagccaaagagctgctcttgcaattattttggctctcaagctctgttcttcatcgcattctcatttctgtgtacatttgcaagatgtgtgtaatgtcattttccaaaaataaaatttgatttcaata

SEQ ID NO: 12367 - DNA, 5703 bp, Homo sapiens
gcacatccctgcactagtggccgcaaccgagacgccgcgctccagcagctgctgccgcccagcccggccccgccgccgccccccagccctgcagccccgcagccccggccgcgcccagcccggcgaggacagcaccaggaggcggcccccagcgcggccacaaagacccccggcggcgtctctccgcggaccggtcctacttgaagtccatcatgtccttcggcagagacatggagctggagcacttcgacgagcgggataaggcgcagagatacagccgagggtcgcgggtgaacggcctgccgagcccgacgcacagcgcccactgcagcttctaccgcacccgcacgctgcagacgctcagctccgagaagaaggccaagaaagttcgtttctatcgaaacggagatcgatacttcaaagggattgtgtatgccatctccccagaccggttccgatcttttgaggccctgctggctgatttgacccgaactctgtcggataacgtgaatttgccccagggagtgagaacaatctacaccattgatgggctcaagaagatttccagcctggaccaactggtggaaggagagagttatgtatgtggctccatagagcccttcaagaaactggagtacaccaagaatgtgaaccccaactggtcggtgaacgtcaagaccacctcggcttctcgggcagtgtcttcactggccactgccaaaggaagcccttcagaggtgcgagagaataaggatttcattcggcccaagctggtcaccatcatcagaagtggcgtgaagccacggaaagctgtcaggattctgctgaacaagaaaacggctcattcctttgagcaggtcctcaccgatatcaccgatgccatcaagctggactcgggagtggtgaaacgcctgtacacgttggatgggaaacaggtgatgtgccttcaggacttttttggtgatgatgacatttttattgcatgtggaccggagaagttccgttaccaggatgatttcttgctagatgaaagtgaatgtcgagtggtaaagtccacttcttacaccaaaatagcttcatcatcccgcaggagcaccaccaagagcccaggaccgtccaggcgtagcaagtcccctgcctccaccagctcagttaatggaacccctggtagtcagctctctactccgcgctcaggcaagtcgccaagcccatcacccaccagcccaggaagcctgcggaagcagaggagctctcagcatggcggctcctctacgtcacttgcgtccaccaaagtctgcagctcgatggatgagaacgatggccctggagaagaagtgtcggaggaaggcttccagattccagctacaataacagaacgatataaagtcggaagaacaataggagatggaaattttgctgttgtcaaggaatgtgtagaaagatcgactgctagagagtatgctctgaaaattatcaagaaaagcaaatgtcgaggcaaagagcacatgatccagaatgaagtgtctattttaagaagagtgaagcatcccaatatcgttcttctgattgaggagatggatgtgccaactgaactgtatcttgtcatggaattagtaaaggggggagacctttttgatgccattacttccactaacaaatacaccgagagagacgccagtgggatgctgtacaacctagccagcgccatcaaatacctgcatagcctgaacatcgtccaccgtgatatcaagccagagaacctgctggtgtatgagcaccaagatggcagcaaatcactgaagctgggtgactttggactggccaccattgtagacggccccctgtacacagtctgtggcaccccaacatacgtggctccagaaatcattgcagagactggatacggcctcaaggtggacatctgggcagcaggtgtaatcacttatatcctgctgtgtggtttccctccattccgtggaagtggtgatgaccaggaggtgctttttgatcagattttgatggggcaggtggactttccttctccatactgggataatgtttccgattctgcaaaggagctcattaccatgatgctgttggtcgatgtagatcagcgattttctgctgttcaagtacttgagcatccctgggttaatgatgatggcctcccagaaaatgaacatcagctgtcagtagctggaaagataaagaagcatttcaacacaggccccaagccgaatagcacagcagctggagtttctgtcatagcactggaccacgggtttaccatcaagagatcagggtctttggactactaccagcaaccaggaatgtattggataagaccaccgctcttgataaggagaggcaggttttccgacgaagacgcaaccaggatgtgaggagccggtacaaggcgcagccagctcctcccgaactcaactcggaatcggaagactactccccaagctcctccgagactgttcgctcccctaactcgcccttttaataagacccttttactcaaagtcctagcttaaccctttgagactctgagatttttttcccccaaatttgtgtaaaacagtttcatctgatctatctagcgctcaatgcttgaatggcagaactgaaagtgttttcaggtatctttgtagcggtttccctttactgaataagatgacacgtggtgattgtgaagatggtaatttgctgctaatagagtcctcaaagggttaaggccaatttgcaatttttttttaaacttagaagcaatgaatgttttcatcagtcaagctaggatctgcagtatgtaatatagcacttgttaaccctctgagtgcatagaattttattgagaattcttgtttgggaatttttcaggcctttggatgtatacacacatgtttcttgattttactgcagatcaaggggtgttgttagatgctgaaatgtccagaaaagaaggacatttagaatgatatcttgtttgtccttttctgtgggtttagaacgtggcaggtttataacttcgacacacgcacggttctttcttcttcacaatcctattcagaaacagattttttttttcattagagatatgactgtcagttgcagtgagttctgcatcccaagtggagggaattgggtttgtggcaaagagcttgacccaggaaatagatggtgccccccaaattgtctccacatgaagatgtactgatgacgccccagaaatgctgcttccatatcagctgctgctagcgccagcgcagactctcagggagtcaccacagcttgtcttgtgcttggtgagtgagggtctctctactcagtgtcagacatctacaggaaagaaacaactggtggaaaagagcaataaattgcccggtgctctgcagggctggaatttcaaacagaaagagggaataagatcctgtgatttttctcacctgcttttccacgcactgtggtcatcactgtgcaatctacatctagtatgaaatccacacataggagagctggggcacaaggggactggaggcagttgctttgcaagatggctgaggagaaagcacactgggaacacaatccagaatgttctaacaataagttttcagtgaataaaccactggcaagacatttccatgtgcacctttaggttacctatatagtctcctaggaagatcaggatgaaagacctagatgatacccctgaggataaaacctccatcccctaaaatgattttttttaaataccactgtctttagctgtccaggaggtcagagtgttttttctgtctttgggccaagtcctgtctgagacctgtattttcactcttgttaccaaatctatctccctagtgcagtgtctccaggcctgagtttcttctggaacagattccattttagaatggggattcacaggttctgtgcatcaccacagtgctcagagaggattctcctggggtgtcttagaggcaggtgcccaactcaaatgtattcccaaggtttgctgggctctgggatccacgagacaaccagagagggatatctcatgaaatttgcatctggtggctgaacagtacctatgttctctgttttgaatatactttaatacctgagagtcttaaaatttgtgaacaacgtttctatagtcctttattttcaaatgcacattgatcttcacttgctgcatttttactcttcaaccctgaaactatggtctacattaatatggatttttaaatcacatgtcattacttttgcaacaccatcaccaaaattttttgctcttttacatttaggttcatctctgtggtctgtgttgtcctgacatgtaaaaagcatatcgtttattgaggtttttttcccccccttttagagcatccggaagtgataacacgcaaaatcacaaagtagcataaatcagtaaattagttgagttgtttttgggggggaggtgggggtagggggcacagaacaccagaaagagtgttggtgtgtaggtagattccatattaatgaggaacactgaactagttggaaattactgctttctctagaaatataaagcaaagcactattccaaggctatggagtagctctacagcctggcctcaactctaaaagtgtgaagaatgcaatgggcagagacctacctgcagtggactgtcattttcctttctttctctgaattactgctttttctgtgggcattaactatattgctacagcatctagtgtactgagcctgcggtgcatggctcaggccttttcccatcgacgtctagggggactctggaccgtgtgaagctagggggtgtttctcagcacactgcagaagggcagctcagaagaatgcagggcccattcagcatggggatcccagcacatcactgtagaatttgagtgatctatgctgaataaacagtggaatgtgaccagtcaagtagaaatcttgagtaatcagatggaatgcaatctttctaacattaagctaccaagatcctgaatgtcagagatgtactcagagggttaacagacaagcacaaggcatgctgactacattggtgtatccagattgctttgcttttagccagtgctttctaatttttttctcgacattcttgggatagttcaagtttgaaataattaagtggtggtgttctttaaggaatttctataaccaaattgatcttatttttgatttcacttatcatagaacaaatatgtatcattatggcagtgtatctatgtaattatcaatttaatcatcaccaccggtgtttccatattttttcccaagtatttaatatagctctcttatggtggtggcctggtgatggggaccgtctttcttttactgacacatgaccaatcatatggtattttcaagggaattttaagattcatcttttcagtttgatagtagactagttaaggaagaactctttcattacttgcatcgtgtaaatcatctctgtagacatgtgttcatattaatgaacacattttttctcaacattgtagcagaaatcattttattcgtcatgatcaatgaatatgtgatttgctccagatcgttagaaggaaaagtaagatttcagtcatcaaaaatgtttttaccgtagccctcatctaacttacacgtggtgcatattaaaataagcagagaaaaaaaaatgtgaataaactactgaaaac

SEQ ID NO: 12368 - DNA, 4653 bp, Homo sapiens
gtaccgggccgtggagcggcggctcctgtacccccggcgcggacctaaaggggctcgggccgctcgggccgggaatggcggcggcggccgagcccggggcccgcgcctggctgggcggcggctccccgcgccccggcagcccggcctgcagccccgtgctgggctcaggaggccgcgcgcgcccggggccggggccggggccgggacccgagcgggcgggcgtcagagccccgggccccgctgccgcgccgggacacagcttccggaaggtgacgctcaccaagcccaccttctgccacctctgctccgacttcatctgggggctggccggcttcctgtgcgacgtctgcaatttcatgtctcatgagaagtgcctgaagcacgtgaggatcccgtgcacgagtgtggcacccagcctggtccgggttcctgtagcccactgcttcggcccccgggggctccacaagcgcaagttctgtgctgtctgccgcaaggtcctggaggcaccggcgctccactgcgaagtgtgtgagctgcacctccacccagactgtgtgcccttcgcctgcagtgactgccgccagtgccaccaggatgggcaccaggatcacgacacccatcaccaccactggcgggaggggaacctgccctcgggagcgcgctgcgaggtctgcaggaagacgtgcggctcctctgacgtgctggccggcgtgcgctgcgagtggtgcggggtccaggcgcactccctctgctccgcggcgctggctcccgagtgtggcttcgggcgtctgcgctccctggtcctgcctcccgcgtgcgtgcgccttctgcccggcggcttcagcaagacgcagagcttccgcatcgtggaggccgcggagccgggcgaggggggcgacggcgccgacgggagcgctgccgtgggtccaggcagagagacacaggcaactccggagtccgggaagcaaacgctgaagatctttgatggcgacgacgcggtgagaagaagccagttccgcctcgtcacggtgtcccgcctggccggtgccgaggaggtgctggaggccgcactgcgggcccaccacatccccgaggaccctggccacctggagctgtgccggctgcccccttcctctcaggcctgtgacgcctgggctgggggcaaggctgggagtgctgtgatctcggaggagggcagaagccccgggtccggcgaggccacgccagaggcctgggtcatccgggctctgccgcgggcccaggaggtcctgaagatctaccctggctggctcaaggtgggcgtggcctacgtgtccgtgcgagtgaccccgaagagcacggcccgctctgtggtgctggaggtcctgccgctgctcggccgccaggccgagagtcccgagagcttccagctggtggaggtggcgatgggctgcaggcacgtccagcggacgatgctgatggacgaacagcccctgctggaccggctacaggacatccggcagatgtctgtgcggcaggtgagccagacgcggttctacgtggcagagagcagggatgtagccccgcacgtctccctgtttgttggcggcctgcctcccggcctgtctcccgaggagtacagcagcctgctgcatgaggccggggctaccaaagccaccgtggtgtccgtgagtcacatctactcctcccaaggcgcggtagtgttggacgttgcctgctttgcggaggccgagcggctgtacatgctgctgaaggacatggctgtgcggggccggctgctcactgccctggtgctccccgacctgctgcacgcgaagctgcccccagacagctgtcccctccttgtgttcgtgaaccccaagagtggaggcctcaagggccgagacctgctctgcagcttccggaagctactgaaccctcatcaggtcttcgacctgaccaacggaggtcctcttcccgggctccacctgttctcccaggtgccctgcttccgggtgctggtgtgtggtggcgatggcactgtgggctgggtgcttggcgccctggaggagacacggtaccgactggcctgcccggagccttctgtggccatcctgcccctgggcacagggaatgaccttggtcgagtcctccgctggggggcgggctacagcggcgaggacccgttctccgtactgctgtctgtggacgaggccgacgccgtgctcatggaccgctggaccatcctgctggatgcccacgaggctggcagtgcagagaacgacacggcagacgcagagccccccaagatcgtgcagatgagtaactactgtggcattggcatcgacgcggagctgagcctggacttccaccaggcacgggaagaggagcctggcaagttcacaagcaggctgcacaacaagggtgtgtacgtgcgggtggggctgcagaagatcagtcactctcggagcctgcacaagcagatccggctgcaggtggagcggcaggaggtggagctgcccagtattgaaggcctcatcttcatcaacatccccagctggggctcgggggccgacctgtggggctccgacagcgacaccaggtttgagaagccacgcatggacgacgggctgctggaggttgtgggcgtgacgggcgtcgtgcacatgggccaggtccagggtgggctgcgctccggaatccggattgcccagggttcctacttccgagtcacgctcctcaaggccaccccggtgcaggtggacggggagccctgggtccaggccccggggcacatgatcatctcagctgctggccctaaggtgcacatgctgaggaaggccaagcagaagccgaggagggccgggaccaccagggatgcccgggcggatgctgcgcctgcccctgagagcgatcctaggtaggggtggctggggcagcccaagggctcgagccatctctgctcccgccagccttgttttcaggtggtctggaggcagctccacgtccacacagtggccggccctgtggtcggacctggctacagccctgaccacagcatcttcccagtgacggagcgggacccgccctcatcccattggtgacacatgttggtgtcacagccctcatcccactggagactggtgtgcgggtggcagtgttaccccgtgtcccgggtgggcgcagggctctggatggtgagccctctgccctgtgggggcctggtcctctcctcaggggtgggcacccatccctctacccactgagccccttgagctggacagtgctggatgcaggccgtccaggtgggtctgatctcactttgtgcccctcgggccgtccccctggccagtccttcagagcagcaggctccctggtgtgtccctgccccagcagacacaggctgccagtccctccagcctcacctccccgccctgggcagcaggtgtgggcagcgtgtgaggctgccgggtggtggtgactggtgacttccttgtgttcagggaagggagaaggtgccttcccttgttttctggccttgttatatacagatggcagcttggatctcaggtacagctccaggggcaggcagtgcccagctggacctggtggccctttcctagtgcctctgcttggggaggagaacctctgtccacgtggaggctaggaggtctcaggtgctgccctggcagcaccagagtgtgggccgggcccgagtgtctgcccctcggccctcagggtggggcacttagcacccagaagggaccaaaagcagggcatggcggtgcagaggagtttgggaggtgtaaacagcccatgcacgtggaggaggagctggctttcagccccagaccccacgctagcactttccacgctgcttgcccgctgttgatgtgcagttcccagtgcctgtgtgagccgacatctgctcagtcctatccctcgtcagcgtgtggagacccagctcctgcagccctcctgctcccacgcccccagacagcttggtggagggtcctgcatctgggccaggctggggtgcacccagccaaagacaaagctgcctccacgtgcccaaggattcagatggtgcactggccccgggaggagtctgaccaaaaatggagcccgctctgtggggaagccccgactcccccacgagaaacggtcccacggtgcggatctcccccttcccttgtggggcacagctggcctgggcctccaatcctgcggagctttcctgggtgtggctttgacctcagaagtggctctggtttggcctcaggagtgtggcctggcccagcctgctgcagcctcctggggggcccttgatgccactaatcccccgaccccccgcatctgccaaactgcacagacacacgcattgtaaggccgcttgtggcctccagcgtgcactcttgtttacgtcattgtcatcttcaagaccagtcctttgtgattagttttgcttcgcgagccctggtgtggactgtggtctgtatgaatcgtgtgtaactgtggtgaggggcttgtcctgtatgtgagtctgtacccaggtggggtctgtgccctgcacaccgggcccctctgtatttatcgctgcctgaatgcaacagtaatttatatccaggacaaatacagtctgggcgtcactatcctaaaaaaaaaaaaaaaaaa

SEQ ID NO: 12369 - DNA, 1633 bp, Homo sapiens
cacgagggggacccgggccgcgtgggcgccgggatggagggcgccaaggggcggggagcgggcgtgcgtgtgtgtgcgagtgcgaatgcgagggaggccggccttgagtgaaaccggagctacaaagaaggggagagtccgggagcgggagggcgcgagggaggagcggcggctccggggcagctccgacgccctcccgcggggaaggagcccccgcggtgccgccgaggccccgacgcggggccgcccctcggctcgccgccccgcgcccgcgcccgctgggaatgatgaagaagaacaattccgccaagcggggacctcaggatggaaaccagcagcctgcaccgcccgagaaggtcggctgggtccggaaattctgcgggaaagggattttcagggagatttggaaaaaccgctatgtggtgctgaaaggggaccagctctacatctctgagaaggaggtaaaagatgagaaaaatattcaagaggtatttgacctgagtgactatgagaagtgtgaagagctccggaagtccaagagcaggagcaagaaaaatcatagcaagtttactcttgcccactccaaacagcccggtaacacggcacccaacctgatcttcctggcagtgagtccagaagagaaggaatcgtggatcaatgccctcaactctgccatcacccgagccaagaaccgtatcttggatgaggtcaccgttgaggaggacagctatcttgcccatcccactcgagacagggcaaaaatccagcactcccgccgccccccaacaaggggacacctaatggctgtggcttccacctctacctcggatgggatgctgaccttggacttgatccaagaggaagacccttcccctgaggaaccaacctcttgtgctgagagctttcgggttgacctggacaagtctgtggcccagctggcagggagccggcggagagcggactcagaccgcatccagccctccgcagaccgggcaagcagtctctcccgaccttgggaaaaaacagacaaaggggccacctacaccccccaggcacccaagaagttgacgcccacagagaaaggccgctgcgcctccctggaggagatcctatctcagcgggatgctgcctctgcccgcaccctccagctgcgggctgaggaacccccaacccctgccctccccaacccggggcagctgtcccggatccaggacctggtagcaaggaaactggaggagactcaggagcttctggcagaggttcagggactgggagatgggaagcgaaaggccaaggacccccctcggtctccgccggattctgagtcagagcagctgctgctggagacggaacggctgctgggagaggcatcatcgaattggagccaggcaaagagggtgctgcaggaggtcagggagctgagagacctgtacagacagatggacctgcagaccccggactcccacctcagacagaccaccccgcacagtcagtaccggaagagcctgatgtgagggcagggtggggtctggaacttgtcgggttggacagactcttatctccgtgttgctggataaagcttttttatttacctcaatcaaaaaaagaaaacaaaaatgaaaaaaaaaaaaaa

SEQ ID NO: 12370 - DNA, 3295 bp, Homo sapiens
tggagagggacaggaggaaacgcagcgccagcagcatctcatctaccctccttgacacctccccgtggctccagccagaccctagaggtcagccttgcggaccaacaggaggactcccagctttcccttttcaagaggtccccagacaccggccaccctcttccagcccctgcggccagtgcaaggaggcaccaatgctctgaggctgtcgcgtggtgcagcgtcgagcatcctcgccgaggtcctttctgctgcctgtcccgcctcaccccgctccatcacaccagctggccctctttgcttccttttcccagaatcgttaagccccgactcccactagcacctcgtaccaacctcgccccaccccatcctcctgccttcccgcgctccggtgtcccccgctgccatgagctcccccatcagcaagagccgctcgcttgccgccttcctgcagcagctgcgcagtccgaggcagcccccgagactggtgacatctacggcgtacacgtcccctcagccgcgagaggtgccagtctgcccgctgacagctggtggcgagactcagaacgcggccgccctgccgggccccaccagctggccactgctgggcagcctgctgcagattctctggaaagggggtctcaagaaacagcacgacaccctggtggagtaccacaagaagtatggcaagattttccgcatgaagttgggttcctttgagtcggtgcacctgggctcgccatgcctgctggaagcgctgtaccgcaccgagagcgcgtacccgcagcggctggagatcaaaccgtggaaggcctatcgcgactaccgcaaagaaggctacgggctgctgatcctggaaggggaagactggcagcgggtccggagtgcctttcaaaagaaactaatgaaaccaggggaagtgatgaagctggacaacaaaatcaatgaggtcttggccgattttatgggcagaatagatgagctctgtgatgaaagaggccacgtcgaagacttgtacagcgaactgaacaaatggtcgtttgaaagtatctgcctcgtgttgtatgagaagagatttgggcttctccagaagaatgcaggggatgaagctgtgaacttcatcatggccatcaaaacaatgatgagcacgtttgggaggatgatggtcactccagtcgagctgcacaagagcctcaacaccaaggtctggcaggaccacactctggcctgggacaccattttcaaatcagtcaaagcttgtatcgacaaccggttagagaagtattctcagcagcctagtgcagatttcctttgtgacatttatcaccagaatcggctttcaaagaaagaattgtatgctgctgtcacagagctccagctggctgcggtggaaacgacagcaaacagtctaatgtggattctctacaatttatcccgtaatccccaagtgcaacaaaagcttcttaaggaaattcaaagtgtattacctgagaatcaggtgccacgggcagaagatttgaggaatatgccgtatttaaaagcctgtctgaaagaatctatgaggcttacgccgagtgtaccatttacaactcggactcttgacaaggcaacagttctgggtgaatatgctttacccaaaggaacagtgctcatgctaaatacccaggtgttgggatccagtgaagacaattttgaagattcaagtcagtttagacctgaacgttggcttcaggagaaggaaaaaattaatccttttgcgcatcttccatttggcgttggaaaaagaatgtgcattggtcgccgattagcagagcttcaactgcatttggctctttgttggattgtccgcaaatacgacatccaggccacagacaatgagcctgttgagatgctacactcaggcaccctggtgcccagccgggaactccccatcgcgttttgccagcgataatacgcctcagatggtggtatttgctaacatcatatccaactcagggaagcggactgagtgctgggatccaaggcattctacagggttcactgctggtttacacttcacctgtgtcagcaccatcttcaggtgcttagaatggcctgggagcctgttctgtcttgcatcttccatgacatgaaagggaggctggcacttgtcagtcaggtagaggttacaaaccgtttcaggccctgcctaccacattcactgtttgaatctttaattcccaagaataagtttacatttcacaatgaatgacctacaacagctaaattttctggggctgggagtaatactgacaatccatttactgtagctctgcttaatgtactacttaggaaaatgtccctgcttaataatgtaagccaagctaaatgatggttaaagttatcaggcctcccatgaaattgcgttcttcctgcattgaaataaaaacattattgggaaactagagaacacctctatttttaaaaggactttaacgaagtcaaacaacttataagactagtgattcactggggcattattttgttagaggaccttaaaattgtttattttttaaatgtgattcctttatggcattagggtaaagatgaagcaataatttttaaattgtgtatgtgcatatgaagcacagacatgcatgtgtgtgtgtgtctgtgtgtgtgtgtccgtgtatgtgtgtgtgggttctaatggtaatttgcctcagtcatttttttaatatttgcagtacttgatttaggatctgtggtgcagggcaatgtttcaaagtttagtcacagcttaaaaacattcagtgtgactttaatattataaaatgatttcccatgccataatttttctgtctattaaatgggacaagtgtaaagcatgcaaaagttagagatctgttatataacatttgttttgtgatttgaactcctaggaaaaatatgatttcataaatgtaaaatgcacagaaatgcatgcaatacttataagacttaaaaattgtgtttacagatggtttatttgtgcatatttttactactgcttttcctaaatgcatactgtatataattctgtgtatttgataaatatttcttcctacattatatttttagaatatttcagaaatatacatttatgtctttatattgtaataaatatgtacatatctaggtatatgctttctctctgctgtgaaattatttttagaattataaattcacgtcttgtcagatttcatctgtataccttcaaattctctgaaagtaaaaataaaagtttttaaatattaaaaaaaaaaaaaaaaaaaaa

SEQ ID NO: 12371 - DNA, 3275 bp, Homo sapiens
cgtgcgagtgtctccctctccctctcgctctctctctctctccctctctctctctcttttgtgagttatagcaaccgttgccttgtgaatcaagcgccatagtcaccgtagtcctggcgactgttacccatcaacaacaactactcctctcctcctcctcctcctcttcctcctcctcctccccaccaccaccatctccatcacccaccaacaacaccacaataatccacagccaaggccacttggtcattctggcattttatggtagagaatacgttgagtttggctctggaaggaatatgagagaccatcatgcagacatcagagactgggtcggacacaggctcgacagtgaccttacaaacatctgtggctagtcaagcagcagtgcctacgcaggtggtacagcaagtaccagtacaacaacaggtacagcaggtacagactgtgcagcaggtacaacatgtctatcccgctcaggtgcagtatgtggaaggaagcgatactgtctataccaatggagcaatccgaacaacaacgtatccttacacagagacacagatgtacagccaaaatactggagggaattactttgatactcaagggagttccgcccaggtgactaccgtggtctcatcccacagtatggtgggcactggtgggattcagatgggcgtcacaggaggacaactcatcagcagctctggaggaacctatctgatcggcaactcaatggagaattctggtcactcagtgacacacacaactcgggcctccccagcgacaattgaaatggcgattgagacgctgcaaaagtctgacggtctgtccactcacagaagctctcttctcaacagccatctccagtggctgttggacaattatgagacagcagaaggagtgagccttcccagaagcactctgtacaaccactaccttcgacactgtcaggaacacaaactggacccagtcaatgctgcctcttttggaaaattaataagatcaatttttatggggctacgaaccaggagattgggcactagaggaaactccaaataccactactatgggattcgtgtcaagccagattcccctcttaatcgtctgcaagaagacatgcagtatatggctatgagacaacaacccatgcaacagaaacaaaggtacaagcctatgcagaaagtggatggggttgcagatggtttcacaggaagtggtcaacagacaggcacatctgttgagcaaactgtaattgcccaaagccaacatcatcaacagtttttagatgcatctcgagcacttccagagtttggagaagttgaaatctcttctctgccagatggtactacctttgaggatatcaagtcactgcagagtctttatagagagcactgtgaggcaatattggacgttgttgtgaatcttcaatttagcctgatagaaaaattgtggcaaacattctggcgctattctccctctactccaactgatggcactaccattaccgaatcgagcaatctgagtgaaatagaaagtcgacttccgaaagcaaagctgataactctgtgcaaacatgagtctatcctgaaatggatgtgtaactgtgaccatgggatgtaccaggctttggtggagattctcatccccgacgtccttagacctattcctagtgccttgacccaagccattcgaaattttgcaaaaagccttgaaggttggctttccaatgccatgaacaatattccacagagaatgatacaaaccaaggttgccgctgtaagtgcctttgcccagactctgcgaagatacacgtcgcttaatcacctggcccaggcagctcgtgcagtgcttcagaacacttcccaaatcaaccagatgcttagtgacctcaaccgtgtcgactttgccaatgtccaggagcaggcttcctgggtgtgccagtgtgatgacaacatggttcagagactagaaacagacttcaagatgactcttcagcagcagagcaccctggagcagtgggctgcgtggcttgacaatgtgatgatgcaagcactgaaaccctatgaaggaagacccagttttcctaaagccgccaggcagtttctgctaaaatggtctttctacagctcaatggttattcgggacttaaccttacgcagtgctgctagctttggctccttccacctgatccgtctactctacgacgaatatatgttttacttagtagaacatcgtgttgctcaggcaacaggagagactcctatagcagtcatgggcgaggtaagagaggctgaaagagctgtgacccactgggttattaaaaataagccagaattacacttcagtctaaatacattattgattaaaaccatggttcctaaccaagtcagcctcagagccaggagggactgtggagttattgcaagagttccttaaattcctctgttcttatgtgcttaatcaaaagattctaaaattgtggattatatcatgtgaaagttcatggaatgtgtctctatattatacaggtacctatgtaaaagaaaaacttgagaaccactggaatatgaaaaatattttaagtgggaaaaagattggtgctcctgataaagcaaagggctgggaatacaatggaaaggattaaatatgtattttgtagactctttcccggtctccaagaacaaagtaaatgattctattttagaaggataaaaatggtaatgatgataactaacattttttggacacttactatgtgcgaggcacagttctatgttttttacatgtaataaagcacttaatgcaagtctttgagatacgttctactttattctgttttacaataagcatccgaggtttatgcagaaagctaaggcacagaaaggttaaatgattactcagctaaaaaatggtagagatttttttttcaaacacagtctgattttcaaacccatatgcttctaaccactaatgatgtaagggggaaaattctcttcttcagaatttctgaatagtcatcaaaatggcttatcaaaaagcttaaactctgaatataacaagggctggttaatataatgaggaatagatgcaaatgctcagatggttcagcactggcttattttgttatattgaatgcaggaggcgggggtagtttataccttgtcgaatcataccagattattaaatgtgacaaattacccaaggcggtaaaaaagacatgttcacttttaagctatgtgtatgtgcttatataaataaaaaagagtgaaaacaga

SEQ ID NO: 12372 - DNA, 3018 bp, Homo sapiens
cgtgcgagtgtctccctctccctctcgctctctctctctctccctctctctctctcttttgtgagttatagcaaccgttgccttgtgaatcaagcgccatagtcaccgtagtcctggcgactgttacccatcaacaacaactactcctctcctcctcctcctcctcttcctcctcctcctccccaccaccaccatctccatcacccaccaacaacaccacaataatccacagccaaggccacttggtcattctggcattttatggtagagaatacgttgagtttggctctggaaggaatatgagagaccatcatgcagacatcagagactgggtcggacacaggctcgacagtgaccttacaaacatctgtggctagtcaagcagcagtgcctacgcaggtggtacagcaagtaccagtacaacaacaggtacagcaggtacagactgtgcagcaggtacaacatgtctatcccgctcaggtgcagtatgtggaaggaagcgatactgtctataccaatggagcaatccgaacaacaacgtatccttacacagagacacagatgtacagccaaaatactggagggaattactttgatactcaagggagttccgcccaggtgactaccgtggtctcatcccacagtatggtgggcactggtgggattcagatgggcgtcacaggaggacaactcatcagcagctctggaggaacctatctgatcggcaactcaatggagaattctggtcactcagtgacacacacaactcgggcctccccagcgacaattgaaatggcgattgagacgctgcaaaagtctgacggtctgtccactcacagaagctctcttctcaacagccatctccagtggctgttggacaattatgagacagcagaaggagtgagccttcccagaagcactctgtacaaccactaccttcgacactgtcaggaacacaaactggacccagtcaatgctgcctcttttggaaaattaataagatcaatttttatggggctacgaaccaggagattgggcactagaggaaactccaaataccactactatgggattcgtgtcaagccagattcccctcttaatcgtctgcaagaagacatgcagtatatggctatgagacaacaacccatgcaacagaaacaaaggtacaagcctatgcagaaagtggatggggttgcagatggtttcacaggaagtggtcaacagacaggcacatctgttgagcaaactgtaattgcccaaagccaacatcatcaacagtttttagatgcatctcgagcacttccagagtttggagaagttgaaatctcttctctgccagatggtactacctttgaggatatcaagtcactgcagagtctttatagagagcactgtgaggcaatattggacgttgttgtgaatcttcaatttagcctgatagaaaaattgtggcaaacattctggcgctattctccctctactccaactgatggcactaccattaccgaatcgagcaatctgagtgaaatagaaagtcgacttccgaaagcaaagctgataactctgtgcaaacatgagtctatcctgaaatggatgtgtaactgtgaccatgggatgtaccaggctttggtggagattctcatccccgacgtccttagacctattcctagtgccttgacccaagccattcgaaattttgcaaaaagccttgaaggttggctttccaatgccatgaacaatattccacagagaatgatacaaaccaaggttgccgctgtaagtgcctttgcccagactctgcgaagatacacgtcgcttaatcacctggcccaggcagctcgtgcagtgcttcagaacacttcccaaatcaaccagatgcttagtgacctcaaccgtgtcgactttgccaatgtccaggagcaggcttcctgggtgtgccagtgtgatgacaacatggttcagagactagaaacagacttcaagatgactcttcagcagcagagcaccctggagcagtgggctgcgtggcttgacaatgtgatgatgcaagcactgaaaccctatgaaggaagacccagttttcctaaagccgccaggcagtttctgctaaaatggtctttctacagctcaatggttattcgggacttaaccttacgcagtgctgctagctttggctccttccacctgatccgtctactctacgacgaatatatgttttacttagtagaacatcgtgttgctcaggcaacaggagagactcctatagcagtcatgggcgagtttggtgatttaaatgccgtgtctcctggaaatctggataaagatgaaggcagtgaagtagaaagtgaaatggatgaagaactggatgactcttcagagcctcaagccaaaagagagaaaacagagctgagccaggcatttccagtgggctgcatgcagcctgttctcgagactggcgtgcaaccaagcctcctgaatccaattcacagcgagcacattgtcacaagtactcagactatcagacagtgcagcgctacaggaaatacctacactgcagtctaaagaatattaaagcgtatttttccagcttacattaaccctgttgatattgggcttaagttgaaaatttaataagcctgaaggtcgactgttgtcaaattctatctgtgctgaacattaactttttggagttgtgaaatggaatgggtgtatgtattttgccagatctttttttttaacgtaaacaaattatttgcttcttaataatgaattttttcccttagtttcaggtgtcaagaaggatttttacaacacttaatgtcaatgttttgttttcttataattaaaaagtaatttacattttttgtagcttaaaatattttattgttgattgttagtcttggtgtatgatttcatgtgtaagttttttaattagatgcacttctgtgaaatatcaaaaaaaaaaaaaaaaaaaaaaaaaaaaaaaaaaaaaaaaaaaaaaaaaaaaaaaaaaaaaaa

SEQ ID NO: 12373 - DNA, 2707 bp, Homo sapiens
gccggccggctggtaaccccccagcggagggaccgggccgagcccgcggacccctccgagtgtctcctggggcccagccgttggtaccccatttcccccgggtccggtatttggggtggtctctgtctgccccggttcatctccaccgtctcaccttcaccccatcttgggacgtgaaactttttgaaagtttagaagcgaacttactgtggggaccttcctctggggttagttctctggtgccaccttcagtgatctgtgtggcagctctgctgctcacttctggctttactgggttttggtatttaactgttgcttacgcacactggaaattttcacctgcagtttttcttctgcctaagctctcacgtgtgaatatgtgtctagtgcatccttaacctgaggacttcaccagttcgaaattacagttttcaccatcaactaccttatcctttttggcctggttttcttcctcaaacagtggaaacatttttaaagttgcttttgttgcagagttaaacaaatggctgatagtggcttagataaaaaatccacaaaatgccccgactgttcatctgcttctcagaaagatgtactttgtgtatgttccagcaaaacaagggttcctccagttttggtggtggaaatgtcacagacatcaagcattggtagtgcagaatctttaatttcactggagagaaaaaaagaaaaaaatatcaacagagatataacctccaggaaagatttgccctcaagaacctcaaatgtagagagaaaagcatctcagcaacaatggggtcggggcaactttacagaaggaaaagttcctcacataaggattgagaatggagctgctattgaggaaatctatacctttggaagaatattgggaaaagggagctttggaatagtcattgaagcgacagacaaggaaacagaaacgaagtgggcaattaaaaaagtgaacaaagaaaaggctggaagctctgctgtgaagttacttgaacgagaggtgaacattctgaaaagtgtaaaacatgaacacatcatacatctggaacaagtatttgaaacgccaaagaaaatgtaccttgtgatggagctttgtgaggatggagaactcaaagaaattctggataggaaagggcatttctcagagaatgagacaaggtggatcattcaaagtctcgcatcagctatagcatatcttcacaataatgatattgtacatagagatctgaaactggaaaatataatggttaaaagcagtcttattgatgataacaatgaaataaacttaaacataaaggtgactgattttggcttagcggtgaagaagcaaagtaggagtgaagccatgctgcaggccacatgtgggactcctatctatatggcccctgaagttatcagtgcccacgactatagccagcagtgtgacatttggagcataggcgtcgtaatgtacatgttattacgtggagaaccaccctttttggcaagctcagaagagaagctttttgagttaataagaaaaggagaactacattttgaaaatgcagtctggaattccataagtgactgtgctaaaagtgttttgaaacaacttatgaaagtagatcctgctcacagaatcacagctaaggaactactagataaccagtggttaacaggcaataaactttcttcggtgagaccaaccaatgtattagagatgatgaaggaatggaaaaataacccagaaagtgttgaggaaaacacaacagaagagaagaataagccgtccactgaagaaaagttgaaaagttaccaaccctggggaaatgtccctgatgccaattacacttcagatgaagaggaggaaaaacagtctactgcttatgaaaagcaatttcctgcaaccagtaaggacaactttgatatgtgcagttcaagtttcacatctagcaaactccttccagctgaaatcaagggagaaatggagaaaacccctgtgactccaagccaaggaacagcaaccaagtaccctgctaaatccggcgccctgtccagaaccaaaaagaaactctaaggttccctccagtgttggacagtacaaaaacaaagctgctcttgttagcactttgatgagggggtaggaggggaagaagacagccctatgctgagcttgtagccttttagctccacagagccccgccatgtgtttgcaccagcttaaaattgaagctgcttatctccaaagcagcataagctgcacatggcattaaaggacagccaccagtaggcttggcagtgggctgcagtggaaatcaactcaagatgtacacgaaggttttttaggggggcagataccttcaatttaaggctgtgggcacacttgctcatttttacttcaaattcttatgtttaggcacagctatttataggggaaaacaagaggccaaatatagtaatggaggtgccaaataattatgtgcactttgcactagaagactttgttagaaaattactaataaacttgccatacgtattacagcagaagtgcttcagtcattcacatgtgttcgtgagattttaggttgctatagattgtttaagacagcttattttaaatgtagaaaaataggagattttgtaactgcttgccattaacttgctgctaaattcccaatgtattgattaaatcaataaaaaacagatgttactcagc

SEQ ID NO: 12374 - DNA, 1342 bp, Homo sapiens
agggaagtggggtggctccccatggcttctcccggggctggcactgaagctggagcacaggatgtgctgacgggggtccagaggcagagtccttaacttactcagcttaagcgtggcatggagtcccaactgggaggggccctggcagcatgaaacccccacccccactctctgcgacggcccagatggagggcaggaggaacagcggttcagccctggctggggctgcaggggctggggtgtgttactcactggcacgatggagaactgcatgaagaggcagcggagtgctgtctgtccccacccttccccgcccggcctccaactggtgggaactggattttgcggctgcagaggacttccccaaattttgccacattaacagctgactgcacacctgagccccgaggtgaagcagggcctcaggtagccagggaactggttgagcagaggaaatcggagagacctttttttttgtcatgaacaggctcagtgtgaatgggggaacttcctggttctgagggaatgtgggaaaattgccctttaggctgggtgaagaagaaagcaagtggaaccctggcacccctggacttcctcctccagaggaagcggctttggttgtgggccagcgagcctgtgcgtccccagccccagggcattcaccgcttcagagaagcaaggcgacagttctgccggatgagaggatccaggctgactggaggaaggaagggctttggctcatctgggctcaggtttgggagagatggcttctcagaggaggtgatgcctcagccagtcttaaaggcaatgcggtgtgcagagggtgcttggtggttctctcctgatggccccgcagggtctgcagcctccatctggccagcagaaggcgcagaaagactgcctgggcagctcggacgtgaccgcctggaagtggtgtacagcgttcctgacaacgttcccggccaaaacgggtcccgccgcccacttgtgtgcaagataactggaaaatgtctttctgtgtgctccgaggagaatgcaaaggctggtggatgtagtgcctttcctctactgctctctcagctgggggcaagaatgacaggacgtgaacatgcacacaagggcccggaactcacgacccccgacagcggtctcccccgcccccccaaccccgcgcttgcaggatttagggcactagcacagcacagtccaccccttgggactagcaccccctccgcagttctgctctctgcagcaacatagagtacaaatattgttccttttgtttcttttttccctttggatacatttttaattacaaaaatagagcttgattgttgcacct

SEQ ID NO: 12375 - DNA, 1835 bp, Homo sapiens
ggtgaccaagatggcggcggagctggtggaggccaaaaacatggtgatgagttttcgagtctccgaccttcagatgctcctgggtttcgtgggccggagtaagagtggactgaagcacgagctcgtcaccagggccctccagctggtgcagtttgactgtagccctgagctgttcaagaagatcaaggagctgtacgagacccgctacgccaagaagaactcggagcctgccccacagccgcaccggcccctggaccccctgaccatgcactccacctacgaccgggccggcgctgtgcccaggactccgctggcaggccccaatattgactaccccgtgctctacggaaagtacttaaacggactgggacggttgcccgccaagaccctcaagccagaagtccgcctggtgaagctgccgttctttaatatgctggatgagctgctgaagcccaccgaattagtcccacagaacaacgagaagcttcaggagagcccgtgcatcttcgcattgacgccaagacaggtggagttgatccggaactccagggaactgcagcccggagttaaagccgtgcaggtcgtcctgagaatctgttactcagacaccagctgccctcaggaggaccagtacccgcccaacatcgctgtgaaggtcaaccacagctactgctccgtcccgggctactacccctccaataagcccggggtggagcccaagaggccgtgccgccccatcaacctcactcacctcatgtacctgtcctcggccaccaaccgcatcactgtcacctgggggaactacggcaagagctactcggtggccctgtacctggtgcggcagctgacctcatcggagctgctgcagaggctgaagaccattggggtaaagcacccggagctgtgcaaggcactggtcaaggagaagctgcgccttgatcctgacagcgagatcgccaccaccggtgtgcgggtgtccctcatctgtccgctggtgaagatgcggctctccgtgccctgccgggcagagacctgcgcccacctgcagtgcttcgacgccgtcttctacctgcagatgaacgagaagaagcccacctggatgtgccccgtgtgcgacaagccagccccctacgaccagctcatcatcgacgggctcctctcgaagatcctgagcgagtgtgaggacgccgacgagatcgagtacctggtggacggctcgtggtgcccgatccgcgccgaaaaggagcgcagctgcagcccgcagggcgccatcctcgtgctgggcccctcggacgccaatgggctcctgcccgcccccagcgtcaacgggagcggtgccctgggcagcacgggtggcggcggcccggtgggcagcatggagaatgggaagccgggcgccgatgtggtggacctcacgctggacagctcatcgtcctcggaggatgaggaggaggaggaagaggaggaggaagacgaggacgaagaggggccccggcccaagcgccgctgccccttccagaagggcctggtgccggcctgctgaccccggccgcacactcgactttcctggtgctcaccacgcagaggggcacgggccagcctcgggcgcagagggaggagtgacctttctttttctttttattgtcgttcgttttgtttttccacccttttgcctggctcctggcacctgtacctctggactctcctatcgggggattaaaaaaaaaagtaaaatgaaaaaaaaaaaaaaaaaaaaaaaaaaaaaaaaaaaaaaaaaaaaaaaaaaaaaaaaaaaaaaaaaaaaaaaaaaaaaaaaaaaaaaaaaaaaaaaaaaa

SEQ ID NO: 12376 - DNA, 3369 bp, Homo sapiens
ggtcccgcccgccgcgctgccgctgagcgcatgggcccggaccgcgccgcgccgctccgggagccgggcccggggtcccgccaccaccgcgcgcgggacagattgattcactttggagctgtaagtactgatgtattagggtgcagcgctcattgttccttgacgcagagtcccaaaatgaatatccaagagcagggtttccccttggacctcggagcaagtttcaccgaagatgctccccgacccccagtgcctggtgaggagggagaactggtgtccacagacccgaggcccgccagctacagtttctgctccgggaaaggtgttggcattaaaggtgagacttcgacggccactccgaggcgctcggatctggacctggggtatgagcctgagggcagtgcctcccccaccccaccatacttgaagtgggctgagtcactgcattccctgctggatgaccaagatgggataagcctgttcaggactttcctgaagcaggagggctgtgccgacttgctggacttctggtttgcctgcactggcttcaggaagctggagccctgtgactcgaacgaggagaagaggctgaagctggcgagagccatctaccgaaagtacattcttgataacaatggcatcgtgtcccggcagaccaagccagccaccaagagcttcataaagggctgcatcatgaagcagctgatcgatcctgccatgtttgaccaggcccagaccgaaatccaggccactatggaggaaaacacctatccctccttccttaagtctgatatttatttggaatatacgaggacaggctcggagagccccaaagtctgtagtgaccagagctctgggtcagggacagggaagggcatatctggatacctgccgaccttaaatgaagatgaggaatggaagtgtgaccaggacatggatgaggacgatggcagagacgctgctccccccggaagactccctcagaagctgctcctggagacagctgccccgagggtctcctccagtagacggtacagcgaaggcagagagttcaggtatggatcctggcgggagccagtcaacccctattatgtcaatgccggctatgccctggccccagccaccagtgccaacgacagcgagcagcagagcctgtccagcgatgcagacaccctgtccctcacggacagcagcgtggatgggatccccccatacaggatccgtaagcagcaccgcagggagatgcaggagagcgtgcaggtcaatgggcgggtgcccctacctcacattccccgcacgtaccgggtgccgaaggaggtccgcgtggagcctcagaagttcgcggaggagctcatccaccgcctggaggctgtgcagcgcacgcgggaggccgaggagaagctggaggagcggctgaagcgcgtgcgcatggaggaggaaggtgaggacggcgatccatcgtcagggcccccagggccgtgtcacaagctgcctcccgcccccgcttggcaccacttcccgccccgctgtgtggacatgggctgtgccgggctccgggatgcacacgaggagaaccctgagagcatcctggacgagcacgtacagcgtgtgctgaggacacctggccgccagtcgcctgggcctggccatcgctccccggacagtgggcacgtggccaagatgccagtggcactggggggtgccgcctcggggcacgggaagcacgtacccaagtcaggggcgaagctggacgcggccggcctgcaccaccaccgacacgtccaccaccacgtccaccacagcacagcccggcccaaggagcaggtggaggccgaggccacccgcagggcccagagcagcttcgcctggggcctggaaccacacagccatggggcaaggtcccgaggctactcagagagtgttggcgctgcccccaacgccagtgatggcctcgcccacagtgggaaggtgggcgtggcgtgcaaaagaaatgccaagaaggctgagtcggggaagagcgccagcaccgaggtgccaggtgcctcggaggatgcggagaagaaccagaaaatcatgcagtggatcattgagggggaaaaggagatcagcaggcaccgcaggaccggccacgggtcttcggggacgaggaagccacagccccatgagaactccagacccttgtcccttgagcacccctgggccggccctcagctccggacctccgtgcagccctcccacctcttcatccaagaccccaccatgccaccccacccagctcccaaccccctaacccagctggaggaggcgcgccgacgtctggaggaggaagaaaagagagccagccgagcaccctccaagcagaggacaagatcgcagaggaaggtgggcggcgggagtgcccagccgtgtgacagcatcgttgtggcgtactacttctgcggggaacccatcccctaccgcaccctggtgaggggccgcgctgtcaccctgggccagttcaaggagctgctgaccaaaaagggcagctacagatactacttcaagaaagtgagcgacgagtttgactgtggggtggtgtttgaggaggttcgagaggacgaggccgtcctgcccgtctttgaggagaagatcatcggcaaagtggagaaggtggactgataggctggtgggctggccgctgtgccaggcgaggcccttggcgggcacgggtgtcacggccaggcagatgacctcgtactcaggagcccgatggggaacagtgttgggtgtaccacccatccctgtggtctacccgtgtctagaggcaggtagggggtccctccaagtggtccacaagcttctgtcctgcccccaaggaggcagcctggaccactcctcatagcaatacttggagggcccagcccaagtgaggcagccgaggtccctgctgccagcttcaggtgacccccccccatcccccggcacctcccttgggcacgtgtgctgggatctactttccctctgggatttgcccacgtacccaggtctgggtggggcccaggcccggatgcagaggcctgcagggcctctgtcaattgtacgcgccaccgagtgccttcaacacagcttgtctcttgcctgccactgtgtgaatcggcgacggagcactgcacctgcctccagccgccggctgtgcagtcctgggtcctcctttctgagggcccgtgtaaatatgtacatttctcaggctaggccagcaggggctgcccgagtctgtttttcatgcgatgacacttgtacaattaattatcttttcaaaggtacttggataataatgaaataaaactgtttttgaacctgcaaaaaaaaaaaaaaaaaaaaaaaaaaaaa

SEQ ID NO: 12377 - DNA, 3477 bp, Homo sapiens
ggtcccgcccgccgcgctgccgctgagcgcatgggcccggaccgcgccgcgccgctccgggagccgggcccggggtcccgccaccaccgcgcgcgggacagattgattcactttggagctgtaagtactgatgtattagggtgcagcgctcattgttccttgacgcagagtcccaaaatgaatatccaagagcagggtttccccttggacctcggagcaagtttcaccgaagatgctccccgacccccagtgcctggtgaggagggagaactggtgtccacagacccgaggcccgccagctacagtttctgctccgggaaaggtgttggcattaaaggtgagacttcgacggccactccgaggcgctcggatctggacctggggtatgagcctgagggcagtgcctcccccaccccaccatacttgaagtgggctgagtcactgcattccctgctggatgaccaagatgggataagcctgttcaggactttcctgaagcaggagggctgtgccgacttgctggacttctggtttgcctgcactggcttcaggaagctggagccctgtgactcgaacgaggagaagaggctgaagctggcgagagccatctaccgaaagtacattcttgataacaatggcatcgtgtcccggcagaccaagccagccaccaagagcttcataaagggctgcatcatgaagcagctgatcgatcctgccatgtttgaccaggcccagaccgaaatccaggccactatggaggaaaacacctatccctccttccttaagtctgatatttatttggaatatacgaggacaggctcggagagccccaaagtctgtagtgaccagagctctgggtcagggacagggaagggcatatctggatacctgccgaccttaaatgaagatgaggaatggaagtgtgaccaggacatggatgaggacgatggcagagacgctgctccccccggaagactccctcagaagctgctcctggagacagctgccccgagggtctcctccagtagacggtacagcgaaggcagagagttcaggtatggatcctggcgggagccagtcaacccctattatgtcaatgccggctatgccctggccccagccaccagtgccaacgacagcgagcagcagagcctgtccagcgatgcagacaccctgtccctcacggacagcagcgtggatgggatccccccatacaggatccgtaagcagcaccgcagggagatgcaggagagcgtgcaggtcaatgggcgggtgcccctacctcacattccccgcacgtaccgggtgccgaaggaggtccgcgtggagcctcagaagttcgcggaggagctcatccaccgcctggaggctgtgcagcgcacgcgggaggccgaggagaagctggaggagcggctgaagcgcgtgcgcatggaggaggaaggtgaggacggcgatccatcgtcagggcccccagggccgtgtcacaagctgcctcccgcccccgcttggcaccacttcccgccccgctgtgtggacatgggctgtgccgggctccgggatgcacacgaggagaaccctgagagcatcctggacgagcacgtacagcgtgtgctgaggacacctggccgccagtcgcctgggcctggccatcgctccccggacagtgggcacgtggccaagatgccagtggcactggggggtgccgcctcggggcacgggaagcacgtacccaagtcaggggcgaagctggacgcggccggcctgcaccaccaccgacacgtccaccaccacgtccaccacagcacagcccggcccaaggagcaggtggaggccgaggccacccgcagggcccagagcagcttcgcctggggcctggaaccacacagccatggggcaaggtcccgaggctactcagagagtgttggcgctgcccccaacgccagtgatggcctcgcccacagtgggaaggtgggcgtggcgtgcaaaagaaatgccaagaaggctgagtcggggaagagcgccagcaccgaggtgccaggtgcctcggaggatgcggagaagaaccagaaaatcatgcagtggatcattgagggggaaaaggagatcagcaggcaccgcaggaccggccacgggtcttcggggacgaggaagccacagccccatgagaactccagacccttgtcccttgagcacccctgggccggccctcagctccggacctccgtgcagccctcccacctcttcatccaagaccccaccatgccaccccacccagctcccaaccccctaacccagctggaggaggcgcgccgacgtctggaggaggaagaaaagagagccagccgagcaccctccaagcagaggtatgtgcaggaggttatgcggcggggacgcgcctgcgtcaggccagcgtgcgcgccggtgctgcacgtggtaccagccgtgtcggacatggagctctccgagacagagacaagatcgcagaggaaggtgggcggcgggagtgcccagccgtgtgacagcatcgttgtggcgtactacttctgcggggaacccatcccctaccgcaccctggtgaggggccgcgctgtcaccctgggccagttcaaggagctgctgaccaaaaagggcagctacagatactacttcaagaaagtgagcgacgagtttgactgtggggtggtgtttgaggaggttcgagaggacgaggccgtcctgcccgtctttgaggagaagatcatcggcaaagtggagaaggtggactgataggctggtgggctggccgctgtgccaggcgaggcccttggcgggcacgggtgtcacggccaggcagatgacctcgtactcaggagcccgatggggaacagtgttgggtgtaccacccatccctgtggtctacccgtgtctagaggcaggtagggggtccctccaagtggtccacaagcttctgtcctgcccccaaggaggcagcctggaccactcctcatagcaatacttggagggcccagcccaagtgaggcagccgaggtccctgctgccagcttcaggtgacccccccccatcccccggcacctcccttgggcacgtgtgctgggatctactttccctctgggatttgcccacgtacccaggtctgggtggggcccaggcccggatgcagaggcctgcagggcctctgtcaattgtacgcgccaccgagtgccttcaacacagcttgtctcttgcctgccactgtgtgaatcggcgacggagcactgcacctgcctccagccgccggctgtgcagtcctgggtcctcctttctgagggcccgtgtaaatatgtacatttctcaggctaggccagcaggggctgcccgagtctgtttttcatgcgatgacacttgtacaattaattatcttttcaaaggtacttggataataatgaaataaaactgtttttgaacctgcaaaaaaaaaaaaaaaaaaaaaaaaaaaaa

SEQ ID NO: 12378 - DNA, 2025 bp, Homo sapiens
ccacgcgtccgggccccgcccccgtcatggcgcccgaggagaacgcggggagcgaactcttgctgcagagtttcaagcgccgcttcctggcagcgcgcgccctgcgctccttccgctggcagagcttagaagcaaagttaagagactcatcagattctgagctgctgcgggatattttgcagaagacgtgctgtattgcccagaagccatcgtgtcgctggtcggggtcctgcggaggctggctgcctgccgggagcaccagcgggctcctcaattctacatggcccttaccgtctgcaacccagagatgtgccagctgttcaccaccgagctatgctggactgggatcagatgggaagcggaagctcatcatgaccagaaactgtttccctacagagagcacttggagatggcaaagctgaacctcacactgtaggactcacacatgactccaacgggattgtgagaattaagtcactctcgtgggaagaatttttatatgggaaagcggataaaactttcattggactggaatgtttggagaatgttaaattccaaatcaggaaccacaaactgcgctctaataagacatcggctatctaagcatgtgggttccccctttctgccagcagttctggttcttaagaaaatcaccataaatcagacatgaaaattctggctccaaaaatagcattttcattgtgcaaataaaaacgtgtgtatcaagtatgacattcccccaacgtggacacacttggttcctcacaaagccaagcccgctgcagctgccacatccctggacacactcgtttcctcacaaagccaagcccgctgcagcttccacatccctggacacactcggttcctcacaaagccaagcccgctgcagctgccacatccctggacacactcgtttcctcacaaagccaagcccgctgcagctgccacatccctggacacactcgtttcctcacaaagccaagcccgctgcagctgccacatccctggacacactcggttcctcaaaaagccaagccggctgcagctgccacatccctgggtttatgatgcagcaggtgcttttttcaagacaggaatcaaagtgttaggaacatggcagaaaggtgacacctggagaccaaatgcagggtaaggagtactgcagaggtcacagggaagtcacagaacagtaatacgctagcaggggcatggggcgtgaagaacagaagacaggaagcgtttcagagactccaaagaagaaatcagggccaaccacagcttcccgagtcattcaccaggtggcaccactgccttcatttcagcttccggccactgggaggcgctgctcgaaagggtttgccctgagacaccaagaagaagctgcgggaaggacagcaggggccctggggttttagcctctggcccaggagttatgtgtccataaccaaagggagcacagtctgcacccagctctcatcccatcagagctgctgcgactcccgcaggttcttccagaactggtttagcttgcctgcaggatcaggaaagtttgagaaaagcatctgcaaaatactaaagagcagagcttacttcattgcctgtccccaccccatcccaggtcaccacctggctgaacccaggtccccgacccaacaacaacccctcccaagtccctaactccctcacttggacttgagacccttcacaacccagcagcgctccgcctccaacttgacatcatgctttctggaaacttccccgtgtgtcccactttcccacacttggtgcgctggagcaccttccggcctctacatgctgtacgttcccctgtgagcaccctcctctcagcctctggccaacacagtcccacccatctgtgggtaacaagggggtgtgggtgttcttttcagccttgctaaactgtctgaatcaaggatcacaaactacagcctgcaggccaaatccagcccacagcctgtgtttgtaaataaagctttattggaacaaagaaaaaaaaaaaaaaaa

SEQ ID NO: 12379 - DNA, 2087 bp, Homo sapiens
atggcgccggaggagaactcggggagcgaactcttgctgcagagtttcaagcgccgcttcctggcggcgcgcgccctgcgctccttcccctggcagagcttagaagcaaagttaagagactcatcagattctgagctgctgcgggatattttgcagaagcacgaggctgtccacacagagcctttggatgagctgtacgaggtgctggcggagaccctgatggccaaggagtccacccagggccaccggagctatttgctgacgtgctgtattgcccagaagccatcgtgtcgctggtcggggtcctgcggaggctggctgcctgccgggagcaccagcgggctcctcaattctacatggcccttaccgtctgcaacccagagatgtgccagctgttcaccaccgagctatgctggactgggatcagatgggaagcggaagctcatcatgaccagaaactgtttccctacagagagcacttggagatggcaaagctgaacctcacactgtaggactcacacatgactccaacgggattgtgagaattaagtcactctcgtgggaagaatttttatatgggaaagcggataaaattttcattggactggaatgtttggagaatgttaaattccaaatcaggaaccacaaactgcgctctaataagacatcggctatctaagcatgtgggttccccctttctgccagcagttctggttcttaagaaaatcaccataaatcagacatgaaaattctggctccaaaaatagcattttcattgtgcaaatgaaaacgtgtgtatcaagtatgacattcccccaacgtggacacacttggttcctcacaaagccaagcccgctgcagctgccacatccctggacacactcgtttcctcacaaagccaagcccgctgcagctgccacatccctggacacactcggttcctcacaaagccaagcccgctgcagctgccacatccctggacacactcgtttcctcacaaagccaagcccgctgcagctgccacatccctggacacactcgtttcctcacaaagccaagcccgctgcagctgccacatccctggacacacttggttcctcacaaagccaagccggctgcagctgccacatccctgggtttatgatgcagcaggtgcttttttcaagacaggaatcaaagtgttaggaacatggcagaaaggtgacacctggagaccaaatgcagggtaaggagtactgcagaggtcacagggaagtcacagaacagtaatacgctagcaggggcatggggcgtgaagaacagaagacaggaagcgtttcagagactccaaagaagaaatcagggccaaccacagcttcccgagtcattcaccaggtggcaccactgccttcatttcagcttccggccactgggaggcgctgctcgaaagggtttgccctgagacaccaagaagaagctgcgggaaggacagcaggggccctggggttttagcctctggcccaggagttatgtgtccataaccaaagggagcacagtctgcacccagctctcatcccatcagagctgctgcgactcccgcaggttcttccagaactggtttagcttgcctgcaggatcaggaaagtttgagaaaagcatctgcaaaatactaaagagcagagcttacttcattgtctgtccccaccccatcccaggtcaccacctggctgaacccaggtccccgacccaaaaacaacccctcccaagtccctaactccctcacttggacttgagacccttcacaacccagcagcgctccgcctccaacttgacatcatgctttctggaaacttccccgtgtgtcccactttcccacacttggtgcgctggagcaccttccggcctctacatgctgtacgttcccctgtgagcaccctcctctcagcctctggccaacacagtcccacccatctgtgggtaacaagggggtgtgggtgttcttttcagccttgctaaactgtctgaatcaaggatcacaaactacagcctgcaggccaaatccagcccacagcctgtgtttgtaaataaagctttattggaacaaagcc

SEQ ID NO: 12380 - DNA, 12227 bp, Homo sapiens
tgagctgcgaggcccgagagtcagaacctgggggagagggatggtctctgcacgggggggagccggaggagccgccgccgctgccgacgccaccgccgcagccgccgccgccgccgccccggcacccgcctcccggcgctgacggtctcgtacgaagccggcgagggggagccagcagcggcggtcgccggcacgccgcccagcatggtccgggaaaccaggcatctctgggtgggcaacttacccgagaacgtgcgggaagagaagatcatcgagcatttcaaacgatatggccgcgtggaaagtgtcaaaattcttcccaagaggggatctgaaggaggagtggctgcctttgtggattttgtggacatcaaaagtgcacagaaagctcacaactcggtcaacaaaatgggtgacagagacctacgcacggattataatgaaccaggcaccatcccgagtgctgctcggggattggatgatacagtttccatagcatctcgtagtagagaggtttctgggttcagaggaggtggtggagggcctgcttatggtcccccaccgtcacttcatgcacgagaaggacgttatgagcggagacttgatggggcttcagataacagggagcgtgcttatgaacatagtgcctatggacaccatgaacgggggacgggaggatttgatcggacaagacattacgatcaggattactatagagatcctcgagagcggactttacaacatgggctctattacgcttctcggagtcgaagtccaaatcgctttgatgctcatgacccccgatatgaacctagggctcgcgagcagtttacactgcccagtgtggtacacagggatatctacagggatgatattacccgggaggtacgaggcagaaggccagagcggaattaccagcacagcaggagtcggtcaccacattcatcccagtctagaaatcagtctcctcagagactggctagccaagcatctagacccacaaggtcccctagcggcagcggctctagaagtagatcctccagtagtgattcaatcagcagcagcagtagtaccagcagtgacagcagtgattccagcagtagttcaagtgatgattctccagctcgatcagttcagtctgcagcagtccctgcacccacttcccagttgctttcatctctggaaaaagatgagccccgtaaaagttttggcatcaaggtccagaatcttccagtacgctctacagatacaagccttaaagatggccttttccatgaatttaagaaatttggaaaagtaacttcagtgcagatacatggaacttcagaagagaggtatggtctggtattctttcggcagcaagaggaccaagaaaaagccttgactgcatcaaaaggaaaacttttctttggcatgcagattgaagtaacagcatggataggtccagaaacagaaagtgaaaatgaatttcgccccttggatgaaaggatagatgaatttcaccccaaagcaacaagaactctctttattggcaaccttgaaaaaaccactacttaccatgaccttcgcaacatcttccagcgctttggagaaattgtggatattgacattaagaaagtaaatggagttcctcagtatgcgtttctgcaatactgtgatattgctagcgtttgtaaagctattaagaagatggatggggaatatcttggaaataatcgcctcaagctgggttttggaaagagcatgcctacaaactgcgtgtggctagatgggctttcttcgaatgtgtcagatcagtatttaacacgacatttctgccgatatgggcctgtggtaaaggtggtgtttgaccgcttaaaaggcatggccctggttctctacaatgaaattgaatatgcacaagcagctgtaaaagagaccaaagggaggaaaatcggtgggaataaaattaaggtggattttgcaaatcgggaaagtcagctggctttttatcactgcatggagaaatctggtcaagacatcagagacttttatgaaatgttagccgaaagaagagaggaacgaagggcatcctacgactataaccaagatcgtacatattatgagagtgttcgaactccaggcacttatcctgaggattccaggcgggactatccagctcgagggagagagttttattcagaatgggaaacttaccaaggagactactatgaatcacgatactacgatgatcctcgggaatacagggattacaggaatgatccttatgaacaagatattagggaatatagttacaggcaaagggaacgagaaagagaacgtgaaagatttgagtctgaccgggacagagaccatgagaggaggccgattgaacgaagtcaaagtcctgttcacttgcgacgtccacagagtcctggagcgtctccctctcaggcagagaggttgccgagtgattctgagaggaggctttacagccgatcctcagaccggagtggaagctgtagctcactctcccctccaagatatgagaaactggacaagtctcgtttggagcgctatacaaaaaatgaaaagacagataaagaacgaacttttgatccggagagagtggagagagagagacgcttaatacggaaggaaaaagtggaaaaggacaaaactgacaagcagaaacgcaaaggaaaggttcactcccctagttctcagtcttcagaaacggaccaagaaaatgagcgagagcaaagccctgaaaagcccaggagttgtaataaactgagcagagagaaagctgacaaagagggaatagcgaaaaaccgcctggaactcatgccttgcgtggttttgactcgagtgaaagagaaagagggaaaggtcattgaccacactcctgtggaaaagttgaaagccaagcttgataatgacactgtcaaatcttctgccctggaccagaaacttcaggtctctcagacggagcctgcaaaatctgacttgtctaaactggaatcagttagaatgaaagtaccaaaggaaaaggggctttcaagccatgttgaagtggtggagaaggaaggcaggcttaaagccaggaagcacctcaagcctgagcagcctgcagatggggtaagtgctgtggatctggagaagctggaagccaggaaaaggcgctttgcagattccaatttaaaagcagaaaagcaaaaaccagaggtcaagaaaagcagtccagagatggaggatgctcgcgtgctttcaaaaaagcagcctgacgtgtcctctagagaggtcattctgctgagggaaggagaggctgaaagaaagcctgtgaggaaagaaattcttaaaagagaatctaaaaaaatcaaactggacagacttaatactgttgccagccccaaagactgtcaggagcttgccagtatttctgttgggtctggctcaaggcccagctcagacctacaagcaagactgggagaactagcaggtgaatctgtggaaaatcaagaagtccaatcaaaaaagcccattccctcaaaaccacagctcaaacagctgcaggtattagatgatcaaggaccagagagagaagacgttaggaaaaactattgcagtcttcgtgatgaaacacctgaacgtaaatcaggccaagagaaatcacattcagtaaatactgaagaaaaaattggcattgacatcgatcacacgcagagttaccgaaaacaaatggaacagagtcgtaggaaacagcagatggaaatggaaatagccaagtctgagaagtttggcagtcctaaaaaagatgtagatgaatatgaaagacgtagcctcgttcacgaggtaggcaaaccccctcaagatgtcactgatgactctcctcctagcaaaaagaaaaggatggatcatgtcgattttgatatctgcaccaagcgagaacggaattacagaagttcacgccaaatcagcgaagattctgaaaggactggtggttctcccagtgtccgacatggttccttccatgaagatgaggatcccataggctcccctaggctactgtcagtaaaagggtctcctaaagtagatgaaaaagtcctcccctattctaacataacagtcagggaagagtctttaaaatttaatccttatgattctagcaggagagaacagatggcagatatggccaaaataaaactatctgtcttgaattctgaagatgaactaaatcgttgggactctcagatgaaacaggatgctggcagatttgatgtgagtttcccaaacagcataattaagagagatagccttcgaaaaaggtctgtacgagatctggaacctggtgaggtgccttctgattctgacgaagatggtgaacacaaatcccactcacccagagcctctgcattatatgaaagttctcgattgtcttttttattgagggacagagaagacaagctacgtgagcgagatgaaagactctctagttctttagaaaggaacaaattttactcttttgcattggataagacaatcacaccagacactaaagctttgcttgaaagagctaaatccctctcttcatctcgtgaagaaaattggtcttttcttgattgggactcccgatttgcaaattttcgaaacaacaaagataaagaaaaggttgactctgctccaagacctattccatcctggtacatgaaaaagaagaaaattaggactgattcagaagggaaaatggatgataagaaagaggaccataaagaagaagagcaagagaggcaggaattgtttgcttctcgttttttacacagctcaatctttgaacaagattccaagcgattgcagcatctagagagaaaagaggaagattctgacttcatttctggtaggatctatgggaagcagacatctgagggagcaaacagcacaactgattccattcaagaaccagtagttctgttccatagcagatttatggagctcacacggatgcaacagaaagaaaaagaaaaagaccagaaacccaaagaggttgagaaacaggaagatacagagaatcatcccaagaccccagaatctgctcctgagaataaagattcagaactgaaaactccaccttccgttgggcctccaagtgtcacagtcgtaactctagaatcagccccatcagcactagagaagaccactggtgacaaaacggtagaggcgcctttggtaacagaagagaagactgtggagccagctaccgtctcagaagaagcaaagcctgcatctgaacctgctcctgcccctgtggaacagctggaacaagtagacctgcccccaggagcagaccccgataaagaagctgccatgatgcctgcgggtgttgaggaaggttcatcaggtgaccagccgccttatctggatgccaagcctccaactcccggggcctcgttttcccaggcagagagcaacgtagatccagagcctgacagtacccagccactttcaaaaccagctcagaagtctgaggaagccaatgagccaaaggccgaaaagccagacgccactgcagatgctgagcctgatgcaaaccagaaagccgaagctgctcctgagtctcagcccccagcttctgaagatttagaggttgatcctccagttgctgcaaaggataaaaagccaaacaaaagcaagcgttcaaagacccctgttcaggcagctgcagtgagtatcgtggagaagcccgtcacaaggaagagtgagaggatagaccgggaaaaactcaagcggtccaattctcctcggggagaagcacagaagcttttggaattgaagatggaggcagagaagattacaaggactgcttctaaaaactctgctgcagaccttgaacatcccgaaccaagtttgcctctcagccgaacaaggcgccggaatgtaaggagcgtctatgcaaccatgggtgaccatgaaaaccgctctcctgtcaaagagcccgttgagcaaccaagagtgaccagaaagagattggagcgagagcttcaggaggctgcagcggttcccaccacccctcggaggggaaggcctccaaagacacgccggcgagccgatgaagaggaggagaacgaggccaaggaacctgcagaaacactcaagccacctgagggatggcggtcgccaaggtcccagaaaactgcagctggtggtggaccccaagggaaaaagggaaaaaatgaaccgaaggtggatgctacacgtcctgaggccaccactgaggtgggcccccaaataggcgtgaaagagagctccatggaacccaaggctgctgaggaggaggcagggagtgaacagaaacgtgacagaaaagatgctggcacagacaaaaacccccctgaaaccgcccctgttgaagttgtagagaaaaaaccggcccctgaaaaaaactccaaatcaaagagaggaagatctcgaaactccaggttagcagtggacaaatctgcaagtctgaaaaatgtggatgctgctgtcagtcccaggggggctgcagcacaggcaggggagagggaatctggggtggtggcagtctcccctgagaaaagtgagagtccccaaaaggaggatggtttatcatcccagttgaaaagtgatccagttgatccagacaaggaaccagagaaagaagacgtgtctgcctctgggccgtccccagaagccacccagttagccaagcagatggagctggagcaggccgtggaacacatcgcaaagctcgctgaggcctctgcctctgctgcctataaggcagatgcaccagagggccttgccccagaggacagggacaagcctgcacaccaagcaagtgaaacagagctggctgcggccatcggctccatcatcaatgacatttctggggagccagaaaacttcccagcacctccaccttatcctggagaatcccagacagatctgcaaccccccgcaggtgcacaggcgctgcagccttctgaggaaggaatggagacagatgaggctgtatctggcatcctggaaactgaggctgctacagaatcttctaggcctccagtcaatgctcctgacccctcagccggcccaacagataccaaggaagccagaggaaatagcagtgaaacctcacactcagtgccagaagccaaagggtctaaagaagtggaagtcactcttgttcggaaagacaaagggcgccagaaaacaacccgatcacgccgcaagcgaaacacaaacaagaaagtggtggctcctgtagagagccatgtccctgaatccaaccaagctcaaggtgagagtcctgctgcaaatgaggggacaacagtacagcaccccgaagccccacaggaagaaaagcagagtgagaaaccccattccactcctcctcagtcatgtacttctgacctaagcaagattccctccacagagaattcgtcccaagaaatcagtgttgaggaaaggactccaaccaaagcatctgtgcccccagaccttcccccacctccccagccagcaccggtggatgaggagcctcaagccaggttcagggtgcattccatcattgaaagtgacccggtgaccccacccagcgatccaagcatccccatacccacactgccttctgtaactgcagcaaagctctcacctcctgtcgcctctggggggatcccacaccagagcccccctactaaggtgacagagtggatcacaaggcaggaggagccacgggctcagtctactccatctccagctcttcccccagacacaaaggcctctgatgttgacaccagctccagcaccctgaggaagattctcatggaccccaagtatgtgtctgccacaagtgtcacttccacaagtgtcaccacagccattgcagagcctgtcagtgctgccccttgcctacatgaggccccgcccccgccagttgactctaaaaagcctttagaagaaaaaacagcacctccagtgacaaacaactctgagatacaagcctcggaggtgctggtagctgctgacaaggaaaaggtggctccagtcattgctcccaaaattacctctgttattagccggatgcctgtcagcattgacctggaaaattcacagaagataaccttggcaaaaccagctcctcaaaccctcactggtctggtgagcgcactcactggcctggtgaacgtctccctggtcccggtgaatgccctgaaaggccccgtgaagggctcagtgaccacactgaaaagtttggtgagcacccctgctgggcccgtgaacgtcctgaaagggcctgtgaatgttcttacggggccagtgaatgttctcaccactccagtgaacgccacggtgggcacagtgaatgccgccccaggcacagtcaatgccgctgcgagtgcagtgaatgccacagcaagtgcagtgaccgtcacagcgggtgcggttactgctgcatctggtggtgtaacggccacaacaggcacggtgacaatggcaggggcagtgattgcgccgtcaacaaagtgcaaacagagagcgagtgctaatgaaaacagtcggttccacccagggtccatgcctgtgatcgacgatcgtccggcagacgcgggctcaggggcggggctgcgtgtgaacacttctgaaggggttgtgctcctgagttactcagggcagaagaccgaaggcccacagcggatcagcgccaagatcagccagatccccccggccagtgcaatggacattgaatttcagcagtcagtgtccaagtcccaggtcaaacctgattctgtcacagcatcgcagcctccatccaaaggccctcaagctcctgcaggctatgcgaacgtggccacccattccacgttggtactgaccgcccagacatataatgcctctcctgtgatttcgtctgtgaaggccgataggccatccttggagaagcccgagcccattcacctctcggtgtccacgcctgtcacccagggaggcacagtgaaggttctcacccaggggatcaacacaccccctgtgctggttcacaaccagctggtcctcaccccaagcattgtcaccacaaacaagaagcttgctgaccccgtcacccttaaaatcgagaccaaggtccttcagccggccaacctggggtccacgctcacgccccaccaccctcctgctctgcccagcaaactgcctacagaagtcaaccatgtcccctcggggcccagcatcccagcagatcgaactgtctcccatttggcagctgcaaagctagatgctcattctcctcgaccaagtggacccgggccatcctcattcccaagggcaagccaccccagcagtactgcatctacggcgctctccaccaacgccacagtcatgctggctgcaggcatcccagtgccccagttcatctccagcatccacccagagcagtctgtcatcatgccaccccacagcatcacccagactgtgtccctgagccacctctcccagggcgaggtgagaatgaacactcccacgctgcccagtatcacctacagcatccggccagaagcgcttcactctcctcgggctccgctgcagccccagcaaatagaggtcagggccccacagcgtgccagcaccccgcagccagccccagctggtgtgcctgcactggcctcccagcaccctcccgaggaggaagtgcattatcaccttcctgtcgctcgagccacagcccctgtgcagtcagaggtactagtcatgcagtctgagtaccgactgcacccctatactgtgccacgggatgtgaggatcatggtgcatccacatgtgacggcagtcagcgagcagcccagggccgcggatggggtggtgaaggtgccaccagccagcaaggcccctcagcagccagggaaggaagctgccaagacaccagatgccaaagctgcccccacccccacccctgcccccgtccctgtccctgtcccccttcctgcccctgctcctgcccctcatggtgaggcccgtatcctcacagttacccccagtaaccaactccaggggctgcctctgacccctcctgtggtggtgacccatggggtgcagattgtgcactccagcggggagctgtttcaagagtaccggtacggcgacatccgcacctaccaccccccggcccagctcacacacactcagtttcccgccgcttcctctgttggcctgccttcccggaccaagacagctgctcagggccctcctcctgaaggtgagcccctgcagcctcctcagcctgtgcagtccacacagcctgcccagcctgcaccaccctgcccgccctcccagctcggtcagcccggccagccaccaagcagcaagatgcctcaagtgtcccaggaggcaaaggggacccagacgggagtagagcagcctcgcctcccagctggacctgcaaacaggccacctgagcctcacacccaggttcagagggcacaagcagaaacaggcccgacttccttcccctcccctgtgtctgtctccatgaagcctgaccttccagtctctcttcccactcagactgccccaaaacagccgttgtttgtcccaacaacctctggccccagcaccccaccaggactggttctgccacacactgaattccagccagcccccaaacaagattcctctccacacctgacttcccagagacccgtggatatggttcaacttctgaagaagtaccccatcgtgtggcagggcctgctggccctcaagaatgacacagctgctgtgcagctccacttcgtctctggcaacaacgtcctggcccatcggtccctgcccctttctgaaggagggcccccactaaggatcgcccagaggatgcggctggaggcaacgcagctggaaggggttgcccgaaggatgacggtggagacagattactgtctgctgctggctctgccctgtggccgtgaccaagaggatgttgtgagccagaccgagtccctcaaggctgccttcatcacttacctgcaggccaagcaggcggcagggatcatcaacgttcccaaccctggctccaatcagcctgcctacgtgctgcagatcttcccgccctgtgagttctctgagagtcacctgtcccgcctggcccctgacctccttgccagcatctccaacatctctccccacctcatgattgtcattgcctccgtgtgagccactgagtggttatcacctcagtgaatcttcccagggctctgcagtaaaaacaaaggacaacccagccaagcagaggaagaagctgccgaaggggacagactccactgccagacggccagccgtttgctgtcctgccgcccggctcagtcggccagacttcctctaggagtggtgctgctaccttgtatgtttacataatgctttagcccaaggacacatcaccaacccatggactcgcagacaccggggctgggtttctctttcctctttttggagaaaaggaacagggcagtggaatgaaaattttttgtttgtttgtttttaagaaacaagaaaacagaactgcctttgcactaaattagtgacttggacttttgcccagtgaagacaggctgtgacactctggatgtcttggtgtgtgtagacacacattgcagactcttaacgcaggaaggacttcaaacttctgctgagaccttggggtcaaggaacatttcattggttttttttgtccacccccatctcccttgctcatttggatgcgtcaccttaattctcctgctgccaccgtctttgattcaccgggatgtacagtttacagttgaagagcaaacagaaaggttttctcttggtgggatatgcagaacttgggatgtgtgtatatataaatatataatatatataaatatatataatactgacttaaaaaatcaaatcccccgacatacgttttttttaatctgtgccaaaaatgtgttttcagaggaaatcttattttcatattcagactttgtattgcccactcatttgtataagtgcgcttcggtacagcacgggtcctgctcccgcgatgtggaagtgtcacacggcacctgtacaaaaagactggctaacccctcttcctattaccttgatctcttcccccaacttcctaacacttattaatttatgaaactgtttttctcagcgcagttttgttttgtgtgtccattggattacaaactttattaaaaaatataaaacac

SEQ ID NO: 12381 - DNA, 952 bp, Homo sapiens
ttggtccaagcaagaaggcagtggtctactccatcggcaacatgctggtcctttatggacacagcacccaggaccttccggaaaccaatgcccgcgtagtcggagggactgaggccgggaggaattcctggccctctcagatttccctccagtaccggtctggaggttcccggtatcacacctgtggagggacccttatcagacagaactgggtgatgacagctgctcactgcgtggattaccagaagactttccgcgtggtggctggagaccataacctgagccagaatgatggcactgagcagtacgtgagtgtgcagaagatcgtggtgcatccatactggaacagcgataacgtggctgccggctatgacatcgccctgctgcgcctggcccagagcgttaccctcaatagctatgtccagctgggtgttctgccccaggagggagccatcctggctaacaacagtccctgctacatcacaggctggggcaagaccaagaccaatgggcagctggcccagaccctgcagcaggcttacctgccctctgtggactacgccatctgctccagctcctcctactggggctccactgtgaagaacaccatggtgtgtgctggtggagatggagttcgctctggatgccagggtgactctgggggccccctccattgcttggtgaatggcaagtattctgtccatggagtgaccagctttgtgtccagccggggctgtaatgtctccaggaagcctacagtcttcacccaggtctctgcttacatctcctggataaataatgtcatcgcctccaactgaacattttcctgagtccaacgaccttcccaaaatggttcttagatctgcaataggacttgcgatcaaaaagtaaaacacattctgaaagactattgagccattgatagaaaagcaaataaaactagatatacatt

SEQ ID NO: 12382 - DNA, 10697 bp, Homo sapiens
cacagtggtcctccgccggctacggcgctgcgtcactggtttgcaggcgctttcctcttggaagtggcgactgctgcgggcctgagcgctggtctcacgcgcctcgggagccaggttggcggcgcgatgaggcgcagcaaggctgacgtggagcggtacatcgcctcggtgcagggctccaccccgtcgcctcgacagaagtcaatgaaaggattctattttgcaaagctgtattatgaagctaaagaatatgatcttgctaaaaaatacatatgtacttacattaatgtgcaagagagggatcccaaagctcacagatttctgggtcttctttatgaattggaagaaaacacagacaaagccgttgaatgttacaggcgttcagtggaattaaacccaacacaaaaagatcttgtgttgaagattgcagaattgctttgtaaaaatgatgttactgatggaagagcaaaatactggcttgaaagagcagccaaacttttcccaggaagtcctgcaatttataaactaaaggaacagcttctagattgtgaaggtgaagatggatggaataaactttttgacttgattcagtcagaactttatgtaagacctgatgacgtccatgtgaacatccggctagtggaggtgtatcgctcaactaaaagattgaaggatgctgtggcccactgccatgaggcagagaggaacatagctttgcgttcaagtttagaatggaattcgtgtgttgtacagacccttaaggaatatctggagtctttacagtgtttggagtctgataaaagtgactggcgagcaaccaatacagacttactgctggcctatgctaatcttatgcttcttacgctttccactagagatgtgcaggaaagtagagaattactgcaaagttttgatagtgctcttcagtctgtgaaatctttgggtggaaatgatgaactgtcagctactttcttagaaatgaaaggacatttctacatgcatgctggttctctgcttttgaagatgggtcagcatagtagtaatgttcaatggcgagctctttctgagctggctgcattgtgctatctcatagcatttcaggttccaagaccaaagattaaattaataaaaggtgaagctggacaaaatctgctggaaatgatggcctgtgaccgactgagccaatcagggcacatgttgctaaacttaagtcgtggcaagcaagattttttaaaagagattgttgaaacttttgccaacaaaagcgggcagtctgcattatatgatgctctgttttctagtcagtcacctaaggatacatcttttcttggtagcgatgatattggaaacattgatgtacgagaaccagagcttgaagatttgactagatacgatgttggtgctattcgagcacataatggtagtcttcagcaccttacttggcttggcttacagtggaattcattgcctgctttacctggaatccgaaaatggctaaaacagcttttccatcatttgccccatgaaacctcaaggcttgaaacaaatgcacctgaatcaatatgtattttagatcttgaagtatttctccttggagtagtatataccagccacttacaattaaaggagaaatgtaattctcaccacagctcctatcagccgttatgcctgccccttcctgtgtgtaaacagctttgtacagaaagacaaaaatcttggtgggatgcggtttgtactctgattcacagaaaagcagtacctggaaacgtagcaaaattgagacttctagttcagcatgaaataaacactctaagagcccaggaaaaacatggccttcaacctgctctgcttgtacattgggcagaatgccttcagaaaacgggcagcggtcttaattctttttatgatcaacgagaatacatagggagaagtgttcattattggaagaaagttttgccattgttgaagataataaaaaagaagaacagtattcctgaacctattgatcctctgtttaaacattttcatagtgtagacattcaggcatcagaaattgttgaatatgaagaagacgcacacataacttttgctatattggatgcagtaaatggaaatatagaagatgctgtgactgcttttgaatctataaaaagtgttgtttcttattggaatcttgcactgatttttcacaggaaggcagaagacattgaaaatgatgccctttctcctgaagaacaagaagaatgcaaaaattatctgagaaagaccagggactacctaataaagattatagatgacagtgattcaaatctttcagtggtcaagaaattgcctgtgcccctggagtctgtaaaagagatgcttaattcagtcatgcaggaactcgaagactatagtgaaggaggtcctctctataaaaatggttctttgcgaaatgcagattcagaaataaaacattctacaccgtctcctaccaaatattcactatcaccaagtaaaagttacaagtattctcccaaaacaccacctcgatgggcagaagatcagaattctttactgaaaatgatttgccaacaagtagaggccattaagaaagaaatgcaggagttgaaactaaatagcagtaactcagcatcccctcatcgttggcccacagagaattatggaccagactcggtgcctgatggatatcaggggtcacagacatttcatggggctccactaacagttgcaactactggcccttcagtatattatagtcagtcaccagcatataattcccagtatcttctcagaccagcagctaatgttactcccacaaagggcccagtctatggcatgaataggcttccaccccaacagcatatttatgcctatccgcaacagatgcacacaccgccagtgcaaagctcatctgcttgtatgttctctcaggagatgtatggtcctcctgcattgcgttttgagtctcctgcaacgggaattctatcgcccaggggtgatgattactttaattacaatgttcaacagacaagcacaaatccacctttgccagaaccaggatatttcacaaaacctccgattgcagctcatgcttcaagatctgcagaatctaagactatagaatttgggaaaactaattttgttcagcccatgccgggtgaaggattaaggccatctttgccaacacaagcacacacaacacagccaactccttttaaatttaactcaaatttcaaatcaaatgatggtgacttcacgttttcctcaccacaggttgtgacacagccccctcctgcagcttacagtaacagtgaaagccttttaggtctcctgacttcagataaacccttgcaaggagatggctatagtggagccaaaccaattcctggtggtcaaaccattgggcctcgaaatacattcaattttggaagcaaaaatgtgtctggaatttcatttacagaaaacatggggtcgagtcagcaaaagaattctggttttcggcgaagtgatgatatgtttactttccatggtccagggaaatcagtatttggaacacccactttagagacagcaaacaagaatcatgagacagatggaggaagtgcccatggggatgatgatgatgacggtcctcactttgagcctgtagtacctcttcctgataagattgaagtaaaaactggtgaggaagatgaagaagaattcttttgcaaccgcgcgaaattgtttcgtttcgatgtagaatccaaagaatggaaagaacgtgggattggcaatgtaaaaatactgaggcataaaacatctggtaaaattcgccttctaatgagacgagagcaagtattgaaaatctgtgcaaatcattacatcagtccagatatgaaattgacaccaaatgctggatcagacagatcttttgtatggcatgcccttgattatgcagatgagttgccaaaaccagaacaacttgctattaggttcaaaactcctgaggaagcagcactttttaaatgcaagtttgaagaagcccagagcattttaaaagccccaggaacaaatgtagccatggcgtcaaatcaggctgtcagaattgtaaaagaacccacaagtcatgataacaaggatatttgcaaatctgatgctggaaacctgaattttgaatttcaggttgcaaagaaagaagggtcttggtggcattgtaacagctgctcattaaagaatgcttcaactgctaagaaatgtgtatcatgccaaaatctaaacccaagcaataaagagctcgttggcccaccattagctgaaactgtttttactcctaaaaccagcccagagaatgttcaagatcgatttgcattggtgactccaaagaaagaaggtcactgggattgtagtatttgtttagtaagaaatgaacctactgtatctaggtgcattgcgtgtcagaatacaaaatctgctaacaaaagtggatcttcatttgttcatcaagcttcatttaaatttggccagggagatcttcctaaacctattaacagtgatttcagatctgttttttctacaaaggaaggacagtgggattgcagtgcatgtttggtacaaaatgaggggagctctacaaaatgtgctgcttgtcagaatccgagaaaacagagtctacctgctacttctattccaacacctgcctcttttaagtttggtacttcagagacaagtaaaactctaaaaagtggatttgaagacatgtttgctaagaaggaaggacagtgggattgcagttcatgcttagtgcgaaatgaagcaaatgctacaagatgtgttgcttgtcagaatccggataaaccaagtccatctacttctgttccagctcctgcctcttttaagtttggtacttcagagacaagcaaggctccaaagagcggatttgagggaatgttcactaagaaggagggacagtgggattgcagtgtgtgcttagtaagaaatgaagccagtgctaccaaatgtattgcttgtcagaatccaggtaaacaaaatcaaactacttctgcagtttcaacacctgcctcttcagagacaagcaaggctccaaagagcggatttgagggaatgttcactaagaaggagggacagtgggattgcagtgtgtgcttagtaagaaatgaagccagtgctaccaaatgtattgcttgtcagaatccaggtaaacaaaatcaaactacttctgcagtttcaacacctgcctcttcagagacaagcaaggctccaaagagcggatttgagggaatgttcactaagaaggaaggacagtgggattgcagtgtgtgcttagtaagaaatgaagccagtgctaccaaatgtattgcttgtcagtgtccaagtaaacaaaatcaaacaactgcaatttcaacacctgcctcttcggagataagcaaggctccaaagagtggatttgaaggaatgttcatcaggaaaggacagtgggattgtagtgtttgctgtgtacaaaatgagagttcttccttaaaatgtgtggcttgtgatgcctctaaaccaactcataaacctattgcagaagctccttcagctttcacactgggctcagaaatgaagttgcatgactcttctggaagtcaggtgggaacaggatttaaaagtaatttctcagaaaaagcttctaagtttggcaatacagagcaaggattcaaatttgggcatgtggatcaagaaaattcaccttcatttatgtttcagggttcttctaatacagaatttaagtcaaccaaagaaggattttccatccctgtgtctgctgatggatttaaatttggcatttcggaaccaggaaatcaagaaaagaaaagtgaaaagcctcttgaaaatggtactggcttccaggctcaggatattagtggccagaagaatggccgtggtgtgatttttggccaaacaagtagcacttttacatttgcagatcttgcaaaatcaacttcaggagaaggatttcagtttggcaaaaaagaccccaatttcaagggattttcaggtgctggagaaaaattattctcatcacaatacggtaaaatggccaataaagcaaacacttccggtgactttgagaaagatgatgatgcctataagactgaggacagcgatgacatccattttgaaccagtagttcaaatgcccgaaaaagtagaacttgtaacaggagaagaagatgaaaaagttctgtattcacagcgggtaaaactatttagatttgatgctgaggtaagtcagtggaaagaaaggggcttggggaacttaaaaattctcaaaaacgaggtcaatggcaaactaagaatgctgatgcgaagagaacaagtactaaaagtgtgtgctaatcattggataacgactacgatgaacctgaagcctctctctggatcagatagagcatggatgtggttagccagtgatttctctgatggtgatgccaaactagagcagttggcagcaaaatttaaaacaccagagctggctgaagaattcaagcagaaatttgaggaatgccagcggcttctgttagacataccacttcaaactccccataaacttgtagatactggcagagctgccaagttaatacagagagctgaagaaatgaagagtggactgaaagatttcaaaacatttttgacaaatgatcaaacaaaagtcactgaggaagaaaataagggttcaggtacaggtgcggccggtgcctcagacacaacaataaaacccaatcctgaaaacactgggcccacattagaatgggataactatgatttaagggaagatgctttggatgatagtgtcagtagtagctcagtacatgcttctccattggcaagtagccctgtgagaaaaaatcttttccgttttggtgagtcaacaacaggatttaacttcagttttaaatctgctttgagtccatctaagtctcctgccaagttgaatcagagtgggacttcagttggcactgatgaagaatctgatgttactcaagaagaagagagagatggacagtactttgaacctgttgttcctttacctgatctagttgaagtatccagtggtgaggaaaatgaacaagttgtttttagtcacagggcaaaactctacagatatgataaagatgttggtcaatggaaagaaaggggcattggtgatataaagattttacagaattatgataataagcaagttcgtatagtgatgagaagggaccaagtattaaaactttgtgccaatcacagaataactccagacatgactttgcaaaatatgaaagggacagaaagagtatggttgtggactgcatgtgattttgcagatggagaaagaaaagtagagcatttagctgttcgttttaaactacaggatgttgcagactcgtttaagaaaatttttgatgaagcaaaaacagcccaggaaaaagattctttgataacacctcatgtttctcggtcaagcactcccagagagtcaccatgtggcaaaattgctgtagctgtattagaagaaaccacaagagagaggacagatgttattcagggtgatgatgtagcagatgcaacttcagaagttgaagtgtctagcacatctgaaacaacaccaaaagcagtggtttctcctccaaagtttgtatttggttcagagtctgttaaaagcatttttagtagtgaaaaatcaaaaccatttgcattcggcaacagttcagccactgggtctttgtttggatttagttttaatgcacctttgaaaagtaacaatagtgaaactagttcagtagcccagagtggatctgaaagcaaagtggaacctaaaaaatgtgaactgtcaaagaactctgatatcgaacagtcttcagatagcaaagtcaaaaatctctttgcttcctttccaacggaagaatcttcaatcaactacacatttaaaacaccagaaaaggcaaaagagaagaaaaaacctgaagattctccctcagatgatgatgttctcattgtatatgaactaactccaaccgctgagcagaaagcccttgcaaccaaacttaaacttcctccaactttcttctgctacaagaatagaccagattatgttagtgaagaagaggaggatgatgaagatttcgaaacagctgtcaagaaacttaatggaaaactatatttggatggctcagaaaaatgtagacccttggaagaaaatacagcagataatgagaaagaatgtattattgtttgggaaaagaaaccaacagttgaagagaaggcaaaagcagatacgttaaaacttccacctacatttttttgtggagtctgtagtgatactgatgaagacaatggaaatggggaagactttcaatcagagcttcaaaaagttcaggaagctcaaaaatctcagacagaagaaataactagcacaactgacagtgtatatacaggtgggactgaagtgatggtaccttctttctgtaaatctgaagaacctgattctattaccaaatccattagttcaccatctgtttcctctgaaactatggacaaacctgtagatttgtcaactagaaaggaaattgatacagattctacaagccaaggggaaagcaagatagtttcatttggatttggaagtagcacagggctctcatttgcagacttggcttccagtaattctggagattttgcttttggttctaaagataaaaatttccaatgggcaaatactggagcagctgtgtttggaacacagtcagtcggaacccagtcagccggtaaagttggtgaagatgaagatggtagtgatgaagaagtagttcataatgaagatatccattttgaaccaatagtgtcactaccagaggtagaagtaaaatctggagaagaagatgaagaaattttgtttaaagagagagccaaactttatagatgggatcgggatgtcagtcagtggaaggagcgcggtgttggagatataaagattctttggcatacaatgaagaattattaccggatcctaatgagaagagaccaggtttttaaagtgtgtgcaaaccacgttattactaaaacaatggaattaaagcccttaaatgtttcaaataatgctttagtttggactgcctcagattatgctgatggagaagcaaaagtagaacagcttgcagtgagatttaaaactaaagaagtagctgattgtttcaagaaaacatttgaagaatgtcagcagaatttaatgaaactccagaaaggacatgtatcactggcagcagaattatcaaaggagaccaatcctgtggtgttttttgatgtttgtgcggacggtgaacctctagggcggataactatggaattattttcaaacattgttcctcggactgctgagaacttcagagcactatgcactggagagaaaggctttggtttcaagaattccatttttcacagagtaattccagattttgtttgccaaggaggagatatcaccaaacatgatggaacaggcggacagtccatttatggagacaaatttgaagatgaaaattttgatgtgaaacatactggtcctggtttactatccatggccaatcaaggccagaataccaataattctcaatttgttataacactgaagaaagcagaacatttggactttaagcatgtagtatttgggtttgttaaggatggcatggatactgtgaaaaagattgaatcatttggttctcccaaagggtctgtttgtcgaagaataactatcacagaatgtggacagatataaaatcattgttgttcatagaaaatttcatctgtataagcagttggattgaagcttagctattacaatttgatagttatgttcagcttttgaaaatggacgtttccgatttacaaatgtaaaattgcagcttatagctgttgtcactttttaatgtgttataattgaccttgcatggtgtgaaataaaagtttaaacactggtgatttcaggtgtacttgtgtttatgtactcctgacgtattaaaatggaataatactaatcttgttaaaagcaatagacctcaaactattgaaggaatatgatatatgcaatttaattttaattccttttaagatatttggacttcctgcatggatatacttaccatttgaataaagggaccacaacttggataatttaattttaggtttgaaatatatttggtaatcttaactattggtgtactcatttatgcatagagactcgtttatgaatgggtagagccacagaacgtatagagttaaccaaagtgctcttctctagaatctttacacctcctgtgtggttacaagttaactttgtaagtagcgtaccttccttccttaaaatatctagcttcctgtgccctttcatagatattcgattaatttttacattttaaacaagttgactatttcctttaggggttttgtttcaaacttttctgtcatctgtctctactacctcagaaactgcagcttggttctgatgatagaaattgaatttttccttgtagttattgtgataaagtatgaatatttttagaaagtctataccatgttctttcgttaaagatttgctttatacaagattgttgcagtacctttttctggtaaattttgtagcagaaataaaatgacaattcctaagagccaaaa

SEQ ID NO: 12383 - DNA, 8319 bp, Homo sapiens
agtggcgctgctgggacgggggaaaggagacgcttcttcctcttgctgctcttctcgttcccgagatcagcggcggcggtgaccgcgagtgggtcggcaccgtctccggctccgggtgcgaacaatgctgactgatagcggaggcggcggcacctcctttgaggaggacctggactctgtggctccgcgatccgccccagctggggcctcggagccgcctccgccgggaggggtcggtctggggatccgcaccgtgaggctctttggggaggccgggccagcgtcgggagtcggcagcagcggcggcggcggcagcggcagcggtacgggcggaggggacgcggcgctggatttcaagttggcggctgccgtgctgaggaccgggggtggaggtggtgcctctggcagtgacgaggacgaagtgtccgaggttgaatcatttattttggaccaagaagatctggataacccagtgcttaaaacaacatcagagatattcttatcaagtactgcagaaggagcagacttacgcactgtggatccagagacacaggcacgactagaagcattgctagaagcagcaggaattggcaaattgtcaactgctgatggtaaagcttttgcagatcctgaggtactccggagactgacatcctcagttagttgtgcactggatgaagctgctgctgcactgacacggatgaaagcagaaaacagccacaatgcaggacaagtggacactcgcagtctagcagaagcttgttcagatggggatgttaatgctgttcgtaaattgctagatgaaggcagaagtgtaaatgaacatacagaagaaggagaaagcctgctgtgtttggcttgttcagcagggtattatgaattagcacaagtattgcttgctatgcatgctaatgttgaagatcgagggaataaaggagacataactcccctgatggcagcttccagtggaggttacttagatattgtgaaattattacttcttcatgatgctgatgtcaactcccagtctgcaacaggaaacactgcgctaacttatgcatgtgctggaggatttgttgacattgttaaagtgctccttaatgaaggtgcaaatatagaagatcataatgaaaatggacatactcccttaatggaagcagccagtgcaggtcatgtggaagttgcaagagttcttttagatcatggtgcaggcatcaacactcattctaatgaattcaaagaaagtgctctaacacttgcttgctacaaaggccatttggatatggttcgctttctacttgaagctggtgcagatcaagagcacaaaacagatgagatgcacactgccttaatggaggcctgcatggatggacatgtagaggtggcacgtttgcttttggatagtggtgctcaagtgaacatgcctgcagattcatttgaatctccattgacgctagctgcctgtggaggacatgttgaattggcagctctacttattgaaaggggagcaaatcttgaagaagttaatgatgaaggatacactcccttgatggaagctgcccgggaaggacatgaagaaatggtggcactactcttagcacaaggagcaaatataaatgcccagacagaagaaactcaagaaactgctcttactttggcttgctgtggaggattttctgaagttgcagactttcttattaaggcaggggctgatatagaacttggctgctccacacctctgatggaggcatctcaggagggacacctggaattggttaaatatttgctggcttctggcgctaatgtgcatgctacaacagcaacaggagacacagccttaacctatgcttgtgaaaatggacatacggatgttgcagatgttttacttcaagcaggggctgatttagaacatgaatctgaaggtggaagaacacctttgatgaaagctgcaagagctggtcatttgtgcactgtgcagtttcttattagcaaaggtgccaatgttaacagggctacagccaataatgatcatacagtagtgtcgctggcatgtgcaggaggccacctggcagttgttgagcttctcttggctcatggggctgaccctactcatcgactcaaggatggttcaacaatgctcattgaagctgcaaagggtggccatactaatgtagtttcttatctgttggattatccaaataatgttctgtcagttcccaccacagatgtgtctcagctccctccaccttctcaagatcagtctcaggtgccacgtgtgccaacgcatacacttgccatggttgtacctccccaggaacctgacagaacttcacaggagaactctcctgcccttttaggagtgcaaaaaggtacatccaagcagaagtccagttccctccaggtagcagatcaggacctactgccatcttttcacccataccagcctttggagtgcatagtagaggagactgaaggcaagctgaatgaactgggacaaagaattagtgctattgaaaaagcacagcttaagtcactggagttaattcaaggtgaacctctgaacaaagataagatagaagaacttaaaaagaacagagaagagcaagtccagaagaagaagaaaatattgaaagaactgcagaaagtggaaaggcagttgcagatgaaaacacagcagcaatttaccaaagaatacttggaaaccaaaggtcagaaagacacagtgtctctacaccaacagtgctctcatagaggagtcttcccagaaggggaaggagatggtagtctcccagaggatcacttttcagagttacctcaggttgacacaatcttatttaaagataatgatgttgatgatgagcaacagtctccaccatcggcagaacagattgattttgtcccagtccagcctttatcatctccacagtgtaacttttccagtgacttaggttctaatgggacaaattctcttgaacttcagaaagtatcaggtaatcagcagattgtaggacagcctcagattgctattactggacatgatcaggggctgttagttcaagaaccagatggactaatggttgcaactccagctcagacgcttaccgacactcttgatgacctgatagcagctgtgagtaccagagtgcccactggttccaacagttcttctcagaccacagagtgtcttacacctgaatcctgttcgcagactacaagcaatgtggcttcccaatcgatgcctcctgtgtatccttcagttgacattgatgcacatactgagagcaatcatgacacagcattaacactagcttgtgcaggtggtcatgaagaacttgtatctgtgctcattgcacgggatgccaaaattgaacacagagacaaaaaaggtttcacaccactaatcctggcagcaacagcagggcatgttggagttgttgaaatccttttggataaaggtggagatatagaagcacagtctgaacgaactaaggatactccgctttcattggcatgttctggtggacgtcaggaggtggtagacttgctgctggctcgaggtgcaaataaagaacataggaacgtatctgattatacaccactgagtctagctgcgtctggaggatatgttaatatcattaagattctgcttaatgctggggcagaaattaattcaaggactgggagtaaactaggtatttctcccctgatgttggctgcaatgaatggacatgttcctgcagtaaaattgctgctcgatatgggttcagacattaatgcccaaatagagaccaatcggaacacggctctcaccctggcctgtttccagggccgagcagaagtagtgagtttgcttctggaccgaaaagccaatgttgaacatagggcaaagacgggtcttacccccttgatggaagcagcttctggagggtatgcagaggttggaagagttcttcttgataaaggagcagatgttaatgctccccctgtgccttcctcaagagatactgctttaacaatagcagcagacaaaggtcactacaaattttgtgaactcctgattcataggggagcccacattgatgttcgtaacaaaaagggaaatacgccactttggctggcatccaatggaggtcattttgatgttgtgcagttgctagtgcaagcaggtgctgatgtggatgcagcagataaccggaaaatcacacctcttatgtcagcatttcgcaagggtcatgtaaaagttgttcaatatttggtaaaggaagtaaatcagttcccttctgatatagaatgcatgagatacatagcaacaattacagataaggaactgttgaaaaaatgtcatcaatgtgtcgaaaccattgtgaaggctaaagaccagcaagctgcagaagcaaataagaatgcgagtattcttttaaaggaacttgatctggaaaagtcaagagaagagagcagaaagcaggctcttgctgctaaaagagaaaaaagaaaagaaaagagaaaaaagaaaaaagaggaacagaaaaggaaacaggaagaagatgaagaaaacaaacctaaggagaattcggaactaccagaggatgaagatgaagaggagaatgatgaagatgtggagcaagaagttcccatagaacctcctagtgcaaccaccaccactacgattggaatctctgcaacatctgcaacattcacaaatgtgtttgggaaaaaaagggccaatgtggtgacaactcccagcaccaatcggaaaaataagaagaacaaaacaaaagaaacccctcctacagcacatttaattttaccagaacaacatatgtctttagcccaacaaaaggcagataaaaataaaataaatggagaacctagaggtggtggtgcaggtgggaatagtgattcagataacttggacagcacagactgcaacagtgagagtagcagtggtggtaaaagccaagagttaaattttgtgatggatgtgaattcctctaaatacccctcactgctccttcattcccaagaagaaaagacaagtactgctacttccaaaactcagacacgacttgaaggtgaagtgactcctaattccttgtcaaccagctacaagacagtgtcattgccattaagctctccaaacataaagctgaatctcactagccctaaaaggggtcagaaaagagaagaagggtggaaagaagttgtacgaaggtcaaagaaattgtctgttccagcctcagtggtgtcgaggataatgggaagaggaggatgcaacatcactgcaatacaggatgttactggtgcccatattgatgtggataaacaaaaagataagaatggcgagagaatgatcacaataaggggtggcacagaatcaacaagatatgcagttcaactaatcaatgcactcattcaagatcctgctaaggaactggaagacttgattcctaaaaatcatatcagaacacctgccagcaccaaatcaattcatgctaacttctcatctggagtaggtaccacagcagcttccagtaaaaatgcatttcctttgggtgctccaactcttgtaacttcacaggcaacaacgttatctacgttccagcccgctaataaacttaataagaatgttccaacaaatgtacgttcttctttcccagtttctctacccttagcttatcctcaccctcattttgccctgctggctgctcaaactatgcaacagattcggcatcctcgcttacccatggcccagtttggaggaaccttctcaccttctcctaacacatggggaccattcccagtgagacctgtgaatcctggcaacacaaatagctctccaaagcataataacacaagccgtctacctaaccagaacgggactgttttaccctcagagtctgctggactagctactgccagttgtcctatcactgtctcttctgtagttgctgccagtcagcaactgtgtgtcactaatacccggactccttcatcagtcagaaagcagttgtttgcctgtgtgcctaagacaagtcctccagcaacagtgatttcttctgtgacaagcacttgtagttccctgccttctgtctcctctgcacctatcactagcgggcaagctcccaccacatttctacctgcaagtacttctcaagcacagctttcttcacaaaagatggagtctttctctgctgtgccacccaccaaagagaaagtgtccacacaggaccagcccatggcaaacctatgtaccccatcttcaactgcaaacagttgcagtagctctgccagcaacaccccgggagctccagaaactcacccatccagtagtcccactcctacttccagtaacacacaagaggaggcacagccatccagtgtgtctgatttaagtcctatgtcaatgccttttgcatctaactcagaacctgctccattgactttgacatcacccagaatggttgctgctgataatcaggacaccagtaatttacctcagttagctgtaccagcacctcgagtttctcatcgaatgcagcccagaggttctttttactccatggtaccaaatgcaactattcaccaggatccccagtctatttttgttacgaatccagttactttaacaccacctcaaggcccaccagctgcagtgcagctttcttcagctgtgaacattatgaatggttctcagatgcacataaacccagcaaataagtctttgccacctacatttggcccagccacacttttcaatcacttcagcagtctttttgatagtagtcaggtgccagctaaccagggctggggagatggtccactgtcctcacgagttgctacagatgcctctttcactgttcagtcagcgttcctgggtaactcagtgcttggacacttggaaaacatgcaccctgataactcaaaggcacctggcttcagaccaccttcccagcgagtttctactagtccagttgggttaccatccattgacccatcaggcagctccccatcttcctcttctgctcctctggcaagtttttccggcataccaggaacaagggttttcctgcaagggccagctcctgttgggactcctagtttcaacagacaacatttttctccccatccttggacaagcgcctcaaactcatccacttctgccccaccaacgttgggccaaccaaaaggagtcagtgccagtcaagatcgaaagatacctcccccaattggaacagagagactggcccgaattcggcaaggagggtctgttgcacaagccccggcggggaccagttttgtcgctcccgttggacacagtggaatctggtcatttggtgtcaatgctgtgtcagaaggcttatcaggttggtcgcaatctgtgatggggaaccatccaatgcatcaacaattatcagacccaagcacattctcccaacatcagccaatggagagagatgattctggaatggtagccccctctaacatttttcatcagcctatggcaagtggttttgtggatttttctaaaggtctgccaatttccatgtatggaggcaccataataccctctcatcctcagcttgctgatgttccaggaggccctctgtttaatggacttcacaatccagatcctgcttggaaccctatgataaaagttatccaaaattcaactgaatgcactgatgcccagcaggccagtctgcttccttcagtccctgctctcaaaggggaaatcccatcacctcagctaaccagaccgaagaagagaattggacggccgatggtggcctctcctaaccagaggcaccaggatcatctacgaccgaaagttcctgctggagtgcaagaactcacccattgcccggacacccccctgctgcctccctcagattcccggggtcacaactcctccaacagcccctctctccaagctggaggagctgaaggagcaggagacagaggaagagatacccgatgacgcacaatttgaaatggacatctaatccagtgcagatgacctggcatgtggagttacagagggatccctcatgccactgctgccaccacctcttcctggggcatccaaaggccagctggcctcatctaatctggaagggagtgacttgttagttccaggcctcctttagttctgaggcagctagaccagggataggagtgggcaacttgccaagcccttaactctacttcctcttcagtctgtggtactcctcctaaccctaaaccctctatgctcaggggctggaactggggaatggagtaagtcaccttctgactgcttagtaaacattcaaagaaatg

SEQ ID NO: 12384 - DNA, 4593 bp, Homo sapiens
gggggagtttgaagacagaaaggaaaggggagaaacctgcagagagcatcaaaggatggggggtgctataaaagaagcaggggggtcctttgaaagaaatctatcatgcactgaaatgctttctggagaaggtgccgttattttcctcccctcttgctcagatgaaaggagccagcaaggacagtcctgaaatattcctcaggggactttttgtcattgttcctctttcctcttgcacagagctatttgctgacctttccagaggaatctcagtccagctgagaagacagttcttaataaaaacaaaaaaatgcaaaaaccaattcctgctgtttgaatgggaatggtagcttgcttgctgcagttcttttcctgtgacattttggaatgtctgcagaaacttaaaaaaaagaaaaaaaaaaccttaaaaactccctggattaggcaagagaaaaggaagtttttttttgctaaacaggagtaaatgagaggtggtaacttatccctaagccaggacctggatgatcaaaaccttcaaattctagggatcagcacttcaaaaataacaagtaaacaagcatgaggagtggctgttgggtttcgctcagaggcaggttttaaaggaagccaaaaccgggttcagaacttcaggcctgtacgatgcctgaagaccggaattctggggggtgcccggctggtgccttagcctcaactcctttcatccctaaaactacatacagaagaatcaaacggtgttttagttttcggaaaggcatttttggacagaaactggaggatactgttcgttatgagaagagatatgggaaccgtctggctccgatgttggtggagcagtgcgtggactttatccgacaaagggggctgaaagaagagggtctctttcgactgccaggccaggctaatcttgttaaggagctccaagatgcctttgactgtggggagaagccatcatttgacagcaacacagatgtacacacggtggcatcacttcttaagctgtacctccgagaacttccagaaccagttattccttatgcgaagtatgaagattttttgtcatgtgccaaactgctcagcaaggaagaggaagcaggtgttaaggaattagcaaagcaggtgaagagtttgccagtggtaaattacaacctcctcaagtatatttgcagattcttggatgaagtacagtcctactcgggagttaacaaaatgagtgtgcagaacttggcaacggtctttggtcctaatatcctgcgccccaaagtggaagatcctttgactatcatggagggcactgtggtggtccagcagttgatgtcagtgatgattagcaaacatgattgcctctttcccaaagatgcagaactacaaagcaagccccaagatggagtgagcaacaacaatgaaattcagaagaaagccaccatggggctgttacagaacaaggagaacaataacaccaaggacagccctagtaggcagtgctcctgggacaagtctgagtcaccccagagaagcagcatgaacaatggatcccccacagctctatcaggcagcaaaaccaacagcccaaagaacagtgttcacaagctagatgtgtctagaagcccccctctcatggtcaaaaagaacccagcctttaataagggtagtgggatagttaccaatgggtccttcagcagcagtaatgcagaaggtcttgagaaaacccaaaccacccccaatgggagcctacaggccagaaggagctcttcactgaaggtatctggtaccaaaatgggcacgcacagtgtacagaatggaacggtgcgcatgggcattttgaacagcgacacactcgggaaccccacaaatgttcgaaacatgagctggctgccaaatggctatgtgaccctgagggataacaagcagaaagaacaagctggagagttaggccagcacaacagactgtccacctatgataatgtccatcaacagttctccatgatgaaccttgatgacaagcagagcattgacagtgctacctggtccacttcctcctgtgaaatctccctccctgagaactccaactcctgtcgctcttctaccaccacctgcccagagcaagacttttttggggggaactttgaggaccctgttttggatgggcccccgcaggacgacctttcccaccccagggactatgaaagcaaaagtgaccacaggagtgtgggaggtcgaagtagtcgtgccaccagtagcagtgacaacagtgagacatttgtgggcaacagcagcagcaaccacagtgcactgcacagtttagtttccagcctgaaacaggaaatgaccaaacagaagatagagtatgagtccaggataaagagcttagaacagcgaaacttgactttggaaacagaaatgatgagcctccatgatgaactggatcaggagaggaaaaagttcacaatgatagaaataaaaatgcgaaatgccgagcgagcaaaagaagatgccgagaaaagaaatgacatgctacagaaagaaatggagcagtttttttccacgtttggagaactgacagtggaacccaggagaaccgagagaggaaacacaatatggattcagtgagcctgctttcgcctgctgtctctgatggctctggcaaggactccagggattctggtgggatatgacttagaaccaggtggctggtcacctggatgtacagaagtctaactggtgaaggaatatcatttacagacattaaacatccatatctgcaatgtgtaccaaagttatatcatgccccataatgctactgtcaagtgttacaactggatatgtgtatatagagtagtttttcaaaagtaaactaaaaatgagaagcatatttcaagaattattttattgcaagtcttgtatttaaatgttaaatcaatatgttgttgcaatttagcttgctttcaagcttcaccccttgcacttaacataagctatttttggcattgtgttatcatcggcttattttatagatcaatatttttatttcccttttttgctgaggaaatgaagataagcaaaaatataaatatatatataaatatatgagttattaaaaccagaagaatactttgtggctgtgctgtttgtgccaatagactttgtcatgaccaaaaagagaaatgtaaatagttttataaaatacagtcgaatcaccaggaacctttgagctgcttttaaaattcttcccctggcaccactcagttttgcttttgcgaggcgatttgacataggaactttgagactccatgagaaagtccctttctgaggcccactgtctaccttgccagatcctcagtgcgtatcgccaatgcaggatgctccttagaaaagaaaaaatggtaaaggatggcatttaacgattcaggctttgaattactctgtccctctggaccgaatctctttaactgctggatagttttagaggaattctcctgctacttaggtactgggaaacaatgcttgctaaaccatgcccacgtgagcacctgtctcccactcaaacctctcccatctcccaacaactgcactttagaataccagcagtgaaatggtattactgtttccctctgagtgaaactgctagagtatatgtcacgtagtgacatttttttctcactcaggctattgccatctgggattctctccctactacagctggcaaagttggtttgcagcaagaagatagtgggagggggccaggctgcaggagaaggagaaaagtttagaagaaacaaaccattttgcttctaattttgacagtatcactttcctgttaaaacatacaataattttaaaaggtgaatgcctaaagttccaattttagcaaatatgggaacctcagcaatgctaattttctagaaaaacccagggctctttggagctagagttttgggagaacagttcttcacaataaggcaatggttttgagaggccaggcaaataatctttctcaccgtagaacaaaaagttacaaaaggcataatcggaaatagagactacatacttgagtttatggggtttgtgttgtttgaaggttcaatgcttgcatgtgtttatttattttcaagagggaaagtggtctgtactgctttcatccttgccactgtcttgcttttattttttactctcccactgagcaagcgtctgtggtcctatggtatcaaccagtatctttatagcaataatttctttaattcccttttctctctctttccaattatttaaccagttacttccacctggacatacgataggaaattcaaactcaaaatatgaaaattgatcttaataactctcccttcatatcttttcacctatttccagtccttatcatagttgataaaaacctcagactcatccagaaagctatatgatgcactagtaaaaaaaacaaagatatttaaactgcttgggttcaaatggtatacaatttgccagctgttactgaaccttctatgcataactttttttttcctctgtgcaattggaataataaaaatactactcccataaaaaaaaaaaaaaaaaaac

SEQ ID NO: 12385 - DNA, 2240 bp, Homo sapiens
acttccccgccctcgccccaaaggagcagcagctccttcttgcctctccattgccgccgccgcaccggcggagctcctctctcgcgcgtctctcctccgatggagctcgggcgccgccgacgccgccgctgccccgaaccctgagcggggccgccccggtcggaggaacgcgccgcccagtccgagggcgcagagcgccaggagcacgcggagggctggggcgcgggctccgggaacgagaaagtgcagctctctcgggtcactgggccggcggcggggggactatggctctgaaggacacgggcagcggcggcagcaccatcctgcccattagcgagatggtttcctcgtccagctcgcccggcgcgtcggccgccgccgccccggggccctgcgcaccctcgcccttccctgaagtagtggagctgaacgtaggcggccaggtttatgtgaccaagcactcgacgctgctcagcgtcccggacagtactttggccagcatgttctcgccctctagtccccgtggcggcgcccggcgccggggcgagctgcccagggacagccgggcgcgcttcttcatcgaccgggacggcttccttttcaggtacgtgctggattatctgcgggacaagcaactcgcgctgccggagcacttccccgagaaggagcggctgctgcgcgaggccgagtatttccagctcaccgacttggtcaagctgctgtcgcccaaggtcaccaagcagaactctctcaacgacgagggctgccagagcgacctggaggacaacgtctcgcagggtagcagcgacgcgctgctgctgcgcggggcggcggccgccgtgccctcgggcccgggagcgcacggtggtggcggcggcggcggcgcgcaggacaagcgctcgggcttcctcacgctgggctaccggggctcctacaccaccgtgcgcgacaaccaggccgacgccaaattccggcgtgtggcgcgcatcatggtgtgcgggcgcatcgcgctggccaaggaggtcttcggggacacgctcaacgagagccgcgaccccgaccggcagccggagaagtacacgtcccgcttctacctcaagttcacctacttggagcaggcctttgatcgcctgtccgaggccggcttccacatggtggcgtgtaactcctcgggcaccgccgccttcgtcaaccagtaccgcgacgacaagatctggagcagctacaccgagtacattttcttccgaccacctcagaaaatagtatcacctaaacaagaacatgaagataggaaacatgacaaagtcactgataaaggaagtgaaagtgggacttcctgtaatgagctctccacttccagttgtgacagccattcagaggcaagcactccccaggacaacccatccagtgcccagcaggcaacagctcaccaacctaacactttaacattggatcgcccctctaaaaaagcacctgtacaatggatacccccaccagacaaacgcagaaacagtgaactctttcagaccctcatcagcaagtcccgggaaacaaatctgtccaaaaagaaagtctgtgagaagctaagtgtggaagaagaaatgaaaaagtgtattcaggattttaaaaaaatccacattccagattattttccagagcgcaaacgccaatggcaatctgaactgttgcagaagtatgggttatagtaattgtcacattcctgcagtattttgatgacattcaatgtttactacagtgtcaccacctgactgatgtcctaacaatggtcagtgtgattcttgctgctcttccttgttgtgaacagtggatgtgggacagtattttcttttatgttttagttgttgttctttttagaaacatgattaaaaaggaaaaaatattaaatcaataagtgttaaatcaaaatggaatatctgattcaaaccattttacaagaatgaaagtaaaatgtgcatgatcaagcttagtatcttggtttttgaactctggtcaactggatatgtttgtcattttgtaacttaccaaaaacaaaccatcatatcataccaactaaaatgatatatggatgaagcaacatcaagtaaaattttagacgatggctataggacccaaatctaaagctgtctaaatgttaattcaatgaaacaagtattatttttgcatgaatacaatgttacaaataaatcacaagaaatagggaagatctgtttgttgcttgg

SEQ ID NO: 12386 - DNA, 5744 bp, Homo sapiens
agcgcatggagccagaggaggaggatgaactaggctcagggcgggatgtggattccaactccaacgcggacagtgagaaatgggtggcaggagatggtttggaagaacaggaattttctatcaaggaggcaaacttcacagagggaagtctgaagctaaagattcagaccacaaagcgggctaagaaacccccaaagaatttggagaactatatatgtccacctgagatcaagatcaccatcaagcagtctggggaccagaaggtgtcccgtgctggaaaaaatagcaaagccacgaaggaggaagaaagaagccactccaaaaagaagctcctcacagccagtgaccttgcagccagtgacctcaaaggatttcagccacaggcttacgaaaggccccagaaacattcaactctccattatgacacgggcctcccacaggacttcaccggtgacaccttaaaaccaaagcaccagcaaaaaagcagcagccagaaccacatggactggtccaccaactctgacagcggacccgtcactcagaattgcttcatcagtccagagtctggcagagaaactgcaagcaccagcaagatccccgctcttgagcccgtggcttcctttgcaaaggcccagggtaagaaaggcagtgcagggaacacgtggagtcagttgtctaacaataacaaagatctgctcttgggaggtgtggctccatccccaagcagccacagctcaccagccccacccagcagctctgctgagtgcaacgggcttcagcccttggtggatcaagatggaggaggtacaaaggagcccccagaaccacctacggtgggcagcaagaaaaagtccagtaaaaaagatgtgataagtcagaccataccaaacccagacctggattgggtcaagaatgcccagaaagcatttgacaatacagaagggaaaagggaaggttattccgcagatagtgcccaagaggcatcaccagccaggcagaacgtgagttctgccagtaatcctgaaaatgactcaagtcatgtccggattactatccccatcaaggcaccctctctggatccaaccaaccataagaggaaaaaaagacagtccattaaagcggtggtggaaaagatcatgccagagaaagccttggcttctggaatcaccatgagcagtgaagtagttaacaggatactttccaactctgaggggaataagaaggatccccgtgtccctaagttgagtaaaatgatagagaatgagtccccctcagttggccttgaaactggtggaaatgctgagaaagttatcccaggaggtgtgtctaagccgcggaagccacccatggtcatgacacctccaacgtgcacagatcactctccatccagaaagctgccagaaatccagcatccaaaatttgctgcaaaacgaaggtggacttgcagcaaaccaaaacctagcaccatgcttcgagaggcagttatggccacctctgataaactgatgctggagcccccgtctgcatatcccatcaccccatccagccctctctacaccaacacagacagtcttactgtgatcactccagtcaaaaagaagcggggacgaccaaagaagcagcctttgctcacagtcgagacgattcatgagggaacttccaccagccccgtcagtcccatcagccgagagtttcctggcactaagaaaagaaagcgacgacgcaatttagcgaagttggcccagctagtgccgggagaggacaaacccatgagcgagatgaaatttcacaagaaagttggaaagctcggcgtgttggataagaagaccatcaaaactatcaataagatgaagacactcaagaggaaaaacatcttgaatcagatcttgtcctgttccagcagcgttgctctgaaggcaaaagctcccccagagaccagccctggggcagcagccattgaaagcaaactgggcaagcagattaatgtcagcaagaggggaaccatctacattggcaagaagcggggcaggaagccaagagcagagctgccacccccatccgaagaacccaaaacagccatcaagcaccccaggcctgtttctagccagccggatgttccagccgtgccttccaactttcagtcacttgtggcgtcttcaccagcagctatgcacccactttcaacacagttaggtgggtccaatggcaacctgagccctgccagcactgaaaccaatttttcagagttgaaaactatgccaaatctccagcccatcagtgctcttccaaccaaaacccaaaagggaatacacagtggaacctggaagctgtctccacccagactgatggccaactccccttcacacctgtgcgagattggctccctaaaggaaatcacgctgtcccctgtgagcgagtcccacagtgaggagacgatccccagcgacagcggcattgggacagacaacaacagcacttctgaccaagcggagaagagctcagaatcccgaaggaggtactcttttgatttctgctccctggacaacccggaggccattccgtccgacaccagcacaaagaaccggcatggccaccggcaaaagcatctcattgtggacaactttctggcccacgaaagcctcaagaagccaaagcacaagaggaaacggaaaagcctgcaaaaccgcgatgacctccagtttctggcagacctggaggagctaatcaccaagttccaagtgttcagaatctcccaccggagttacaccttctaccacgagaatccatatcccagcatttttcggattaattttgatcactattacccggtgccatatatccagtatgacccgttgctctatcttcgtaggacttcagacttgaagtcaaagaagaagcgtggtaggcctgcaaaaaccaatgacaccatgacaaaggtgccttttttacaagggttcagctaccctattcccagtggaagttactatgcaccctatggaatgccttacacatcaatgcctatgatgaaccttggttattacggtcagtacccagctcctttgtacctatcgcacacgcttggagcagcttccccattcatgaggccaacagtgccaccacctcagttccacacaaactcccacataaagatgtccggtgcagctaagcataaagccaagcatggagtacacctgcagggacctgttagcatgggccttggtgacatgcagccttctctgaaccctcccaaggtaggcagtgccagtctgtccagtggtcggctccataagaggaaacacaaacacaagcataagcacaaggaagaccggatcctagggacccatgacaacctgagtggtctttttgcaggcaaagccacaggcttctccagccacatcctgagcgagcggctgagtagcgcagacaaagagctcccgctggtgagtgagaagaacaagcataaggagaaacagaagcaccagcacagcgaagccggccacaaagcttctaagaacaactttgaggtggacaccctgtctacactgtcactttccgacgcccagcattggacacaggccaaggaaaaaggagacttgagcagtgagcctgtggactcatgcacgaaaagatactctggcagtggcggggatggtggcagcacgagatcggagaacctggacgtgttcagtgaaatgaacccttcgaatgacaagtgggacagtgacgtgagtgggagtaaaaggaggagctatgaaggctttggaacgtacagggaaaaggacatccaagccttcaagatgaaccgcaaggagagaagttcttatgactcctccatgtctccagggatgccaagtccccacttaaaagtggaccagacagcagtgcatagtaagaacgaaggctcagtgcccaccatgatgaccaggaagaagccagccgcagttgacagtgttacaattccaccagccccagtgttatctctccttgctgcatctgcagcaacgtcggatgcagtcggctcctccctgaagaagaggttcaagcggcgggagatcgaagccatccagtgcgaagtgcggaagatgtgcaactacaccaagatcctgtccaccaagaagaacctggaccacgtgaacaagatcctgaaggccaagcggctgcagagacaatcaaaaacaggcaacaacttcgtgaagaagaggcgcgggcgtcccaggaagcagcccacccagttcgatgaggactccagagaccaaatgccggtgctggaaaaatgcatcgacctgcccagcaaaagaggccagaagcccagcctgagcccgctggtgctggagcccgccgccagccaagacaccatcatggccaccatcgaggcggtcatccacatggcccgggaggcgccgcccctgcccccgccaccgccgccgcccctgccgccaccgccgccaccacccctgcccccgccaccccctctacccaagaccccccgaggcggaaagaggaaacacaaaccgcaggcccccgctcagcccccacagcagtcgcccccgcagcagccccttccccaggaagaggaggtgaaagccaaaaggcagaggaagtcccgagggagtgagagcgaggtccttccctagggcgggtctgggcgtctgcacctggggcctagggaactgacacgtgggaagcgcagtgagccggggcgggggcggaatcccccgctgcagggacacccacgcccttctctccagaagccgggcaggcagaatccggccagacgacggggctgagccatcaggagctcttgggaaagcaaagcagggagacaccttcagaagaagcttgtctgagcttcaccgcagctcccaccacgcggcgcttcagtacggctggatcctccgcaggcgagcggaaggcccccaggaggagcaggctggtggcactctcctgacctcacgctgccaaggtgcgccctcgactcccgatttcatttgctggccaggaaaatcgaaagggaaacaccctcaattaggaaacattccaaggggagaaaagctgcaaattgctcaactggcattgctgtaacccgttccatttaattggtttttatttcttttgattttcaagctctgctaagctttggggtaccaacgtcatcttcaggtgacctgaatctttcccttaaccgtacagtttctcgatggaattgtgtgatcagaaggtggaattctagtgataggcgacctcagacccgcattcatgttctgtgtgcctcttctattgcacatacactgatttttagcattgtctattcctatttttcctttgcccattgtacttccatatatcttttcattaacttacttgctgccttttttttttcttggtacacatttaaataaagtaatccttaacctgtgctgtaaagttcacccttggcatgctgttccaagaacctgggtttgaatcccaatcgttgtgaaacatactcagtattgataaaacctttttaataagtgatgcagagcagccaaggatatgttgacccagatgtcaaccaggctatttttatacttaaaacatgtcagcagagcataggcagaataaaatggtttaaataccccacagcaaatagagtaactgacaaaccaccaaaaactgaaaccccagacccaccagaaagacaagtgtctagcaatgccttggtacctgatctttttcattcaaataattgtcataggttgttc

SEQ ID NO: 12387 - DNA, 6791 bp, Homo sapiens
gtttccgggtgagggttgggctccttggtaccatgtgggaagcgctgtgaagagttgttgccttccaagatatacccaaattcccagttccagcccgtgtcattaaaactccgctggcgtgaaagatgacgtccttagcccagcagctgcaacgactcgccctccctcaaagtgatgccagcctcttatctagagatgaagttgcttctttgttatttgaccctaaggaagcggccacaatcgacagggacaccgccttcgccattggatgtactggcctggaagagttgcttggaattgatccttcctttgagcagtttgaagcaccgttgttcagtcagctagcaaaaaccttggagcgaagtgttcagaccaaagcagtaaacaaacagttggatgaaaacatttcattattccttattcacttgtcgccttacttcctgcttaagccagcacagaagtgtctggagtggttgattcacaggttccatatacatctctataatcaagatagcctcattgcttgtgttctgccataccacgagacaagaatatttgtgcgagtcatacagcttctaaaaattaataattcaaagcacagatggttctggttgttgccagttaagcaatctggagtgccgttagctaaaggaactttgattacccactgctacaaagatcttggattcatggatttcatttgcagtttggtgacaaaatctgtgaaggtttttgctgagtacccgggcagctcagctcagttgagggtgctcttggctttctatgcttctaccatagtgtcggcgctggtagctgcagaggacgtatcagacaatatcatcgccaaactatttccctatatccaaaagggattgaaatcatctttaccagattacagagctgcaacatacatgataatatgtcagatttctgtgaaagtgaccatggaaaatacctttgtgaattcattggcatcacagatcatcaaaacattgaccaagattccctctttgatcaaggatgggttaagttgcttgatagtgctcctgcagagacagaagccagagagccttgggaaaaagccattccctcacttatgtaatgttcctgatcttattacaatacttcatgggatttctgaaacttacgatgtcagtcctcttctgcattacatgcttccccatctggtcgtctccatcattcatcatgttacaggagaagaaactgaaggaatggatggtcaaatctacaagagacacttagaagctatacttacaaaaatatcactgaagaacaacttagaccatttgttggctagccttctatttgaagagtatatttcatatagttcacaggaagaaatggattctaataaagtgtctttgcttaatgaacaatttcttccactcattaggcttttagaaagcaaataccccagaacattagatgttgtattagaggaacacttaaaggaaattgcagatctgaaaaaacaagagcttttccatcagtttgtttctctttctacaagtggaggaaagtatcagtttttagcagattctgatacttctttgatgctcagcctgaatcatccacttgctcctgtgagaattctggccatgaatcatttgaaaaagatcatgaaaacatcaaaggagggtgttgatgaatctttcataaaagaagctgttttagcccgattaggtgatgataatatagatgttgttttgtcggctataagtgcttttgagattttcaaagaacacttcagttcagaagtgacgatttcaaatcttctgaatctctttcaaagagcagaactttcaaagaatggagaatggtacgaggtacttaagatagccgctgacatattaattaaagaagagatactgagtgaaaatgatcagttgtcaaatcaggtggttgtatgtttgctgccatttatggttatcaataatgatgatacggaatctgctgagatgaaaattgctatatatttatcaaaatcaggaatctgctccctgcaccctctattaagaggctgggaagaagctcttgaaaatgtaattaaaagcacaaagccaggaaaactaatcggtgtagcaaatcagaagatgattgagttgttggctgataatataaatttaggagatccttcttcaatgttaaagatggtggaggatttgataagcgtgggtgaggaggagtcctttaacctgaagcagaaagtaacgtttcatgtgatcctgtctgtgctcgtctcttgttgttcatctttaaaagaaacccactttccatttgcgataagagtcttcagtttgttgcagaaaaaaataaagaagcttgaaagtgtcattactgcagtggaaatcccctcagaatggcacattgaactgatgttagacagagggatcccagtggagctgtgggcacattatgtagaagagctcaacagcactcagagggtggccgtggaggactcggtttttcttgtattttccttgaaaaaatttatttatgcactgaaagctcctaaatcttttcctaaaggtgatatatggtggaatcctgaacaactgaaagaagacagcagggactatctgcacttgctcattgggctgtttgagatgatgctcaatggtgccgatgctgttcatttcagagttctgatgaaacttttcataaaggtgcatctagaagatgtttttcagttattcaagttctgttctgttttatggacctatggttctagcctttcaaatccactaaactgcagtgtgaaaacagtgctgcagactcaagctctttatgtgggctgtgcaatgctttcttctcagaagacacagtgtaaacaccaactggcatccatatcttctccagtggtgacatctttactcattaacctgggaagccccgtaaaagaagttcgtagggctgccattcagtgtctccaggccctcagtggagtggcatccccgttttatctgataatagatcatttgatttctaaagcagaggagatcacttcagatgctgcctatgttattcaggatttggctactttatttgaggaactacagagagaaaagaaactgaaatctcatcagaagttgtctgaaactttgaaaaacttacttagttgtgtgtatagttgcccatcttatatagcaaaagatttgatgaaagtacttcagggagtcaacggtgagatggtgctttctcagctattgcctatggctgaacaactgctagaaaagatccagaaggagcccacagctgtgctgaaagatgaggccatggttctgcatctcactctgggaaagtataatgaattttcagtttcccttttaaatgaggatccgaagagtctagatatatttataaaagctgtgcacacaacaaaggaactttacgcgggaatgccaaccattcagatcacagcccttgaaaagattacaaaaccattttttgcagccatatcagatgaaaaagttcagcagaagcttttaagaatgttgtttgatttattggtgaactgtaaaaactcacattgtgctcagactgtcagcagtgtttttaaagggatttccgttaatgctgaacaagtccgaatagaactggagccaccagataaagctaaacccttgggcacagttcagcaaaaaagaaggcaaaaaatgcagcagaaaaaatcacaagatctagaatctgttcaggaagttggaggttcttactggcaaagagtaactctcatcctggaattactgcagcacaaaaagaagctcagaagtcctcagatattggtgccaactctttttaacttgctatcaagatgtttagaacccttgccacaagagcagggaaatatggaatacaccaaacaattaattcttagttgtctgctcaacatctgccaaaaactatctccagatggtggcaaaatacccaaagatattttagatgaggagaagttcaacgtggagttgatagttcagtgcatccgcctttcggagatgccgcagacccatcaccatgcccttttacttttgggcactgttgctggaatatttccggataaagttttacacaatatcatgtctatttttacatttatgggagccaatgtcatgcgcctagatgatacttacagttttcaagttattaacaagacagtgaaaatggttattcccgcacttattcagtctgatagtggagattctatagaagtttcaagaaacgttgaagagattgtggtaaaaatcattagtgtatttgtggatgcgctgccacacgtcccggagcacaggcgcctgcccatccttgttcaacttgttgatacactgggtgcagagaaattcctctggattctcctcatcttgctttttgaacagtatgtcacaaaaacagtgctggcggctgcctatggcgaaaaggatgctattttagaagcagacactgaattttggttttcagtctgttgtgagtttagtgtccagcatcagatacaaagcttgatgaatatcctccagtacttactaaagctgccagaggaaaaagaagaaaccattcccaaagcagtgtcatttaataagagtgaatcacaagaagaaatgctacaggtttttaatgtagagactcacactagcaagcaactgcggcattttaaatttttgtcagtgtccttcatgtctcagctcctgtcttccaataattttctgaaaaaggtagttgagagtggtggtcctgagattttaaaaggccttgaagagaggttgctggagaccgttctcggctatatcagtgcagttgcacagtccatggaaaggaacgcagacaaactcaccgtgaagttctggcgcgcgctccttagtaaagcttacgacctgttagataaggtcaatgccttgctgcccacagagacattcattcctgtgatcagagggctggtgggcaatcccctgccatctgttcgccgcaaagcgctggaccttttgaataacaagctgcagcaaaatatatcctggaagaagacaatagttacccgtttcctaaaactggttccagaccttttggccattgtgcagcgtaagaaaaaggaaggggaagaagaacaagcaatcaacagacagacagcattgtataccttaaagcttttatgcaagaattttggtgcagaaaatccagatccttttgtcccagtgctgaacactgctgtgaaactgattgctccagagagaaaggaggagaagaatgtcctgggaagcgcgctgctgtgcatagcagaggtgacctccaccctggaggcgctggccatcccccagcttcccagcctgatgccatcgttgctgacaacaatgaagaacaccagcgagctggtctccagcgaggtctacctgctcagtgccttggctgctctgcagaaggttgtggagactctcccgcacttcatcagcccctatctggaaggcattctctcccaggtgattcatctggagaaaatcactagtgaaatgggttctgcgtcacaggctaatatccgtctcacatctcttaaaaagacactggctaccacacttgcaccccgagtcctgttgcccgccatcaaaaaaacttacaagcagattgagaagaactggaagaatcacatgggtccgtttatgagcatcttgcaagagcatattggggtgatgaagaaggaagagctcacctcccatcagtctcagctaaccgcctttttcctggaagccctggacttccgagcccagcactctgagaacgatctggaggaagttggaaaaacggaaaattgtatcattgactgtctagtagccatggttgtcaaactttccgaggtcacattcaggcccctgttcttcaagctgtttgattgggctaaaacagaagatgccccaaaggacaggttgttgacattttacaacttggcagattgcattgctgaaaagctgaaagggctttttactctgtttgccggccacttagtgaagccttttgctgacaccttgaaccaggtgaacatctccaaaacagatgaagcattttttgactctgaaaatgaccctgaaaagtgctgcttgctgttgcagtttattttgaactgtttatacaaaatcttcctttttgatacccagcattttataagtaaagagagagcagaagccttgatgatgcctctggtggatcagctggaaaacaggcttgggggagaagagaaattccaggaacgggtgacaaagcacctgataccatgcatcgcacagttttcggtggccatggcggatgactctctttggaaaccactgaactaccagattctgctaaagacgagagactcctcgcctaaggttcgatttgctgctttgattactgtgttagcactggctgaaaaactaaaggagaattatattgtcttgctaccagaatccattcctttcttagcagagttgatggaagatgaatgtgaagaagtagaacatcagtgccaaaagactattcagcaactggaaactgtcctgggagagccactccagagctatttctaagactttctgtggtgtttcatactctactcagagttcacactcatatttcatatttttatttttgggtgttgggtgccatgttacttttggtgccttaatacacctacttggattacttacaaatgttttatcacttctttacaaaatccccacctggcttgtgctgccacataagcctctcctgcctatcgtatagagctgcagaaagagtaaatgatacacggtattttt

SEQ ID NO: 12388 - DNA, 10259 bp, Homo sapiens
ccgagccgggagccgagcgcgctgggcgcggccgtcccgctgccgccgccaagcccggagtgcgccagcggccatggttcccgcggcggcgccgggcgcctgagccccgggacgcaagcgctggaggcgggctgccggctgtgcgggcgctccggagagaccgacagaaggtgagcactgtgggctatgggatggatgaggtggagcaggaccagcatgaggcccgactcaaggagctgtttgacagttttgacacgacgggcacagggtccctggggcaggaggaactcaccgacctttgccacatgttgagcttggaggaggtggccccagtgctgcagcagacattacttcaggacaacctcttgggcagggtacattttgaccaatttaaagaagcattaatactcatcttgtccagaactctgtcaaatgaagaacactttcaagaaccagactgctcactagaagctcagcccaaatatgttagaggtgggaagcgttacggacgaaggtccttgcccgagttccaagagtccgtggaggagtttcctgaagtgacggtgattgagccactggatgaagaagcgcggccttcacacatcccagccggtgactgcagtgagcactggaagacgcaacgcagtgaggagtatgaagcggaaggccagttaaggttttggaacccagatgacttgaatgcttcacagagtggatcttcccctccccaagactggatagaagagaaactgcaagaagtttgtgaagatttggggatcacccgtgatggtcacctgaaccggaagaagctggtctccatctgtgagcagtatggtttacagaatgtggatggagagatgctcgaggaagtattccataatcttgatcctgacggtacaatgagtgtagaagattttttctatggtttgtttaaaaatggaaaatctcttacaccatcagcatctactccatatagacaactaaaaaggcacctttccatgcagtctttcgatgagagtggacgacgtaccacaacctcatcagcaatgacaagtaccattggctttcgggtcttctcctgcctggatgatgggatgggccatgcatctgtggagagaatactggacacctggcaggaagagggcattgagaacagccaggagatcctgaaggccttggatttcagcctcgatggaaacatcaatttgacagaattaacactggcccttgaaaatgaacttttggttaccaagaacagcattcaccaggcggctctggccagctttaaggctgaaatccggcatttgttggaacgagttgatcaggtggtcagagaaaaagagaagctacggtcagatctggacaaggccgagaagctcaagtctttaatggcctcggaggtggatgatcaccatgcggccatagagcggcggaatgagtacaacctcaggaaactggatgaagagtacaaggagcgaatagcagccttaaaaaatgaactccgaaaagagagagagcagatcctgcagcaggcaggcaagcagcgtttagaacttgaacaggaaattgaaaaggcaaaaacagaagagaactatatccgggaccgccttgccctctctttaaaggaaaacagtcgtctggaaaatgagcttctagaaaatgcagagaatgtgttagcagaaaagtttggtgacctcgatcctagcagtgctgagttcttcctgcaagaagagagactgacacagatgagaaatgaatatgagcggcagtgcagggtactacaagaccaagtagatgaactccagtctgagctggaagaatatcgtgcacaaggcagagtgctcaggcttccgttgaagaactcaccgtcagaagaagttgaggctaacagcggtggcattgagcccgaacacgggctcggttctgaagaatgcaatccattgaatatgagcattgaggcagagctggtcattgaacagatgaaagaacaacatcacagggacatatgttgcctcagactggagctcgaagataaagtgcgccattatgaaaagcagctggacgaaaccgtggtcagctgcaagaaggcacaggagaacatgaagcaaaggcatgagaacgaaacgcacaccttagaaaaacaaataagtgaccttaaaaatgaaattgctgaacttcaggggcaagcagcagtgctcaaggaggcacatcatgaggccacttgcaggcatgaggaggagaaaaaacaactgcaagtgaagcttgaggaggaaaagactcacctgcaggagaagctgaggctgcaacatgagatggagctcaaggctagactgacacaggctcaagcaagctttgagcgggagagggaaggccttcagagtagcgcctggacagaagagaaggtgagaggcttgactcaggaactagagcagtttcaccaggagcagctgacaagcctggtggagaaacacactcttgagaaagaggagttaagaaaagagctcttggaaaagcaccaaagggagcttcaggagggaagggaaaaaatggaaacagagtgtaatagaagaacctctcaaatagaagcccagtttcagtctgattgtcagaaagtcactgagaggtgtgaaagcgctctgcaaagcctggaggggcgctaccgccaagagctgaaggacctccaggaacagcagcgtgaggagaaatcccagtgggaatttgagaaggacgagctcacccaggagtgtgcggaagcccaggagctgctgaaagagactcttaagagagagaaaacaacttctctggtcctgacccaggagagagagatgctggagaaaacatacaaagaacatttgaacagcatggtcgtcgagagacagcagctactccaagacctggaagacctaagaaatgtatctgaaacccagcaaagcctgctgtctgaccagatacttgagctgaagagcagtcacaaaagggaactgagggagcgtgaggaggtcctgtgccaggcaggggcttcggagcagctggccagccagcggctggaaagactagaaatggaacatgaccaggaaaggcaggaaatgatgtccaagcttctagccatggagaacattcacaaagcgacctgtgagacagcagatcgagaaagagccgagatgagcacagaaatctccagacttcagagtaaaataaaggaaatgcagcaggcaacatctcctctctcaatgcttcagagtggttgccaggtgataggagaggaggaggtggaaggagatggagccctgtccctgcttcagcaaggggagcagctgttggaagaaaatggggacgtcctcttaagcctgcagagagctcatgaacaggcagtgaaggaaaatgtgaaaatggctactgaaatttctagattgcaacagaggctacaaaagttagagccagggttagtaatgtcttcttgtttggatgagccagctactgagttttttggaaatactgcggaacaaacagagccgtttttacagcaaaaccgaacgaagcaagtagaaggtgtgaccaggcggcatgtcctaagtgacctggaagatgatgaggtccgggacctgggaagtacagggacgagctctgttcagagacaggaagtcaaaatagaggagtctgaagcttcagtagagggtttttctgagcttgaaaacagtgaagagaccaggactgaatcctgggagctgaagaatcagattagtcagcttcaggaacagctaatgatgttatgtgcggactgtgatcgagcttctgaaaagaaacaggacctactttttgatgtttctgtgctaaaaaagaaactgaagatgcttgagagaatccctgaggcttctcccaaatataagctgttgtatgaagatgtgagccgagaaaatgactgccttcaggaagagctgagaatgatggagacacgctacgatgaggcactagaaaataacaaagaactcactgcagaggttttcaggttgcaggatgagctgaagaaaatggaggaagtcactgaaacattcctcagcctggaaaagagttacgatgaggtcaaaatagaaaatgaggagctgaatgttctggttttgagacttcaaggcaagattgagaagcttcaggaaagcgtggtccagcggtgtgactgctgcttatgggaagccagtttagagaacctggaaatcgaacctgatggaaatatactccagctcaatcagacactggaagagtgtgtgcccagggttaggagtgtacatcatgtcatagaggaatgtaagcaagaaaaccagtaccttgaggggaacacacagctcttggaaaaagtaaaagcacatgaaattgcctggttacatggaacaattcagacacatcaagaaaggccaagagtacagaatcaagttatactggaggaaaacactactctcctaggctttcaagacaaacattttcagcatcaggccaccatagcagagttagaactggagaaaacaaagttacaggagctgactaggaagttgaaggagagagtcactattttagttaagcaaaaagatgtactttctcacggagaaaaggaggaagagctgaaggcaatgatgcatgacttgcagatcacgtgcagtgagatgcagcaaaaagttgaacttctgagatatgaatctgaaaagcttcaacaggaaaattctattttgagaaatgaaattactactttaaatgaagaagatagcatttctaacctgaaattagggacattaaatggatctcaggaagaaatgtggcaaaaaacggaaactgtaaaacaagaaaatgctgcagttcagaagatggttgaaaatttaaagaaacagatttcagaattaaaaatcaaaaaccaacaattggatttggaaaatacagaacttagccaaaagaactctcaaaaccaggaaaaactgcaagaacttaatcaacgtctaacagaaatgctatgccagaaggaaaaagagccaggaaacagtgcattggaggaacgggaacaagagaagtttaatctgaaagaagaactggaacgttgtaaagtgcagtcctccactttagtgtcttctctggaggcggagctctctgaagttaaaatacagacccatattgtgcaacaggaaaaccaccttctcaaagatgaactggagaaaatgaaacagctgcacagatgtcccgatctctctgacttccagcaaaaaatctctagtgttctaagctacaacgaaaaactgctgaaagaaaaggaagctctgagtgaggaattaaatagctgtgtcgataagttggcaaaatcaagtcttttagagcatagaattgcgacgatgaagcaggaacagaaatcctgggaacatcagagtgcgagcttaaagtcacagctggtggcttctcaggaaaaggttcagaatttagaagacaccgtgcagaatgtaaacctgcaaatgtcccggatgaaatctgacctacgagtgactcagcaggaaaaggaggctttaaaacaagaagtgatgtctttacataagcaacttcagaatgctggtggcaagagctgggccccagagatagctactcatccatcagggctccataaccagcagaaaaggctgtcctgggacaagttggatcatctgatgaatgaggaacagcagctgctttggcaagagaatgagaggctccagaccatggtacagaacaccaaagccgaactcacgcactcccgggagaaggtccgtcagttggaatccaatcttcttcccaagcaccaaaaacatctaaacccatcaggtaccatgaatcccacagagcaagaaaaattgagcttaaagagagagtgtgatcagtttcagaaagaacaatctcctgctaacaggaaggtcagtcagatgaattcccttgaacaagaattagaaacaattcatttggaaaatgaaggcctgaaaaagaaacaagtaaaactggatgagcagctcatggagatgcagcacctgaggtccactgcgacgcctagcccgtcccctcatgcttgggatttgcagctgctccagcagcaagcctgtccgatggtgcccagggagcagtttctgcagcttcaacgccagctgctgcaggcagaaaggataaaccagcacctgcaggaggaacttgaaaacaggacctccgaaaccaacacaccacagggaaaccaggaacaactggtaactgtcatggaggaacgaatgatagaagttgaacagaaactgaaactagtgaaaaggcttcttcaagagaaagtgaatcagctcaaagaacaactctgcaagaacactaaggcagacgcaatggtgaaggacttgtatgttgaaaatgcccagttgttgaaagctctggaagtgactgaacagcgacagaaaacagcagagaagaaaaattacctcctggaggagaagattgccagcctcagtaatatagttaggaatctgacaccagcgccattgacttctacacctcctttgaggtcatagccaaaccaaagggtacactcatatttgtgcactttactgaaatagatgaacatttcagtaggttctcaacttaaaattaagcctaacctaaaactgccagcaacacaactggagtttccatttatcataattagtttttctaaatagacccttatgggagtttgaaaataaatactcacatatttcactacttaaattattcccaagatttgaatttattttaaaattttaatagccaccaagaatgtggacatatgaaaattcaagaacctaaaaaataccagttttgaatgagtttttgtggttttggttttttttttaattattacaaatctatgtgtaaaatctagatatttgaagtttgagatctgatgagaatggttgttataaactttattttaaaaccaaatttaggtgttcttacatatttaaatactggaaagtcattataatagttttggttctttgaattggtagacaattagtagagtataattggttaggaggcagggcttattaagtggttattaaccgctgacatcagacaaacccaaatctgtagaattctaaccttctaacacctgtgacagtattaccactcttcttgtattatagatttagaactgatttactcaattgcactcttaactaatgttaaaagcttacttgctttaaacagccttttcttctttctcttaaaagtttcatttggggagctggtcttctaagaaacggataaagccacataattaaagcagttgaactatagggaaagcactgaacaaaccactttggagtaaatagctactcttagaaaagagggataagcagaccatgtaggttttctgtctctcaaatcttagagttcataaatttacttgaggttgcctcaagaactcagggaacaatactgtaaactgtcttcctgaactactgtagggcctctctaagaatttgaaatgtataaaccatgtgacctcatttatttgtcttatatatttacagccatactagaatttttatttctacgtttttagtaaatttaatattctgggggaaaaaaggccttgattttagggttaaaaacctgacttatagaagagtttatttaatataggtcaaaattttctgtgtttcttattccttctatacctcaaatctgattctaagaatttcttactgtgataatcattggcatgccacctgaggtcaaggagtgccaaataggactttccactcatgctcaagatcaaaactttatagaacagtcaacattttagattcggtaaccttttttttcttccaattataatctctgctagccacttccgccagcagttggtggaagacttactaggtgcagggcactttccaagttcatcacaacaacctgcttgttttcatgagacaataatccgaaaagttcgctttgatatattcctggagggccaagcccatctatttacaaaaggtgaacagcaaaatcaagcactgctttatgggcaggaacacaagagaaagcaaactgcccaagaagtcatcatgtcagaaactcaatctcaacaaaataatttccatcagggaacttcagggtttcttgggggcttatgagtctcaccggtcaacccaggaggcctcactacaagagccttgacaaggcactgttttttgtgggactgggagttcacactgatgaagcaaacctttgaatttttgcacagctcttgtcagaaagccctgagttccccctggataaagagttaattttaatccttccctataattatacttcaaaatatttgacatctgctattatgccttctttagatctttcttctgtggtgcagacatttctagtaagtgtttgactacttgtatggcattagctttcacagaaaattgtttcacttaaaactgtggattggcctaggctaaggacaaaaataaactaagtacctgtagtgtatttatgtgatatgtgtcaagttactcaaagttattgctgttggaactgaacaataatatttcccagatagctggccttagcatgtgatcacggttgttgtatttttaatttttgtcttttacagtatgagaggtgtaggttaatttgtttatttcctataaatttgtatttatgtgtatataaaatgtacaatgaatgtaaatatgactttctggaaagtttagactacatttagaatctctattcaaaatcaaaatgctgctcaaatgaatttaaccaacatctaggtgcttaatttctcattttatcccacttatgagattgggaaaaagatcaatatgagaaataccatacagataccttaaatgtatgcatttgtgcaacaatttttgagaaggtgagtggcaatttataatttagttggcaatttataatagaacttatagcttttaaaagaccttttaaagacattaaatgtaaacttaaaaatgtttagatcttgtttcaaactttacaatagcattcttcaaaatattaagttatatattttataggcatttagttgcttattaaaagcactgattttcaaactttttgatttaagaacaattatttaagatcgtctcagaagatgggatcttcgtttcaagaaaagggaatcaagtttgcctttgagataatacgttacactaagaaaaggaaaatgtggatagtaaaacccacctctctcatcctattgtactctcttctgctttttagaagcctgcacttaagcttagatttgtgaagggagagtagaaggggagaagtagaaccacagtgttttatttatttttctaaaactcttactaaatccagattttttaaactgttttaaatgtgaattcttcccagaaatttcaatgcattgcatatttagccttcggcatatttttcatgaatagatcatgaagtcataggcttccaaggcataggaagagatcttgcaggtctagtattttaataatgcactattacccagggcagatattatgagaaactgtttcttctctaagggtttatggcagactttgcttttttaacatgtgagaaatgaattttttattttgtgatttatgtgatttcttttgctgagtgaaggaaaggagaaattgttgctattgtcagcatcttaaaggtatttccagtcaaggcaaggctaagtgctttgtgatagtattaagcaagtcatgttttgaatggattacctgtagtgactcattggaatgatataattatacaagtaatgccaaaaaccaagtcaaagcctaattaaccaaagcactcatttaaaaatcatcatgtttggacctatctggacctctcagcactgtaaaatagttttggttttgtggcatatgaatagctgtttaacaaatcaaagttagctttttgcttctcagcttttttgggcaatacaagttaagttcttaatggggagacattatcatggcatgacttaagggaacattggtttgtgaaggaaaaacagattatctaaagccatctctatgtttctgttcagataaagattaatgagttctgtgtttatatcagctttgtatatttcatcttagccattctatcctagaaagattttaatgtgagcttaagatgtaaataaataattttgcaaacatgccttttgttttctatataccctgaccttttaataaagtttcagtgtatttatcaaaaaaaaaaaaaaaaaa

SEQ ID NO: 12389 - DNA, 3414 bp, Homo sapiens
tgagaactcaggctggcacagggattcccagggcatctaccaccacgcagctggagcagggctgagcccaggagcatggagatggacgcccccaggccccccagtcttgctgtccctggagcagcatcgaggcccgggaggctgctggatggggggcacggcaggcagcaggttcaggccctctcttcacagctcctggaggtgatccccgactccatgaggaagcaagaggtgcggacgggcagggaggccggccagggccacggtacgggctccccagccgagcaggtgaaagccctcatggatctgctggctgggaagggcagtcaaggctcccacgccccgcaggccctggataggacaccggatgccccgctggggccctgcagcaatgactcaaggatacagaggcaccgcaaggccctgctgagcaaggtgggaggtggcccggagctgggcggaccctggcacaggctggcctccctcctgctggtggagggcctgacggacctgcagctgagggaacacgacttcacacaggtggaggccacccgcgggggcgggcaccccgccaggaccgtcgccctggaccggctcttcctgcctctctcccgggtgtctgtcccaccccgggtctccatcactatcggggtggccggcatgggcaagaccaccctggtgaggcacttcgtccgcctctgggcccatgggcaggtcggcaaggacttctcgctggtgctgcctctgaccttccgggatctcaacacccacgagaagctgtgtgccgaccgactcatctgctcggtcttcccgcacgtcggggagcccagcctggcggtggcagtcccagccagggccctcctgatcctggacggcttggatgagtgcaggacgcctctggacttctccaacaccgtggcctgcacggacccaaagaaggagatcccggtggaccacctgatcaccaacatcatccgtggcaacctctttccggaagtttccatctggatcacctcccgtcccagtgcatctggccagatcccagggggcctggtggaccggatgacggagatccggggctttaacgaggaggagatcaaggtgtgtttggagcagatgttccccgaggaccaggcccttctgggctggatgctgagccaagtgcaggctgacagggccctgtacctgatgtgcaccgtcccagccttctgcaggctcacggggatggcgctaggccacctgtggcgcagcaggacggggccccaggatgcagagctgtggcccccgaggaccctgtgcgagctctactcatggtactttaggatggccctcagcggggaggggcaggagaagggcaaggcaagccctcgcatcgagcaggtggcccatggtggccgcaagatggtggggacattgggccgtctggccttccatgggctgctcaagaagaaatacgtgttttacgagcaagacatgaaggcgtttggtgtagacctcgctctgctgcagggcgccccgtgcagctgcttcctgcagagagaggagacgttggcatcgtcagtggcctactgcttcacccacctgtccctgcaggagtttgtggcagccgcgtattactatggcgcatccaggagggccatcttcgacctcttcactgagagcggcgtatcctggcccaggctgggcttcctcacgcatttcaggagcgcagcccagcgggccatgcaggcagaggacgggaggctggacgtgttcctgcgcttcctctccggcctcttgtctccgagggtcaatgccctcctggccggctccctgctggcccaaggcgagcaccaggcctaccggacccaggtggctgagctcctgcagggctgcctgcgccccgatgccgcagtctgtgcacgggccatcaacgtgttgcactgcctgcatgagctgcagcacaccgagctggcccgcagcgtggaggaggccatggagagcggggccctggccaggctgactggtcccgcgcaccgcgctgccctggcctacctcctgcaggtgtccgacgcctgtgcccaggaggccaacctgtccctgagcctcagccagggcgtccttcagagcctgctgccccagctgctctactgccggaagctcaggctggacaccaaccagttccaggaccccgtgatggagctgctgggcagcgtgctgagtgggaaggactgtcgcattcagaagatcagcttggcggagaaccagatcagtaacaaaggggccaaagctctggccagatccctcttggtcaacagaagtctgacctctctggacctccgcggtaactccattggaccacaaggggccaaggcgctggcagacgctttgaagatcaaccgcaccctgacctccctgagcctccagggcaacaccgttagggatgatggtgccaggtccatggctgaggccttggcctccaaccggaccctctccatgctgcacctgcagaagaacagcatcgggcccatgggagcccagcggatggcagatgccttgaagcagaacaggagtctgaaagagctcatgttctccagtaatagtattggtgatggaggtgccaaggccctggctgaggccctgaaggtgaaccagggcctggagagcctggacctgcagagcaattccatcagtgacgcaggagtggcagcactgatgggggccctctgcaccaaccagaccctcctcagcctcagccttcgagaaaactccatcagtcccgagggagcccaggccatcgctcatgccctctgcgccaacagcaccctgaagaacctggacctgacagccaacctcctccacgaccagggtgcccgggccatcgcagtggcagtgagagaaaaccgcaccctcacctcccttcacctgcagtggaacttcatccaggccggcgctgcccaggccctgggacaagcactacagctcaacaggagcctcaccagcttagatttacaggagaacgccatcggggatgacggagcgtgtgcggtggcccgtgcactgaaggtcaacacagccctcactgctctctatctccaggtggcctcaattggtgcttcaggcgcccaggtgctaggggaagccttggctgtgaacagaaccttggagattctcgacttaagaggaaatgccattggggtggctggagccaaagccctggcaaatgctctgaaggtaaactcaagtctccggagactcaatcttcaagagaattctctggggatggacggggcgatatgcattgccacagcactgtctggaaaccacaggctccagcatatcaatctccagggaaaccacattggggactccggggccaggatgatctcagaggccatcaagacaaatgctcccacgtgcactgttgaaatgtga

SEQ ID NO: 12390 - DNA, 3765 bp, Homo sapiens
ggcgaacggctgccggtcaggtgtccttgtccccttgagttgcgcgggtcgtgttcgagggcatggacgacaggtaccctgcgcttcagcgggcccagctgcgtctggatttcatccacgccaactccaccactcacagtttcctttttggagcactggctgaattgctggacaatgcaagagatgcaggggctgaaagacttgatgtcttttcagtggataatgaaaaactgcaggggggattcatgttgtgtttcctggatgatggatgtggcatgagccctgaggaagcttcagacatcatttactttggacgatccaaaaaacggctgtcaaccttgaagttcatagggcaatacggcaatggtcttaaaagtgggtccatgagaattggaaaagactttattctttttacgaagaaggaagaaacgatgacctgtgtgtttttttctcagacattctgtgaagaagaaagtcttagtgaggttgtagttccaatgccctcatggttaataagaaccagagaatctgtcacagatgatccccagaaatttgcaatggaattatctataatttataaatactccccatttaaaactgaagcagaattgatgcagcagtttgatgtgatctatggaaaatgtggtactttgctggttatttataacttgaagcttctgcttaatggagaaccagagttggatgttaaaactgacaaagaagatatactgatggctggagctctggaggatttcccagcgaggtggtcattcagagcctacacatctgttctgtattttaacccatggatgagaatattcattcaagccaagagagttaaaactaaacatctttgctattgcctctacagacccagaaagtatctttatgtcacatcttcttttaaaggagcatttaaagatgaagttaaaaaggcagaagaagcagtaaagattgctgaatccatattgaaagaagcacaaatcaaagtaaaccagtgtgacagaacctctttatcttctgccaaggatgtattacagagagctttggaagatgtagaagcaaagcaaaagaatcttaaagagaaacaaagagaattaaaaacagcaagaacgctctccctgttctatggagtgaacgtagaaaaccgaagccaagctggaatgttcatttacagtaataaccgtttgatcaaaatgcatgaaaaagtgggctcacagttgaaactgaagtccttacttggcgcaggcgtggttggaattgttaatatacccttggaggtcatggaaccatcccataataaacaggaatttctcaatgtccaagagtataatcatctactaaaagtcatgggacagtacttggtccagtactgtaaggacaccggcatcaataatagaaatttaacattgttttgcaatgaatttggataccagaatgacatcgatgtggagaaacctttaaattctattcaatatcaaagaagacaagccatgggtatcccattcatcatacaatgtgatctttgtcttaaatggagagtcttgccttcctctactaattatcaggaaaaagaattttttgacatttggatttgtgctaataatcccaaccgcttggaaaacagttgtcatcaggtagaatgtctaccttccatcccactgggcaccatgagcacaatatcaccatcaaaaaatgagaaagagaagcaacttagagagtcggtcataaagtatcaaaatagactggcagaacagcagccacagcctcaatttataccagtggacgaaatcactgtcacttccacctgcctaacttcagcacataaggaaaataccaaaacccagaaaatcaggcttttgggcgatgacttgaagcatgaatctctttcatcctttgagctttcagcgagccgtagaggacagaaaagaaacatagaagagacagactctgatgtagagtatatttcagaaacaaaaattatgaaaaagtctatggaggagaaaatgaactctcaacagcagagaattccagtagctctgccagaaaatgtcaaactagctgagagatcccagagaagtcagattgctaatattaccactgtctggagagctcaaccaactgaagggtgcctgaagaatgcccaggccgcttcttgggaaatgaaaaggaagcagagtctgaactttgtagaggaatgtaaggtattgactgaagatgagaacacgagtgattcagatataatcctggtttcagataaaagcaacactgatgtttcattgaaacaagaaaaaaaggaaattcctcttttaaaccaagaaaaacaggagctgtgcaatgatgttctagcaatgaaaagaagctcttcattacctagctggaaaagcttgctcaatgtgccgatggaagatgtgaatctaagttctggacacatagccagagtttctgtgagtggcagttgtaaagttgcttcttcgccagcgtcttctcaaagcacacctgtcaaggaaacagtgagaaaactgaagtctaagttaagggagattcttctgtatttttttcctgagcatcagctaccatcagaattggaagaacctgcattaagttgtgagctggagcagtgcccagagcagatgaacaaaaagctgaaaatgtgtttcaaccagatacagaatacttacatggtccaatatgaaaaaaaaataaagaggaaattgcagtccattatctatgattcaaatacaagaggaatacataatgaaatctctctggggcaatgtgaaaataaaagaaaaatctctgaggataagctgaagaatcttcgtataaaactggcactattgttgcagaaactccaactgggtggtccagaaggtgacctggagcagactgacacttatttagaagctttgcttaaagaagataatcttctcttccagaacaatttaaataaagtaactatagatgcaagacatagactccctttagaaaaaaatgaaaagacttcggaaaattaagtcagagatggtattaccttttaaaaaatgctaataagaaaattggaagattcttttaaaaatttttcttttttgttgttgttactgtaaagtctattctgtttaacaataagaaataagaaataatttttttcaaataagaaaattgtgtactctagaaatggagaccgatttacaatttatgtattccctaatccaattatctaaatcttccttttctttcagaaatattaataatatctagagttctctaattttcatgtgagctactgaaaaaaatgaaaatgtcactcaagcttaacttttgttattccttaaaagattgttattgtaattttgttattccttaaaaacatttaaaagcagattttttcaaaatcgatatgtgaaggactacagaatcacctcctcttgaagatattgaaaaagaaagacattatgccctttctccactatagccaacactcagtcaagcagaaaatacaaatccccccaaaactttgagacatagcttatataattttattatttagtcatagtaaaagaataaatctcctaagcataatatgtatacatattacacatatgtaaaaattgttgttttacatttacatatacgtaaagaagtatgtttttacacttttcttgataagtgttttttttttgtttagaaatgtctgaaactttagacaaaaacagtaaaacatttaatattcatttgtgaaaaaaaaaaaaaaaaaaaaaaaaa

SEQ ID NO: 12391 - DNA, 1660 bp, Homo sapiens
cgggatttagatcacgtcccgcaggccggcggaagtagctgatactctcattggttgcaaaaccttgatctgtgaaagcgggcgttttggaagataccggaagtagagtcacggagaggtattaagaaatggagagaaaaataagcagaatccaccttgtttctgaacccagtataactcattttctacaagtatcttgggagaaaacactggaatctggttttgttattacacttactgatggtcattcagcatggactgggacagtttctgaatcagagatttcccaagaagctgatgacatggcaatggaaaaagggaaatatgttggtgaactgagaaaagcattgttgtcaggagcaggaccagctgatgtatacacgtttaatttttctaaagagtcttgttatttcttctttgagaaaaacctgaaagatgtctcattcagacttggttccttcaacctagagaaagttgaaaacccagctgaagtcattagagaacttatttgttattgcttggacaccattgcagaaaatcaagccaaaaatgagcacctgcagaaagaaaatgaaaggcttctgagagattggaatgatgttcaaggacgatttgaaaaatgtgtgagtgctaaggaagctttggagactgatctttataagcggtttattctggtgttgaatgagaagaaaacaaaaatcagaagtttgcataataaattattaaatgcagctcaagaacgagaaaaggacatcaaacaagaaggggaaactgcaatctgttctgaaatgactgctgaccgagatccagtctatgatgagagtactgatgaggaaagtgaaaaccaaactgatctctctgggttggcttcagctgctgtaagtaaagatgattccattatttcaagtcttgatgtcactgatattgcaccaagtagaaaaaggagacagcgaatgcaaagaaatcttgggacagaacctaaaatggctcctcaggagaatcagcttcaagaaaaggaaaagcctgattcttcactacctgagacgtcgaaaaaggagcacatctcagctgaaaacatgtctttagaaactctgagaaacagcagcccagaagacctctttgatgagatttaacagtctcaaaaaatactttgatgttcactagactatgttttctattcatttctttaaaatgaaaaaggagaatttcaagtcagcagccgctattaccgtatcttacaatttaattacatacacagtgaattgaaaccattgtgcaaaatggattacacatgtatacaaagatacgatttgatgatgacactggcacattgagttctaaactattcattcagcatgcctataattacataaattgtatgagactttttgttgcaaaggacacatttatcatattcattcacacatattatatgtgatagctgtccaacatcctgtctgggaagattttgaaaacaggacaaagaaaacatcattttaaaatgtcttcagctttttttgaatagacgtattcaaacatattctgaacattgatgtttgaacattttaatttgtgtgatgatgtagaaaatataattttagtttgtacataaacattgtgaaaatctgataataaaatttttgatacattgaaaaaaaaa

SEQ ID NO: 12392 - DNA, 1707 bp, Homo sapiens
cgggatttagatcacgtcccgcaggccggcggaagtagctgatactctcattggttgcaaaaccttgatctgtgaaagcgggcgttttggaagataccggaagtagagtcacggagaggtaggatccggaagtggggctgcctctttaaataacaaaaatctgaggtattaagaaatggagagaaaaataagcagaatccaccttgtttctgaacccagtataactcattttctacaagtatcttgggagaaaacactggaatctggttttgttattacacttactgatggtcattcagcatggactgggacagtttctgaatcagagatttcccaagaagctgatgacatggcaatggaaaaagggaaatatgttggtgaactgagaaaagcattgttgtcaggagcaggaccagctgatgtatacacgtttaatttttctaaagagtcttgttatttcttctttgagaaaaacctgaaagatgtctcattcagacttggttccttcaacctagagaaagttgaaaacccagctgaagtcattagagaacttatttgttattgcttggacaccattgcagaaaatcaagccaaaaatgagcacctgcagaaagaaaatgaaaggcttctgagagattggaatgatgttcaaggacgatttgaaaaatgtgtgagtgctaaggaagctttggagactgatctttataagcggtttattctggtgttgaatgagaagaaaacaaaaatcagaagtttgcataataaattattaaatgcagctcaagaacgagaaaaggacatcaaacaagaaggggaaactgcaatctgttctgaaatgactgctgaccgagatccagtctatgatgagagtactgatgaggaaagtgaaaaccaaactgatctctctgggttggcttcagctgctgtaagtaaagatgattccattatttcaagtcttgatgtcactgatattgcaccaagtagaaaaaggagacagcgaatgcaaagaaatcttgggacagaacctaaaatggctcctcaggagaatcagcttcaagaaaaggaaaagcctgattcttcactacctgagacgtcgaaaaaggagcacatctcagctgaaaacatgtctttagaaactctgagaaacagcagcccagaagacctctttgatgagatttaacagtctcaaaaaatactttgatgttcactagactatgttttctattcatttctttaaaatgaaaaaggagaatttcaagtcagcagccgctattaccgtatcttacaatttaattacatacacagtgaattgaaaccattgtgcaaaatggattacacatgtatacaaagatacgatttgatgatgacactggcacattgagttctaaactattcattcagcatgcctataattacataaattgtatgagactttttgttgcaaaggacacatttatcatattcattcacacatattatatgtgatagctgtccaacatcctgtctgggaagattttgaaaacaggacaaagaaaacatcattttaaaatgtcttcagctttttttgaatagacgtattcaaacatattctgaacattgatgtttgaacattttaatttgtgtgatgatgtagaaaatataattttagtttgtacataaacattgtgaaaatctgataataaaatttttgatacattgaaaaaaaaa

SEQ ID NO: 12393 - DNA, 1665 bp, Homo sapiens
cgggatttagatcacgtcccgcaggccggcggaagtagctgatactctcattggttgcaaaaccttgatctgtgaaagcgggcgttttggaagataccggaagtagagtcacggagagtattaagaaatggagagaaaaataagcagaatccaccttgtttctgaacccagtataactcattttctacaagtatcttgggagaaaacactggaatctggttttgttattacacttactgatggtcattcagcatggactgggacagtttctgaatcagagatttcccaagaagctgatgacatggcaatggaaaaagggaaatatgttggtgaactgagaaaagcattgttgtcaggagcaggaccagctgatgtatacacgtttaatttttctaaagagtcttgttatttcttctttgagaaaaacctgaaagatgtctcattcagacttggttccttcaacctagagaaagttgaaaacccagctgaagtcattagagaacttatttgttattgcttggacaccattgcagaaaatcaagccaaaaatgagcacctgcagaaagaaaatgaaaggcttctgagagattggaatgatgttcaaggacgatttgaaaaatgtgtgagtgctaaggaagctttggagactgatctttataagcggtttattctggtgttgaatgagaagaaaacaaaaatcagaagtttgcataataaattattaaatgcagctcaagaacgagaaaaggacatcaaacaagaaggggaaactgcaatctgttctgaaatgactgctgaccgagatccagtctatgatgagagtactgatgaggaaagtgaaaaccaaactgatctctctgggttggcttcagctgctgtaagtaaagatgattccattatttcaagtcttgatgtcactgatattgcaccaagtagaaaaaggagacagcgaatgcaaagaaatcttgggacagaacctaaaatggctcctcaggagaatcagcttcaagaaaaggaaaattctaggcctgattcttcactacctgagacgtcgaaaaaggagcacatctcagctgaaaacatgtctttagaaactctgagaaacagcagcccagaagacctctttgatgagatttaacagtctcaaaaaatactttgatgttcactagactatgttttctattcatttctttaaaatgaaaaaggagaatttcaagtcagcagccgctattaccgtatcttacaatttaattacatacacagtgaattgaaaccattgtgcaaaatggattacacatgtatacaaagatacgatttgatgatgacactggcacattgagttctaaactattcattcagcatgcctataattacataaattgtatgagactttttgttgcaaaggacacatttatcatattcattcacacatattatatgtgatagctgtccaacatcctgtctgggaagattttgaaaacaggacaaagaaaacatcattttaaaatgtcttcagctttttttgaatagacgtattcaaacatattctgaacattgatgtttgaacattttaatttgtgtgatgatgtagaaaatataattttagtttgtacataaacattgtgaaaatctgataataaaatttttgatacattgaaaaaaaaa

SEQ ID NO: 12394 - DNA, 9348 bp, Homo sapiens
cagctgccacttttcaccgttagaagtagagctttttccagacctcctaccttttagtctactttgaaaggtgaaagaaagaacatcgtttcaggaataaaaatgcacagtagtagttatagttaccgtagcagtgattctgtgtttagtaacactaccagcactcgaaccagtcttgattcaaatgaaaatcttctcttggttcattgtggtccaacactgatcaactcttgcattagcttcggcagtgaatcctttgatggacacaggttagaaatgttgcaacagattgccaacagagttcagagggacagtgtcatctgtgaagacaaactgattcttgctggaaatgctcttcagtctgattctaaaagattagaatcaggagtgcagtttcagaatgaagcagaaattgctgggtatatacttgaatgtgagaaccttttacgccagcatgtaattgatgtacagattcttattgatggaaaatactaccaggcagatcaattggtacagagggttgcaaaactgcgtgacgaaattatggccttaaggaacgaatgttcttctgtgtacagcaaaggacgcatactgacaacagaacagacaaagctcatgatatcaggaatcactcaaagtttaaactcaggatttgcacagaccttacaccctagtctgacctcagggctgacccagagtttaacaccttccctaacctcttctagtatgacttctggcctgtcatcagggatgacttcccgcctgactccatctgtcactccagcttatacacctggtttcccatcaggattagttccaaatttcagttcaggagtagagccaaattcattgcaaactttgaagttgatgcagatccgaaaaccccttctaaagtcttctttgctggatcaaaatttaacagaagaagaaatcaatatgaaatttgttcaggatcttttgaattgggttgatgagatgcaggtacaactggaccgcactgagtggggctcagatttgccaagtgttgaaagccatttagaaaatcataaaaatgttcatagagctattgaagaatttgaatctagtctcaaagaagctaaaatcagtgagattcaaatgacagcacctcttaaactgacttatgcagaaaagttgcacagattagagagtcagtatgcaaaactcttgaatacatccaggaatcaagaacggcaccttgatacactccataattttgtaagtcgtgcgactaatgaacttatttggttgaatgaaaaagaagaggaggaagttgcttatgactggagtgagagaaacaccaacatagctaggaaaaaagattatcatgctgaattaatgagagaacttgatcaaaaggaagaaaatattaaatcagttcaggagatagcagagcagctacttctagaaaatcatccagcccggttaactattgaggcctacagagcggcaatgcagacgcagtggagctggatcttacagctctgccagtgtgtggagcagcacataaaggagaacacagcgtatttcgagtttttcaatgatgccaaagaagctactgattacttaaggaatctaaaagatgccattcagcggaagtacagctgtgatagatcaagcagcattcacaagctagaagaccttgttcaggaatcaatggaagagaaagaagaacttctgcagtacaaaagcactatagcaaacctaatgggaaaagcaaaaacaataattcaactgaagccaaggaattctgactgtccactcaaaacttctattccgatcaaagctatctgtgactacagacaaattgagataaccatttacaaagacgatgaatgtgttttggcgaataactctcatcgtgctaaatggaaggtcattagtcctactgggaatgaggctatggtcccatctgtgtgcttcaccgttcctccaccaaacaaagaagcggtggaccttgccaacagaattgagcaacagtatcagaatgtcctgactctttggcatgagtctcacataaacatgaagagtgtagtatcctggcattatctcatcaatgaaattgatagaattcgagctagcaatgtggcttcaataaagacaatgctacctggtgaacatcagcaagttctaagtaatctacaatctcgttttgaagattttctggaagatagccaggaatcccaagtcttttcaggctcagatataacacaactggaaaaggaggttaatgtatgtaagcagtattatcaagaacttcttaaatctgcagaaagagaggagcaagaggaatcagtttataatctctacatctctgaagttcgaaacattagacttcggttagagaactgtgaagatcggctgattagacagattcgaactcccctggaaagagatgatttgcatgaaagtgtgttcagaatcacagaacaggagaaactaaagaaagagctggaacgacttaaagatgatttgggaacaatcacaaataagtgtgaggagtttttcagtcaagcagcagcctcttcatcagtccctaccctacgatcagagcttaatgtggtccttcagaacatgaaccaagtctattctatgtcttccacttacatagataagttgaaaactgttaacttggtgttaaaaaacactcaagctgcagaagccctcgtaaaactctatgaaactaaactgtgtgaagaagaagcagttatagctgacaagaataatattgagaatctaataagtactttaaagcaatggagatctgaagtagatgaaaagagacaggtattccatgccttagaggatgagttgcagaaagctaaagccatcagtgatgaaatgtttaaaacgtataaagaacgggaccttgattttgactggcacaaagaaaaagcagatcaattagttgaaaggtggcaaaatgttcatgtgcagattgacaacaggttacgggacttagagggcattggcaaatcactgaagtactacagagacacttaccatcctttagatgattggatccagcaggttgaaactactcagagaaagattcaggaaaatcagcctgaaaatagtaaaaccctagccacacagttgaatcaacagaagatgctggtgtccgaaatagaaatgaaacagagcaaaatggacgagtgtcaaaaatatgcagaacagtactcagctacagtgaaggactatgaattacaaacaatgacctaccgggccatggtagattcacaacaaaaatctccagtgaaacgccgaagaatgcagagttcagcagatctcattattcaagagttcatggacctaaggactcgatatactgccctggtcactctcatgacacaatatattaaatttgctggtgattcattgaagaggctggaagaggaggagaagtcactggaagaagaaaagaaagaacatgttgaaaaagccaaagaattgcaaaaatgggtatcaaatatcagcaagacattgaaagatgcagagaaggctggaaaacctcccttctctaagcaaaagatttccagtgaggaaatatcaaccaagaaggaacaattatcggaagcacttcaaactatacagctttttttggcaaaacatggagacaaaatgacagatgaagaaagaaatgaattggaaaaacaagtgaaaactcttcaggaaagttataatttattattcagtgaatctctgaaacagctacaagaatcacaaacctcaggagatgtaaaggtagaggagaagctggataaagtgattgcaggcaccattgatcagacaactggagaagtcctttcagtctttcaagcagttttaagaggcctcattgactatgacacaggaattaggttgcttgagacacagctaatgatttctggtctaatttcaccagaattaagaaagtgctttgaccttaaagatgccaaaagtcatggccttattgatgaacaaattctgtgccaactcaaagaactaagtaaagctaaggagattatttctgctgcgtcacctaccacaattccagtactggatgctctagctcaaagcatgataacagaatccatggccatcaaagttcttgagatactgctttctacaggctctctggttattccagccacaggagaacagttgaccctacagaaggctttccaacagaacttggtttcctcagcattattttctaaagttctggaaaggcaaaatatgtgcaaagatcttattgacccctgcacctctgagaaggtttctttaatagatatggtacaaagaagtactttacaggaaaacacagggatgtggcttctacctgtgagaccacaagaaggaggtagaataacattaaaatgtggaagaaacataagcattttaagagcagctcatgaaggtctcatagaccgtgaaaccatgtttaggttgttaagtgcacagcttctttctggaggtctgatcaattccaactctggccaaagaatgactgttgaagaagctgtcagagaaggggtgattgacagggacactgctagcagtatcctcacatatcaggttcaaactggtggaatcatccagtcaaaccctgccaagcgtttaactgtagacgaagcagtacagtgtgatttaataacttccagcagtgctcttctggtcctggaagctcagcgaggctatgttggactcatttggccccattctggtgaaatatttcccacatcatcttccttgcagcaagaattgattacaaatgaattggcctacaaaatcctgaatggcagacaaaaaatagctgctctttatattccagaaagttctcaagtcattggtttggatgctgctaaacagctaggaattatagacaacaacacagcatcaattttaaaaaatataacactgcctgataaaatgccagatttaggagatttagaagcttgtaaaaatgccagaagatggctctctttttgtaaatttcaaccctccacagttcatgattacagacaagaagaggatgtttttgatggagaagaacctgtcactactcagacctcagaagaaactaaaaaattatttctatcttatttaatgataaatagctatatggatgcaaacacagggcaaaggcttttgctgtacgatggagacttggatgaggctgttggcatgctactggaaggctgtcatgcagaatttgatggaaacacagccataaaagaatgtctcgatgtcttaagctcatctggtgtatttcttaataatgcttcaggtagagaaaaggatgaatgtacagctacaccaagtagtttcaataaatgtcactgtggagaacctgaacatgaagagactcctgaaaatagaaagtgtgctatagatgaagaatttaatgaaatgagaaatactgttatcaatagtgaattttctcagtcaggaaaactggcaagtacaatatcaattgatcctaaagttaacagttcacccagtgtgtgtgttcccagtctcatatcatatttaacacagactgaacttgcagacattagcatgcttagaagtgactctgaaaacatacttacaaactatgaaaatcaaagccgagtggaaacaaatgaacgtgcaaatgaatgtagtcattctaaaaacattcaaaactttccaagtgatttaatagaaaatcctattatgaaatcaaaaatgagtaaattctgtggtgtgaatgaaacagagaatgaagataatacaaacagggattcacctatctttgactattcccccaggctaagtgccttgttaagtcatgataaattgatgcacagtcagggaagttttaatgatacacacaccccagagagcaatggaaataagtgtgaagccccagccttatcattcagtgacaaaaccatgttgtcaggtcaaagaataggagaaaaatttcaagaccagtttctgggaattgcagctattaacatcagtttaccaggagagcagtatggacagaaatctttaaatatgatttctagtaatcctcaagtacaatatcacaatgataaatacatttcaaatacttctggtgaggatgaaaaaacacatccaggttttcagcagatgcctgaagacaaggaagatgagtctgaaatagaagagtattcctgtgctgtgactccagggggtgatactgataatgccattgtgtctcttacttgtgctacaccattgcttgatgaaaccatcagtgctagtgactatgaaacgtcactgctgaatgatcagcagaataacacaggaacagacactgatagtgatgatgatttttatgatactcccttgtttgaagatgatgaccatgattctttgcttcttgatggtgatgatcgtgattgcctgcaccctgaggactacgacacactgcaagaggaaaatgatgagacggcttctcctgctgatgttttttatgatgtctcaaaagagaatgaaaattccatggttccccagggggcaccagttggtagcttaagtgtgaagaacaaagcacattgtcttcaggatttccttatggatgttgagaaagatgaattagattctggtgaaaaaatacatttaaatcctgttggctcagataaggtgaatggacagtcactggaaactggatcagaaagggaatgcacaaatatccttgaaggtgatgaatctgactcattgactgattatgatattgtaggaggaaaagagagcttcactgcatcattaaaatttgatgacagtggcagttggagaggaagaaaggaagagtatgtaactggacaggaatttcactccgatactgatcatttagattctatgcaaagtgaagaaagttatggggattatatatatgacagtaatgatcaggatgacgatgatgatgatggcattgatgaagaaggaggaggtataagagatgagaatggaaagcccaggtgccaaaatgtggctgaagatatggatatccagttgtgtgcctctattttaaatgaaaacagtgatgaaaatgaaaatattaatacaatgattcttctggataaaatgcacagttgtagctctttagaaaaacagcaaagggtaaatgttgtacagctagcatcacctagtgaaaataacttagttactgaaaaaagcaaccttccagaatatacaactgagattgctggaaaaagcaaagaaaatctgttgaaccatgagatggtacttaaggatgtattgccgcctatcattaaagacactgaatctgaaaaaacttttggccctgcaagtatttcacatgataataataatatcagttcaacttctgaattaggtactgatctagcaaacacaaaggttaagttgattcaagggtcagaattgccagaattgactgattctgtgaaaggtaaagatgaatattttaagaatatgacaccaaaagttgactcatctcttgatcacatcatttgtactgagcctgatttaataggaaaacctgctgaggaaagccatttgtcattgatagcctctgtaactgacaaagatcctcaaggaaatggaagcgatctcattaaagggagagatggcaaaagtgatattctaatagaagatgaaacatcaattcagaaaatgtacttgggtgaaggagaagtgcttgtagaaggtctagtagaagaagaaaataggcatctcaaacttttgcctggtaaaaatacaagggatagtttcaagttaattaatagtcagtttccatttccacaaatcacaaacaatgaagaacttaatcagaaaggaagccttaaaaaagcaactgtaactcttaaagatgaaccaaataatctacaaataatagttagtaaaagtcctgttcagtttgagaatcttgaagaaatttttgacacatcagtttccaaagagattagtgatgacattacttcagacattacatcgtgggaagggaatacacattttgaggagtcattcactgatggacctgagaaagagcttgatctgtttacttacttaaaacattgtgctaaaaatataaaagcaaaagatgtagccaaaccaaatgaagatgtcccaagccatgttttaataactgcccctcccatgaaagaacatttacaattaggagttaataatacaaaagagaagtccactagtacccaaaaagactcacctcttaatgacatgatccaaagcaatgatctttgtagtaaagaaagcatctcaggaggaggaacagaaatttctcagttcacaccagaaagtattgaagccacactttcaatattatctcgtaaacatgtagaagatgttgggaaaaatgattttctgcagtcggagcggtgtgcaaatggattaggaaatgataactccagtaacactttaaatactgactattcattcttagaaattaataataagaaagaaagaattgagcaacagctaccaaaagaacaagccttgtctccaagatcccaagaaaaggaggttcagattcctgaattgtctcaggtatttgtggaggatgtaaaggatatcttaaaaagcaggttgaaagaaggtcatatgaaccctcaagaggttgaagaaccttcagcctgtgcagacactaaaattttaattcaaaatttaattaaaaggattaccacatcacagttggtaaatgaggcatctactgtgcccagcgactctcaaatgagtgactcttctggagtttcccccatgactaactcatcagaactaaagccagaaagtagagatgatcctttctgtattggaaatcttaagtctgagcttctccttaatatattgaagcaagatcaacatagccaaaaaattacaggagtatttgaattgatgagagaattaactcatatggagtatgacctagagaaaagaggcattacgtctaaagtacttccactgcagcttgaaaatattttctacaaactgcttgctgatggatattcagagaaaatagaacatgttggagactttaatcaaaaagcatgttctacatctgagatgatggaagaaaagccacatattcttggtgatattaaaagcaaagaaggaaactactattctcctaatttagaaactgtaaaagaaattggactagaaagctctactgtgtgggcatcaacattgccaagagatgagaagctcaaggatctgtgtaatgatttcccaagccatttggaatgtacttcagggtctaaagagatggcttctggagatagctcaaccgaacaagtaagttgacctatacattttatacagaaaaagctgcatgaaccatgtgagaataatcccatacat

SEQ ID NO: 12395 - DNA, 4661 bp, Homo sapiens
tttttgaatctgcggaggcggcggcggtggcagcggcggcgcggcgactgaagcgcgcgaaaagctgaggcggcaacgtcggggacggctgcgcgggacggctctgtaggaaggaacttggttccccctccctcagcttccgccccaaaagattcagaatggacagtttagaagaacctcagaaaaaagtctttaaggctcgaaaaacgatgagagtgagtgatcgtcagcaacttgaagcagtgtacaaggtcaaagaagaactgttgaaaactgatgtcaagctgttaaatggcaaccatgaaaatggagatttggacccaacctcacctttggaaaacatggattacattaaagacaaggaagaggtgaatggcattgaagagatttgttttgatcctgaaggaagtaaagcagaatggaaggaaacaccctgtatcctaagtgttaatgtaaaaaacaagcaggatgatgatttaaattgtgaacctttgtctccccataatataactccagaaccagtctctaaactgcctgctgaaccagtttctggtgatccagcccctggtgatctggatgccggagatccagcctccggagtactggcctctggtgattccacctctggtgatcccacctctagcgagccctcctctagtgatgctgcctctggtgatgcaacctctggtgatgccccttctggtgatgtgtcccctggtgatgccacctctggtgatgccactgctgatgatctctcctctggtgatcccacctctagtgatcccatcccaggtgaaccggtccctgttgaacccatttctggtgattgtgccgctgatgatatagcctctagtgaaataacttctgttgatctggcttctggagcaccagcttccactgatccagcctctgatgatctggcctctggtgatctatcctctagtgaactggcctctgatgatctggccactggtgaactggcctctgatgagctgacttctgaatcaacctttgatcgtacctttgaaccaaagtctgtaccagtttgtgaaccagttcctgaaattgacaatatagaaccaagtagcaataaagatgatgattttcttgaaaaaaatggagctgatgaaaaattagagcaaattcagagtaaagactcattggatgagaaaaataaagctgataataatattgatgctaatgaagaaactctagaaacagatgatacaactatttgttcagatcgacctcctgaaaatgaaaagaaggtagaggaagatattatcacagagcttgctcttggagaagatgctatatctagcagtatggaaattgaccaaggtgaaaagaatgaagatgaaacttctgcagatcttgtagaaacgattaatgaaaatgttattgaagataacaaaagtgagaatatcttagaaaatacagactctatggagacagatgaaatcattcctattttggaaaagcttgcaccttctgaggatgaacttacttgcttttctaaaacatctctccttccaatcgatgagacaaatccagatttggaagagaaaatggaaagttcttttggttcaccatctaaacaagaaagtagtgagagtttgccaaaagaagcctttctggtcctctctgatgaagaggatatttcgggtgaaaaagatgagtctgaagttatatcgcaaaatgaaacgtgctctccagcagaagtagaaagtaatgaaaaggacaacaaacctgaggaagaagagcaagtaatacatgaagatgatgaaagaccttctgagaaaaatgaattttctagacgaaaacgttctaaatcagaagacatggacaatgtacagtctaaacgtcgtcgatatatggaagaagaatatgaggcagaatttcaagtaaagattacagccaaaggagacattaaccagaaacttcaaaaggttatacagtggttgctggaagaaaaattgtgtgcgctgcagtgtgctgtatttgataagactttggcagaattgaaaacacgagtggaaaagattgaatgtaacaagaggcataaaacagttctcactgaactacaggccaagatagccaggttaaccaaacgctttgaagcagccaaagaagatcttaagaaaagacatgaacatccacccaacccaccagtatcaccaggaaaaactgtaaatgatgtcaacagcaataataacatgtcttacagaaatgcaggcacagtgagacagatgctggagtccaaaagaaatgtaagcgagagtgcaccaccatcctttcaaactcctgtgaatacagtatcttcaaccaatcttgtcactcctccagcagttgtcagtagtcaacctaaattgcagactccagtgacttcgggttccctcacagcaacgtcagttcttcctgcacccaatacagctactgtagttgctactactcaggtgcctagtggaaatccccagcctacaatctctttacagcctttgccagtgattttgcatgtacctgttgcagtatcctcccagcctcagcttctacagagccatccagggactttggtgactaatcaaccatctggcaatgttgaattcatttctgtgcaaagcccacctacagtgagtggtcttaccaaaaatccagtatccttgccatccttgccaaatcccactaaaccaaacaacgttccttctgtgcccagtcctagtattcaaaggaaccctactgccagtgctgcaccattgggaacaacacttgctgtgcaggctgttccaacagcacactctattgtacaagccacaaggacttctttacccacagtgggcccatcaggactctatagtccatcaactaatcgaggtcctatacagatgaaaattccaatttctgcatttagtacttcgtctgctgcagaacagaacagcaataccaccccaagaattgaaaaccagacaaacaaaacaatagatgcttctgtcagtaagaaagcagctgatagcacatcacagtgtggaaaagccactggcagtgattcaagtggtgtcattgatctcacaatggatgatgaagagagtggagcttcacaagaccccaaaaaactaaatcacactcctgtatcaaccatgagttcttctcagcctgtgtcacgaccattgcaacccatacaaccagcaccgcctcttcaaccatctggggtgccaacaagtggaccatctcagaccaccatacacttactacctacagctccaactaccgtgaatgtaacacatcgtccagtaactcaggtgaccacaagactccctgtaccaagagctcctgcaaaccaccaggtggtttatacaactcttcctgcaccaccagctcaggctcccttgcgaggaactgttatgcaggctcctgctgttcggcaggtcaatccccaaaatagtgttacagttcgagtgcctcaaacaaccacatatgttgtaaacaatggactaaccctgggatcaacaggacctcagctcacagtgcatcaccgaccaccacaagtgcatactgagcccccacgccccgtgcacccagcacccttaccagaagctccacaaccacagcgtctgcccccagaagctgccagcacatctctgcctcagaagccacacttgaagttagcacgcgttcagagtcaaaatggcatagtactgtcatggagtgtcctggaggtggatcgaagctgtgccactgttgatagctaccatctctatgcttaccatgaggaacccagtgccactgtgccctcacaatggaaaaagattggggaagtcaaggcacttcccttgcccatggcatgtactctcacccagtttgtatctggtagcaaatactactttgcagtacgagccaaggatatttatggacgttttgggcctttctgtgatcctcagtcaacagatgtgatctcttctacccagagcagttaaaccttggagcctttatattttcctcttttaaaatttccaccttttggtcttgtttttaatcttgtgcatgataccccatgtaaaatccaccttgtgcaagatttcttggacagatgtgtgtatacactacatttgtttataaccagaagcaaaataaactcagcccacaaagctagaatcttttcctggacagtttaggctttggggtttggaaatgtaaatgtgtaccttgctttagttttgaggctggggaatatgtgtgggtgtttatgtgtgtttttccttatgtaggtgttattgcattggagtctcccattttcattctcaaatttacctcttaaagtacgaagtaagtagatcaaaggatttgagatgtgtaactggcatgattctgcttttgaaggatctatagtatcattttagttaagtgggtcaaacagaatcaaaacaaaacccaaagaaataaataaaaaacaaaatggctaaatagtttaaaataggttaattcgaacacaggaaaggatctatttgttgtttcttttgtctggtctcctgagttgttaattaggtgaaaaaagatctgcaatggccccctccctttcctaatctggcttttacatttattttgtgccttaaagattaactacaaagataaacatggccaaaaataaataaataaatatggccata

SEQ ID NO: 12396 - DNA, 4845 bp, Homo sapiens
gagaatcgtgagggtggccaagtccagtttggacctctgacccttgggcagcacctcccgacagccggctcgggacccaactctgcgagccaggtgaaaatgagttcttcagtaagaagaaaaggcaagccaggcaaaggaggtggaaaagggtcttctagaggaggaagaggaggcaggagtcacgccagtaaatctcatgggagtggtggcggtggcggtggtggtggtggtggaggtggcggcaacagaaaggcctccagtagaatatgggatgatggagatgacttttgtatcttcagtgaatcaaggcgcccttccagacctagcaacagtaacataagcaaaggagagtcacgcccaaaatggaaacccaaagccaaagtaccccttcagactctacatatgacttctgagaatcaagagaaagtgaaagctcttctccgagacctgcaagaacaagatgctgatgctggatctgaaagaggcctttctggggaggaggaagatgatgagcctgattgctgtaacgatgagcggtactggccagctggacaggaaccttccctcgttcccgacttggatcctttggaatatgctggcttagcctcagtggagccttatgttccagaatttacagtctccccatttgcagtgcaaaaactttccaggtatggtttcaatactgaacgctgtcaagcggtcctgaggatgtgtgatggagatgtgggagcatcactagagcatctccttacccagtgtttttcagagacatttggagagaggatgaagatctctgaggcagtcaaccagataagcttggatgagtgtatggaacagcgacaggaagaggcatttgctctcaagtccatctgtggagaaaaatttatagaaagaattcagaacagagtctggaccattgggttagaactggagtatctgacaagtagattccgcaaatccaagccaaaagaaagtaccaaaaatgtacaagagaattcacttgaaatctgtaaattttacctcaaaggaaattgtaaatttggatcaaaatgcagattcaaacatgaagtgcccccaaatcaaattgttggaagaatagaaagaagtgtagatgattctcatcttaatgctattgaagatgcatcttttttatatgaacttgaaattcgattttctaaagaccacaaatatccctaccaagctccgctcgtggcattttattccaccaatgagaacctacctctggcttgtcgtttacatatttctgagtttctttatgacaaggccttgacatttgcggaaacttcggaacctgtcgtatattctttgataacccttttagaggaagagtcggaaatagtcaagttactaacgaatacccaccacaagtatagtgaccctcctgtgaactttctgccagtaccctctaggaccagaataaataatcctgcctgtcataaaacagtgattccaaataattcttttgtttctaatcaaattccagaagttgaaaaagcatcagaatctgaggagtcagatgaggatgacggtcctgcacctgttatagtagagaatgaaagctatgtgaaccttaagaaaaagatttccaaaagatatgactggcaggcaaagtcagtacatgctgaaaatggtaaaatctgcaagcagttccgaatgaaacaggcttccagacagttccagtccattctgcaagagaggcaatcactccctgcttgggaagaaagagaaaccattcttaacttattgcgtaagcaccaggtggttgtcataagtggtatgactggatgtgggaaaaccacacaaattccgcagtttattctggatgattctctgaatggaccacctgagaaggtagccaacatcatctgtacccaaccccgacgaatctctgcaatctctgttgctgaacgcgttgctaaagaaagagcagagagggtgggtctgaccgtgggataccagattcggttagaaagtgtcaagtcctcagccaccagactgttatactgcaccacgggagtgctgctgagaaggctagaaggagatacagctctacaaggagtttcccatatcattgttgatgaagttcatgagaggacagaagaaagtgacttcttgctgctagttttgaaggacattgtatcgcagaggccaggtcttcaagttattttaatgagtgcaactctaaacgctgagcttttttcagactattttaattcctgccccgttattactataccaggtcgtacatttcctgttgatcaattttttttggaagatgcaattgctgtgacaaggtatgtattacaggatgggagcccatatatgcggtccatgaaacagatttcaaaggaaaagcttaaagcaaggcggaacagaactgcatttgaagaagtggaagaagacctaaggctctcccttcacctccaggatcaggattctgtcaaagatgcagtgccagatcaacagttagattttaagcagctcctggcccgctataaaggggttagcaagtcagtcatcaaaacaatgtccatcatggattttgaaaaggtgaatcttgaattaatagaggccttattagagtggattgtggatggaaagcactcctaccctccaggtgctatacttgtatttttaccaggactagcagaaatcaaaatgctttatgaacagctacagtctaattctcttttcaacaacagacgtagtaatcgatgtgttattcacccacttcattcatctttatccagtgaagagcagcaggctgtgtttgtaaaacctcctgcaggagtaactaagattataatttccaccaacattgctgagacatccataaccatcgatgatgttgtctatgttatcgattctgggaaaatgaaagaaaagagatatgatgccagcaaagggatggaaagtctagaggacacctttgtatctcaagctaatgctctacaaaggaaaggccgagcaggccgtgttgcatctggggtctgcttccatttattcactagccatcactacaatcaccagcttttaaaacaacagctaccagaaatacaaagagtgccattggaacagctgtgtctaagaattaaaattttagagatgtttagtgctcataatctccagtctgtgttctctcggctcattgaacctccacacaccgattctcttcgtgcctcaaaaatacgattacgagacttaggagcattaactccagatgaaagattgacccctcttgggtatcatttggcctctctgcccgtggatgtgagaattggcaaactaatgttgtttgggtctatcttccgctgtttggatcctgctctcaccattgctgccagtttggcttttaagtctccgtttgtatctccctgggataaaaaagaagaagctaaccagaaaaagctggaatttgcattcgcaaacagtgattatctggcccttctacaagcgtataagggatggcagctaagtacaaaagaaggcgtgcgtgcaagttataattactgcagacaaaacttcttgtctggaagagttctgcaggaaatggccagcctcaaacgacaattcacggaactgttatcggatatagggtttgcaagggaagggctcagagcaagggaaattgagaaaagggcccaaggaggagatggtgtcttagatgccacaggagaagaggcaaactcaaatgctgagaaccccaagctgatatcagcaatgctgtgtgctgctttgtatccaaatgtagtgcaggtgaaaagcccagaaggaaaatttcagaagaccagtactggagctgtcagaatgcaaccaaaatcagctgagttgaagtttgtcaccaagaacgatggatatgtacacattcacccttcatcagtgaactatcaggtgagacactttgacagcccctacctgttgtaccacgagaagataaaaactagtcgagtattcatccgagactgcagcatggtgtctgtgtacccgctggtcttgtttggaggaggccaagtgaatgtgcagcttcaaagaggagagttcgttgtctccctggatgatggttggatccgttttgtagctgcttcccatcaggtggctgaactggtaaaggagcttcgttgcgaacttgatcagcttctccaggataaaattaaaaacccaagcattgatctgtgtacgtgtcctcgaggatcccggatcatcagcacaattgtgaaacttgtcaccacacaataaaaagcagtcttagagagtgcttgctactcacctgcttctagctcacctgggaaataacagcagaacctctacctcgaactaaagacctattggggctggccctggtggaggagcccagggcatgaagcccaaggcagctgaggcagtgtatatacccttagggccatttctaacaaagccttggccactcccagcacaatttggagtgtcaagggtgagagcctaaaacccagcttgcctgtctttgtctctgtgattgttctggagtgaattaagttcacctgataactcaaaagtgaatgtataatacaattctgttttaatctgtgtattctttttctcctactttttactggggtgagaggggcatgaagagaaatacgccttttttttttttcttttcctgtcgccaaggctcgactgagagaagtcagaacagagaaggggaaaaaaaacccaaaattatgtgaacaagcaaaattaaaatttcattttaggctattggctactgagtaaacttgacttgtgaggggtttttatttttactcattaaaagtcaacttaaaaaaaaaaaaaaaaaaaaaa

SEQ ID NO: 12397 - DNA, 3196 bp, Homo sapiens
gacatagctgccctaaaaggaatgaggaagcgagagctctccagtgtctggctggctccgtccgtgtgacagcccatgatgttctttccggtctctgtaatattctgaatttccacctgcccgccccttcgcttataatgcagagcatgtgaagggagaccggctcggtctctctctctcccagtggactagaaggagcagagagttatgctgtttctcccattctttacagctcaccggatgtaaaagaactctggctagagaccctccaaggacagaggcacagccacacgggagtgaaatccacccctggacagtcagccgcaatactgatgaagctgagaagcagccacaatgcttcaaaaacactaaacgccaataatatggagacactaatcgaatgtcaatcagagggtgatatcaaggaacatcccctgttggcatcatgtgagagtgaagacagtatttgccagctcattggacattctcactattctatgccttaaaggcccttcaacggaagggatattcaggagagcagccaacgagaaagcccgtaaggagctgaaggaggagctcaactctggggatgcggtggatctggagaggctccccgtgcacctcctcgctgtggtctttaaggacttcctcagaagtatcccccggaagctactttcaagcgacctctttgaggagtggatgggtgctctggagatgcaggacgaggaggacagaatcgaggccctgaaacaggttgcagataagctcccccggcccaacctcctgctactcaagcacttggtctatgtgctgcacctcatcagcaagaactctgaggtgaacaggatggactccagcaatctggccatctgcattggacccaacatgctcaccctggagaatgaccagagcctgtcatttgaagcccagaaggacctgaacaacaaggtgaagacactggtggaattcctcattgataactgctttgaaatatttggggagaacattccagtgcattccagtatcacttctgatgactccctggagcacactgacagttcagatgtgtcgaccctgcagaatgactcagcctacgacagcaacgaccctgatgtggaatccaacagcagcagtggcatcagctctcccagcaggcagccccaggtgcccatggccacagctgctggcttggatagcgcgggcccacaggatgcccgagaggtcagcccagagcccattgtgagcaccgtggccaggctgaaaagctccctcgcacagcccgataggagatactcagagcccagcatgccatcctcccaggagtgcctcgagagccgggtgacaaaccaaacactaacaaagagtgaaggggacttccccgtgccccgggtaggctctcgtttggaaagtgaggaggctgaagacccatttccagaggaggtcttccctgcagtgcaaggcaaaaccaagaggccggtggacctgaagatcaagaacttggccccgggttcggtgctcccgcgggcactggttctcaaagccttctccagcagctcgctggacgcgtcctctgacagctcgcccgtggcttctccttccagtcccaaaagaaatttcttcagcagacatcagtctttcaccacaaagacagagaaaggcaagcccagccgagaaattaaaaagcactccatgtctttcacctttgcccctcacaaaaaagtgctgaccaaaaacctcagcgcgggctctgggaaatcgcaagactttaccagggaccacgtcccgaggggtgtcagaaaggaaagccagcttgccggccgaatcgtgcaggaaaatgggtgtgaaacccacaaccaaacagcccgcggcttctgcctgagaccccacgccctctcggtggatgatgtgttccagggagctgactgggagaggcctggaagcccaccctcttatgaagaggccatgcagggcccggcagccagactagtggcctccgagagccagaccgtggggagcatgacggtggggagcatgagggcgaggatgctggaggcgcactgcctcctaccccctcttccacctgctcaccacgtagaggactcaagacacaggggcagcaaagagccactccctggccacggactctctcccctgcctgagcgatggaaacagagcagaactgtccatgcttctggggactctctggggcacgtgtctggcccagggagacctgagctcctcccgctgaggaccgtctccgagtccgtgcagaggaataagcgggactgtctcgtgcgacgatgtagccagccggtctttgaggctgaccaattccaatatgccaaagaatcgtatatttaggagggaggccatacgccatgccatagcttgtgctatctgtaaatatgagacttgtaaagaactgcctgtagattgtttttaaaaggtcttgaataagctccttgagaaagttgtggaaagccctcctcagtgaggatagctacaccatggccatggcgcatcagatagtctctgtgtacctggatttgtgcaatatgtaaaaatgtatcaaatgtattatagataaggtgttaggtgcaaaggatgtctaataatccctgcacacgttttgaacttgcagtgaagtacactgctgttccttgcttcctggggcacttttctcttggttagtgtttaaaaattatcttcgcttttttaatgtggcctcaaatgtcatgccaattttcacatcttccacaaactccatttagggagaaatgtttaaatctctggtataagtttactccataccagagtaaactatatattactctatataagcagtcttgcaataactaatcaccaccatagaagaaagaaacagactgcaaggaacagagttgagtgtctggagtcatcaaaggcattaaaaactccagtaaaagctggggccgtagcaaaaatcatgaaaaacacttcaacgtgtcctttcaatcatccaattaaatgtgggtagattaatgaaaatgtattacatcaatattaactcatctatagcactttgagtatctttgtagttcatgatatcctatcctataatgtggaggtaaatgattttatatgcattgggggtcatatataaaacttcaatgtaatttcactacaataaattgccttccttatttgaaagtaaaaa

SEQ ID NO: 12398 - DNA, 3363 bp, Homo sapiens
gacatagctgccctaaaaggaatgaggaagcgagagctctccagtgtctggctggctccgtccgtgtgacagcccatgatgttctttccggtctctgtaatattctgaatttccacctgcccgccccttcgcttataatgcagagcatgtgaagggagaccggctcggtctctctctctcccagtggactagaaggagcagagagttatgctgtttctcccattctttacagctcaccggatgtaaaagaactctggctagagaccctccaaggacagaggcacagccacacgggagtgaaatccacccctggacagtcagccgcaatactgatgaagctgagaagcagccacaatgcttcaaaaacactaaacgccaataatatggagacactaatcgaatgtcaatcagagggtgatatcaaggaacatcccctgttggcatcatgtgagagtgaagacagtatttgccagctcattgaagttaagaagagaaagaaggtgctgtcctggccctttctcatgagaaggctctcccctgcatcagatttttctggggctttggagacagacttgaaagcatcgctatttgatcagcccttgtcaattatctgcggtgacagtgacacactccccagacccatccaggacattctcactattctatgccttaaaggcccttcaacggaagggatattcaggagagcagccaacgagaaagcccgtaaggagctgaaggaggagctcaactctggggatgcggtggatctggagaggctccccgtgcacctcctcgctgtggtctttaaggacttcctcagaagtatcccccggaagctactttcaagcgacctctttgaggagtggatgggtgctctggagatgcaggacgaggaggacagaatcgaggccctgaaacaggttgcagataagctcccccggcccaacctcctgctactcaagcacttggtctatgtgctgcacctcatcagcaagaactctgaggtgaacaggatggactccagcaatctggccatctgcattggacccaacatgctcaccctggagaatgaccagagcctgtcatttgaagcccagaaggacctgaacaacaaggtgaagacactggtggaattcctcattgataactgctttgaaatatttggggagaacattccagtgcattccagtatcacttctgatgactccctggagcacactgacagttcagatgtgtcgaccctgcagaatgactcagcctacgacagcaacgaccctgatgtggaatccaacagcagcagtggcatcagctctcccagcaggcagccccaggtgcccatggccacagctgctggcttggatagcgcgggcccacaggatgcccgagaggtcagcccagagcccattgtgagcaccgtggccaggctgaaaagctccctcgcacagcccgataggagatactcagagcccagcatgccatcctcccaggagtgcctcgagagccgggtgacaaaccaaacactaacaaagagtgaaggggacttccccgtgccccgggtaggctctcgtttggaaagtgaggaggctgaagacccatttccagaggaggtcttccctgcagtgcaaggcaaaaccaagaggccggtggacctgaagatcaagaacttggccccgggttcggtgctcccgcgggcactggttctcaaagccttctccagcagctcgctggacgcgtcctctgacagctcgcccgtggcttctccttccagtcccaaaagaaatttcttcagcagacatcagtctttcaccacaaagacagagaaaggcaagcccagccgagaaattaaaaagcactccatgtctttcacctttgcccctcacaaaaaagtgctgaccaaaaacctcagcgcgggctctgggaaatcgcaagactttaccagggaccacgtcccgaggggtgtcagaaaggaaagccagcttgccggccgaatcgtgcaggaaaatgggtgtgaaacccacaaccaaacagcccgcggcttctgcctgagaccccacgccctctcggtggatgatgtgttccagggagctgactgggagaggcctggaagcccaccctcttatgaagaggccatgcagggcccggcagccagactagtggcctccgagagccagaccgtggggagcatgacggtggggagcatgagggcgaggatgctggaggcgcactgcctcctaccccctcttccacctgctcaccacgtagaggactcaagacacaggggcagcaaagagccactccctggccacggactctctcccctgcctgagcgatggaaacagagcagaactgtccatgcttctggggactctctggggcacgtgtctggcccagggagacctgagctcctcccgctgaggaccgtctccgagtccgtgcagaggaataagcgggactgtctcgtgcgacgatgtagccagccggtctttgaggctgaccaattccaatatgccaaagaatcgtatatttaggagggaggccatacgccatgccatagcttgtgctatctgtaaatatgagacttgtaaagaactgcctgtagattgtttttaaaaggtcttgaataagctccttgagaaagttgtggaaagccctcctcagtgaggatagctacaccatggccatggcgcatcagatagtctctgtgtacctggatttgtgcaatatgtaaaaatgtatcaaatgtattatagataaggtgttaggtgcaaaggatgtctaataatccctgcacacgttttgaacttgcagtgaagtacactgctgttccttgcttcctggggcacttttctcttggttagtgtttaaaaattatcttcgcttttttaatgtggcctcaaatgtcatgccaattttcacatcttccacaaactccatttagggagaaatgtttaaatctctggtataagtttactccataccagagtaaactatatattactctatataagcagtcttgcaataactaatcaccaccatagaagaaagaaacagactgcaaggaacagagttgagtgtctggagtcatcaaaggcattaaaaactccagtaaaagctggggccgtagcaaaaatcatgaaaaacacttcaacgtgtcctttcaatcatccaattaaatgtgggtagattaatgaaaatgtattacatcaatattaactcatctatagcactttgagtatctttgtagttcatgatatcctatcctataatgtggaggtaaatgattttatatgcattgggggtcatatataaaacttcaatgtaatttcactacaataaattgccttccttatttgaaagtaaaaa

SEQ ID NO: 12399 - DNA, 2066 bp, Homo sapiens
gcggcgcgctcctggcgaggacggagcgagcagatctcgcgtgcgctcgccgcccggcgcagcccagcccggcccccgcctggcgccgcgagccgaggtgtctcccgcgcccgcgcccgtgtcgccgccgtgcccgcgagcgggagccggagtcgccgccgcccgagcgcagccgagcgcacgccgagcccgtccgccgccgccatggccaccacggtgacctgcacccgcttcaccgacgagtaccagctctacgaggatattggcaagggggctttctctgtggtccgacgctgtgtcaagctctgcaccggccatgagtatgcagccaagatcatcaacaccaagaagctgtcagccagagatcaccagaagctggagagagaggctcggatctgccgccttctgaagcattccaacatcgtgcgtctccacgacagcatctccgaggagggcttccactacctggtcttcgatctggtcactggtggggagctctttgaagacattgtggcgagagagtactacagcgaggctgatgccagtcactgtatccagcagatcctggaggccgttctccattgtcaccaaatgggggtcgtccacagagacctcaagccggagaacctgcttctggccagcaagtgcaaaggggctgcagtgaagctggcagacttcggcctagctatcgaggtgcagggggaccagcaggcatggtttggtttcgctggcacaccaggctacctgtcccctgaggtccttcgcaaagaggcgtatggcaagcctgtggacatctgggcatgtggggtgatcctgtacatcctgctcgtgggctacccacccttctgggacgaggaccagcacaagctgtaccagcagatcaaggctggtgcctatgacttcccgtcccctgagtgggacaccgtcactcctgaagccaaaaacctcatcaaccagatgctgaccatcaaccctgccaagcgcatcacagcccatgaggccctgaagcacccgtgggtctgccaacgctccacggtagcatccatgatgcacagacaggagactgtggagtgtctgaaaaagttcaatgccaggagaaagctcaagggagccatcctcaccaccatgctggccacacggaatttctcagtgggcagacagaccaccgctccggccacaatgtccaccgcggcctccggcaccaccatggggctggtggaacaagccaagagtttactcaacaagaaagcagatggagtcaagccccagacgaatagcaccaaaaacagtgcagccgccaccagccccaaagggacgcttcctcctgccgccctggagcctcaaaccaccgtcatccataacccagtggacgggattaaggagtcttctgacagtgccaataccaccatagaggatgaagacgctaaagcccggaagcaggagatcattaagaccacggagcagctcatcgaggccgtcaacaacggtgactttgaggcctacgcgaaaatctgtgacccagggctgacctcgtttgagcctgaagcactgggcaacctggttgaagggatggacttccacagattctacttcgagaacctgctggccaagaacagcaagccgatccacacgaccatcctgaacccacacgtgcacgtcattggagaggatgccgcctgcatcgcttacatccggctcacgcagtacattgacgggcagggccggccccgcaccagccagtctgaggagacccgcgtgtggcaccgccgcgacggcaagtggcagaacgtgcacttccactgctcgggcgcgcctgtggccccgctgcagtgaagagctgcgccctggtttcgccggacagagttggtgtttggagcccgactgccctcgggcacacggcctgcctgtcgcatgtttgtgtctgcctcgttccctcccctggtgcctgtgtctgcagaaaaacaagaccagatgtgatttgttaaaaaaaaacaaaaaaaaaaaaaaaaaaaacaagatgacgacgacaaccacaaaaaaaattgacatcagatgaaatgaaaaaa

SEQ ID NO: 12400 - DNA, 1991 bp, Homo sapiens
gcggcgcgctcctggcgaggacggagcgagcagatctcgcgtgcgctcgccgcccggcgcagcccagcccggcccccgcctggcgccgcgagccgaggtgtctcccgcgcccgcgcccgtgtcgccgccgtgcccgcgagcgggagccggagtcgccgccgcccgagcgcagccgagcgcacgccgagcccgtccgccgccgccatggccaccacggtgacctgcacccgcttcaccgacgagtaccagctctacgaggatattggcaagggggctttctctgtggtccgacgctgtgtcaagctctgcaccggccatgagtatgcagccaagatcatcaacaccaagaagctgtcagccagagatcaccagaagctggagagagaggctcggatctgccgccttctgaagcattccaacatcgtgcgtctccacgacagcatctccgaggagggcttccactacctggtcttcgatctggtcactggtggggagctctttgaagacattgtggcgagagagtactacagcgaggctgatgccagtcactgtatccagcagatcctggaggccgttctccattgtcaccaaatgggggtcgtccacagagacctcaagccggagaacctgcttctggccagcaagtgcaaaggggctgcagtgaagctggcagacttcggcctagctatcgaggtgcagggggaccagcaggcatggtttggtttcgctggcacaccaggctacctgtcccctgaggtccttcgcaaagaggcgtatggcaagcctgtggacatctgggcatgtggggtgatcctgtacatcctgctcgtgggctacccacccttctgggacgaggaccagcacaagctgtaccagcagatcaaggctggtgcctatgacttcccgtcccctgagtgggacaccgtcactcctgaagccaaaaacctcatcaaccagatgctgaccatcaaccctgccaagcgcatcacagcccatgaggccctgaagcacccgtgggtctgccaacgctccacggtagcatccatgatgcacagacaggagactgtggagtgtctgaaaaagttcaatgccaggagaaagctcaagggagccatcctcaccaccatgctggccacacggaatttctcagccaagagtttactcaacaagaaagcagatggagtcaagccccagacgaatagcaccaaaaacagtgcagccgccaccagccccaaagggacgcttcctcctgccgccctggagcctcaaaccaccgtcatccataacccagtggacgggattaaggagtcttctgacagtgccaataccaccatagaggatgaagacgctaaagcccggaagcaggagatcattaagaccacggagcagctcatcgaggccgtcaacaacggtgactttgaggcctacgcgaaaatctgtgacccagggctgacctcgtttgagcctgaagcactgggcaacctggttgaagggatggacttccacagattctacttcgagaacctgctggccaagaacagcaagccgatccacacgaccatcctgaacccacacgtgcacgtcattggagaggatgccgcctgcatcgcttacatccggctcacgcagtacattgacgggcagggccggccccgcaccagccagtctgaggagacccgcgtgtggcaccgccgcgacggcaagtggcagaacgtgcacttccactgctcgggcgcgcctgtggccccgctgcagtgaagagctgcgccctggtttcgccggacagagttggtgtttggagcccgactgccctcgggcacacggcctgcctgtcgcatgtttgtgtctgcctcgttccctcccctggtgcctgtgtctgcagaaaaacaagaccagatgtgatttgttaaaaaaaaacaaaaaaaaaaaaaaaaaaaacaagatgacgacgacaaccacaaaaaaaattgacatcagatgaaatgaaaaaa

SEQ ID NO: 12401 - DNA, 1916 bp, Homo sapiens
gcggcgcgctcctggcgaggacggagcgagcagatctcgcgtgcgctcgccgcccggcgcagcccagcccggcccccgcctggcgccgcgagccgaggtgtctcccgcgcccgcgcccgtgtcgccgccgtgcccgcgagcgggagccggagtcgccgccgcccgagcgcagccgagcgcacgccgagcccgtccgccgccgccatggccaccacggtgacctgcacccgcttcaccgacgagtaccagctctacgaggatattggcaagggggctttctctgtggtccgacgctgtgtcaagctctgcaccggccatgagtatgcagccaagatcatcaacaccaagaagctgtcagccagagatcaccagaagctggagagagaggctcggatctgccgccttctgaagcattccaacatcgtgcgtctccacgacagcatctccgaggagggcttccactacctggtcttcgatctggtcactggtggggagctctttgaagacattgtggcgagagagtactacagcgaggctgatgccagtcactgtatccagcagatcctggaggccgttctccattgtcaccaaatgggggtcgtccacagagacctcaagccggagaacctgcttctggccagcaagtgcaaaggggctgcagtgaagctggcagacttcggcctagctatcgaggtgcagggggaccagcaggcatggtttggtttcgctggcacaccaggctacctgtcccctgaggtccttcgcaaagaggcgtatggcaagcctgtggacatctgggcatgtggggtgatcctgtacatcctgctcgtgggctacccacccttctgggacgaggaccagcacaagctgtaccagcagatcaaggctggtgcctatgacttcccgtcccctgagtgggacaccgtcactcctgaagccaaaaacctcatcaaccagatgctgaccatcaaccctgccaagcgcatcacagcccatgaggccctgaagcacccgtgggtctgccaacgctccacggtagcatccatgatgcacagacaggagactgtggagtgtctgaaaaagttcaatgccaggagaaagctcaagggagccatcctcaccaccatgctggccacacggaatttctcagtgggcagacagaccaccgctccggccacaatgtccaccgcggcctccggcaccaccatggggctggtggaacaagccaagagtttactcaacaagaaagcagatggagtcaaggagcctcaaaccaccgtcatccataacccagtggacgggattaaggagtcttctgacagtgccaataccaccatagaggatgaagacgctaaagcccggaagcaggagatcattaagaccacggagcagctcatcgaggccgtcaacaacggtgactttgaggcctacgcattctacttcgagaacctgctggccaagaacagcaagccgatccacacgaccatcctgaacccacacgtgcacgtcattggagaggatgccgcctgcatcgcttacatccggctcacgcagtacattgacgggcagggccggccccgcaccagccagtctgaggagacccgcgtgtggcaccgccgcgacggcaagtggcagaacgtgcacttccactgctcgggcgcgcctgtggccccgctgcagtgaagagctgcgccctggtttcgccggacagagttggtgtttggagcccgactgccctcgggcacacggcctgcctgtcgcatgtttgtgtctgcctcgttccctcccctggtgcctgtgtctgcagaaaaacaagaccagatgtgatttgttaaaaaaaaacaaaaaaaaaaaaaaaaaaaacaagatgacgacgacaaccacaaaaaaaattgacatcagatgaaatgaaaaaa

SEQ ID NO: 12402 - DNA, 1744 bp, Homo sapiens
cagcgcccgggccatggcggcggcggtggcgggagctgctgtctgagcagcggttgcggaccgagcgaacttggcccaggagcccgggcctagggagaggcgcggcggcggcgggagcgcgaacggctggagctggccttcttcgccttctcctcggctgtggagccctggtggggggtctgcgcccggtcaccatgacgacgccggcgaatgcccagaatgccagcaaaacgtgggaactgagtctgtatgagctgcaccggaccccgcaggaagccataatggatggcacagagattgctgtttcccctcggtcactgcattcagaactcatgtgccctatctgcctggacatgctgaagaatacgatgaccaccaaggagtgcctccacagattctgctctgactgcattgtcacagccctacggagcgggaacaaggagtgtcctacctgccgaaagaagctggtgtccaagcgatccctacggccagaccccaactttgatgccctgatctctaagatctatcctagccgggaggaatacgaggcccatcaagaccgagtgcttatccgcctgagccgcctgcacaaccagcaggcattgagctccagcattgaggaggggctacgcatgcaggccatgcacagggcccagcgtgtgaggcggccgataccagggtcagatcagaccacaacgatgagtgggggggaaggagagcccggggagggagaaggggatggagaagatgtgagctcagactccgcccctgactctgccccaggccctgctcccaagcgaccccgtggagggggcgcaggggggagcagtgtagggacagggggaggcggcactggtggggtgggtgggggtgccggttcggaagactctggtgaccggggagggactctgggagggggaacgctgggccccccaagccctcctggggcccccagccccccagagccaggtggagaaattgagctcgtgttccggccccaccccctgctcgtggagaagggagaatactgccagacgaggtatgtgaagacaactgggaatgccacagtggaccacctctccaagtacttggccctgcgcattgccctcgagcggaggcaacagcaggaagcaggggagccaggagggcctggagggggcgcctctgacaccggaggacctgatgggtgtggcggggagggtgggggtgccggaggaggtgacggtcctgaggagcctgctttgcccagcctggagggcgtcagtgaaaagcagtacaccatctacatcgcacctggaggcggggcgttcacgacgttgaatggctcgctgaccctggagctggtgaatgagaaattctggaaggtgtcccggccactggagctgtgctatgctcccaccaaggatccaaagtgaccccaccaggggacagccagaggaaggggaccatggggtatccctgtgtcctggtctatcaccccagcttctttgtcccccagtacccccagcccagccagccaataagaggacacaaatgaggacacgtggcttttatacaaagtatctatatgagattcttctatattgtacagagtggggcaaaacacgcccccatctgctgccttttctattgccctgcaacgtcccatctatacgaggtgttggagaaggtgaagaaccctcccattcacgcccgcctaccaacaacaaacgtgcttttttcctctttgaaacctgcaaaaaaa

SEQ ID NO: 12403 - DNA, 3696 bp, Homo sapiens
atagcacgccgcgcgcggggcggatgtccgggccggctgggccggggccgcggaggagatggcggaaggtggaggctgccgtgagcgaccggatgcggagactcagaagtccgagcttggacccttaatgaggaccacactccaacgcggggcgcagtggtatcttattgacagccggtggttcaagcagtggaagaagtatgtgggctttgacagctgggacatgtacaatgtgggtgaacataacctatttcctggcccaatagacaactctgggctattttcagatcctgagagtcagaccttgaaagaacacttaattgatgaattggactatgtattggtccctaccgaggcgtggaataaactactaaactggtacggctgtgtagaaggccagcaacccatcgtcagaaaagttgtggagcatggcctgtttgtcaagcactgcaaagtcgaggtgtatttgctggaactgaagctctgtgagaacagtgaccccaccaatgtgctgagttgccatttcagcaaggcagacaccattgcaaccatcgagaaagagatgcggaagctattcaacatccctgcggagcgtgaaacacggctctggaacaaatacatgagcaacacctacgagcagttgagcaagctagacaacactgtccaggatgctgggctataccagggtcaggtgctagtaattgagcctcaaaatgaagatggcacatggcccaggcagaccttgcagtcaaaatcaagcactgcgcctagcagaaattttactacctctccaaaatcatcagcaagtccctattcctcagtgtctgcctctctcattgcaaatggtgatagcactagcacctgtgggatgcacagttccggtgtcagcaggggtggatctggcttttctgcttcgtataattgtcaggagccaccatcctctcatatacaacctgggctctgtggacttggaaacctgggaaacacctgcttcatgaactccgctttgcagtgtttgagcaacactgcaccactgactgactactttctcaaagatgagtatgaagccgaaatcaacagagacaaccctctggggatgaaaggggaaattgcagaagcctatgctgaactcattaagcagatgtggtctggaagggacgcccatgtggcacctcgcatgttcaaaactcaagtaggacgttttgctcctcaattttctggctaccagcaacaagattctcaggagctgctggcctttcttctagatggattgcatgaagatctgaaccgggtaaagaaaaagccctacttggagctgaaggatgccaatgggcggccagatgcggtggtggcaaaggaagcctgggagaatcacaggttgaggaatgattctgtgattgtggatactttccatggcctcttcaaatctactttggtttgcccagaatgtgctaaggtttctgtgacctttgacccattttgctatctaacgctgccactgcccttgaagaaagatcgagttatggaggttttcctggttcctgctgaccctcactgcagacctactcagtaccgtgtgactgtgccgctgatgggggctgtgtccgacctgtgcgaggctctctccaggctgtctggcattgctgcagaaaatatggtggtcgcagatgtgtataatcaccgattccacaaaattttccaaatggatgaaggtttaaaccacatcatgcctcgggatgacattttcgtgtacgaggtctgcagcacttccgtggatggctcggaatgtgtcacgcttccagtctacttcagggagaggaagtccaggccatcaagcacttcctccgcatcagcgctatatgggcagccactattgctttctgtccccaagcacaagttaacccttgagtctttgtaccaggctgtttgtgatcgtatcagccgctatgtgaaacagcctttacctgatgagtttggcagctcacccttggagccaggggcctgcaatggctccaggaacagctgtgaaggagaagatgaggaagaaatggagcatcaggaagaaggcaaagagcagctttcagaaacagaaggcagtggggaagatgagccaggaaatgaccccagtgagaccacccaaaagaagatcaaaggccagccctgcccaaaaaggctttttaccttcagtcttgtgaactcctatggaacagctgacataaattcacttgcagctgatggaaaactacttaaactcaactctcgatctacactggccatggattgggacagtgaaactcggagactttactatgatgagcaagaatctgaggcctacgagaagcatgtgagcatgttgcagcctcagaagaagaagaagaccacagtggccctgagagactgcatcgagctcttcaccaccatggagacccttggggagcatgacccctggtactgtcccaactgtaagaagcatcaacaggccacaaaaaagtttgacctatggtccttgcccaagatcctggtggtccacctcaaacgtttctcctacaacagatactggagggataagctcgacacagtcgtagaattcccaatcagagggctgaacatgtccgagtttgtctgtaacctgtcagcaaggccttatgtgtacgacctcattgccgtgtccaatcattatggagccatgggggttggccactacactgcatatgcgaagaacaaactgaatggtaaatggtattactttgatgatagcaacgtgtccctggcctctgaggatcagatagtgactaaagcagcttatgtgctattttaccaacgtcgagatgatgaattttataagacaccttcacttagcagttctggttcctctgatggagggacacgaccaagcagctctcagcagggctttggggatgatgaggcttgcagcatggacaccaactaatgctgactccacgatcctgccaccctgtagcgccagtgtaatcccccaggagaacatctttgacactctgcagactgctagtgttctgtctaaaaaccagacaaggaaatacccttcttttatgagcagaaggaaacaaaaaaaaaaaagaagaccgtttacctagaagaagctatgtcaagaggctgaattatttttatttttaaacaggtggtgagaaatttctgtgaaacctgtgaagctgaaaagggggtgggatgggggtactcaatggagtatgtctgatggatcccgaagaatggagaggaacacaggcgctgagtatggagcagcctggagacccaccccacctgcagggctgccctgagcgcctggatttctggttctgatgccaatactagtcaccccaagtagtctgctcacagtaacccaaacctcaagtaaactcccctttccctcgctatgtgcactgatatgggtttataattttctgaaagttacccactgaagcccatttctccgttgagtcatcttgtaatttccagctttctccccgctaaggaagatatctagtgttggggatcctggcccctcaacctcctgtggaacccagcagttctgttatatcccctgctaccctagatgaattaagacggttaaatactgtgtggaacttttattagataacacactttttattagataacgcttaaaggaagtcagtacataaaaaaaaaaaaaaaaaa

SEQ ID NO: 12404 - DNA, 5243 bp, Homo sapiens
agcgtgagactcgcgccctccggcacggaaaaggccaggcgacaggtgtcgcttgaaaagactgggcttgtccttgctggtgcatgcgtcgtcggcctctgggcagcaggtttacaaaggaggaaaacgacttcttctagatttttttttcagtttcttctataaatcaaaacatctcaaaatggagacctaaaatccttaaagggacttagtctaatctcgggaggtagttttgtgcatgggtaaacaaattaagtattaactggtgttttactatccaaagaatgctaattttataaacatgatcgagttatataaggtataccataatgagtttgattttgaatttgatttgtggaaataaaggaaaagtgattctagctggggcatattgttaaagcatttttttcagagttggccaggcagtctcctactggcacattctcccattatgtagaatagaaatagtacctgtgtttgggaaagattttaaaatgagtgacagttatttggaacaaagagctaataatcaatccactgcaaattaaagaaacatgcagatgaaagttttgacacattaaaatacttctacagtgacaaagaaaaatcaagaacaaagctttttgatatgtgcaacaaatttagaggaagtaaaaagataaatgtgatgattggtcaagaaattatccagttatttacaaggccactgatattttaaacgtccaaaagtttgtttaaatgggctgttaccgctgagaatgatgaggatgagaatgatggttgaaggttacattttaggaaatgaagaaacttagaaaattaatataaagacagtgatgaatacaaagaagatttttataacaatgtgtaaaatttttggccagggaaaggaatattgaagttagatacaattacttacctttgagggaaataattgttggtaatgagatgtgatgtttctcctgccacctggaaacaaagcattgaagtctgcagttgaaaagcccaacgtctgtgagatccaggaaaccatgcttgcaaaccactggtaaaaaaaaaaaaaaaaaaaaaaaaaagccacagtgacttgcttattggtcattgctagtattatcgactcagaacctctttactaatggctagtaaatcataattgagaaattctgaattttgacaaggtctctgctgttgaaatggtaaatttattattttttttgtcatgataaattctggttcaaggtatgctatccatgaaataatttctgaccaaaactaaattgatgcaatttgattatccatcttagcctacagatggcatctggtaacttttgactgttttaaaaaataaatccactatcagagtagatttgatgttggcttcagaaacatttagaaaaacaaaagttcaaaaatgttttcaggaggtgataagttgaataactctacaatgttagttctttgagggggacaaaaaatttaaaatctttgaaaggtcttattttacagccatatctaaattatcttaagaaaatttttaacaaagggaatgaaatatatatcatgattctgtttttccaaaagtaacctgaatatagcaatgaagttcagttttgttattggtagtttgggcagagtctctttttgcagcacctgttgtctaccataattacagaggacatttccatgttctagccaagtatactattagaataaaaaaacttaacattgagttgcttcaacagcatgaaactgagtccaaaagaccaaatgaacaaacacattaatctctgattatttattttaaatagaatatttaattgtgtaagatctaatagtatcattatacttaagcaatcatattcctgatgatctatgggaaataactattatttaattaatattgaaaccaggttttaagatgtgttagccagtcctgttactagtaaatctctttatttggagagaaattttagattgttttgttctccttattagaaggattgtagaaagaaaaaaatgactaattggagaaaaattggggatatatcatatttcactgaattcaaaatgtcttcagttgtaaatcttaccattattttacgtacctctaagaaataaaagtgcttctaattaaaatatgatgtcattaattatgaaatacttcttgataacagaagttttaaaatagccatcttagaatcagtgaaatatggtaatgtattattttcctcctttgagttaggtcttgtgcttttttttcctggccactaaatttcacaatttccaaaaagcaaaataaacatattctgaatatttttgctgtgaaacacttgacagcagagctttccaccatgaaaagaagcttcatgagtcacacattacatctttgggttgattgaatgccactgaaacattctagtagcctggagaagttgacctacctgtggagatgcctgccattaaatggcatcctgatggcttaatacacatcactcttctgtgaagggttttaattttcaacacagcttactctgtagcatcatgtttacattgtatgtataaagattatacaaaggtgcaattgtgtatttcttccttaaaatgtatcagtataggatttagaatctccatgttgaaactctaaatgcatagaaataaaaataataaaaaatttttcattttggcttttcagcctagtattaaaactgataaaagcaaagccatgcacaaaactacctccctagagaaaggctagtcccttttcttccccattcatttcattatgaacatagtagaaaacagcatattcttatcaaatttgatgaaaagcgccaacacgtttgaactgaaatacgacttgtcatgtgaactgtaccgaatgtctacgtattccacttttcctgctggggttcctgtctcagaaaggagtcttgctcgtgctggtttctattacactggtgtgaatgacaaggtcaaatgcttctgttgtggcctgatgctggataactggaaaagaggagacagtcctactgaaaagcataaaaagttgtatcctagctgcagattcgttcagagtctaaattccgttaacaacttggaagctacctctcagcctacttttccttcttcagtaacaaattccacacactcattacttccgggtacagaaaacagtggatatttccgtggctcttattcaaactctccatcaaatcctgtaaactccagagcaaatcaagatttttctgccttgatgagaagttcctaccactgtgcaatgaataacgaaaatgccagattacttacttttcagacatggccattgacttttctgtcgccaacagatctggcaaaagcaggcttttactacataggacctggagacagagtggcttgctttgcctgtggtggaaaattgagcaattgggaaccgaaggataatgctatgtcagaacacctgagacattttcccaaatgcccatttatagaaaatcagcttcaagacacttcaagatacacagtttctaatctgagcatgcagacacatgcagcccgctttaaaacattctttaactggccctctagtgttctagttaatcctgagcagcttgcaagtgcgggtttttattatgtgggtaacagtgatgatgtcaaatgcttttgctgtgatggtggactcaggtgttgggaatctggagatgatccatgggttcaacatgccaagtggtttccaaggtgtgagtacttgataagaattaaaggacaggagttcatccgtcaagttcaagccagttaccctcatctacttgaacagctgctatccacatcagacagcccaggagatgaaaatgcagagtcatcaattatccattttgaacctggagaagaccattcagaagatgcaatcatgatgaatactcctgtgattaatgctgccgtggaaatgggctttagtagaagcctggtaaaacagacagttcagagaaaaatcctagcaactggagagaattatagactagtcaatgatcttgtgttagacttactcaatgcagaagatgaaataagggaagaggagagagaaagagcaactgaggaaaaagaatcaaatgatttattattaatccggaagaatagaatggcactttttcaacatttgacttgtgtaattccaatcctggatagtctactaactgccggaattattaatgaacaagaacatgatgttattaaacagaagacacagacgtctttacaagcaagagaactgattgatacgattttagtaaaaggaaatattgcagccactgtattcagaaactctctgcaagaagctgaagctgtgttatatgagcatttatttgtgcaacaggacataaaatatattcccacagaagatgtttcagatctaccagtggaagaacaattgcggagactacaagaagaaagaacatgtaaagtgtgtatggacaaagaagtgtccatagtgtttattccttgtggtcatctagtagtatgcaaagattgtgctccttctttaagaaagtgtcctatttgtaggagtacaatcaagggtacagttcgtacatttctttcatgaagaagaaccaaaacatcgtctaaactttagaattaatttattaaatgtattataactttaacttttatcctaatttggtttccttaaaatttttatttatttacaactcaaaaaacattgttttgtgtaacatatttatatatgtatctaaaccatatgaacatatattttttagaaactaagagaatgataggcttttgttcttatgaacgaaaaagaggtagcactacaaacacaatattcaatcaaaatttcagcattattgaaattgtaagtgaagtaaaacttaagatatttgagttaacctttaagaattttaaatattttggcattgtactaataccgggaacatgaagccaggtgtggtggtatgtgcctgtagtcccaggctgaggcaagagaattacttgagcccaggagtttgaatccatcctgggcagcatactgagaccctgcctttaaaaacaaacagaacaaaaacaaaacaccagggacacatttctctgtcttttttgatcagtgtcctatacatcgaaggtgtgcatatatgttgaatgacattttagggacatggtgtttttataaagaattctgtgagaaaaaatttaataaagcaacaaaaattactcttaaaaaaaaaaaaaaa

SEQ ID NO: 12405 - DNA, 2683 bp, Homo sapiens
agcgtgagactcgcgccctccggcacggaaaaggccaggcgacaggtgtcgcttgaaaagactgggcttgtccttgctggtgcatgcgtcgtcggcctctgggcagcaggtttacaaaggaggaaaacgacttcttctagatttttttttcagtttcttctataaatcaaaactacctccctagagaaaggctagtcccttttcttccccattcatttcattatgaacatagtagaaaacagcatattcttatcaaatttgatgaaaagcgccaacacgtttgaactgaaatacgacttgtcatgtgaactgtaccgaatgtctacgtattccacttttcctgctggggttcctgtctcagaaaggagtcttgctcgtgctggtttctattacactggtgtgaatgacaaggtcaaatgcttctgttgtggcctgatgctggataactggaaaagaggagacagtcctactgaaaagcataaaaagttgtatcctagctgcagattcgttcagagtctaaattccgttaacaacttggaagctacctctcagcctacttttccttcttcagtaacaaattccacacactcattacttccgggtacagaaaacagtggatatttccgtggctcttattcaaactctccatcaaatcctgtaaactccagagcaaatcaagatttttctgccttgatgagaagttcctaccactgtgcaatgaataacgaaaatgccagattacttacttttcagacatggccattgacttttctgtcgccaacagatctggcaaaagcaggcttttactacataggacctggagacagagtggcttgctttgcctgtggtggaaaattgagcaattgggaaccgaaggataatgctatgtcagaacacctgagacattttcccaaatgcccatttatagaaaatcagcttcaagacacttcaagatacacagtttctaatctgagcatgcagacacatgcagcccgctttaaaacattctttaactggccctctagtgttctagttaatcctgagcagcttgcaagtgcgggtttttattatgtgggtaacagtgatgatgtcaaatgcttttgctgtgatggtggactcaggtgttgggaatctggagatgatccatgggttcaacatgccaagtggtttccaaggtgtgagtacttgataagaattaaaggacaggagttcatccgtcaagttcaagccagttaccctcatctacttgaacagctgctatccacatcagacagcccaggagatgaaaatgcagagtcatcaattatccattttgaacctggagaagaccattcagaagatgcaatcatgatgaatactcctgtgattaatgctgccgtggaaatgggctttagtagaagcctggtaaaacagacagttcagagaaaaatcctagcaactggagagaattatagactagtcaatgatcttgtgttagacttactcaatgcagaagatgaaataagggaagaggagagagaaagagcaactgaggaaaaagaatcaaatgatttattattaatccggaagaatagaatggcactttttcaacatttgacttgtgtaattccaatcctggatagtctactaactgccggaattattaatgaacaagaacatgatgttattaaacagaagacacagacgtctttacaagcaagagaactgattgatacgattttagtaaaaggaaatattgcagccactgtattcagaaactctctgcaagaagctgaagctgtgttatatgagcatttatttgtgcaacaggacataaaatatattcccacagaagatgtttcagatctaccagtggaagaacaattgcggagactacaagaagaaagaacatgtaaagtgtgtatggacaaagaagtgtccatagtgtttattccttgtggtcatctagtagtatgcaaagattgtgctccttctttaagaaagtgtcctatttgtaggagtacaatcaagggtacagttcgtacatttctttcatgaagaagaaccaaaacatcgtctaaactttagaattaatttattaaatgtattataactttaacttttatcctaatttggtttccttaaaatttttatttatttacaactcaaaaaacattgttttgtgtaacatatttatatatgtatctaaaccatatgaacatatattttttagaaactaagagaatgataggcttttgttcttatgaacgaaaaagaggtagcactacaaacacaatattcaatcaaaatttcagcattattgaaattgtaagtgaagtaaaacttaagatatttgagttaacctttaagaattttaaatattttggcattgtactaataccgggaacatgaagccaggtgtggtggtatgtgcctgtagtcccaggctgaggcaagagaattacttgagcccaggagtttgaatccatcctgggcagcatactgagaccctgcctttaaaaacaaacagaacaaaaacaaaacaccagggacacatttctctgtcttttttgatcagtgtcctatacatcgaaggtgtgcatatatgttgaatgacattttagggacatggtgtttttataaagaattctgtgagaaaaaatttaataaagcaacaaaaattactcttaaaaaaaaaaaaaaa

SEQ ID NO: 12406 - DNA, 4304 bp, Homo sapiens
cgggatcgcgctgatgtggccccaaccccgcctccctccccgccccgcgatgtcggaagaaacccgacagagcaaattggccgcagcgaagaaaaagttgagagaatatcagcagaggaatagccctggtgttcctacaggagcgaaaaagaagaagaaaataaaaaatggcagtaaccctgagacaaccacttctggtggttgccactcacctgaggatacacccaaggacaatgctgctactctacaaccatctgatgacaccgtgttacctggcggtgtcccttcccctggtgccagtctcactagcatggcggcatctcagaatcatgatgctgacaatgtccctaatctcatggatgaaaccaagactttctcatcaaccgagagcctgcgacaactctcccaacagctcaatggtcttgtttgtgagtctgcgacatgtgtcaatggggagggccctgcatcgtctgctaacctgaaggatctggagagccggtaccaacagctagcggtagccctggactccagctatgtaacaaacaaacaactcaatatcacgatagagaaattgaaacaacagaaccaagaaattacggatcagttggaagaagaaaagaaagaatgccaccaaaagcagggagccctaagggagcagttacaggttcacattcagaccatagggatcctcgtatcagagaaagctgagttacagacagccctggctcacactcagcatgctgccaggcagaaagaaggagagtctgaagatctggccagccgcctgcagtattcccggcggcgtgtgggagagttggagcgggctctctctgctgtctccacgcagcagaagaaggcagacaggtacaacaaggagttaaccaaagagagagacgccctcaggctggagttatacaagaacacccaaagcaatgaggacctgaagcaagagaaatcagaattggaagagaagcttcgggtcctagtgactgagaaggctggcatgcagcttaacttggaagaattgcaaaagaagttagagatgacggaactcctgcttcaacagttttcaagccggtgtgaagcccctgatgctaaccagcagttacagcaggccatggaggagcgggcacagctggaagcacacctggggcaggtaatggagtcggttagacaactacaaatggagagagataaatatgcggagaatctcaaaggagagagcgccatgtggcggcagaggatgcagcagatgtcagagcaggtgcacacattgagagaggagaaggaatgtagcatgagtcgggtacaggagctggagacgagcttggctgaactgaggaaccagatggctgaacccccgcccccagagcccccagcagggccctccgaggtggagcagcagctacaagcggaggctgagcacctgcggaaggagctggagggtctggcaggacagcttcaagcccaggtgcaagacaatgagggcttgagtcgcctgaaccgggagcaggaggagaggctgctggagctggagcgggcggccgagctctggggggagcaggcggaggcgcgcaggcaaatcctggagaccatgcagaacgaccgcactaccatcagccgcgcactctcccagaaccgggagctcaaggagcagctggctgagctgcagagcggatttgtaaagctgactaatgagaacatggagatcaccagcgcactgcagtcggagcagcacgtcaagagggagctgggaaagaagctgggcgagctgcaggagaagctgagcgagctgaaggaaacggtggagctgaagagccaagaggctcaaagtctgcagcagcagcgagaccagtacctgggacacctgcagcagtatgtggccgcctatcagcagctgacctctgagaaggaggtgctgcataatcagctactgctgcagacccagctcgtggaccagctgcagcagcaggaagctcagggcaaagcggtggccgagatggcccgccaagagttgcaggaaacccaggagcgcctggaagctgccacccagcagaatcagcagctacgggcccagttgagcctcatggctcaccctggggaaggagatggactggaccgggaggaggaggaggatgaggaggaggaggaggaggaggcggtggcagtacctcagcccatgccaagcatcccggaggacctggagagccgggaagccatggtggcatttttcaactcagctgtagccagtgccgaggaggagcaggcaaggctacgtgggcagctgaaggagcaaagggtgcgctgccggcgcctggctcacctgctggcctcggcccagaaggagcctgaggcagcagccccagccccagggaccgggggtgattctgtgtgtggggagacccaccgggccctgcagggggccatggagaagctgcagagccgctttatggagctcatgcaggagaaggcagacctgaaggagagggtagaggaactggaacatcgctgcatccagctttctggagagacagacaccattggagagtacattgcactgtaccagagccagagggcagtgctgaaggagcggcaccgggagaaggaggagtacatcagcaggctggcccaagacaaggaggagatgaaggtgaagctgctggagctgcaggagctggtcttacggcttgtgggcgaccgcaacgagtggcatggcagattcctggcagctgcccagaaccctgctgatgagcccacttcaggggccccagccccccaggaacttggggctgccaaccagcagggtgatctttgcgaggtgagcctcgccggcagtgtggagcctgcccaaggagaggccagggagggttctccccgtgacaaccccactgcacagcagatcatgcagctgcttcgtgagatgcagaacccccgggagcgcccaggcttgggcagcaacccctgcattccttttttttaccgggctgacgagaatgatgaggtgaagatcactgtcatctaaaagccggctactgtcagcaaagcctgaagaagtggggctggataccctgcccccaccatatccctaccatcccttctcagtcaaccctttacccttacagtagcaagcatagacccctgtctaacgggggtagacaggtgcagatgaggtgaagatcactgtcatctaaaagctggccactaaattaaaaaaaaattaaaagttatgggattaaaaaaagttatgggataaaaaaggttatgggtaacttatggtataaaagttatgaaaaaaggccaggtgcagtggctcacgcctgtaatcccagcacttttgggaggctgaggttgggagttcaagaccagcctggtcaacatggtgaaactgtgtctctactaaaaatacaaaaattagccaggcatggtggcacgtgcctgtaatcccagctactcgggaggctgaggcaggagaatcgcttgaacctgggaggtggaggttgcagtgggctgagatcacgccattgcactccagcctgggcgacagagtgagactctgtctcaaaaaaaaaaaaaattatgaaaaaagttatgggattaaagaaagtcaggataaaaattttaaaaagcaggccactgtcagcaaagcctggagaagtggggccggaggctccgcccccatcatgtgcctgccaccccttcccagtcatccctttactcttacagtagcaaataagacccctgtctaatggggggagacaaatgtgtagacccttagccaccttggccagggctgactccttaaatttctggatgatgatgattgttatttaatagccagaggctcatataattggcctctttggaagaggcctcatggcctccttactctcaccaaagcaatttttccctcaggggggctcccatcttcttacacagagaggcagctgaggcaggacagtggggctaactgtagaccaggcgagggcacgggctgctggggtggccctgcttccccagtgtacatattgtatctgtgtaacattttgtatattccaggggtagggccgccccctgtatcatacctagcagaggttggagctggcacatggggaggaggttctaataattatttggggctgggaaacttatttattgatagcataggacagaggaaggaggcggggatggggtcgtggcgccctggtgatgcgactcctgtttattttgctttttatttcggaataaatggatttagccataaaaaaaaaaaaaaaaaaaaaaaaaaaaaaaaaaaaaaaaaaaaa

SEQ ID NO: 12407 - DNA, 6232 bp, Homo sapiens
ctgccagatcagtttgtcaccacccaggctcccttgcctttggctgggtgcaacttccattttaggtgttggatctgagggggaaaaaaaagagagagggagagagagagaaagaagagcaggaaagatcccgaaaggaggaagaggtggcgaaaaatcaactgccctgctggatttgtctttctcagcaccttggcgaagccttgggtttctttcttaaaggactgatttttagaactccacatttgaggtgtgtggcttttgaagaaaatgtatgtactgacgggaaaaggaagataagcaagtcgaatttttgtcttacgctctctccttcctgcttcctccttgctgtggtggctgggatgctccttccatgattttttgaatctagactgggctgttctctgtgttaaaccaatcagttgcgaccttctcttaacagtgtgaagtgagggggtctctctccctccttctccttcctctgtgattcaccttcctttttaccctgccctgcggcggctccgccccttaccttcatggacgactcagaggtggagtcgaccgccagcatcttggcctctgtgaaggaacaagaggcccagtttgagaagctgacccgggcgctggaggaggaacggcgccacgtctcggcgcagctggaacgcgtccgggtctcaccacaagatgccaacccactcatggccaacggcacactcacccgccggcatcagaacggccggtttgtgggcgatgctgaccttgaaagacagaaattttcagatttgaaactcaacggaccccaggatcacagtcaccttctatatagcaccatccccaggatgcaggagccggggcagattgtggagacctacacggaggaggatcctgagggagccatgtctgtagtctctgtggagacctcagatgatgggaccactcggcgcacagagaccacggtcaagaaagtagtgaagactgtgacaacacggacagtacagccagtcgctatgggaccagacgggttgcctgtggatgcttcatcagtttctaacaactatatccagactttgggtcgtgatttccgcaagaatggcaatgggggacctggtccctatgtggggcaagctggcactgctacccttcctaggaacttccactaccctcctgatggttatagtcgccactatgaagatggttatccaggtggcagtgataactatggcagtctgtcccgggtgacccgcattgaggagcggtataggcccagcatggaaggctaccgggcacctagtagacaggatgtgtatgggccccaaccccaggttcgggtaggtgggagcagcgtggatctgcatcgctttcatccagagccttatgggctagaggatgaccagcgtagtatgggctatgatgacctggattatggtatgatgtctgattatggcactgcccgtcggactgggacaccctctgaccctcgtcggcgcctcaggagctatgaagacatgattggtgaggaggtgccatcggatcaatactactgggctcctttggcccagcatgagcgaggaagtttagcaagcttggatagcctgcgcaaaggagggcctccacctcctaattggagacagccagagctgccagaggtgatcgccatgcttggattccgcttggatgctgtcaagtccaatgcagctgcatacctgcaacacttatgctaccgcaatgacaaggtgaagactgacgtgcggaagctcaagggcatcccagtactggtgggattgttagaccatcccaaaaaggaagtgcaccttggagcctgtggagctctcaagaatatctcttttggacgtgaccaggataacaagattgccataaaaaactgtgatggtgtgcctgcccttgtgcgattgcttcgaaaggctcgtgatatggaccttactgaagttattaccggaaccctgtggaatctttcatcccatgactcaatcaaaatggagattgtggaccatgcactgcatgccttgacagatgaagtgatcattcctcattctggttgggagcgggaacctaatgaagactgtaagccacgccatattgagtgggaatcggtgctcaccaacacagctggctgccttaggaatgtaagctcagagaggagtgaagctcgccggaaacttcgggaatgtgatggtttagttgatgccctcattttcattgttcaggctgagattgggcagaaggattcagacagcaagcttgtagagaactgtgtttgccttcttcggaacttatcatatcaagttcaccgggagatcccacaggcagagcgttaccaagaggcagctcccaatgttgccaacaatactgggccacatgctgccagttgctttggggccaagaagggcaaagggaaaaaacctatagaggatccagcaaacgatacagtggatttccctaaaagaacgagtccagctcgaggctatgagctcttatttcagccagaggtggttcggatatacatctcacttcttaaggagagcaagactcctgccatcctagaagcctcagctggagctatccagaacttgtgtgctgggcgctggacgtatggtcgatacatccgctctgctctgcgtcaagagaaggctctttctgccatagctgacctcctgactaatgaacatgaacgggtggtgaaagctgcatctggagcactgagaaacctggctgtggatgctcgcaacaaagaattaattggtaaacatgctattcctaacttggtaaagaatctgccaggaggacagcagaactcctcttggaatttctctgaggacactgtcatctctattttgaacactatcaacgaggttatcgctgagaacttggaggctgccaaaaagcttcgagagacacagggtattgagaagctggtgttgatcaacaaatcagggaaccgctcagaaaaagaagttcgagcagcagcacttgtattacagacaatctggggatataaggaactgcggaagccactggaaaaagaaggatggaagaaatcagactttcaggtgaatctaaacaatgcttcccgaagccagagcagtcattcatatgatgatagtactctccctctcattgaccggaaccaaaaatcagataacaactattccacaccaaatgagagaggagaccacaatagaacactggatcgatcgggggatctaggcgacatggagccattgaagggaacaacacccttgatgcaggacgaggggcaggaatctctggaggaagagttggatgtgttggttttggatgatgaggggggccaagtgtcttacccctccatgcagaagatttagcaccactatctccgttccatctgggcttatatgtacttttattttttggtggtgaaattgactgatgattttcctttttcttcgctggactattgtgccaactgccaggctgcctcctgcccttacagccctaagtggctgccttctttccatcaactcccaacttcttcctgtgaagtttaattgtctcaacgcctccccctcccccattccctccatttttctcccaagaaacctgactcaattatttgcatattttgagaaactgctgcagattagttctttttgccagttttccctggaactcctggccttttgtggaggggagggatggagagaataggaatcttcactagaagccgtgggaagaattggaagttacatgctgtatatgcaatgtccagcagtctgataaactgacgattcttaatcaagatttttttcctgatggggaagggacttttattttcttttagagaggggaaagtgtgagctcttcccttattcctaatggctatttttgaagcaaagaaggccagcaacattggcacatgccacctggcaaaggacccttgagtaagtgaaggtctcctaaaactgggattaagaaaccttgctctcctcatctccaaggcagggaccatcaagaacctacagactccatctcttctgcaagcctcatgccaaccctgggctattgctgctgccccttaaacacaggctgtccttaacccacctctcctgccctgtgatatgtctgctgagttggcctggccatttccaagaggctgtagaaaggggagaatgtcaaggaagacttttggtagagaaggagcagaaagatgtgtttttgggaagaagaagacctctaggaggagctagtaggaatgtacatgaagcaattagtctgaaactggcttccccactcccccgtttctccttttcctatccttataggcctgtcccttgcctctgccctggattggttggcaaactataggacttgatgtacataactcctgtcccttttcccttacaaggtggggattgcccctggctttgcctcttctttgtgcctttggcctggggtgcatctcctcccgcccttccatgtgcctttctttgcctctgcagtctcatttctcataattttgcaaattatattttgttgctttcttacctactattggccctaaatagcagaaagaagagaagtgaccgagagaacctcagattcttcattgaggattggtatagccatgatttcagtcatagcaagcttttgctcaacagcatatgggtgggatttggcaaaaatcctattctgatgaatctcaaagtaaggctggtaagagaagtgagtggtgtgactcttactccttaggtgcccagaatttaccatcatctctgaaggagttacagggaagtggtctccccaattctcccctccctccagtattgccccctctcactttagcatatattaattagcaggttgggctagagaaatcagctgctatgcgggttgattattattattatttctaatccttttccttatttgccttctactccccttaatctaatctaaaagctctgttccatgcaactggagttccttatccctctcttccccttcccttatatattgaggctatggggtaggagaaaagtgcacaacccaccaccccctctactcgtgcattaaaatttcttatttacccttttcccccttcccatttcttcccactttcatctaccttttctggcaaaaaggagccttttgctctctgtgaccctaagagcacactgcacagggaaaattgccccatccagacctggctccactcttgatctctcttgtcctcttctgctcttttcctggtgctcttttttctcggtggggtgtgggtaatagaacagccgtgggcttttggggacctttaacttttttttctctcttttgtttataaaaaacactaaacattcaattccagagaacccaaaatcccaccttcccaccgaacactactaaggggcttgtgttctgctccataccttttctcttttctttctgtcttgttaatgcttttaaaaacaaatgagttttttatataaataaagtttttaaagtgtgtatgtggggggtctgtgtcatttcttcacttcaagctgttatttcttccctgctttgcatctttgttacttccttatgtatcagtgtcctttccagagcaaccagaaggaggttataccaggatttattttgagctcagccccaactctttatcaagcaacattcttgttaactatatgtgaaacattttttcttctgaagattcttaaaaattgaatgtggctgaagttgaacatgggagcttattgctaatttagagataggaaactgaagcataaagaattaatgacttactttaattactggaattcttctgcaacatttgacaaaactaaccttgaataaggcccactgtaatacgtagctctcttaaatataacacttaggactagaagattagaaactaccaatcccaactacgtaataggaaaatgtaggatcaaaaggcccatgtatataagtactgaccactgggccataatgttgcttctcaggctatatgcagtcctttagtcagaagtcaataggcctatttattaatattttacagaccatattacctggattaccagggactatctttgctgcagagatcaagggttaagatctatgggaagatacttatttttctgaggtccttatgtcctgtcatataattaaagactcaagagaatttatgtgaaatgctttctgtatgccccaatctttagattaaaattatatacctgctcct

SEQ ID NO: 12408 - DNA, 5229 bp, Homo sapiens
agcggaggctatctccagccgtggccgatggccgtgccgggggcagagcccgctcccctccgcgcgttgctacgtgcggggatgacatggatccagacgccgtcaactacgggaaggaggaggcgagagttggagcgcgtgggagcgcagaggccggaggagggaaacaccctcccggatccagagcccggcggcggcgaagcagcagctgcggccgcgcccttgccagagccggtgcgtccgcctagccccgctccgcctgaggccgtcagggctcccgaggatggaagattcccaggagacatcgccgtcctccaacaactcctcggaggagctcagctctgctctgcacctgtccaagggcatgtcgatcttcctcgacatactgaggagagcagacaaaaatgatgatggaaaattatcctttgaagaattcaaagcatattttgcagatggtgttctcagtggagaagaattacacgagcttttccataccattgatacacataatactaataatcttgacacagaagagctatgtgaatatttttctcagcacttgggcgagtatgagaatgtactagcagcacttgaagacctgaatctttccatcctgaaggcaatgggcaaaacaaagaaagactaccaagaagcctccaatttggaacaattcgtaactagatttttattgaaggaaaccctgaatcagctgcagtctctccagaattccctggaatgtgccatggaaactactgaggagcaaacccgtcaagaaaggcaagggccagccaagccagaagtcctgtcgattcaatggcctggaaaacgatcaagccgccgagtccagagacacaacagcttctccccaaacagccctcagtttaatgtcagcggtccaggcttattagaagaagacaaccagtggatgacccagataaatagactccagaaattaattgatagactggaaaagaaggatctcaaactcgaaccaccagaagaagaaattattgaagggaatactaaatctcacatcatgcttgtgcagcggcagatgtctgtgatagaagaggacctggaagaattccagctcgctctgaaacactacgtggagagtgcttcctcccaaagtggatgcttgcgtatttctatacagaagctttcaaatgaatctcgctacatgatctatgagttctgggagaatagtagtgtatggaatagccaccttcagacaaattatagcaagacattccaaagaagtaatgtggatttcttggaaactccagaactcacatctacaatgctagttcctgcttcgtggtggatcctgaacaactagatgttcctagacattttctttatggttccaagtgcaaaacaggtgttcttatctaaaacgtcaattagaaaattatctgcggttgttaatctactgtatatttttgtttggtatatttactaagtgcactctttcaaaacttattctataactttatcaattcatgtgaattttagctcaattttcaaagttcactaatattctcaatatttaatgctaaatgctttgctacattgtaactcacctaaaaccttttagtgacaaaatcctaatatgtggaaaaaagcatatgcataaaggaataatattgtgaaaatgaatctgttatgataaagaaaaaataaagtggaaacttttagagtattacttcatagggcagattttgtaaactgtcgtatactgtaaagggttaaatcagcgttttgtgatttttaagtaactgtgagtgaagtttattcttcaacaatgtctactccatccccaacccaactcacagccctatgactactatctttgcattagttaaaaagttagtatataggcatcaaacaaccttggctgtaacctatagaatctctatccacgtatcaggttatagactggtttttcaaaagtgaacaatcctgtgataagttggagtaccatttagtaatacagcaacattgtgtcatttattagcatcataattctttgttatgtaagttaaatatatcaagaaagaagagactgtttggaaaaatgtggttcaagttttatgctatatagttttggtatgcgatacagacagctaacttttcttatgaaaaatacatatttgcatgtaaacaatgatttcaaaatacttgaaaaataaaattttaacccaaatgaataactaagaaatataaaacaagcacaaaatcttagggaagtcataaaatagtagtgaaagtattagacagaagacatctgttttcgaatttcaacactagaatgactaaaactatctacctatagaactatctgtagatagtatactatctacactctgctcaacaagctcagaaattaaatatttttaataataaaaatctgttctggttataaaccttgctaatgaaaatacaatacatataaaaatgtatagccatgttattttctagtataaattcctttgaaactataagtctttgaggaaaattataaggtaaaattttcctgtttttccccctttgaaaaactcaggaaaaaaggaagattgaactaataaaattttatttcttaaatataaatttgacctaaaatattttctcaaactaattcatgaaacagcaacttttaccaatacctttgtatactctcagttctcattcagtataaataaaattttaaaatcctttcatagttctattagaaataagtagtaaattttgatatattgtacatacacacgtgtgtgtgtgtgtgtgtgtgtgtgtgtgtgtgtgtgtgtgtatttgtgtgcctctggtcaactctaaggatgacagacactgtgtaacaacacctgggtcaactcttttaatttatatacaaagcaaagaacaacattaatggagatgcacaatgattattcaaacaagctatatatatgtacaaaggcaaacagacacataacagtctctgcagactgattgtatatagtaagaaaagatcaaaagactttaaaacctaaatgacttttgacatacaaactcttcttgagaatgtttgttgtaaatggtttcaaaaatacaaattatagccaatcaaaacattgctttggttggtgcatttaagtatccaactcaaaaagcatatcaaatattttgggtactaggcagtttccaaagtagcatggtagtattacttgttaaaagggttctgttttcattaacagtactaagtggaagggatctgcagattccaaactggaataagctctatcatattctgaaacaagaattagaatgacttgagaacgggcaaataacaaagcaaaccaatataattatatggtcattctgaccccagctcttatacaaattatacatgtatttttgtgtatgtttgtgagagttgtatgtatgtgaatgtgtgtgagtgtgtattcacatacacatatatactggaacctatagtagaaaaggaaactagtagggccaaaaaaaaaaagaaaaagaaaaagaaaaaagaaaaaaaaagaaaaaactgggacctaagtataaatatctcatcctaaagtaaacaataagtttatagttaacgaagatttttttctatttaaaaccccattttcctaaagaacaaagtagtaaaataaaaaaaaatttaaaaaattaaaaaataaaaaaaagaggtcactaaaagaccaagatgggaaacgtaacatggaatacaagcttgaatctgggaaacaagctcaaaaaacagtgaaaaaaaaagtactggtttaggagttcaaaattcagtgaaacaaactttttgccaatagacctagggatctaagaaatagaattagggagagtttacacttacttacctatatatcagcagatttttctggaagaaaccctttttttttttttttttaaacagtaacatccagagtgacaaattgcaggagatttaatgtataaaatttctaggaattaaaagcttaaacccaaaaattgttcatccatatataagaaattatcgaattaaaacttaatgtatgtcaattattttcaaatgtctaaattcctttggaaataaaaatatcagttttactttgaaattgctcaacttctgctattcatatggtctgattagtgacataagtagcagccgtttttcaacttcagtttcattcactaccattgtttccaaattatcaatctctgctagtaattatgaatttaagaccatattattatcaaaaacctagagaccaatcatatatctgaaaagaaatacccattaaaaattctgcctcctgtttattgagaactatgcattgaacattctgaatcattctaagcctctggagagactgtaatgatccattcatgagctggtatgaaatcagtgggaagcagaacaacagaaggaactttaaaagcaacaagcaattatgtaccatatatacactgtagcaaatattttatatttgagagtctttacagcttacatttccattccattattacaagtgatgaaaaacaaaaaattgcaagtagtatgcaaattataaatatacagtcttcccacttcactaaccaaattcctactttccagtgttacttcccaatttatgcaggaaacctcctgcaaagctgaaactgattagaaaattctttatattttaaaatagctctttctcatttttagagaagtcaaatagccaaccatcaaaattaagaataaattgaattgtcacagtccattacagttattgttgctagatccacctcatttgcagatgtccaaacttaaattcatctgttcttaaaatgctacttaaaactttggttgttttcctgtaatataaaagaaaaagttaatttatcaattgattgaatacagtttttactaattagtttatcaaaccaaatactgtgaacgtaccaggtgtttacagatttaaatgcatgttaccatagaaactattaaagtaactagaactgtcaaataacaaaacggctcatgtttttaaaatatatgtaactcattttaaaatatattaaattgtattccaaacctgttcttctgtttctgtggcacctaggtttaaaatatgtattaatgtgtaaatcacaagtaaaatgaattctaatgtacaagtttgttttaaaaagtgtatgtcaagcttttatttacacaataaaatgttattaaagatggaaagtcta

SEQ ID NO: 12409 - DNA, 3047 bp, Homo sapiens
gggccgggccttcgggcccgaggcggcggcggcggtataaagccggcgactgggagcatgtaatgtcggaatgcggaggccgcggcggcggcagcagcagcagcgaggacgccgaggacgagggagggggcggcggcggccccgcgggctcagactgcctcagctcgagcccgaccctggccacagcgtcctcggcgggccggctccgtcgcgggctgcgtggcgccttcctcatggcgcgccagcggcccgagctgctctgcggggccgtggcgctcggctgcgcgctgctcctcgccctcaagttcacctgcagtcgagcaaaagatgtgataataccagcaaagccacctgtcagctttttctccttgaggtctccagtccttgacctcttccaggggcagctggattatgcagagtacgttcgacgggattcagaggtggtactgctcttcttctatgccccttggtgtggacagtccatcgctgccagggcagaaattgagcaagcagcaagtcggctttcagatcaggtgttgtttgtggcaattaactgttggtggaaccaggggaaatgcagaaaacagaaacacttcttttattttcctgtaatatatctgtatcatcggagttttggaccaatcgaatacaaaggccccatgagtgctgtttacattgagaagtttgtccgccgggtgatgaaaccacttctctacatcccatctcaatcagaattactagattttctctcaaactacgagcctggagtactcgggtactttgagttcagtggctcaccccagcctcctggttatttgaccttcttcacctcagcattacattcattaaagaaagattacctaggaacagtacgatttggggttatcacaaataaacatcttgcgaaactggtatccttagtacactctggaagtgtgtatttacatagacatttcaacacatcacttgtcttccccagggaggtcctgaactacacagctgagaacatctgtaagtgggccttagaaaaccaggagacgctctttcggtggctgcggccacacggaggcaagagtctcctgctgaataacgagctgaagaaaggaccagcgctgtttctgttcataccttttaatcccctggccgaaagtcatcctttaatagacgagatcaccgaagtggccttggagtacaacaactgtcatggggaccaggtggtggagcgtctccttcagcacctgcggcgggtggatgctccagtgctggagtccctggccctggaagtgccggcacagctgccagacccgccaacgatcacagcgtccccctgctgcaacactgtggtgctgccccagtggcactccttctccaggacccacaacgtctgtgaactctgtgtcaaccagacctccgggggcatgaagccgagctcggtcagcgtgccacagtgcagcttttttgaaatggcagcagctctggattctttctacctcaaggagcagaccttttatcatgtggcatcagacagcatagaatgcagcaattttttaacttcctatagccccttcagctactacactgcatgttgcaggaccataagcaggggtgtgtcaggcttcatcgactctgaacaaggtgtctttgaagcccctactgttgcattttcttcccttgagaagaaatgtgaggttgatgccccaagctccgttcctcacattgaggagaacaggtatctctttccagaagtggacatgactagcacaaacttcacaggcctgagctgcagaaccaacaagactctcaacatctaccttttggattcaaatttgttttggttatatgcagagagactgggtgctccgagctccactcaggtgaaagaatttgcggcaattgttgacgtgaaagaagaatctcattacatcttggatccaaagcaagcactgatgaagctcaccctagagtcttttattcaaaacttcagcgttctctatagtcccttgaaaaggcatctcattggaagtggctctgcccagttcccgtctcagcatttaatcactgaagtgacaactgataccttttgggaagtagtccttcaaaaacaggacgttctcctgctctattacgctccgtggtgcggcttctgtccatccctcaatcacatcttcatccagctagctcggaacctgcccatggacacattcactgtggcaaggattgacgtgtctcagaatgaccttccttgggaatttatggtcgatcgtcttcctactgtcttgttttttccctgcaacagaaaggacctaagtgtgaaataccccgaagacgtccccatcacccttccaaacctgttgaggttcattttgcatcactcagaccctgcttccagcccccagaatgtggctaactctcctaccaaggagtgtcttcagagcgaggcagtcttacagcgggggcacatctcccacttggagagagagatccagaaactgagagcagaaataagcagcctccagcgagcacaagtgcaggtggagtcccagctctccagtgcccgcagagatgagcaccggctgcggcagcagcagcgggccctggaagagcagcacagcctgctccacgcacacagtgagcagctgcaggccctctatgagcagaagacacgtgagctgcaggagctggcccgcaagctgcaggagctggccgatgcctcagaaaacctccttaccgagaacacgtggctcaagatcctggtggcgaccatggagaggaaactggagggcagggatggagctgaaagcctggcggcccagagagaggtccaccccaagcagcctgagccctcagccaccccccagctccctggcagctcccctccacctgccaatgtcagcgccacactggtgtctgaaaggaataaggagaacaggacagactaactttttaaatgatatgaagaaatcagaggtgaaaattgtacattgggaatatatttatgcaaattttattgaaatttattgtaaataaagattttctcagtggtctag

SEQ ID NO: 12410 - DNA, 4785 bp, Homo sapiens
acctgcttccctctcggatagccagggctgatgatttcaactcattaatcattccgaactcttcccaacaaacagcctcatggctgtcccggacctcctctgtcccggctcaggaaatgatctcggtcggaagtgaaaagaccaaatcggccccaggaggccattttcttcgacagaagctgaggcgtgggggcgtggccttcccccgcttccccctccactcccccgcccgcccccggccccggctttccgatctcggcccagggaagagccttggtcgcgaatcaccagtttgcatttgcccctggggcgggggcggctttctgagaccaggctggggctgggactccgccaccttcagctaagggtaccgaggtcagtccgggagtcgcgtcaccgggactcgaacccgcctcttcgtcttccgaggcctagtgcgagcctgcggcgctaaacgcagtcacactgtccctttaaggcggcactttttattcttcatttgtttacttcttcatgcgctcttcggtctttacaaaatgtgctcgcgatatccttccgcaagtgtcagtctcaggcactcaccacccgccttgaagccatttctataatcttaagactcgcgagttagcagccgtgggccgacgtctctctttataggatttaattcttttacattttagggactactttttaggaataaaccattcttgcgttagttaataaaggttcataaccttcggaacccctccgctgagaacaaaatacgataatagcctttataacgcaccttttcataaaaatattctgtgaggactctcataggccatcgaatcttctcgtattcctgaaacagaatggtacggtccagaacccgccccatcttctctgcgattggccgtccttcctcagcgagtcgtgtgatttttcaccaatggccgctcgcgtttctttagcgaggtctaagcgatggaaggtggcggccagggagacgccccctacgcgtcctgggattggctacgtcgcacggcgcgcgagggcggcgggcccgaaagataagaactacgactcccggcgccccgcaaagggaactccgttacgcatgcgcacgggcggggcgaaaaagcttctatataaaaggggcgcagaggactgggagacagcagttggaagttggcaggtggagaggcaggttgggagggaaagtcgggggaggacgcggaagaggagctgtgggaagggggaggagggagggaggaaaagaggaggaggcggaggagaactgagcagagcagagcatcgagccaaaggggagatgagtttgtctgtcctctgctgaggctacggccgggcctagggaactgggagcttgggtggaagcgacacccgtggaagtgggaggaggtggcgccgggactttaaccccttgtgggctctgcggcaggggatttaaccctttgtggatctggcccctcggaggcagcgtcatcggtagttttaaccccttcggggctgggtttcacgcactggacttaccctcatcaccttgctcaccaactcctttattggggtgctccgcttggaggtttgaggcccacctccgcccattacgtactgttcctgccgctgcacccccttggacccgctagctggccgcactgtgggcgcttaaccctttactgacttgagctccccagattgcagttggagtttgctgatagaaggactagctaaaggcgtcactgcaggaattacaaactgaagaggactctgttggactgttttttttttctttttcttttttttaagaaaaacccatttttttccttaaggacttactagccaaaatttcttaaacttcgaggactctactagccatggccgagccattcttgtcagaatatcaacaccagcctcaaactagcaactgtacaggtgctgctgctgtccaggaagagctgaaccctgagcgccccccaggcgcggaggagcgggtgcccgaggaggacagtaggtggcaatcgagagcgttcccccagttgggtggccgtccggggccggagggggaagggagcctggaatcccaaccacctcccttgcagacccaggcctgtccagaatctagctgcctgagagagggcgagaagggccagaatggggacgactcgtccgctggcggcgacttcccgccgccggcagaagtggaaccgacgcccgaggccgagctgctcgcccagccttgtcatgactccgaggccagtaagttgggggctcctgccgcagggggcgaagaggagtggggacagcagcagagacagctggggaagaaaaaacataggagacgcccgtccaagaagaagcggcattggaaaccgtactacaagctgacctgggaagagaagaaaaagttcgacgagaaacagagccttcgagcttcaaggatccgagccgagatgttcgccaagggccagccggtcgcgccctataacaccacgcagttcctcatggatgatcacgaccaggaggagccggatctcaaaaccggcctgtactccaagcgggccgccgccaaatccgacgacaccagcgatgacgacttcatggaagaagggggtgaggaggatgggggcagcgatgggatgggaggggacggcagcgagtttctgcagcgggacttctcggagacgtacgagcggtaccacacggagagcctgcagaacatgagcaagcaggagctcatcaaggagtacctggaactggagaagtgcctctcgcgcatggaggacgagaacaaccggctgcggctggagagcaagcggctgggtggcgacgacgcgcgtgtgcgggagctggagctggagctggaccggctgcgcgccgagaacctccagctgctgaccgagaacgaactgcaccggcagcaggagcgagcgccgctttccaagtttggagactagactgaaacttttttgggggagggggcaaaggggactttttacagtgatggaatgtaacattatatacatgtgtatataagacagtggacctttttatgacacataatcagaagagaaatccccctggctttggtttcgtaaatttagctatatgtagcttgcgtgctttctcctgttcttttaattatgtgaaactgaagagttgcttttcttgttttcctttttagaagtttttttccttaatgtgaaagtaatttgaccaagttataatgcatttttgtttttaacaaatcccctccttaaacggagctataaggtggccaaatctgagaacaattaaattcattttagttataataaatttaatatttgtaaatgtaacatagtttcagtgtgatttctagagctaattcaaaatagtattgatatattttatgtgactgcatttttggggaggggtaccgaaatcgttaaatttgtcagtttgcaaaaatatcaatctttaatgggagaattttcaatttgccaattttttccttgaatgggtttaagtatgctacaatatacagttcaggcaaaatttaagatgtaattatcttcaatacttaagtgtgcttgctttctagtgccttggttttctttcttgatgctggaaaaataaacaaaccggtattgagtgtttaggcgagtggaaagtggctacaatccaaaattttaaatttaactctgcctcggccattcaaaagtctaataacaaaaaatgtaaacctaatttggcagtttgttaggttagacaactgacagcctcatttcattcctacaagttggttttcagtaatctcttccttccccccagtaaggctggaagaggctcttggcaaacttcttagtgcaagcaatggttagattaatttgtgaggcagctctttaagacgttcagaggtaagaaatactggatttataaagcaaatggctgtttgggggattccaaggatttacctaattgtccaattctacgtgctctctataccaaaacaaaaaaaaaaagctatccacctttccatgtgggtcaaactaaaattagaaatgtcccctcactgcagatcaaatgtaaagcttccagttaaggagctaaatgaggtcctcagctgaatgaggaaccctgtacatccccttgcacagccctattctaaatcgcttaaactatgctgatagctgcttaggttcttgagtagttctgctcttaaacgtagggaggccctgagaactaaattttgccccaaaataaaaacagaaattatgagattgcctcctgtcattttggttaacccagtccttcacctgccctgtgtcagtgtcttctgagggcaattgcgttgctcaaatcactagcacagaggttccttaatttggggccttagaaaccattgtgggccttggggtccatgaaccccatgaaattatttgtagacttgtatgtacatttttctggggagaaggttcaagagattcataagattgtcaaactccttgaaggttcagaacctctgcagggaagggggaagaaaaccctcccattaggaagcatgcttttgcagttaaatggcgatggtggaggtgatagggacttcaagagtaaaatgcaccttgtattgcataagaagcatacacaaatcaataaatcaagggagattataccagtaggactgaatcagggccttcaaagctggactgagttggtcctgttctggcacatatggtccactggagacaatgtatgattgagtttttctttggtctaaaaattatattaaacatttattttgaaata

SEQ ID NO: 12411 - DNA, 5228 bp, Homo sapiens
cattgtcgcccacgctgcagtagcggcttctgcggctccaagccagcgggtcctgtgaaggcgagcagacgcggagaaaggacgcgggagtgagagagggtgagtcagccactgtctaaacgataacgggaggcggctctgcggggtagggttgaattcagtaaatgggctcgtgctgctgtctcttcggagacgctgctatcttagcgtcagcgagggaaggttgaggaggagccagagccgggtcctgcagcgtttctcgccatcagcgcccgtcgccatctccaccatgcagtcccgggaagacgccccgcgctctcgccgcctagccagtccccgtggtgggaagcggcccaagaagattcacaaacccacagtttcggcctttttcacgggtccagaggaattaaaggacacggcccattctgcagccctgctggcacagctcaagtccttctacgatgcgcggctgctgtgtgatgtgaccatcgaggtggtgacgcctggcagcgggcctggcacgggtcgcctgttcccctgcaaccgcaatgtgctggccgcggcatgtccctacttcaagagcatgttcacaggtggcatgtacgagagccagcaggccagcgtgaccatgcacgatgtggacgccgagtccttcgaggtgttggtcgactactgctacacgggtcgtgtgtctctcagtgaggccaacgtggagcgcctgtacgcggcctccgacatgctacagctggaatatgtgcgggaagcctgtgcctccttcttagcccgacgtcttgacctgaccaactgcaccgccatcctcaagtttgcagatgcctttggccatcgcaagctgcgatcccaggcccagtcctatatagctcagaacttcaagcaactcagccacatgggttcaattcgggaggagactctagcagatctgaccctggcccagctgctggctgtcctgcgcttggatagtctggacgtggagagtgagcagacagtgtgccatgtggcagtgcagtggctggaggctgctcccaaagagcggggtcccagtgctgcagaagtcttcaagtgcgtgcgctggatgcacttcactgaagaagatcaggactacttagaagggctgctgaccaagcccatcgtgaagaagtactgcctggacgttattgaaggggccctgcagatgcgctatggtgacctgttgtacaagtctctggtgccagtgccaaacagcagcagcagcagtagcagcagcaactctcttgtatctgcagcagaaaatccaccccagagactgggtatgtgtgccaaggagatggtgatcttctttggacaccccagagatccctttctctgctgtgatccatactcgggggacctttacaaagtgccgtcacctttgacctgtctggctcacactaggactgtcaccactctagctgtctgtatctctcctgaccatgacatctatctagctgctcagcccaggacagacctctgggtgtataaaccagctcagaatagttggcagcaacttgcagatcgcttgctgtgtcgtgagggcatggatgtggcatatctcaatggctatatctacattttgggggggcgagaccctattactggagttaagttgaaggaagtggaatgctacaatgttaagagaaaccagtgggcattggtggctccactgccccattcttttttatcctttgacctaatggtaattcgagactatctctatgctctcaacagtaagcgcatgttctgttatgatcctagccacaatatgtggctgaagtgcgtttctctgaagcgcaatgactttcaggaagcctgcgtcttcaatgaggagatctattgtatctgtgatatcccagtcatgaaggtctacaacccagttagggcagaatggaggcaaatgaataatattcccttggtctcagagaccaacaactacagaattatcaagcatggccaaaaattgttgctcatcacctctcgcaccccacagtggaaaaagaaccgggtgactgtgtatgaatatgatattaggggagaccaatggattaatataggtaccacattaggcctcttgcagtttgattctaactttttttgcctctctgctcgtgtttatccttcctgccttgaacctggtcagagtttcctcactgaagaagaagaaataccaagtgagtctagcactgaatgggacttaggtggattcagtgagccagactctgagtcaggaagttcaagttctctttctgatgatgatttttgggtgcgtgtagcgcctcagtgaaatgcacaggatcaacagggtttgttgtaactagattgaaacactaagttgtttttactgttttggaaaatatcttaaatatcctttttgttcctaaaggagaggaaaagttgattaacttctggtttggtttagaaaaagtaatgtttgaaatacgaaggtaatttaatgttacaaattttaacactcaaatcaaccttttaataattttctgtgctaagggtccagtatttatttgattatttagtatgtttatgtttcatgacactaatttagtcttttgatacattttacattctgtttactgccacaagcactgtggcaataacttttgaattttaatttttataatagaaaaatgattaggaattgctagatagtgttttgaaagcatatctttttcttcagaacaatgtagacttccaaaatggttaacctaaggggtctttacaaaatgtgttataagttaaacataatttgggaagttttacttttgttttcttctatgaagaaaaaaatgcaggctgggcgcggtggctcacgcctgtaatcctagcactttgggaggccgaggcaggtggatcacctgaggtcagttcaagaccagcctggccaacatggtgaaaccccgtctctactaaaaatacaaaaattagctgggcgtggtggcatgcgcctgtaatcccagctacccaggaggctgaggcaggagaattgctgaaacccgggagtcagaggctgcagagagccgagactgggccactgcactccagcctggatgacagagtgagactccgtctcaaaaaaaaaaaaaaaaaaaaaaggaaaaaaaaaaaagaaaaaaaaccatatgtgtattagggtgactgagtggtgacttcatttataataatacagagaatagctataagctcattgacagtaaaaacaacaaaccaggattctactgtttgaaaagaagtttcgttttaattttggaatttagaatgtgtatttgcaaagtcaccaattttcatctaaaaggttatattctagttgtgtcaccaaatcatcaaaaaaccttaaaaaagaagtaacttgctttgtaggtttgtattgttgatctaaacctgatacatgcttcatttaatcaggaataatccttttttttctgctggacatgtataaatttcactggattgtataaatttttatctattgccttaaacatttacatgattctcaatatgttttagctgtacagttttggtgttcatcttagaggattcttcagcagaagtgatatttctttactgttttgtgaggtaatactgattttgaaaatatatataagctaaaaacagtatttcgttgatatcagtagtcattgtgttaactataaagtcaagtgccagcaaagaactttaaaactgtaaagctgtgtatagaactgttttgtgtagcatggaaatattctgtcagctttttaaagtcactaaatgttcttgattatcagcttgaaggtatttttgtattacaagttgacagttgctgggtgtagtggctcatgcctgtaatcctagcaactcggggctgaggtgggaggattgcttcagcccaggagtttgagaccagcctgggcaacatagcaaaaccccatctctacaaaaataaaaaatatgtctgggcatggtggcccaagtctgagtcccagttacttgggaggatcacttgaatgtaggatcacttgagtctaggagttcggggctgcagctatcatctgcagctataatcatagctcactgcagctatgatcatgtctcagcactccagctttggcaacagaacgagatcccatctcttagaaaaacaaagttgatagttaaagaacataagtggatgatggcatttgaggccactagtgaaagtatgttttctctaaaatatttctctaatagtgatataaatggctattttattatgatgtttgtatgtgttttgtatttctctgtaaaccatgctccagtctttgtttttctgttaccataatgtaagagaaggtcctggaacagagactaaatcccacgaaactgacattgttaaacacactaaaacagaagtacttacctcttgaagatttaatatataatggttgacatgatacatgtacatgatgaatgaccagatgcttatggtctacattttcctttatcctgttagtattaccttccttaatctttgttcattaacatgctaattcctcttcagtgtttattttctagtgacagaatgctaacatttcttacaccctggcagaagggagagaaatgtgttttggggtgggtaactaaatttttgagtgaaatatcataagatgagaatggaaagagggagacacaaagagttataacaaaaaaacaatggtttttttagccatttgactggctctttaaatagtctacaagacattcacgtttaacatcacttttagtgaaataaaatgtgccatactagtatgtgcttcaaaagggcaaatgtgctttagtgccctaaggctaaattttggtcatttgacatcagagatgttgtaagtattgcacttaatacgcacctatttctcaatagtgttattttttggctagcattttctttaccactatcttgttgatagctttttgttctctaaggttgaaacatgacagtgcttatctcaaacagattacccatctgcagaactaaggaaagcaatttatgtatgaaagaaattcttgaattcgtcattctcaacctttgaattaaagcttagactaaatagtaatatatcgtgggaaggattttggttttgtgatatttctgtgaattaaggaatagatgttaaccattattttgtagaaaagtgatttgtatgtggttaattataaataaaactggtacc

SEQ ID NO: 12412 - DNA, 3009 bp, Homo sapiens
agttctcccgggcgcctagcgggatcgccagcgcggcagtgggggcttccgcggctgcaagccagcgggtcctgtgagggcgagcggaggcggagaaagggcgcgggagtgagagagggtgagtcagccactgtctatgcaataaagggaggcctcaccgcgggatagggctgaattcagaagtgcggcccgtgccgcagtctgttccaggacgcggcttgtcttagcgtcagcgagggaaggttgaggaggagccagagcctggtcctgcagcctttctcgccgtcagcgcccgtcgccatctccaccatgcagtcccgggaagacgtcccgcgctctcgccgcctcgccagtccccgtggtgggaggcggcccaagaggatttccaagccctcggtttcggcctttttcacgggtccagaggagttaaaggacacggcccattctgcagccctgctggcacagctcaagtccttctacgacgcgcggctgctgtgtgatgtgaccatcgaggtggtgacgcctggcagcgggcctggcacgggtcgcctcttttcctgcaatcgcaacgtgctagcagctgcgtgtccctacttcaagagcatgttcacaggtggcatgtacgagagccagcaggccagcgtgaccatgcacgatgtggacgccgagtccttcgaggtgttggtcgactactgctacacgggtcgtgtgtctctcagtgaggccaatgtgcagcgcctgtacgcggcctccgacatgctacagctggaatatgtgcgggaagcctgtgcctccttcttagcccgacgtcttgacctgaccaactgcaccgccatcctcaagtttgcagacgccttcgaccatcacaagcttcgatctcaggcccagtcctacatagctcacaacttcaagcagctcagccgaatgggttcaattcgggaggagactctagcagatctaaccctggcccagctgctggctgtcctacgcctggatagtctggacatagagagtgagcggactgtatgccatgtagctgtgcagtggctggaggctgctgccaaagagcggggtcccagtgctgcagaagtcttcaagtgcgtgcgctggatgcacttcactgaagaagatcaggactacttagaagggctgctgaccaagcccatcgtgaagaagtactgcctggacgttattgaaggggccctgcagatgcgctatggtgacctgttgtacaagtctctggtgccagtgccaaacagcagcagcagcagtagcagcagcaactctcttgtatctgcagcagaaaatccaccccagagactgggtatgtgtgccaaggagatggtgatcttctttggacatcctagagatccctttctctgctatgacccttactcgggggacatttacacaatgccatcccctttgaccagctttgctcacactaagactgtcacctcctcagctgtctgtgtgtccccagaccatgacatctatctagctgctcagcccaggaaagacctctgggtgtataaaccagctcagaatagttggcagcaacttgcagatcgcttgctgtgtcgtgagggcatggatgtggcatatctcaatggctacatctacattttggggggacgagaccctattactggagttaagttgaaggaagtggaatgctacagtgttcagagaaaccagtgggcattggtggctcctgtccctcattccttctattcctttgaactcatagtggttcagaactatctttatgctgtcaacagtaagcgcatgctttgctatgatcctagccacaatatgtggctgaactgtgcttctcttaaacgtagtgactttcaggaagcatgtgtcttcaatgatgaaatctattgtatctgtgacatcccagtcatgaaggtctacaacccagctaggggagaatggaggcggattagtaatattcctttggattcagagacccacaactaccagattgtcaatcatgaccaaaagttgcttctcatcacttctacaaccccacaatggaaaaagaaccgagtgacagtgtatgagtatgatactagggaagatcagtggattaatataggtaccatgttaggccttttgcagtttgactctggctttatttgcctttgtgctcgtgtttatccttcctgccttgaacctggtcagagttttattactgaggaagatgatgcacggagtgagtctagtactgaatgggacttagatggattcagtgagctggactctgagtcaggaagttcaagttctttttcagatgatgaagtctgggtgcaagtagcacctcagcgaaatgcacaggatcagcagggttctttgtaaatagtattttgagacactaagatgtttctactgctacggaatgtattttaaacacatatcgtttctttttcttggaaaaaaagttgattaggaccacagatttggtttagaaagggtaatattttgaaatactacaaggtttagacagtccatgaaatcgacctgtttaataatttaccatcctgaaagtccagaattaaaatatggaagcaagaactatataattgattaggatgcttggtaggtttttttcattgttcaaatattcattgcacagtggattgttttgattagttagtatgctttttttttaattaattcagtcttctgttaatttttaagttttggttagtgccacaaggaatttaactttttgatttgtataatagaaaactgaactaggaattgttagcggggttttgaaggatgtgtactttccttcaaaataaagtggtagattttcaaaattttacactagtcagttctttatattctaagttaaatgtagtttgtaaaattattttggttttcttctacaaaggaaaaaattggatttatatatataaggttactgcataatgatttcattttgataatgtgcagaatggcctcataagctcacagaaagcaaaaaaaaaaaaaaaa

SEQ ID NO: 12413 - DNA, 3322 bp, Homo sapiens
atttttactagggagcagtttccccgcgcgacagttcgggagcgcgcaggcagtcgcgcgcacacacgcacgcaggcacacacacacacacacacacacacactttcgcacacacaaacacgctaggacgctcgtcttcgctactgcatccccgaaccagcagagcgaagctactgcgggttctgttaacctcagcatcgtggggcgaagcagagccattgtgcatcaaggagaggccggtgcctgcgctgccgtctctggcacctaacccagcagaccgctcaccccatcggctggaatgcttgctgattcctctgcacacttctaaggctgagaacctgaggaacccagctggaaaatgccgtctgaacgctgcctcagtattcaagaaatgctgacaggccagaggctctgccactccgaatctcacaatgacagtgtcctggcagcgctgaatcagcagaggagtgatggcatcctctgcgacatcaccctgattgctgaggaacagaaattccatgctcacaaggcagtcctagcagcatgcagtgactatttccgggcaatgttcagtctttgtatggtggaaagtggagctgatgaggttaatttgcacggtgtgaccagccttggcttaaagcaggctctggagtttgcatacacaggacagattttgctggagccaggtgtgatccaggatgtgctagcagcgggcagtcacctacagctgttggagcttctcaatttatgctcccactatctcatccaggaattaaatagctttaattacttggatctgtacagacttgctgacctctttaacctcactttgttggagaaggcagtgatcgatttcttagtgaaacatctctctgaactcctgaagagccgcccagaagaagttctaacgcttccctattgcctgcttcaggaggtgctgaagagcgaccgcctgacctccctgagtgaagagcagatctggcagctagctgtgaggtggttggaacacaactgccactaccagtacatggacgagctcctgcaatacatccgctttggcctaatggatgtggatactctccatacagttgccctgtcccacccccttgtccaagcaagtgagactgcaacagcccttgtcaacgaggccctggaataccaccagagcatctatgcacagcctgtctggcagactcgcaggaccaaaccacgattccagtcagacactctgtatatcattggtgggaaaaagcgcgaggtctgcaaggtcaaggaacttcggtacttcaatcctgttgatcaggagaatgctctcatagctgccattgccaactggagtgagctggcttccatgcctgtgggaaggagccaccattgtgtggcagtcatgggggacttcctgtttgtggcaggaggggaagttgagcatgccagtggccggacgtgtgctgtgaggactgcctgtcgctatgacccccgcagtaattcctgggcagagatagcacccatgaaaaactgccgggagcattttgtgctgggtgccatggaggaatacctctatgcagttgggggcagaaatgaactgcgccaggttctgcctacagttgagcgatattgccccaagaagaacaaatggacttttgttcagtcctttgacagatccctttcatgccatgctggatatgtggctgatggtcttctttggatatcaggtggagtaactaatacggcacaatatcagaacaggctaatggtgtatgaacctaaccagaataagtggataagccgtagccccatgctgcagagaagggtctaccattccatggctgctgtacaaaggaagctttatgttcttggaggcaatgacctagactacaataatgaccggatccttgtgcgccatatagattcttacaacatagacactgaccagtggacacgttgtaatttcaacctgctgactggccaaaatgagtctggagttgctgtccataatgggagaatatatttagttggtggatattcaatttggacaaatgagcctctggcttgtatccaggtactggatgtaagcagagaaggcaaagaagaagtattctatgggcctacactcccttttgcttccaatggaatagcagcatgcttccttccagctccatattttacatgccctaaccttcaaactcttcaagtgcctcatcacaggattggcaccatctgaaaagccaagccatcatgaacaggaggaaaacatagctctgactgttggatactgggcatgaaaagactcagtgctccatgcttccttgtcttgctttataggtcttatattcggataaatttaagcaaaaaatgaacaattttctaaaatacgttattgaaaactcgtcacccttctcagtgtatgtcaacattcaatatgtatgacttttattgtggtatagcttagtgccaatttaaggtatattgtgttccatgggtctttagagcattctttgtacactttttctaatcagcactgtcttaagacaacacaacactgttagtaaggcaatttattggacacaatggcatcgatgatcttaaaaaaatatatattctgtacttaatccctttattatttaaagccgggcttgtaatttttctttttaaaatttaacattatgcagccctgctcagtagagactcactcagcattatgacatcataaatttttaaatgccatattttattcaaggtgatacgaataataatagacatacactggaacagcagttgttgaaatacccagatttttcaccttggttactctgaccttgggtcagaacctaactttacagtgcttcagttttcccaccttttaaggaggataattactgatttccacgttaatttaaaagaacattatgaggattaggcgaacactttgtaatactttgcccaagaaaaagaaaaatgttgttactgaaattataaggtattttattgtctttagaaccttgtaattgaacagggagattatttttgaagtttaaaaattactagatagaatttggaaacatgttgtggaataaatgattctaaaaagcatgtgaaagagacacacaatgaggaaatagggagtttctcaaaatctaaacttgtacaggtatctaaacttgcctcaagtaactctcagatgtcttatttaaaatcatttagtgaaaaatgacatttaaagctaaaaaataatttagttgtactaattatggtaccataaagtgctttgacataaatttgaacctagaattggcagttctaataaaagtttttccactttgtt

SEQ ID NO: 12414 - DNA, 2443 bp, Homo sapiens
cccccccccgccgctgccgcctctgcctgggtcccttcggccgtacctctgcgtgggggctgcctccccggctcccggtgcagacaccatgtacggatttgtgaatcacgccctggagttgctggtgatccgcaattacggccccgaggtgtgggaagacatcaaaaaagaggcacagttagatgaagaaggacagtttcttgtcagaataatatatgatgactccaaaacttatgatttggttgctgctgcaagcaaagtcctcaatctcaatgctggagaaatcctccaaatgtttgggaagatgtttttcgtcttttgccaagaatctggttatgatacaatcttgcgtgtcctgggctctaatgtcagagaatttctacagaaccttgatgctctgcacgaccaccttgctaccatctacccaggaatgcgtgcaccttcctttaggtgcactgatgcagaaaagggcaaaggactcattttgcactactactcagagagagaaggacttcaggatattgtcattggaatcatcaaaacagtggcacaacaaatccatggcactgaaatagacatgaaggttattcagcaaagaaatgaagaatgtgatcatactcaatttttaattgaagaaaaagagtcaaaagaagaggatttttatgaagatcttgacagatttgaagaaaatggtacccaggaatcacgcatcagcccatatacattctgcaaagcttttccttttcatataatatttgaccgggacctagtggtcactcagtgtggcaatgctatatacagagttctcccccagctccagcctgggaattgcagccttctgtctgtcttctcgctggttcgtcctcatattgatattagtttccatgggatcctttctcacatcaatactgtttttgtattgagaagcaaggaaggattgttggatgtggagaaattagaatgtgaggatgaactgactgggactgagatcagctgcttacgtctcaagggtcaaatgatctacttacctgaagcagatagcatactttttctatgttcaccaagtgtcatgaacctggacgatttgacaaggagagggctgtatctaagtgacatccctctgcatgatgccacgcgcgatcttgttcttttgggagaacaatttagagaggaatacaaactcacccaagaactggaaatcctcactgacaggctacagctcacgttaagagccctggaagatgaaaagaaaaagacagacacattgctgtattctgtccttcctccgtctgttgccaatgagctgcggcacaagcgtccagtgcctgccaaaagatatgacaatgtgaccatcctctttagtggcattgtgggcttcaatgctttctgtagcaagcatgcatctggagaaggagccatgaagatcgtcaacctcctcaacgacctctacaccagatttgacacactgactgattcccggaaaaacccatttgtttataaggtggagactgttggtgacaagtatatgacagtgagtggtttaccagagccatgcattcaccatgcacgatccatctgccacctggccttggacatgatggaaattgctggccaggttcaagtagatggtgaatctgttcagataacaatagggatacacactggagaggtagttacaggtgtcataggacagcggatgcctcgatactgtctttttgggaatactgtcaacctcacaagccgaacagaaaccacaggagaaaagggaaaaataaatgtgtctgaatatacatacagatgtcttatgtctccagaaaattcagatccacaattccacttggagcacagaggcccagtgtccatgaagggcaaaaaagaaccaatgcaagtttggtttctatccagaaaaaatacaggaacagaggaaacaaagcaggatgatgactgaatcttggattatggggtgaagaggagtacagactaggttccagttttctcctaacacgtgccaagcccaggagcagttcttccctatggatacagattttcttttgtccttgtccattaccccaagactttcttctagatatatctctcactatccgttattcaaccttagctctgctttctattactttttaggctttagtatattatctaaagtttggcttttgatgtggatgatgtgagcttcatgtgtcttaaaatctactacaagcattacctaacatggtgatctgcaagtagtaggcacccaataaatatttgttgaatttagttaaatgaaactgaacagtgtttggccatgtgtatatttatatcatgtttaccaaatctgtttagtgttccacatatatgtatatgtatattttaatgactataatgtaataaagtttatatcatgttggtgtatatcattatagaaatcattttctaaaggagt

SEQ ID NO: 12415 - DNA, 8565 bp, Homo sapiens
gggaagggatgtgtgtcggtgtgtgtggagagggtgctccttcgctcctgctttcccggctcggtggggtcccttcgcggccacccggggagacgtcttagacagtcgtggttcctgtgatctgtgtcctctttgcagaagttctgtgtccatctcatgtgctgcgtgtgtctgtaaagcctcattccgtgctgtctggcaggaagctccatctcatctcatcatctcacggccctggcactgcctcagcatggccatctcatcacgcctcgccctgtgggagcagaagattcgggaagaggacaagagccctccaccatcctcgccccctcctcttttctctgtcatcccagggggcttcattaagcaactggtccgggggactgaaaaagaggccaaggaagcgagacagaggaagcagttagctgtcgcctctccagaacgagagatcccagaaatttccatcagccaacccaacagcaagtccagcagtggcaccagatctggaagccagcagatctctcaggacgaccagtcaagctctcctgggagctcagacattctgggcaaggagagcgaggggtcccgcagccccgaccctgagcagatgacaagcatcaatggtgagaaggcccaggagctgggctccagtgcgacaccaaccaaaaagactgtccccttcaagaggggcgtgaggaggggtgatgtgttgttgatggtggccaagctggacccggactcagccaagccagagaagactcatccccatgacgcccccccttgcaagacctctccccccgccacagatactggaaaggaaaagaaaggggagacctctaggactccttgtggctcccaggccagcaccgagatcttggccccgaaagctgagaagacccggactgggggtcttggggacccaggccaaggaactgtggcactgaaaaaaggcgaggagggtcaaagcatagtggggaaggggcttgggacccccaagaccacagagctgaaagaggctgagccccagggcaaagacaggcaggggaccaggccccaagcccaagggcccggcgagggggtgcgaccagggaaagcagagaaggagggagcagagcccacaaacacggtggaaaaggggaatgtctctaaggacgtagggagtgaagggaagcacgtaaggccccaaatccctgggagaaagtggggaggtttcctgggaagaaggagtaagtgggacggtccccagaataagaaggacaaagaaggggtgctcttaagtaaggcagagaagacaggtgagcctcagacccagatggagaagacaagccaagtgcagggcgagttgggggacgatctgagaatgggggagaaagcaggtgagcttcggagcacgactgggaaggcaggtgagtcctgggataagaaggaaaagatggggcaaccccagggtaagtccgggaacgcaggtgaagctcggagtcagacagagaagggctgtgaagccccaaaggaggtgagcacaatggtggagtcgccagcagctcctgggaagggaggctggccaggaagccgtgggcaggaagcagaggagccctgctcaagagcaggtgatggggctggtgccctggagacagagctggaaggacccagccagcctgctctggagaaggatgcagaaaggcctcggatacggaaggagaaccaagacgggccagccccgcaggaggagggcaaaggaggccagagcagagactcagaccaggctcctgaggacagatggtatgaggcagagaaagtctggctggctcagaaggatggatttactcttgctacggtgctaaagccagatgagggaacagcagacctgccagcaggaagggtgagactttggattgatgctgacaaaaccatcactgaggtggatgaggagcatgtccatcgggccaaccctcctgagctggaccaggtcgaggacctggcctctctcatcagtgtcaacgaatccagtgtcctgaacacgcttctgcagcgctacaaagctcagctgctgcacacctgcacagggcctgatctgattgtcctccagccccgggggccctcggtgccttctgcagggaaggtgcccaagggccgccgggatggcctgcctgcccacattggctccatggcacagcgggcatactgggcgctgctgaaccagcggagagaccagagcattgtggccctgggctggagtggcgctgggaagaccacctgctgtgagcaggtcctggaacacctggtggggatggcaggcagtgtggatggcagggtctcagtggagaagatccgagccaccttcactgtcctccgggccttcggctctgtgtccatggcccacagccgcagtgccacccggttctccatggtgatgtcgctggacttcaacgctacaggccgcatcacagctgctcagctccagacaatgcttttggagaagagccgcgtggcacggcagccggaaggggaaagtaacttcctggttttctcccagatgctggctggattggacttggatctcaggacggagctgaacctgcaccagatggcagatagcagctcctttggcatgggcgtgtggtccaagcctgaagataaacagaaggcggcagctgcctttgcccagctccagggtgccatggagatgctcggcatctcagagagcgagcagcgggctgtttggcgggtcctggcagccatctaccacctgggtgcggcgggggcctgcaaagtgggtcggaagcagttcatgaggtttgagtgggcaaactacgcagctgaggccctgggctgcgagtatgaggagctgaacacggccaccttcaagcaccaccttcgacagatcatccagcaaatgacgtttgggccaagccgatggggcctcgaggatgaggaaaccagctcagggctcaagatgacaggagtggactgtgtggaggggatggcctcgggcctgtaccaggaactctttgcggctgtggtctcactcatcaacagatccttttcctcccaccatctctccatggcctccatcatggtggtggactctccaggcttccagaacccccggcaccagggcaaggaccgggcggccacctttgaggagctgtgccacaactacgcccatgagcgcctgcagctgctgttctaccagcggacctttgtctccacgctacagcgatatcaagaggaaggtgttcctgtgcagtttgacctcccggacccctccccagggaccaccgtggctgttgtggatcaaaatccctctcaggtccgcttaccagctggaggaggtgcccaggatgccagaggccttttctgggtcttagatgaggaagtccatgtagagggctccagtgacagtgtggtgctcgagcgtctgtgtgctgctttcgagaagaaaggagctgggactgaagggtcctctgccctgcggacctgtgagcagcccctccagtgtgagattttccaccagttgggatgggaccctgtgcggtacgacctcacgggctggctccacagagccaagcccaacctctcggccctggatgcaccccaggtcctgcaccagtcaaaaagagaggagctgcggagtctattccaggcccgggccaagctgcctcctgtgtgccgggctgtggcaggcctggagggcacctcccagcaggccctgcagaggagccgcatggtgaggaggacctttgccagcagccttgccgcggtgaggaggaaagccccgtgctcccagatcaagctgcagatggatgcgctgaccagcatgatcaaaaggtcccggctgcactttatccactgcctggtaccaaaccctgtggtggaaagcaggagtgggcaggaatctccaccaccaccgcagcctggtagagacaagcctggggcaggtggacctctggccctggatatcccagcactgagggtccagcttgctgggttccacatcctggaggctctgcgtctgcataggacaggctatgctgaccacatggggctcactcgcttccgccggcaattccaggtgctggacgctccactcctgaagaagctcatgtcgacctccgagggaatagatgaaaggaaggccgtggaggagctcctggagaccctggatctggaaaagaaggcggtggctgtggggcacagccaagtttttctcaaggcaggtgtgatctccaggcttgagaagcagcgagagaagctggtatctcagagcatcgttctcttccaggcggcttgcaagggctttctgtctcgccaggaattcaagaagctgaagattcgccgactggctgcacagtgcatccagaagaatgtggctgtgttcctcgcagtcaaggactggccatggtggcagctgcttggttccctccagcctctacttagtgccaccattggaactgagcagctccgagccaaggaggaggagcttacaacgctaagacggaagctagaaaaatcagagaagttgcggaatgaactccggcagaacacagatctgctagaaagcaagattgctgacttgacctctgaccttgccgatgagcgcttcaaaggtgatgtggcctgccaggtgctggagagtgagcgggcagagcggctacaggccttccgggaggtccaggagctcaagagcaagcatgaacaagtccagaaaaaactgggagatgtgaataaacagttggaagaagcccagcagaaaattcagttgaatgacttggaaaggaatcccactggaggagcagacgagtggcagatgcgcttcgactgtgctcagatggagaacgagttcctcagaaagcgtctgcagcaatgcgaggagaggctggactcggagctgacagccaggaaagagctggagcaaaagcttggggagttgcaaagtgcttatgacggggccaagaagatggctcaccaactgaagaggaagtgccaccatcttacctgtgaccttgaggatacctgcgtcctgctagagaaccaacaaagtcgaaaccatgagctggagaagaagcagaagaagtttgacctgcagctggcccaggccctaggtgagtcagtgtttgagaagggtctccgtgagaaagtgacccaggagaacaccagtgtccggtgggagctaggccagcttcagcagcagctgaagcaaaaggagcaggaagcctcacagctgaagcagcaggtggagatgctacaggaccataaacgggagctgctggggtcaccctctctgggggaaaattgcgttgctggcttgaaggagaggctctggaagttggaatccagcgcccttgagcaacagaaaatccagagccagcaggaaaacaccatcaagcagctggagcagctccgccagcggtttgagctggagatcgagcggatgaagcagatgcaccagaaggaccgtgaggaccaggaggaggaactggaggatgtccgtcagtcctgccagaagcggcttcatcagctggaaatgcagctggagcaagagtatgaagagaagcagatggtcctccatgagaagcaagatttggaaggcttgatcggaaccctctgtgaccagattggccatcgggactttgatgtggagaagcgacttcggagagacctcaggaggacacatgcactgttgtcagacgtgcagctccttctgggcaccatggaggatggcaagacatcagtcagcaaggaggagctggagaaagtgcacagccagctggagcagagtgaagccaagtgtgaggaggccttgaagacgcagaaggtgctcacagcggacctggagagcatgcacagcgagctggagaacatgacgcggaacaagagcctggtggatgagcagctgtacaggctgcagtttgagaaggcggacctcctgaagcgcatcgatgaggaccaggatgacctgaatgagctgatgcagaagcacaaggacctcattgctcagtctgctgctgacattgggcagatccaagaactgcagctgcagctggaggaagccaagaaggagaagcacaagctacaagaacaactgcaggtggctcagatgcgcatcgagtacctggaacagtccaccgtggatcgagccatcgtcagcaggcaggaggcggtcatctgtgacctagagaacaagacagagttccagaaggtgcagattaagagatttgaggtcctggtgatccggcttcgggacagcctgatcaagatgggggaggagctttcacaggcggccacctccgagtcccagcagcgggagagcagccagtactaccagcggcgcctggaagagctgaaggccgacatggaagagctggtgcagcgggaggcagaggccagccggcggtgcatggagctggagaagtacgtggaggaacttgcagcagtgaggcaaaccctccagacagacctggagacatccattcggcggattgccgacctgcaggctgccttggaagaagtggcatccagtgacagtgatactgagagtgtccagacggcagtggattgtggcagcagcggccgaaaagagatggataacgtctccatcctcagctcccagccagagggcagcctgcagtcctggttgagctgtactctgtccctggccacagatactatgaggactccttctcgacagtcagccaccagcagccgcatcctcagccccaggataaacgaagaggctggggacactgagaggacccagtcggcattggcactgagcagagcccggtccaccaatgtccacagcaagacctcaggagacaagcctgtttctccccactttgtccgccggcaaaagtactgtcattttggggacggcgaagtgcttgccgtccagagaaagtccacagagagattagaacctgcttcctctcccctggcttctcggagtacaaatacatccccgctgtcgagggaaaagctgcccagtccttcagcggccctctcggagttcgtggaagggctccggaggaagagagcccagagaggccaggggtccacgctgggcctagaggactggcccactctccccatttaccagacgactggggcctccacactaaggaggggcagggctggcagtgacgagggaaacctctcgctgagggttggggcaaagtcacccctggaaatcgaaggggccgctggtggtctcttgaggtccaccagcctcaaatgcatctcttcagacggtgttgggggcacaaccctactccccgaaaagtcgaaaacccaattcagttcctgcgagtccctcttagaatccagaccgagcatggggagaaaactgagctctccgaccacacccagggacatgctgttgtcgcccacactgcgtcctcggaggcggtgtctggagtcctctgtggacgatgcgggctgtccagaccttggaaaggagccgcttgttttccagaaccgccagtttgcccacctgatggaggaacctctaggcagtgacccattcagctggaaactcccaagcctcgactacgaacgcaagaccaaagtggacttcgatgacttcctcccagctatccggaagccccagacacctacctccttggctggatcagccaaaggtgggcaagacggttcacagcgttcaagcatccactttgaaacggaagaggctaaccgttcctttctctcggggatcaagaccattttgaagaagagcccggagcccaaggaggatcccgctcacctgtctgactcgtcctcatcctccggctccatcgtgtccttcaaaagtgctgacagcatcaaaagtcgaccaggaatcccacgacttgcgggtgacggtggcgagcgaacgtcccccgagcggagagagccagggacggggaggaaagacgacgatgttgcgagcataatgaagaaatacctccagaagtaggaaccagttcagcctccttgaagctgcccttgaagacttcccgactctacaataacttggagacagagagactggccaggcctccccggtggccagagccagccagcatggccaccctcaagaggcgagatgagcccacagaggcatatcctgcggggatgctgggctcccagtgtggttggcctgaacaaaataaagtgttgactcctgggcatctgtgccttctctatggccttgctacctgggattccagagagttgatggggtgcagataggggtaggactgttagaatagaaccaacccaaactgtgtgtagtttggggtgtatacttctatttctcttcctacatgtctacatgccatgaccttcctcctcctcttcacttggccagtttcagctcacttcctccaggaagtctttcctgatatatcaaactgaaacaaatgctcctcctccatgctcccttaatccccatgcttgtcgattatattcctttgccaattcatttctctatcctgtgtatgtataagtgtgtacaagcattcaagaaactgatgaatgatgaatgaatgaatgagccaaagaacaaataaatgagcccacacaccc

SEQ ID NO: 12416 - DNA, 4562 bp, Homo sapiens
ggtgctgcggcccgcgccgccatcttggattttactctccatttttctctggaattatttttggtgattaattttctgggggggactgggacgcggggcccggcggcgcggccccgcatcgcagcggccgggcagcggggcctgggacgcgccccgaggaggagcggggcggcgcaggcggagagaacattgaaagtattctctaagctatttgaagagagtgactaaatgcacctgggtcaggctgtctgtgggtatgaagtggttgggagaatccaagaacatggtggtgaatggcaggagaaatggaggcaagttgtctaatgaccatcagcagaatcaatcaaaattacagcacacggggaaggacaccctgaaggctggcaaaaatgcagtcgagaggaggtcgaacagatgtaatggtaactcgggatttgaaggacagagtcgctatgtaccatcctctggaatgtccgccaaggaactctgtgaaaatgatgacctagcaaccagtttggttcttgatccctatttaggttttcaaacacacaaaatgaatactagcgcctttccttcgaggagctcaaggcatttttcaaaatctgacagtttttctcacaacaaccctgtgagatttaggcctattaaaggaaggcaggaagaactaaaggaagtaattgaacgttttaagaaagatgaacacttggagaaagccttcaaatgtttgacttcaggcgaatgggcacggcactattttctcaacaagaataaaatgcaggagaaattattcaaagaacatgtatttatttatttgcgaatgtttgcaactgacagtggatttgaaatattgccatgtaatagatactcatcagaacaaaatggagccaaaatagttgcaacaaaagagtggaaacgaaatgacaaaatagaattactggtgggttgtattgccgaactttcagaaattgaggagaacatgctacttagacatggagaaaacgacttcagtgtcatgtactccacaaggaaaaactgtgctcaactctggctgggtcctgctgcgtttataaaccatgattgcagacctaattgtaagtttgtgtcaactggtcgagatacagcatgtgtgaaggctctaagagacattgaacctggagaagaaatttcttgttattatggagatgggttctttggagaaaataatgagttctgcgagtgttacacttgcgaaagacggggcactggtgcttttaaatccagagtgggactgcctgcgcctgctcctgttatcaatagcaaatatggactcagagaaacagataaacgtttaaataggcttaaaaagttaggtgacagcagcaaaaattcagacagtcaatctgtcagctctaacactgatgcagataccactcaggaaaaaaacaatgcaacttctaaccgaaaatcttcagttggcgtaaaaaagaatagcaagagcagaacgttaacgaggcaatctatgtcaagaattccagcttcttccaactctacctcatctaagctaactcatataaataattccagggtaccaaagaaactgaagaagcctgcaaagcctttactttcaaagataaaattgagaaatcattgcaagcggctggagcaaaagaatgcttcaagaaaactcgaaatgggaaacttagtactgaaagagcctaaagtagttctgtataaaaatttgcccattaaaaaagataaggagccagagggaccagcccaagccgcagttgccagcgggtgcttgactagacacgcggcgagagaacacagacagaatcctgtgagaggtgctcattcgcagggggagagctcgccctgcacctacataactcggcggtcagtgaggacaagaacaaatctgaaggaggcctctgacatcaagcttgaaccaaatacgttgaatggctataaaagcagtgtgacggaaccttgccccgacagtggtgaacagctgcagccagctcctgtgctgcaggaggaagaactggctcatgagactgcacaaaaaggggaggcaaagtgtcataagagtgacacaggcatgtccaaaaagaagtcacgacaaggaaaacttgtgaaacagtttgcaaaaatagaggaatctactccagtgcacgattctcctggaaaagacgacgcggtaccagatttgatgggtccccattctgaccagggtgagcacagtggcactgtgggcgtgcctgtgagctacacagactgtgctccttcacccgtcggttgttcagttgtgacatcagatagcttcaaaacaaaagacagctttagaactgcaaaaagtaaaaagaagaggcgaatcacaaggtatgatgcacagttaatcctagaaaataactctgggattcccaaattgactcttcgtaggcgtcatgatagcagcagcaaaacaaatgaccaagagaatgatggaatgaactcttccaaaataagcatcaagttaagcaaagaccatgacaacgataacaatctctatgtagcaaagcttaataatggatttaactcaggatcaggcagtagttctacaaaattaaaaatccagctaaaacgagatgaggaaaatagggggtcttatacagaggggcttcatgaaaatggggtgtgctgcagtgatcctctttctctcttggagtctcgaatggaggtggatgactatagtcagtatgaggaagaaagtacagatgattcctcctcttctgagggcgatgaagaggaggatgactatgatgatgactttgaagacgattttattcctcttcctccagctaagcgcttgaggttaatagttggaaaagactctatagatattgacatttcttcaaggagaagagaagatcagtctttaaggcttaatgcctaagctcttggtcttaacttgacctgggataactactttaaagaaataaaaaattccagtcaattattcctcaactgaaagtttagtggcagcacttctattgtcccttcacttatcagcatactattgtagaaagtgtacagcatactgactcaattcttaagtctgatttgtgcaaatttttatcgtactttttaaatagccttcttacgtgcaattctgagttagaggtaaagccctgttgtaaaataaaggctcaagcaaaattgtacagtgatagcaactttccacacaggacgttgaaaacagtaatgtggctacacagtttttttaactgtaagagcatcagctggctctttaatatatgactaaacaataatttaaaacaaatcatagtagcagcatattaagggtttctagtatgctaatatcaccagcaatgatctttggctttttgatttatttgctagatgtttcccccttggagttttgtcagtttcacactgtttgctggcccaggtgtactgtttgtggcctttgttaatatcgcaaaccattggttgggagtcagattggtttcttaaaaaaaaaaaaaaaatgacatacgtgacagctcacttttcagttcattatatgtacgagggtagcagtgtgtgggatgaggttcgatacagcgtatttattgcttgtcatgtaaattaaaaaccttgtatttaactcttttcaatccttttagataaaattgttctttgcaagaatgattggtgcttattttttcaaaaatttgctgtgaacaacgtgatgacaacaagcaacatttatctaatgaactacagctatcttaatttggttcttcaagttttctgttgcacttgtaaaatgctacaaggaatattaaaaaaatctattcactttaacttataatagtttatgaaataaaaacatgagtcacagcttttgttctgtggtaacctataaaaaaagtttgtctttgagattcaatgtaaagaactgaaaacaatgtatatgttgtaaatatttgtgtgttgtgagaaatttttgtcataagaaattaaaagaacttaccaggaaggtttttaagtttagaaatattcatgccaataaaataggaaattataaatatatagttttaagcactgcatcagtgggagttcttggcttatgttagtttatgttagtttattatgaaaacatcaaagatttttttgactatattatcagttaaacaaaaaggagtcagatttaatttgttttttgaagcactttgagaaattaattttaattaacttaatgagcaaatttttattactactttatgttcaataccaggttcttttcatttctctggattattttgcaaatcattggacagagaatttgggaatataaatctgtaacaggtgtttgacaccagtaggtctctttatttctgggaaatgtgtacctgtactttctgatatacagtgttcctaagtaaaaatcaattcaggggatttgtatagtgtctataggaaagtagcccatgtcttgaaatatgaaaaggaatctgaaggtcatgaaaagtccagtggagaaaatctcaatgcttactgttactactaattgattcctactagtttccaggtttggg

SEQ ID NO: 12417 - DNA, 9644 bp, Homo sapiens
tagaagcattttctttggcagcaagaagataattttatagaagccatgcctgttcttggggttgcctcaaaactgaggcagccagctgttgggtcaaagcctgtgcatactgctcttccgataccaaatcttggcactactgggtcacagcactgttcttcaagacctttggaacttgctgaaacagagagctccatgctttcttgtcagcttgcgttaaaatcaacctgtgaatttggagagaagaaacccctccaaggaaaagccaaggagaaagaagacagcaagatttacactgactgggccaaccactacctagcaaaatcaggccacaagcggctgatcaaggacttgcaacaagacattgcagatggagtactcctagcagaaatcatccagattattgcaaatgaaaaagttgaagatatcaatggatgtcctagaagtcagtctcagatgattgaaaatgttgatgtctgccttagttttctagcagccagaggggtaaatgttcaaggtctatctgctgaagaaataagaaatggaaacttaaaagccattctagggctgtttttcagtttatctcgctacaagcagcaacaacaccatcaacaacagtactatcagtccttggtggaacttcagcagcgagttactcacgcttcccctccatcggaagccagccaggccaaaacccagcaagatatgcagtccagtctggcagccagatatgcaactcagtctaatcacagtggaattgcaaccagtcaaaaaaagcctactaggcttccagggccctctagggtgcctgctgcaggaagcagcagcaaggtccagggagcctctaatttaaataggagaagtcagagctttaacagcattgacaaaaacaagcctccaaattatgcaaatggaaacgaaaaagattcctccaaaggacctcaatcgtcttcaggtgtaaatggtaacgtgcagcctcccagtactgctgggcagcctcctgcctctgccatcccttctccaagtgccagcaagccctggcgcagcaagtccatgaatgtcaaacacagtgccacctccaccatgttgactgtaaagcagtcaagtacagccacctcccccacaccatcttcagacagactgaagccacctgtctcagaaggggtcaaaactgctccctcaggacagaaatccatgcttgagaaattcaagctagtcaatgcccggactgctttacgccccccgcagcctcccagttcaggacctagtgatggtgggaaggatgatgatgccttttctgaatctggtgaaatggaaggttttaacagtggtctgaatagtggtggctcaacaaatagcagtcccaaagtgtcacctaagttggcccctccaaaagctggaagcaaaaatctcagcaataaaaagtctttgctacagccaaaggaaaaagaagaaaagaacagggacaaaaataaagtttgcactgaaaaaccagtcaaagaagagaaggatcaggtgacagagatggctccaaaaaagacctccaaaattgcaagcttgatccctaagggcagcaagacaacagcagctaagaaggaaagcttaattccgtcttccagtggtattccaaaaccaggctctaaagttccaacagtaaagcaaaccatttcacctggcagcacagcaagcaaagagtctgagaaattcaggactaccaaggggagcccttcccagtccttatctaagcctataaccatggagaaagcaagtgcttctagttgtcctgcccctttggaaggaagggaagctggccaagcttctccttctggttcctgtaccatgacagtggcacaaagcagtgggcagagcacaggaaatggtgctgtccaactccctcaacagcagcaacatagccacccgaataccgcgacagtggcaccattcatttacagggcacattcagaaaatgaaggtaccgctttaccatcggctgactcctgtaccagtcctacaaagatggacttatcatatagtaagactgctaagcagtgcctggaggagatatctggtgaagaccctgaaacaagaagaatgagaacagttaaaaacatagcagacttgaggcagaatttagaagagactatgtccagtcttcgtgggactcagataagccacagcaccctggagacaacatttgacagcactgtgacaacagaagttaatggaaggaccatacccaacttgacaagtcgacccacccccatgacctggaggttgggccaggcatgtccgcgacttcaggcgggagatgctccctccctgggtgctggctatcctcgcagtggtaccagtcgattcatccacacagacccctcgaggttcatgtataccacgcctctccgtcgagctgctgtctctaggctgggaaacatgtcacagattgacatgagtgagaaagcaagcagtgacctggacatgtcttctgaggtcgatgtgggtggatatatgagtgatggtgatatccttgggaaaagtctcaggactgatgacatcaacagtgggtacatgacagatggaggacttaacctatatactagaagtctgaaccgaataccagacacagcaacttcccgggacatcatccagagaggggttcacgatgtgacagtggatgcagacagctgggatgacagcagttcagtgagcagtggtctcagtgacacccttgataacatcagcactgatgacctgaacaccacatcctctgtcagctcttactccaacatcaccgtcccctctaggaagaatactcagctgaggacagattcagagaaacgctccaccacagacgagacctgggatagtcctgaggaactgaaaaaaccagaagaagattttgacagccatggggatgctggtggcaagtggaagactgtgtcctctggacttcctgaagaccccgagaaggcagggcagaaagcttccctgtctgtttcacagacaggttcctggagaagaggcatgtctgcccaaggaggggcgccatctaggcagaaagctggaacaagtgcactcaaaacacccgggaaaaccgatgatgccaaagcttctgagaaaggaaaagctcccctaaaaggatcatctctacaaagatctccttcagatgcaggaaaaagcagtggagatgaagggaaaaagcccccctcaggcattggaagatcgactgccaccagctcctttggctttaagaaaccaagtggagtagggtcatctgccatgatcaccagcagtggagcaaccataacaagtggctctgcaacactgggtaaaattccaaaatctgctgccattggcgggaagtcaaatgcagggagaaaaaccagtttggacggttcacagaatcaggatgatgttgtgctgcatgttagctcaaagactaccctacaatatcgcagcttgccccgcccttcaaaatccagcaccagtggcattcctggccgaggaggccacagatccagtaccagcagtattgattccaacgtcagcagcaagtctgctggggccaccacctcgaaactgagagaaccaactaaaattgggtcagggcgctcgagtcctgtcaccgtcaaccaaacagacaaggaaaaggaaaaagtagcagtctcagattcagaaagtgtttctttgtcaggttcccccaaatccagccccacctctgccagcgcctgtggtgcacaaggtctcaggcagccaggatccaagtatccagatattgcctcacccacatttcgaaggttgtttggtgccaaggcaggtggcaaatctgcctctgcacctaatactgagggtgtgaaatcttcctcagtaatgcccagccctagtaccacattagcgcggcaaggcagtctggagtcaccgtcgtccggtacgggcagcatgggcagtgctggtgggctaagcggcagcagcagccctctcttcaataaaccctcagacttaactacagatgttataagcttaagtcactcgttggcctccagcccagcatcggttcactctttcacatcaggtggtctcgtgtgggctgccaatatgagcagttcctctgcaggcagcaaggatactccgagctaccagtccatgactagcctccacacgagctctgagtccattgacctccccctcagccatcatggctccttgtctggactgaccacaggcactcacgaggtccagagcctgctcatgagaacgggtagtgtgagatctactctctcagaaagcatgcagcttgacagaaatacactacccaaaaagggactaagatataccccatcatctcggcaggccaaccaagaagagggcaaagagtggttgcgttctcattctactggagggcttcaggacactggcaaccagtcacctctggtttccccttctgccatgtcatcttctgcagctggaaaataccacttttctaacttggtgagcccaacaaatttgtctcagtttaaccttcccgggcccagcatgatgcgctcaaacagcatcccagcccaagactcttccttcgatctctatgatgactcccagctttgtgggagtgccacttctctggaggaaagacctcgtgccatcagtcattcgggctcattcagagacagcatggaagaagttcatggctcttcattatcactggtgtccagcacttcttctctttactctacagctgaagaaaaggctcattcagagcaaatccataaactgcggagagagctggttgcatcacaagaaaaagttgctaccctcacatctcagctttcagcaaatgctcaccttgtagcagcttttgaaaagagcttagggaatatgactggccgattgcaaagtctaactatgacagcggaacaaaaggaatctgaacttatagaactaagagaaaccattgaaatgctgaaggctcagaattctgctgcccaggcggctattcagggagcactgaatggtccagaccatcctcccaaagatcttcgcatcagaagacagcattcctctgaaagtgtttctagtatcaacagtgccacaagccattccagtattggcagtggtaatgatgccgactccaagaagaagaaaaagaaaaactgggtgaactctagaggaagtgagctgagaagttctttcaaacaagcctttgggaagaaaaagtccaccaagcctccttcatcacattctgacattgaagagcttactgattcatcccttccggcatcccccaagttaccccataatgctggtgactgtggctcagcatccatgaagccctcacaatctgcttcagcgatctgtgaatgcacagaagctgaggcagagataattctgcagctgaagagcgagctcagagaaaaggaattaaaattaacggatattcggctggaggccctcagctctgctcatcatcttgatcagatccgggaagccatgaaccggatgcagaatgaaattgaaatactgaaagctgaaaatgaccggttgaaggcagaaactggtaacacagctaagcctactcggccaccgtcagaatcctcaagcagcacctcctcttcatcttccaggcagtcattaggactttctctaaacaatttgaacatcacagaggctgttagctcagatattttgctagatgatgctggtgatgcaactggacataaagatggccgcagtgtgaaaattatagtctccataagcaagggctatggtcgagcaaaggaccaaaaatctcaggcatatttgataggatccattggtgttagtggaaaaaccaagtgggatgtcttagatggtgtaataagacgtctctttaaggaatatgtattccgaattgatacatccactagccttggtctgagctctgactgcattgctagctactgtataggagacttaattagatcccataacctagaagtgcctgaattgctgccttgtggataccttgttggagataataacatcatcactgtgaacctcaaaggggtagaagaaaatagtttggacagttttgtttttgatacgctgattcctaaaccaattacccaaaggtactttaacttgttgatggagcatcacagaattatactctcaggaccgagtggtactggaaagacctatttggcaaacaaacttgctgaatatgtaataaccaaatctggaaggaaaaaaacagaggatgcaattgccacttttaatgtggaccacaagtcaagtaaggaattgcaacaatatctagctaacctggctgaacagtgcagtgctgataataatggagtggagctcccagttgtaataattcttgataatcttcatcatgtgggctctctgagtgatatcttcaatggttttctcaattgtaaatacaacaaatgtccatatattattggaacaatgaatcagggagtttcttcatcaccaaatctagagctgcatcacaatttcaggtgggtattatgtgcaaatcatacagaaccagtgaaaggctttttaggcagatatcttcgaagaaaactcatagagatagaaattgaaaggaacattcgcaataatgacctagtcaaaattatagattggattccgaagacgtggcatcatctcaacagttttttggaaacacacagttcttctgacgttaccattggtccccgactattccttccttgccccatggatgtagaaggttctagagtatggttcatggatctctggaactattctttagtaccttatattctggaggcagtgagagagggtcttcagatgtatgggaaacgcacaccatgggaagatccttcaaagtgggtgcttgacacatatccatggagctcagcaactctgcctcaggagagcccagccttacttcagctgcgaccagaagatgttgggtatgaaagctgcacatccactaaggaagccacaacctcaaagcacattccgcaaactgacacagaaggagatcccctgatgaatatgctaatgaaactccaagaagcagccaattactcgagcacacaaagctgcgacagcgaaagcaccagccaccatgaagacattttggattcatctcttgaatctaccctctagagggtgaaaaaagttaagggaaaagactttgcttttaaaaaaatgtttcaaaagaaaggtattttcactaaaccactgccagtataaaagcaccctgtcaagggccctgacccagagttgtggtctccaaggaggcagcagaactaagtctgaaccgccaagatgctaaattgcaatggaagcttaactttagtttatttctaagcattttttatatctgtggagtaatagaaagctccattactcaactggaaaggaccctaatgacagggcaactgaacagattgcacatgggatagccaaactggactttctttgtttcctctttaaaagtttacaatgcagaccattttttgtcccttccttttgtttcctctgaggggctgttcgccccaggcagggtccatctttctgatctgtccaacctcctttgtgccacacggtgctggtcacagggcttcagtagtgtttgtgttgtgcgctcaccccattccagaacaaatccaagaggccagtcctccataagcacaaatggaattgtgcaaccaccagaaaaacactactgtggcaaactggagaagtgccaatttaattctaactgccacgttctcatgatgtgctccaccaactttttagtatatgagtcactggttttataaggttgtttttaccacagtggtctttttaaaccacctgcccactcccttaacaagagttttataccaattattagtcaacactgataaaaggcttttttagggctttatttgtttgagccttttcagtgaaagaaggaacatttcctatggtgctgtctcactgccttaaaacagatttctatgacagtttaacagttggtttaaatcctaaaccattggtaatttccactgtcttttcatttacaaccaagcaacaccagttaacatagtagcctcatctctatatatctttctcttttttttttttttgaagaaatggataggagaaagatcagtatttttagccttgtgaatagatcgctttgcctatcctccaaaatattaaaataacccagaaatgctctttgaccgtcacttaaaacctaagacatgtggcgaaattccatccagttctaagtgaaagagtttcagaaggcaggagattttgaattattatccagcagggctggaagcactagatgcagcatgagcacaactattcggctttccttccctattgtttttgtttttttaatgagttttgacgcatgttgttttgattgctattgttgtacatgagaaattcagcattaaagaacactgaagcggtaaggtcactgtggaagaggaagcgtttatactgtaaaagaaggttagatttgcacagtctactgggtaggtattgtaaataataatttttaaaacttgcacaaatcaaaacaaacacaaacaaaattgtattttatcctgttggtgttaagaggtgtttcacttgctgagatttcctgtacattgcaaacaaatacagaatgcaaaccctcaaagctgtattatctggtgtgtttgtcctgtatttacagttgtttttgactatgcaggagctatcagtgctagagtgagcatgcttcaaaactgtacatgaagccaatatatttttggataagtaaaactgtctgaaagtacatctgtcatggcaggctttaaagagagtgcatgaaaactgatcagtcattggagaagttaccaccacacacaaaggacaggttttaagtttatgaaacccaagggctaggccatggtatagacttcttctatgagtgtgtgaaaatgtgttacttttaggacgtgtatttggtgctactctctgtgaccaccaatgggtcagttgctatagaacaacaacaccacgaaacatctgtgcagttttcagagtgtcacaaagtcaataggtccttacacggtgctattgccctaagggaaatccgaactgaatttatgcacatagaattgtcaccctgactttgaagcctcaaacatggatcaaatctgttgtgaaacatcaatatatgtagctggatgagtgactagtttcccttgtataatatgtgatctaagaaaattgctaatctttccctgccattttgagaaacacagtccaaacatgagcataaacagaatttcctgcaatacatcccagtaggtccacctagtttacaacttaaactagtttgtgaaacatttgtctgtatacattttatattttgtacattttgatgtaacatatcatgtaaataggcagaaacagtgaaataaatcatctgaaaagttttgtagtctttgtaaagccccaacaataagtacttggtgtcaatggacttaactggatgatgtattttctattggtttattgttcctctagcttgtaaaccagcttgcatatatttttttgcaaatgtgcaccctgtatctgtctaaattattactttgccattaaagtggaattatttattgacaaaaaaaaaaaaaaaa

SEQ ID NO: 12418 - DNA, 15156 bp, Homo sapiens
cctctgcggagccgggctcgggtcgccggagccgcgccccaccccgccagctccagagccacgactaatggctgaaggataaatcaacatggcaactatgattccaccagtgaagctgaaatggcttgaacacttgaacagctcctggattacagaggacagtgaatctattgctacaagagagggagttgctgttctgtattctaaactggttagcaataaggaagtagtacctttgccccaacaagttttatgcctcaaaggaccacagttgccagactttgaacgtgagtctctttcaagtgatgagcaggaccactatttggatgcccttcttagcagccagctagcattggcaaagatggtatgttcagattccccatttgccggggcacttagaaaacgactgcttgtactccagcgtgtcttttatgcactttctaataaataccatgacaaaggcaaggtgaagcagcagcagcattctccggagagcagttctggttcagcagatgtccattctgttagtgaacgcccccggtcaagcactgatgcacttatagaaatgggtgttcgaactggtctaagtttattatttgcgcttctaagacaaagttggatgatgcctgtgtcaggacctggtctcagtctttgcaacgatgtcattcatactgcaattgaagttgtgagctctttgccaccattatcattagcaaatgaaagcaagattcctcctatgggcttggactgcttatcgcaagtaacaacatttcttaaaggagtcactattcctaattctggggcagacactttaggtcgtagattagcttctgagttgctgcttggtttggcagctcaacgaggctcattgcgatatcttcttgaatggatagaaatggctttgggggcttcggcagttgtacacaccatggagaaaggcaaactactctcaagccaggaaggaatgatcagctttgactgctttatgaccatattaatgcagatgaggcgttctttgggttcatctgctgatcggagtcagtggagagaaccaaccagaacatcggatggcttgtgctccctttacgaggcagcattatgtctctttgaagaggtttgcagaatggcttctgattattcgagaacatgtgctagcccagatagcattcagactggtgatgctcccattgtctccgaaacctgtgaggtttatgtttgggggagcaatagcagccatcagttggtagaaggtacacaggagaaaatactgcaacccaaactggctcctagtttctctgatgcacagaccattgaagctggacagtactgcacttttgtcatttctacggatggctctgttagagcttgcgggaaaggcagctatgggagactgggccttggagactccaataatcagtcaactttaaaaaagttaacattcgagcctcacagatccattaaaaaggtttcatcttctaaaggatctgatggtcacactttagcctttacgacagaaggagaagtcttcagttggggagatggtgattatgggaaactggggcatggaaatagttcaacacagaaatatcccaagcttattcagggacctctacaaggaaaggtagttgtttgtgtgtcagctggatacagacatagtgctgctgtcacagaggatggggaattatacacatggggtgaaggagactttggaagattaggtcatggtgacagcaatagtcgtaacattccaacattagtaaaagacatcagcaatgtaggagaggtttcttgtggcagttcacatactattgctctgtctaaagatgggagaactgtatggtcttttggaggaggagacaatggtaaacttggtcatggtgataccaacagagtgtataaacctaaagttattgaagctttacaaggaatgttcattcgcaaagtttgtgctgggagccagtcttcacttgctttgacatcaacagggcaggtctatgcttggggctgtggagcttgtctaggttgtggttcttcagaagctactgctttgagacccaagcttattgaagaactggctgccacaagaatagttgatgtttctattggagacagtcattgtttggctctttctcatgataatgaagtttatgcctggggcaataactcaatggggcaatgtggtcagggaaattccacaggtcctattactaaaccaaagaaagtgagtggcttagatggcatagctattcagcagatttcggctggaacatcacatagtctggcatggactgctcttcctagggacagacaagttgttgcatggcaccgaccttattgtgtagatcttgaagagagtaccttctcacacctgcgttcttttcttgagagatactgtgataaaataaacagtgagattcccccactccctttcccttcatcaagagaacaccacagttttctcaagctgtgcctgaagctactttcaaatcaccttgctcttgcacttgcgggaggggtagctaccagcattctcgggaggcaggcaggtccacttcgaaatttgctcttcagactgatggactcaactgtcccagatgaaatccaagaggtggtaattgaaactttatcagtgggagcaaccatgctgttacctccattacgagaacggatggaattacttcattctcttttacctcaaggacctgatagatgggaaagcttatctaaaggacagagaatgcaactggatatcatcctgacaagtttgcaagatcatacccacgtagcctccctacttggctatagttcaccctctgatgctgctgacctatcttctgtgtgtactggctacggaaatctgtcagatcaaccttacggcactcagagctgccatccagatacccacctggctgaaattttgatgaagaccctcttaagaaatttaggattttatacagatcaagcatttggagagctagaaaagaatagtgataaatttctacttggaacatcatcatcagaaaacagtcagcctgctcatcttcatgaactgctatgttcactacagaaacagctgctggcattttgccatatcaataacattagtgagaactcaagcagtgtggcattgcttcataaacatcttcagcttttgttgcctcatgccacagatatttattcacgttctgcaaatttgctcaaagaaagtccttggaatggcagtgttggagaaaaattaagagatgtgatatacgtctcagctgctggcagtatgctctgccagattgttaactccctgctgttactccctgtgtcagtggctcggcctttattgagttacctcctcgacttgttgccacctcttgattgccttaatagactcctgccagctgctgatcttttagaagaccaggagttacagtggcctcttcatggagggccagaactaattgatcctgctggtctgccattacctcagccagctcagtcctgggtatggcttgtggatctagaaagaacaattgctctccttattgggcggtgtcttggtggcatgcttcagggctcccctgtgtctccagaggaacaggacactgcatattggatgaaaacgccactgttcagtgacggtgtagaaatggacactcctcaattggataaatgtatgagttgcctgttagaagtagcactttctggaaatgaagaacagaagccttttgattataaattgcggcctgaaattgctgtctatgtagacttggcattgggttgttctaaagagcctgcccgaagcctttggatcagcatgcaggactatgctgttagtaaagattgggacagtgcaactttaagtaatgagtcactcttggacactgtgtctagatttgttcttgcagctcttctgaaacacacaaatttacttagtcaagcatgtggagaaagccgatatcaacctggtaaacacttatcagaagtgtaccgttgtgtatacaaagttcgaagtcgtttacttgcttgcaagaaccttgaacttattcaaacaaggtcatcatcacgggacagatggatatcagaaaaccaggactctgcagatgttgatcctcaggagcattcatttactcgaactattgatgaagaagctgaaatggaagaacaggctgagagagaccgggaagaggggcatccggagccagaggatgaagaggaggaacgggaacatgaagtgatgacagctggcaaaatctttcagtgtttcctctcagcccgtgaagtagctcgtagccgagaccgagatagaatgaacagtggggcagggtctggggctcgagctgatgatccacctcctcagtctcagcaagagcgaagggtcagcacagaccttcctgagggtcaggatgtgtacactgctgcatgcaactccgtgatccatcggtgtgccctgttaatattaggagtaagtcctgtgatagatgagcttcagaagcgaagagaagaaggacagttgcagcaaccttcaacaagtgcctctgaagggggtggacttatgaccaggagtgaaagtcttactgcagagagccggctagtccacacaagcccaaattatagactgatcaaatcgaggagtgaatctgatttgtctcagcctgaatcagatgaagagggttacgcactgagtggcagacgaaatgttgatttggatttggcagcatctcacagaaagagaggtcctatgcacagtcaattggaatccctgagtgactcttgggctcgcctgaaacatagcagagactggttatgcaactcctcctattcctttgagtcagattttgatcttaccaagtctttgggagttcacactttgattgaaaatgttgtaagctttgtgagtggagatgtggggaatgccccaggttttaaagagccagaggaaagtatgtctacaagtccccaggcctccatcattgcaatggaacagcagcagttaagggcagaacttcgtttagaggcacttcatcagatcctcgttctattgtctgggatggaagaaaaaggtagcatctcactggcaggaagcagattgagttcaggcttccagtcctccacactactcacgtctgtgaggctgcagttcctagcagggtgttttggtttaggcactgttggacacacaggagccaagggagagagtggccgattgcatcactatcaggatgggatcagagcagctaagagaaatattcagattgaaatccaggtagctgtgcataaaatttatcaacagttgtctgctaccctggaaagagccctgcaagcaaacaagcatcacattgaagcccagcaacgtctgcttctggttacagtttttgccctaagtgttcattatcaaccagtagatgtttctttggcaatttccactggtctgctaaacgtattgtcacagttgtgtggtacagacaccatgctaggacagcccctgcagttgttgccaaagacgggtgtttcccagcttagcacagctttgaaagtggccagtacaaggttgctccagattctagccatcactactgggacctatgctgataaactgagtcccaaagtagttcaatccttgttggatctactctgtagtcagttgaagaatttattgtcccaaactggtgtactacatatggcctctttcggagaaggggagcaagaagacggtgaagaagaagaaaaaaaagttgactccagtggagaaactgagaagaaagatttcagagctgctcttaggaaacaacatgcagccgaactccatctaggggattttttagtttttcttcgcagagttgtatcttcaaaagcaattcaatcaaaaatggcttccccaaagtggaccgaagtgcttctaaatatagcatctcagaaatgttcttcaggtatccctctggttggtaacttaagaacaaggctccttgcacttcatgtccttgaagctgtgctgccagcttgtgaatctggtgtagaagatgatcaaatggcccagattgttgagcgcttattttcccttctctctgattgtatgtgggagacacccattgctcaggccaaacatgctattcagataaaggaaaaagaacaagaaataaaactacagaagcagggcgagttggaagaagaagatgagaatcttcctatccaagaagtatcctttgacccggagaaagctcagtgttgcctagtggagaatggacagattttaactcacggcagtggagggaaaggatatggattggcatctacaggagtaacttctgggtgctatcagtggaagttttatattgtgaaggaaaacagaggtaatgaaggcacgtgtgttggagtttctcgctggccagtacatgactttaatcaccgcactacctcggatatgtggctctatagggcctacagtggtaacctctatcacaatggagaacagactctcacattgtccagctttactcaaggagatttcattacctgtgtgttagacatggaagccaggaccatttcttttgggaaaaatggagaggaacccaaattagcttttgaagatgtggatgcagcagagttgtacccatgtgtgatgttctatagtagcaatccaggggaaaaggtgaaaatttgtgatatgcagatgcgtggcacaccccgagacttacttccaggagaccctatttgtagtccagtagcagcagtgctggctgaggccactattcagctcatccgtatccttcaccgaacagaccgttggacttactgcattaacaaaaaaatgatggaaaggcttcacaaaattaagatatgtattaaagagtcaggtcagaagctaaagaaaagccgctcggttcagagccgagaggaaaatgaaatgagagaggagaaggagagcaaagaggaagagaaaggtaaacatactaggcatggcctcgctgacctctcagagctgcagctgaggactctttgcatagaggtgtggcccgtgctggctgtgataggaggagttgatgctggtcttagagttggaggtcggtgtgttcacaagcaaactgggcgccatgccacgctgctgggagtggtcaaagagggcagcacgtctgccaaggtccaatgggatgaagcagaaattactatcagcttcccaactttttggtcgcctagtgatactccattgtataatctggaaccctgtgaaccattgccgtttgatgtggcgcgattccgaggcctgacggcttctgtgctgctggacctaacatatctcactggcgttcatgaagacatgggcaaacagagcaccaaacgacatgaaaagaaacaccgacatgaatccgaggagaaaggggatgttgagcagaaacctgagagtgaatccgctttagatatgcgaacaggcctaacatctgatgacgtcaaaagtcagagtaccacaagctccaaatcagaaaatgaaatcgcttcattttctttagatccaacactgccaagtgtggaatcccaacatcaaataacagaagggaaaagaaaaaatcatgaacacatgtccaaaaaccatgatgtagcccagtcagaaatcagagcagtccagctgtcctatctttacctcggtgctatgaagtcacttagtgcccttcttggctgtagtaaatatgctgagctgttgctgataccaaaagttctggctgaaaatggccacaactcagactgtgcaagttctccagttgttcatgaagacgtggagatgcgagcagccctgcagttcttgatgcgacacatggtgaagcgagcagtcatgcggtcacccataaagagagcattgggattagctgatctggaacgagcgcaagccatgatctataaattagtggttcatgggcttttggaagaccagtttgggggcaaaattaagcaagagattgatcaacaagctgaagaaagtgaccctgcccagcaggcacagacaccagttactactagcccatcagcctcaagcacgacctcctttatgagcagctctctggaggacaccacaactgccaccactccagtcactgacacagaaacagtgcctgcatccgagtccccgggagtgatgcctcttagtcttctcaggcaaatgttctctagttacccaactaccactgtacttcccacacgtcgggcacagactcctccaatatcttcgttaccaacctctccttctgatgaagtaggaaggaggcaaagtttaacttctcctgattcccagtcagcaaggccagctaaccgcacagccttgtcagacccaagcagtagactttcaacttctcctcctcctccagcaattgcagttcccttgctggaaatggggttctctcttcggcagattgccaaagccatggaagctacaggtgctaggggagaggctgatgcccagaatatcactgtccttgccatgtggatgatagagcaccctgggcatgaggatgaagaggagccccagtcgggcagcacagcagactctaggcctggagcagccgttctaggcagtggcgggaagtcaaatgatccctgttatttgcagtcacctggagacataccatcagctgatgctgctgaaatggaggaaggttttagtgaaagccctgataatttggatcatacagagaatgcagcttctggaagtggaccatcagctagaggtcgctcagcggtaacaagaagacacaagtttgacttagctgctcgcacactgctagcaagagcagcgggattataccgctctgtgcaggcccacaggaatcaaagtcggagagaaggaatatctttgcagcaagacccaggggcgttgtatgactttaatttagatgaggaattggaaattgatcttgatgatgaggcgatggaagctatgtttggacaagacctgaccagtgacaatgatattctgggaatgtggatcccagaggtactggattggcctacctggcatgtttgtgagtctgaagacagggaagaagtggtggtgtgtgaactgtgtgaatgcagcgtcgtcagcttcaatcagcacatgaagagaaaccatccaggctgtgggcgcagtgcaaaccgccagggctatcgcagcaatggttcctatgtggatggctggtttggcggtgaatgtgggagtggaaatccatactacctgttatgtggcacctgcagggagaagtacttagccatgaagaccaaatctaagtcaacaagttctgaaaggtacaagggacaagctccagatctaattggcaagcaagacagtgtgtatgaagaagactgggacatgttggatgttgatgaagatgaaaagctaactggtgaagaagaatttgaattacttgctggaccgcttggtttaaatgaccggcgcattgtaccagaaccagttcagttccctgacagcgatccactgggagcatcagtagcaatggtcacagccaccaacagtatggaagagactctgatgcaaataggttgccatggctccgtagaaaagagctcctctgggagaataacgttaggagagcaggcagctgccctagcaaaccctcatgaccgtgtggtggctttaaggagagtgactgctgctgctcaggttcttctggccagaaccatggtcatgagagcgctgtctcttctctcagtcagtggttccagttgtagcctggctgctggtcttgagtctctggggctaacagatatccgaacgctagttcgattaatgtgcttggcagcagcagggagagctggcctctccaccagcccttctgccatggctagcacctcagaacgatcacgaggtgggcatagcaaggctaacaagcctatctcttgcctggcctatttgagcacagcagtgggatgtctggcatcaaatgctcctagtgctgccaaactgcttgtacagttgtgtacacagaacttgatttctgctgcaacaggtgtaaatctaaccacagttgatgactcaattcagcgaaagtttctacccagctttctccgaggaattgctgaagagaacaagcttgtgacctccccaaactttgttgtaacacaggcccttgtggcattgctagcagacaaaggggccaaactaagacctaactatgataagtcagaagttgaaaagaaaggccctctggagttggctaatgccctggcagcctgctgcctctcctccaggctgtcctcacagcatcggcaatgggcagctcagcaactcgtgcgcactcttgctgcacacgaccgtgacaaccaaactactctgcagacacttgctgatatgggaggagatcttagaaaatgctcctttatcaaattggaggctcatcagaacagagtaatgacatgtgtttggtgtaataaaaaaggtcttttggctacaagtggcaatgatggcaccatccgcgtatggaatgttaccaagaagcaatattcactgcaacagacctgtgtgttcaacagattggaaggggatgctgaggaaagcctgggatcacccagtgatccaagtttctcaccagtttcctggagtatcagtggcaaatatctagcaggcgctttggaaaagatggtgaatatctggcaagttaatggaggaaaaggattagtagatattcagcctcattgggtatctgccctggcttggccagaagagggtccggctacagcctggtcaggagagtctccagaattgttgttggtgggacggatggatggatctctgggactgattgaagttgttgatgtgtccaccatgcaccgtcgagaattggagcattgctatcgaaaggatgtgtctgttacttgcattgcatggttcagtgaagacagaccatttgcagtgggatattttgatggaaaactgttactgggaacaaaggaaccacttgagaaaggaggcattgttctaattgatgcacataaggatactcttattagcatgaagtgggaccctacaggtcatattcttatgacatgtgccaaagaagacagtgtgaaactctggggctctatttcgggatgctggtgctgtctacattcactctgccatccatctattgtaaatggcattgcttggtgccgccttccagggaaaggatccaagttgcagttactgatggctactggctgtcagagtggcttagtatgtgtttggcgcattcctcaagatactacacagaccaatgtgactagtgcagaaggatggtgggagcaggaatcaaattgccaggatggatataggaaatcatcaggagccaagtgtgtttatcagctgcggggacacatcactcctgttcggactgttgcctttagttctgatgggttggccctggtgtctggtggactaggtgggctcatgaacatttggtctttaagggatggctctgtcttgcaaactgttgtgataggctctggagctattcagaccacagtatggattccagaagttggagtagctgcttgctcaaatagatcaaaggatgttttggtcgtgaattgtacagcagaatgggcagctgccaatcatgttttggcaacctgtaggacagcattgaaacagcagggtgttctgggattgaacatggctccctgcatgagagcatttttggagcggctccccatgatgcttcaggagcagtatgcctatgaaaagcctcatgtggtttgtggtgaccaacttgttcatagcccctatatgcaatgcttggcttcccttgctgtgggacttcatctggatcagctgttgtgtaaccctccagtgccaccacaccaccagaactgtctccctgaccctgcatcctggaatccaaatgaatgggcctggttagaatgtttctcaaccactataaaagctgccgaagccctgaccaatggagcccagtttccagaatcttttaccgttccagatctagaacctgttccagaggatgaacttgtatttctaatggataacagtaaatggattaacggcatggatgaacaaattatgtcttgggcaacttccagacctgaggactggcacctgggaggtaaatgtgatgtctacttatggggtgctggtaggcatggacagctggcagaagctggaagaaatgtaatggtacctgcagcagctccctcattctcacaggcccaacaggtcatttgtggtcagaattgtacctttgtcatccaggccaatggcacagtgttggcttgtggggaaggaagttatggcagattaggacaaggaaattcagatgaccttcatgtgctgacagttatttcagccttacaaggctttgtggtgacccagctggtgacttcctgtggttctgatgggcactctatggccctaactgaaagtggtgaggtctttagctggggagatggtgactatggtaaacttggccatgggaacagcgacaggcagcggcggcccaggcagatcgaggccttacaaggagaagaagtggtgcagatgtcttgtggcttcaagcactcagcagtggtcacttcagatggcaaactgttcacctttgggaatggtgactatggtcgtctgggtcttggaaatacctctaacaaaaaacttccagagagagtgactgcactggagggatatcagattggacaggtggcctgtggattaaaccacactttggcagtgtcagcagatggttccatggtgtgggcttttggagatggagactatggaaaactaggcttaggaaattccactgcaaaatcttcacctcagaaaattgacgtcctttgtggaattggaataaaaaaggttgcttgtggaactcagttttctgttgctttgaccaaagatggtcatgtgtatacctttggtcaagatcgcctgataggcttgccagaggggcgtgctcgcaatcacaatcgaccgcaacaaatccctgtcctggctggagtaatcatagaagatgtggcagttggagctgaacacacacttgctttggcatcaaatggagatgtgtatgcctgggggagcaattcagaagggcagctcggcttaggccataccaaccatgttcgagaaccaaccctggtaacaggtctgcaagggaaaaatgttcggcagatctcggctggccgctgccacagtgctgcatggacagcaccacctgtcccaccaagagcaccaggtgtgtcagtacctctgcagctgggcctgcctgacacagtgcccccccagtatggggcgctgagagaagtcagcattcacacggtgcgggccaggctccggctgctctaccacttctctgacctcatgtactcatcctggagactgctgaaccttagccccaacaaccagaacagcacatcccattataatgctggaacttggggcattgtacagggacaacttcggcctttgttagccccaagagtctacactctgccaatggtgcgctccataggaaaaaccatggttcaaggcaaaaactatggacctcagataactgtaaagaggatatcaaccagaggacggaagtgtaagcctatttttgtccaaatagcgagacaagtagttaagctgaatgcttcagacctccgcctgccttcccgagcgtggaaggttaagctggttggagaaggggctgatgatgctggaggagtgtttgatgacaccatcacagagatgtgccaggaacttgaaactggtattgttgaccttcttataccctctcccaatgccaccgcagaagtgggttacaatagggacaggttcctttttaacccttctgcctgcctcgatgaacacttaatgcagtttaagtttttaggaattttaatgggggttgccattcgcacaaagaagcctctggacctccacttggcccctctggtgtggaagcagctgtgctgtgtcccactcaccctagaggacctggaggaggtggatctgctctacgtgcagactctcaacagcattcttcacattgaagacagtgggattaccgaggagagtttccatgagatgattcctcttgattcttttgttggccagagtgctgatggcaaaatggttcctataatccctggtggaaatagtatcccactcacattttccaacaggaaggaatatgtggagagggccattgaatatcgacttcatgagatggacagacaggtggctgcagtccgagaagggatgtcctggattgttcctgtgccgctgctgtccctcctcacagcaaaacaactggagcagatggtgtgtgggatgcccgagatctctgtggaagtcttgaagaaagtggtgcggtaccgtgaggtggatgagcagcatcagctggtgcagtggttctggcacacgctggaagagttctccaatgaggagcgggtgcttttcatgaggtttgtgtcaggaagatctcgactaccagccaacactgctgacatttctcagagatttcaaatcatgaaggttgataggccttacgacagtctgcctacctcacagacctgcttcttccagctgaggctgcccccgtactccagccagctggtcatggccgagcgcctgcgctatgccatcaacaactgccgctcaatcgacatggacaactacatgctctcgagaaacgtggacaacgccgagggctccgacactgactactgaccgtgcgggtgctctcaccctcccttctctccctcaataatgctcacttctgatttgatgttgatatacttttatggtaactacatagatgttataagaacataaaccaacattataaacaatggccacatttagttactctaaatgtaacaaagaaattagatgtttttatttttctgtgattgtacaaaaacaacaaaaacgaagtgctctcagtcaggtttttccctccatatttttggtcacttttgataagtttgcatgaaaccattttggtgcatttttagttgggaatggtacatttttgtaaatccacccagtgaacatgaaattgtacattgtgtataattgttcattagaaaggacagttttacatgaatattcatatatttattttgttttaatttgaattgcctgttcagggttccttatgcagagaaataaagcagattcaggaattggaaaaaaaaaaaaaaaaaaaa

SEQ ID NO: 12419 - DNA, 6357 bp, Homo sapiens
ctgtggtcggggctcgggaccggctgccatcttagtctagggactgaggagtcgccgccgccccgagtcccggtaccatgcatttcacggtggccttgtggagacaacgccttaacccaaggaagtgactcaaactgtgagaacttcaggttttccaacctattggtggtatgtctgacagtggatcacaacttggttcaatgggtagcctcaccatgaaatcacagcttcagatcactgtcatctcagcaaaacttaaggaaaataagaagaattggtttggaccaagtccttacgtagaggtcacagtagatggacagtcaaagaagacagaaaaatgcaacaacacaaacagtcccaagtggaagcaaccccttacagttatcgttacccctgtgagtaaattacattttcgtgtgtggagtcaccagacactgaaatctgatgttttgttgggaactgctgcattagatatttatgaaacattaaagtcaaacaatatgaaacttgaagaagtagttgtgactttgcagcttggaggtgacaaagagccaacagagacaataggagacttgtcaatttgtcttgatgggctacagttagagtctgaagttgttaccaatggtgaaactacatgttcagaaagtgcttctcagaatgatgatggctccagatccaaggatgaaacaagagtgagcacaaatggatcagatgaccctgaagatgcaggagctggtgaaaataggagagtcagtgggaataattctccatcactctcaaatggtggttttaaaccttctagacctccaagaccttcacgaccaccaccacccaccccacgtagaccagcatctgtcaatggttcaccatctgccacttctgaaagtgatgggtctagtacaggctctctgccgccgacaaatacaaatacaaatacatctgaaggagcaacatctggattaataattcctcttactatatctggaggctcaggccctaggccattaaatcctgtaactcaagctcccttgccacctggttgggagcagagagtggaccagcacgggcgagtttactatgtagatcatgttgagaaaagaacaacatgggatagaccagaacctctacctcctggctgggaacggcgggttgacaacatgggacgtatttattatgttgaccatttcacaagaacaacaacgtggcagaggccaacactggaatccgtccggaactatgaacaatggcagctacagcgtagtcagcttcaaggagcaatgcagcagtttaaccagagattcatttatgggaatcaagatttatttgctacatcacaaagtaaagaatttgatcctcttggtccattgccacctggatgggagaagagaacagacagcaatggcagagtatatttcgtcaaccacaacacacgaattacacaatgggaagaccccagaagtcaaggtcaattaaatgaaaagcccttacctgaaggttgggaaatgagattcacagtggatggaattccatattttgtggaccacaatagaagaactaccacctatatagatccccgcacaggaaaatctgccctagacaatggacctcagatagcctatgttcgggacttcaaagcaaaggttcagtatttccggttctggtgtcagcaactggccatgccacagcacataaagattacagtgacaagaaaaacattgtttgaggattcctttcaacagataatgagcttcagtccccaagatctgcgaagacgtttgtgggtgatttttccaggagaagaaggtttagattatggaggtgtagcaagagaatggttctttcttttgtcacatgaagtgttgaacccaatgtattgcctgtttgaatatgcagggaaggataactactgcttgcagataaaccccgcttcttacatcaatccagatcacctgaaatattttcgttttattggcagatttattgccatggctctgttccatgggaaattcatagacacgggtttttctttaccattctataagcgtatcttgaacaaaccagttggactcaaggatttagaatctattgatccagaattttacaattctctcatctgggttaaggaaaacaatattgaggaatgtgatttggaaatgtacttctccgttgacaaagaaattctaggtgaaattaagagtcatgatctgaaacctaatggtggcaatattcttgtaacagaagaaaataaagaggaatacatcagaatggtagctgagtggaggttgtctcgaggtgttgaagaacagacacaagctttctttgaaggctttaatgaaattcttccccagcaatatttgcaatactttgatgcaaaggaattagaggtccttttatgtggaatgcaagagattgatttgaatgactggcaaagacatgccatctaccgtcattatgcaaggaccagcaaacaaatcatgtggttttggcagtttgttaaagaaattgataatgagaagagaatgagacttctgcagtttgttactggaacctgccgattgccagtaggaggatttgctgatctcatggggagcaatggaccacagaaattctgcattgaaaaagttgggaaagaaaattggctacccagaagtcatacctgttttaatcgcctggacctgccaccatacaagagctatgagcaactgaaggaaaagctgttgtttgccatagaagaaacagaaggatttggacaagagtaacttctgagaacttgcaccatgaatgggcaagaacttatttgcaatgtttgtccttctctgcctgttgcacatcttgtaaaattggacaatggctctttagagagttatctgagtgtaagtaaattaatgttctcatttagatttatctcccagtgatttctactcagcgtttccagaaatcaggtctgcaaatgactagtcagaaccttgcttaacatgagattttaacacaacaatgaaatttgccttgtcttattccactagtttattcctttaacaacaatattttatgtgtgtcaaaagtctcacttgggagtagtgtttttttcttttagacattctgcagacatgcagggaagtcctttggtaactgcaatatacaagattttcctattaagcctcttggtaagaggcatttgttaaaagtgcaagcttactcctgcttctggggatgtgagcaaaattcgggcttgtgttctccctctcattttagtctgacttgactattgtttttcctttctggcgcatgaatccatacatcattcctggaagtgaggcaagactcttgcatctctacaaagtagttttgtcaatttgaattcagggaaaagttggtcacagcctgcaaatgacttcatttggaagtctgattgtttcagttgcctgacaaatactacactttacaaacaatgttaacactgtgattccttcattgttttaagaagttaacctagggccgggcatggtggctcatacctgtaatcctagcactctgggaggccgaggcaggaggatccctttagcccaggagttaaagaccagcctgggcaacatagggagaccctgtcttttttttgggcagcgtggtgggggataaataaataaaaggaaaaaaaacttagcctagaattagaattaatttaattgaattcatctaaagatgtctctggtgatttttatatgttccgctatataattgatgctttatagttttatcataatccaacaacttcagttatatttaattattgttaaggagtttaagactagaaagactagagtgctttctagtccaaatagaggtcagtgaaacagcttttgacatcagattttcatttgagagggagagctgtggtactggctaaaaagaaaggaagataacatccagtaaccacaggaatatattctctgtgaattaaaagtcttcaaagttatcatttctctgacatatgttggagtagtcatttccattctttacattgtcatgaactggattgataaccctcatctgcaatattttcacccctaaaatttttaacagggtttcctttttttctcacgactatttaagtttagattgctccattattaactgattaatgcactttgaagttctctggaattaattattttaacttggcctagcttcgactgtcaaggtggctgttataaatttgacttcattggcagtggatgaagcctaagccagctgagtctctatcatagctgaaccctgaggacagcctcatagctcatgtatcagggacttttgccacatttcagaggcatagcatgaacaagtaatattaagccaagaataagcagcagaaccctgttccatatggaaaaaagaaaaacaattttttgtccctaatgttcttccttttacatcctggaacaacaataaaaacatttttttaaacttgtctactgtaagatactgccatcataaagcagagacttacatgagtgaaagggttgcctcatcaagcagctcagtgtaaatggggaggctaggctctccccagccctatggtttttttatttcatgtaccccaggaaatactgtgtggtttctaaaagccctggttgttaaaagtagggactctgcctttttgttggtagggagaaaaaacgctattgctttgtcttacagagcgaatgtctgccaactacccgttcattatataagtctgaacttggtaatatatggctaatgaagattaagccctctataaagacttcctgttgaggtgaattctcatactgaaatgtagttacctacaatatttactagagatttatgaaattaaattaagagataatgtaagaaaatacatttttttggttctatataatgcttcatgattcatttagggacctagaaatattgtgtgaaaatatataaatatcacccaaaaggctttctgccctatatttttaaaatacagaatagttatatttgaagtagccctggccctagttctatagggcttggctatttaatatttttatggaagaagtgtttagttctggaaaaggtaaatgcttgtatatatttttgcagcctgggatctccctactccattttttcctttaatttaagtggccacatgtatatgtcttccctgctgtgttaggaaaatgggggctggatatcccaagaatcagaggttatataaaaatactgcaaatagaccgcagacataaatatctaccaaatgctatcttaaattttggtccaaactgaacatatggaaatagatttattgtaagtatttacttagagctttttcttaaatctgaactaacttgcttttagaagtctttttctttgtaagcattgtaaatgctaataaatcctgttaatttttttttttttttttttttttttttactgcatgttacattgaaataaaaacaaagtaaaatgagcaattgccttattgttctgctcttttgcagggggtgggggttggggaagacagcattccacagcctggtcaggagggaaggacctcacttgtttcatcaaatggagtggtttaaaactgatcaagcagctcataataatgaattcctgctctgtcttttattatcttatgtcagagtgcagcaaaatctcatttcataagacttacaataactctatttaaaattcaggtattgtactcgggaggctgaggtgggaggatcccaggagttcaaatcctgcctgggcaacatagcaagaccctgtctcttaaaaaaacaaaaagacatattcaggtactgatttttcatcaagagattgacataccaatgatcagaaattttagtgaaacttgactcaactatacacaaagttctcatcctaaatgaactatttcagtcaagcccactctaccactttttacttatctggttaataatccgaaatgttaccggggttgactcacggaattaaatttttcctctatttttatatcctttcctgttgtggatgtaacttacctttctaaactcctttagagttaacgacttctatttagtattgttggtatctccagcccccctcctttttttgtttttcttttagttatttactttgtttgtataatttgctttcattaactaaaaatggaattggcagcactggattgtatattactgtattaagagtacctttgttttcttgatctgttacttttaatactcaggtaatgctacaaatattacagggagtcaaatgcttttataaagttccttcagtggttgcctcacttgcgttttcctacaagatgtaagactgtttataattaaacttttttggtccttc

SEQ ID NO: 12420 - DNA, 6607 bp, Homo sapiens
caaacctatggatctgctgttaaggtgttaaacagccagtcagaaagcagtgctttaacaaatcaacagccacaaaataacggagaggtgcagaacagcaaaaaccagtcagtgaataagtagcagatcctggactcacatcaagatctgtctgactccaaagatatgcttgtaaccaccatgctgtgctttggcaacatacaggatgtgattggtaatgaggaagaggacacaaatatataaaccacagtacttcaggatcccattatgaaaattcccagcggggacctgtgtcttctacaagtgattctagcacaaactgtaagaatgctgttgtaagtgacttgtcggaaaaagaagcatggccctcagcccctggcagtgatccggagttggcttcagaatgtatggatgctgattctgcctccagttctgaatcagagagaaacatcactatcatggcttcagggaacacaggtggtgaaaaagatggccttcggaatagcactggacttggttcccaaaacaagtttgtagttggtagcagcagcaataatgtgggccatggaagtagtactgggccatggggtttttcccatggagccataataagcacatgtcaggtctctgtggatgctcctgaaagcaaatctgaaagtagcaacaatagaatgaatgcttggggcactgtaagttcttcatcaaatggagggttaaatccaagcactttgaattcagctagcaaccatggtgcctggccagtattagagaacaatggacttgccctaaaagggcctgtagggagtggtagttctggcattaatattcagtgcagtactataggccagatgcctaacaatcagagtattaactctaaagtgagtggtggttctacccatggtacctggggaagccttcaggaaacttgtgaatctgaagtaagtggtacacagaaggtttcattcagtggtcaacctcaaaatattaccactgaaatgactggaccaaataacactactaactttatgacctctagtttaccaaactccggttcagtgcagaataatgagctgcctagtagtaacacaggggcctggcgtgtgagcacaatgaatcatcctcagatgcaggctccatcaggtatgaatggcacttccctttctcaccttagcaatggagagtcaaaaagtggaggctcttatggtactacatggggtgcctatggttctaattactctggagacaaatgttcaggccctaatggccaagctaatggtgacactgtgaatgcaactctaatgcagcctggcgtaaatggtcctatgggcactaactttcaagttaacacaaacaaaggaggtggtgtgtgggaatctggtgcagcaaactcccagagtacatcatggggaagtggaaatggcgcaaattctggaggaagtcgaagaggatggggaacccctgcacaaaacactggcactaatttacccagcgttgagtggaacaaactgcctagcaatcagcattccaatgatagtgcaaatggcaatggtaagacgtttacaaatggatggaaatctactgaggaagaggatcagggttctgccacatctcagacaaatgagcaaagcagtgtgtgggccaaaacaggaggtacagtggagagcgatggtagtacagaaagcactggacgccttgaggaaaaaggaactggggaaagtcagagtagagacagaagaaaaattgatcagcacacattactccaaagcattgtaaacagaactgacttagatccacgtgtcctgtccaactctggttggggacagactcctattaagcagaatactgcctgggatacagaaacatcacctagaggggaacgaaagactgacaatgggacagaggcctggggaagctctgcaacacagacttttaactcaggggcatgtatagataagactagccctaatggtaatgatacctcatctgtatcagggtggggcgatcccaaacctgctctgaggtggggagattccaaaggctcaaactgccagggggggtgggaagatgattctgctgctacaggaatggtcaagagcaatcagtgggggaattgcaaagaggagaaggctgcatggaatgactcgcaaaagaataaacagggatggggtgatggacaaaaatcaagccaagggtggtctgtttctgccagtgataactggggagaaacttcaaggaataaccattggggtgaggccaataagaaatccagctcaggaggtagtgacagtgacaggtccgtttccggttggaacgaacttggtaaaactagttctttcacttggggaaacaacataaatccaaataattcatcaggatgggatgaatcttctaaacctactccttcccagggatggggagaccctccaaagtctaatcagtctctaggttggggagattcgtcaaagccagtcagctctccagactggaacaagcaacaagacattgttggatcttggggaatcccaccagctacaggcaaacctcctggtacaggctggctggggggacctataccagccccagcaaaagaagaagaacccacaggctgggaggaaccatccccagaatctatacgtcgcaaaatggagattgatgatggaacttcagcttggggagatccaagcaaatacaactacaaaaatgtgaacatgtggaacaaaaacgtcccaaatggcaacagccgttcagaccagcaagcacaggtacatcagctgctaacgcctgcaagtgccatctcaaacaaagaggcaagcagtggctctggctggggtgagccctggggggagccttctactccagccacaactgtggataatggtacttcagcatggggtaagcccatagacagtggtcccagctggggggaacccattgctgcggcatccagcacatccacgtggggctccagctctgttggtccacaagcattaagcaaatctgggccaaaatctatgcaagatggctggtgtggtgatgatatgccattgcctggaaatcgccccactggctgggaagaggaagaggatgtggagattggaatgtggaatagtaattcatctcaagagcttaactcatctttaaattggccaccatatacaaagaaaatgtcatcgaagggtctgagtggcaaaaaaaggagaagggaaaggggaatgatgaaaggtggaaacaaacaagaagaagcgtggataaatccatttgttaaacagttttcaaacatcagtttttcgagagactcaccagaggaaaatgtacaaagcaataagatggacctttctggaggaatgttacaagacaaacgaatggagatagataaacatagcctaaatattggtgattacaatcgaacggtcgggaaaggccctggttctcggcctcagatttccaaagagtcttccatggagcgcaatccttattttgataaggatggcattgtagcagatgaatcccaaaacatgcagtttatgtccagtcaaagcatgaagcttcccccttcaaatagtgcactacctaaccaggcccttggctccatagcagggctgggtatgcaaaacttgaattctgttagacagaatggcaatcccagtatgtttggtgttggaaacacagcagcacaaccccggggcatgcagcagcctccagcacaacctcttagttcatctcagcctaatctccgtgctcaagtgcctcctccattactctcccctcaggttccagtttcattgctgaagtatgcaccaaacaacggtggcctgaatccactctttggccctcaacaggtagccatgctgaaccagctatcccagctaaaccagctttctcagatctcccagttacagcgattgttagcgcagcagcaaagggcgcagagtcagagaagcgtgccttctgggaaccggccgcagcaagaccagcagggtcgacctcttagtgtgcagcagcaaatgatgcaacaatctcgtcaacttgatccaaacctgttggtgaagcagcagactccaccatctcagcagcagccactccatcagccagccatgaagtctttccttgacaatgtcatgccccacactacacctgagctgcaaaaagggccatcaccaataaatgctttcagcaacttccctataggcttgaactcaaacttgaatgtaaatatggatatgaacagtattaaagagccacagtcaagactaaggaagtggacgacagtggacagcatttctgtgaacacatctttggatcaaaactccagcaaacatggtgctatttcaagtggtttcaggctggaagagtctccatttgttccctatgactttatgaacagcagtacttcaccagccagtcctccaggttcaataggagatggctggccacgtgccaaatcgcctaacggctctagcagtgttaattggccaccagaatttcgtcctggtgagccatggaaaggttatccaaacattgaccctgaaactgacccttacgtcactcctggcagtgtcataaacaatctttcaattaatactgtgcgggaagttgaccacctcagggacaggaacagtgggtcatcctcatccttgaacaccacgctgccttcaactagtgcctggtcatccattcgtgcctccaactacaacgttcccctcagcagtacagcacaaagcacttcagccagaaatagtgattccaaattgacatggtctcctggttcagttacaaacacctctctggctcatgagctgtggaaggtccctttgccacctaaaaacatcactgctccgtcccgcccacctccgggactgactggtcagaagccacccttgtctacgtgggataattctccccttcgtataggtggaggatggggaaattctgacgccagatataccccaggttccagctggggtgagagcagctcagggagaataacaaattggcttgttctaaaaaaccttacacctcagatcgatggctcaactctgcgcactctgtgcatgcagcacggcccgctgatcacattccacctgaacctccctcacggaaatgctctggtccgctacagttcaaaagaagaggtagtgaaggcacaaaagtctctgcacatgtgtgtactggggaacactactattcttgctgagtttgccagtgaagaggagatcagtcgtttctttgcacaaagccagtctctgaccccttctcccggctggcagtctctcgggtccagccagagccggctgggctccctcgactgttcccactcattctccagccggaccgatctcaatcactggaatggtgctgggctgtcgggaactaactgtggagaccttcacggcacttcactctgggggaccccgcattattccacaagcctgtggggtcccccaagcagcagcgacccccgaggaattagcagcccatctcccattaacgcttttctttctgttgaccacctgggtgggggtggagagtccatgtaacagtgtagatgcagactcaccgaccgggacctcagacgcgagggaaaggagcactaagtggggctcgccgcctgcagccaggggccgcctgtgggaacagctattctctgcacattttccactttgttttccccaaaacatatcagtttgaatacttgaatcatgcaggccaatattataatgtgaaaaggtatctactctatttacactcccaaatagcgccatacatgctaaaccgtagagaatgagctcgcttgtgtctattcatcatgtttagcctttggattctttttttttttttccttctattcctccccaacccccccccccgcccctttttttctctcttgcaaaaccattttttgggctgataacgtatgagcttttccctttgcactgaatgatgttctctccgtctcatcggcagtatggggggcagctgtcccagtgtcaatgtttactcaagggtgttcttaggaggcgtgcgctctctactatgccttgatgttgcctaccttattgtggtatcgtggagttttaaaagatcaagttaggatgctgacttaggattattaatgaaagtgttgcaccagttttttcatgttgtaaaactaaagaatttcgctctgcagtttgaaaaactgtggccacagctgtgacttgcagcccacctgccacccaggacgggccctgcactttgaataggctttccattttgttttggaggttctcactttgaaccttcttgtttacagatttttttgtttgttttttcagaaaaaaaaatgtttactcttccatcatttaaaaaaaatgtaaaagacaaaaaaaaaatggaggatgatttaaaagatgctttctatctctgggaaaaaggagcagcatttggccatgttcttttgtttttctattcctgtcccaaatcaaagagcatggttctcaggaaaaccagttccccagtttaaaaaaaaaaaaaaaaaattccttgtagtttcttagaggaaaaaaagaaaaaccccaacttttagcactgatactacatattgctctgttaaagaattttctctgcc

SEQ ID NO: 12421 - DNA, 5889 bp, Homo sapiens
atgagagaattggaagctaaagctaccaaagacgtagaaagaaatcttagcagggatttagtgcaagaagaagaacagttgatggaagaaacagaaaaagaaaaagacgacaagaaaaagaaggaagctgctcaaaagaaggccactgaacaaaaaatcaaagtgccagaacagataaagcccagtgtaagccagcctcagcctgccaactctaataacggcacttccacagcaaccagcactaataataatgccaagcgagctacagccaacaatcagcagccacagcagcagcagcaacagcagcagccgcagcagcagcagccacagcagcagccacagccgcagccgcagcagcagcagccacagcagcagccacaggccttgcctcggtatcctcgtgaagtacctccacgatttcgccaccaggaacacaaacagcttctaaagaggggtcagcattttcctgttatagcagcaaaccttggatctgctgttaaggtgttaaacagccagtcagaaagcagtgctttaacaaatcaacagccacaaaataacggagaggtgcagaacagcaaaaaccagtcagatataaaccacagtacttcaggatcccattatgaaaattcccagcggggacctgtgtcttctacaagtgattctagcacaaactgtaagaatgctgttgtaagtgacttgtcggaaaaagaagcatggccctcagcccctggcagtgatccggagttggcttcagaatgtatggatgctgattctgcctccagttctgaatcagagagaaacatcactatcatggcttcagggaacacaggtggtgaaaaagatggccttcggaatagcactggacttggttcccaaaacaagtttgtagttggtagcagcagcaataatgtgggccatggaagtagtactgggccatggggtttttcccatggagccataataagcacatgtcaggtctctgtggatgctcctgaaagcaaatctgaaagtagcaacaatagaatgaatgcttggggcactgtaagttcttcatcaaatggagggttaaatccaagcactttgaattcagctagcaaccatggtgcctggccagtattagagaacaatggacttgccctaaaagggcctgtagggagtggtagttctggcattaatattcagtgcagtactataggccagatgcctaacaatcagagtattaactctaaagtgagtggtggttctacccatggtacctggggaagccttcaggaaacttgtgaatctgaagtaagtggtacacagaaggtttcattcagtggtcaacctcaaaatattaccactgaaatgactggaccaaataacactactaactttatgacctctagtttaccaaactccggttcagtgcagaataatgagctgcctagtagtaacacaggggcctggcgtgtgagcacaatgaatcatcctcagatgcaggctccatcaggtatgaatggcacttccctttctcaccttagcaatggagagtcaaaaagtggaggctcttatggtactacatggggtgcctatggttctaattactctggagacaaatgttcaggccctaatggccaagctaatggtgacactgtgaatgcaactctaatgcagcctggcgtaaatggtcctatgggcactaactttcaagttaacacaaacaaaggaggtggtgtgtgggaatctggtgcagcaaactcccagagtacatcatggggaagtggaaatggcgcaaattctggaggaagtcgaagaggatggggaacccctgcacaaaacactggcactaatttacccagcgttgagtggaacaaactgcctagcaatcagcattccaatgatagtgcaaatggcaatggtaagacgtttacaaatggatggaaatctactgaggaagaggatcagggttctgccacatctcagacaaatgagcaaagcagtgtgtgggccaaaacaggaggtacagtggagagcgatggtagtacagaaagcactggacgccttgaggaaaaaggaactggggaaagtcagagtagagacagaagaaaaattgatcagcacacattactccaaagcattgtaaacagaactgacttagatccacgtgtcctgtccaactctggttggggacagactcctattaagcagaatactgcctgggatacagaaacatcacctagaggggaacgaaagactgacaatgggacagaggcctggggaagctctgcaacacagacttttaactcaggggcatgtatagataagactagccctaatggtaatgatacctcatctgtatcagggtggggcgatcccaaacctgctctgaggtggggagattccaaaggctcaaactgccagggggggtgggaagatgattctgctgctacaggaatggtcaagagcaatcagtgggggaattgcaaagaggagaaggctgcatggaatgactcgcaaaagaataaacagggatggggtgatggacaaaaatcaagccaagggtggtctgtttctgccagtgataactggggagaaacttcaaggaataaccattggggtgaggccaataagaaatccagctcaggaggtagtgacagtgacaggtccgtttccggttggaacgaacttggtaaaactagttctttcacttggggaaacaacataaatccaaataattcatcaggatgggatgaatcttctaaacctactccttcccagggatggggagaccctccaaagtctaatcagtctctaggttggggagattcgtcaaagccagtcagctctccagactggaacaagcaacaagacattgttggatcttggggaatcccaccagctacaggcaaacctcctggtacaggctggctggggggacctataccagccccagcaaaagaagaagaacccacaggctgggaggaaccatccccagaatctatacgtcgcaaaatggagattgatgatggaacttcagcttggggagatccaagcaaatacaactacaaaaatgtgaacatgtggaacaaaaacgtcccaaatggcaacagccgttcagaccagcaagcacaggtacatcagctgctaacgcctgcaagtgccatctcaaacaaagaggcaagcagtggctctggctggggtgagccctggggggagccttctactccagccacaactgtggataatggtacttcagcatggggtaagcccatagacagtggtcccagctggggggaacccattgctgcggcatccagcacatccacgtggggctccagctctgttggtccacaagcattaagcaaatctgggccaaaatctatgcaagatggctggtgtggtgatgatatgccattgcctggaaatcgccccactggctgggaagaggaagaggatgtggagattggaatgtggaatagtaattcatctcaagagcttaactcatctttaaattggccaccatatacaaagaaaatgtcatcgaagggtctgagtggcaaaaaaaggagaagggaaaggggaatgatgaaaggtggaaacaaacaagaagaagcgtggataaatccatttgttaaacagttttcaaacatcagtttttcgagagactcaccagaggaaaatgtacaaagcaataagatggacctttctggaggaatgttacaagacaaacgaatggagatagataaacatagcctaaatattggtgattacaatcgaacggtcgggaaaggccctggttctcggcctcagatttccaaagagtcttccatggagcgcaatccttattttgataaggatggcattgtagcagatgaatcccaaaacatgcagtttatgtccagtcaaagcatgaagcttcccccttcaaatagtgcactacctaaccaggcccttggctccatagcagggctgggtatgcaaaacttgaattctgttagacagaatggcaatcccagtatgtttggtgttggaaacacagcagcacaaccccggggcatgcagcagcctccagcacaacctcttagttcatctcagcctaatctccgtgctcaagtgcctcctccattactctcccctcaggttccagtttcattgctgaagtatgcaccaaacaacggtggcctgaatccactctttggccctcaacaggtagccatgctgaaccagctatcccagctaaaccagctttctcagatctcccagttacagcgattgttagcgcagcagcaaagggcgcagagtcagagaagcgtgccttctgggaaccggccgcagcaagaccagcagggtcgacctcttagtgtgcagcagcaaatgatgcaacaatctcgtcaacttgatccaaacctgttggtgaagcagcagactccaccatctcagcagcagccactccatcagccagccatgaagtctttccttgacaatgtcatgccccacactacacctgagctgcaaaaagggccatcaccaataaatgctttcagcaacttccctataggcttgaactcaaacttgaatgtaaatatggatatgaacagtattaaagagccacagtcaagactaaggaagtggacgacagtggacagcatttctgtgaacacatctttggatcaaaactccagcaaacatggtgctatttcaagtggtttcaggctggaagagtctccatttgttccctatgactttatgaacagcagtacttcaccagccagtcctccaggttcaataggagatggctggccacgtgccaaatcgcctaacggctctagcagtgttaattggccaccagaatttcgtcctggtgagccatggaaaggttatccaaacattgaccctgaaactgacccttacgtcactcctggcagtgtcataaacaatctttcaattaatactgtgcgggaagttgaccacctcagggacaggaacagtgggtcatcctcatccttgaacaccacgctgccttcaactagtgcctggtcatccattcgtgcctccaactacaacgttcccctcagcagtacagcacaaagcacttcagccagaaatagtgattccaaattgacatggtctcctggttcagttacaaacacctctctggctcatgagctgtggaaggtccctttgccacctaaaaacatcactgctccgtcccgcccacctccgggactgactggtcagaagccacccttgtctacgtgggataattctccccttcgtataggtggaggatggggaaattctgacgccagatataccccaggttccagctggggtgagagcagctcagggagaataacaaattggcttgttctaaaaaaccttacacctcagatcgatggctcaactctgcgcactctgtgcatgcagcacggcccgctgatcacattccacctgaacctccctcacggaaatgctctggtccgctacagttcaaaagaagaggtagtgaaggcacaaaagtctctgcacatgtgtgtactggggaacactactattcttgctgagtttgccagtgaagaggagatcagtcgtttctttgcacaaagccagtctctgaccccttctcccggctggcagtctctcgggtccagccagagccggctgggctccctcgactgttcccactcattctccagccggaccgatctcaatcactggaatggtgctgggctgtcgggaactaactgtggagaccttcacggcacttcactctgggggaccccgcattattccacaagcctgtggggtcccccaagcagcagcgacccccgaggaattagcagcccatctcccattaacgcttttctttctgttgaccacctgggtgggggtggagagtccatgtaa

SEQ ID NO: 12422 - DNA, 1645 bp, Homo sapiens
gcgggctggcgtgcggcgccgttgcgggcgggagcggctgcaacgccggtgcctgaggagcgatgccgagggaaatcatcaccctacagttgggccagtgcggcaatcagattgggttcgagttctggaaacagctgtgcgccgagcatggtatcagccccgagggcatcgtggaggagttcgccaccgagggcactgaccgcaaggacgtctttttctaccaggcagacgatgagcactacatcccccgggccgtgctgctggacttggaaccccgggtgatccactccatcctcaactccccctatgccaagctctacaacccagagaacatctacctgtcggaacatggaggaggagctggcaacaactgggccagcggattctcccagggagaaaagatccatgaggacatttttgacatcatagaccgggaggcagatggtagtgacagtctagagggctttgtgctgtgtcactccattgctggggggacaggctctggactgggttcctacctcttagaacggctgaatgacaggtatcctaagaagctggtgcagacatactcagtgtttcccaaccaggacgagatgagcgatgtggtggtccagccttacaattcactcctcacactcaagaggctgacgcagaatgcagactgtgtggtggtgctggacaacacagccctgaaccggattgccacagaccgcctgcacatccagaacccatccttctcccagatcaaccagctggtgtctaccatcatgtcagccagcaccaccaccctgcgctaccctggctacatgaacaatgacctcatcggcctcatcgcctcgctcattcccaccccacggctccacttcctcatgaccggctacacccctctcactacggaccagtcagtggccagcgtgaggaagaccacggtcctggatgtcatgaggcggctgctgcagcccaagaacgtgatggtgtccacaggccgagaccgccagaccaaccactgctacatcgccatcctcaacatcatccagggagaggtggaccccacccaggtccacaagagcttgcagaggatccgggaacgcaagttggccaacttcatcccgtggggccccgccagcatccaggtggccctgtcgaggaagtctccctacctgccctcggcccaccgggtcagcgggctcatgatggccaaccacaccagcatctcctcgctcttcgagagaacctgtcgccagtatgacaagctgcgtaagcgggaggccttcctggagcagttccgcaaggaggacatgttcaaggacaactttgatgagatggacacatccagggagattgtgcagcagctcatcgatgagtaccatgcggccacacggccagactacatctcctggggcacccaggagcagtgagtcccccaggacagggaccctcatctgccttactggttggcccaagccctgcctgactgaccaccccctcagagcacagatcagggacctcacgcatctctttctcatatacatggactctctgttggcctgcaaacacatttacttctcctcttatgagactatttatctttaataaagcactggatataaaaaaaaaaaaaaaaaaaaaaaaaaaaaaaaaaaaa

SEQ ID NO: 12423 - DNA, 3425 bp, Homo sapiens
gcgccatcttactcggttgcgggaggggtcacaggtcagtgccggagcctccgcgagtgaaggaagacgaagtgcgtgacccgaccggctgtggtgttccagtccccactgaccagtaggagcagcagggcgtcggcttgtgaggtggcttttcctcggggcaaccgaggaaggccccaagaggacaatggattctggaactcgcccagttggtagctgctgtagcagccccgctgggctctcacgggagtacaaactagtgatgctgggtgctggtggtgtagggaagagtgccatgaccatgcagttcatcagccaccgattcccagaagatcatgatcccaccattgaagatgcttataagatcaggatccgtattgatgatgagcctgccaatctggacattttggatacagctggacaggcagagtttacagccatgcgggaccagtatatgagggcaggagaagggtttatcatctgttactctatcacggatcgtcgaagtttccatgaagttcgtgagtttaaacagcttatttatcgagtccgacgtactgacgatacacctgtggttcttgtgggaaacaagtcagacctcaaacagctaagacaggtcaccaaggaagaaggattggccttggcccgagaattcagctgtcccttttttgagacatctgctgcataccgctactatattgatgatgttttccatgcccttgtacgggagatacgtaggaaagaaaaggaggcagtactggccatggagaaaaaatctaagcccaaaaacagtgtatggaagaggctaaaatcaccattccggaagaagaaagattcagtaacttgaagagaagatgtgaagtgtttatctgtgaactgcagtgctgtatcaaagcagtccagtaacctgcagtactgagtatggtgcttgctctttcacttaactgataagagggacatgcctactaggagtttttaatgatgtggtatttaaagtattgtctcttagttaagtatgatttattaacccagtggagcactgtctgcttttaaattgtcacattagaatttgttctaccaatgttttgggttctgttgcgctattaattaatgtaaatttgtttatacccaggagaatatgtataccatgtgtgtttgactaagttcacaagggaagtttttggctctgcactccacattatcctttaatttcaatttcctgggactatcccagagaaagacctcagtctcttctattcacactatgcttcctagagacagaacaaaaatcatgtagggaaattggggctaatgagatcagtgccaaatttcagcagatacctgtgaggctgacacctgttgcagactatggagtggtgagatttgggaaagttgggctatatgtttgcagggacttaaaaaggtaggttcagaacagtattctcagtacaagcttcgcttttctaagaagtacacatttggcccaaattcaccgggataagtgagaacagccagaagcataaaatgtgatgaaggtttctcctgggaaccttattttactcttcatttcagggttttctttttttttttaccttcaaaggtagacattttgggaatcataactgtattactaaacgtgtttaatcaaaattcatagttggatcagccattgccttgtacaggtttattttttccccacagacgcacacaccaacacatttatattcattgcttcctcccactttgtgctctgtaaaagagctacagctggcaagatgttttttcggcccttcatcactgattgcattttccatacagaagagacatcaggggtgtgggtaaaattgtgtgtgtgcctccttgacgtggacaatcactagactcagtgctctgagaaaatctgctatttctgttgaatgggtcagtcttaaagctttaaaattcacataggtggagtttcccatctgaagatttctttacaaggactttgctaagttcatctcagggttatctgagccttgaccaagtttatcctaagggaataccactttgctccctgtgcatagtttaggaactgtagtcctaggaggaaacagctttaaatattggtagtgagttgtctaagatcaggactgttttgatatctgaccttgttatatgcggagagtaaatgcaaaaatgctaagagtaatgcatcatgtattgaatattaagtgtcactgaagcaatgtttgtgttgactagaaacgtaagatgacttgtgtagcacctctttataagcacacagctcatcttaatattttccatttttattagaggaagtaggacagagttgtgtttttctttataaacaaatgataaactagcttttttaaaaagtgactgttagaacttttttagctctgagtagtggtccctttttaaactcctggaaacatttttgttaccaaataaatcatgttttatggtactcagccatccaaaagtgaaagacctagcatttgattctgtgcaggacacaaatctcacaggaactatagcactttggaaaagcatcaaagtagaaaagaaatacagtgcaattctattatgagaatgttttacatttaaactggtttagcaccttttaagtttaaagcccatagcttcttattactagtgacctagggaattgttattaacattaagagatatatatatatatatatatatatatttttttttttttttttttttttttttaaatagagatgaggtttcactatgttgcccaggctgatctcgaactcctaggctcaagcaatcctcccaatatgctgggattacaggcatgagccaccacctggcccaagcaagaaattgacactatatagttatttaaggtagtcaggcagtagaaacattgccagaaggatagaaaggaatttggattatatataaggaaaataacaaatcggtgtttttaagactatcactgtcatatattagatccttgtattagtccatccattaatattagttctattcgtggtgctaggtagcttgacaggtatgatatgcataagtcatagctctattcttagtgtcataaagtgtagctaatttataagctctaagtaatcagctttatctaatttgagggcattaaaattactgcctagaactttgagaagagaaaaattcagggataagttgaaaggcactggaactgttcatgtccataccagaccggtaaattataagatccagatgttagtgtctagaattagctgtttagaattcagaggggacatatgttttaactttgtcatatattagcaagaattggtctactgtgatgtttggggaggaggagggggggataatttttttaatgcacttgtatgtgaagacagtttgtatgacataatacaaaacttttaaac

SEQ ID NO: 12424 - DNA, 3816 bp, Homo sapiens
gcagcgccggggccctcagatcgaggctgcctccccctctcagccggcagcacattccgtcgccttgccgccgcccggccccacagttgtctttgccggagctgcagtcgcgctggggttagggcgggggggcgggcggggagaggagaaggccgcggcggaggcaggtgagaggaggaaggaagcggcggcgcggcgggcacagcagctcaggcggcggcccggttcctgggagtgtcggtgcggcgcgttggttggggcggatcccgcggggcccgggcgggggaaggagtcaccggcccggccatggcggacaacgagaaactggacaaccaacggctcaagaatttcaagaacaaaggccgcgacttggagactatgagaagacaacgaaatgaagttgtagttgaattaaggaagaataaaagagatgaacatctcttaaagagaaggaatgtaccacatgaagatatctgtgaagactctgatatagatggtgattatagagtgcaaaatacctctctagaagctattgttcaaaatgcttcaagtgataaccaaggaattcaattaagtgcagttcaagctgctaggaagcttttgtccagtgatcgaaatccaccaattgatgacttaataaaatctggaatattgcccattttagtccattgtcttgaaagagatgacaatccttctttacagtttgaagctgcatgggctttgacaaacattgcatctggaacttctgaacaaactcaagcagtagttcagtccaatgctgtgccacttttcctgaggcttctccattcaccccatcagaatgtctgtgagcaagcagtgtgggcattgggaaatatcataggtgatgggccccagtgtagagattatgtcataagtcttggagttgtgaaacctttactttccttcataagtccatctattcctataacattcttaagaaatgttacttgggttatggtcaacttatgtcgccacaaagacccaccaccaccaatggaaaccattcaggagattcttccagccctttgtgttttaattcatcacacagatgtaaatatactggtagacacagtctgggccctctcttaccttactgatgctggcaatgaacaaatacagatggtaatagactctggaatagttcctcatttggttcctctgctcagccaccaggaagttaaagttcagactgctgcacttagagctgtgggcaacattgttactggaactgatgagcaaacacaagtagttttgaactgtgatgctctttcacacttcccagcactcctgacacatcccaaagagaaaattaataaagaagcagtgtggttcctctccaacatcactgcaggaaatcagcagcaggtacaggcagtaattgatgccaatcttgtaccaatgataatacaccttttggataagggggattttggcactcaaaaagaagctgcttgggccataagtaacttaacaattagtggaaggaaagatcaagtggcttaccttatccaacaaaatgttatcccacctttttgcaacttgctgactgtaaaagatgcacaagttgtgcaagtagtactcgatggactaagtaatatattaaaaatggctgaagatgaggcagaaaccataggcaatcttatagaagaatgtggagggctggagaaaattgaacaacttcaaaatcatgaaaatgaagacatctacaaattggcctatgagatcattgatcagttcttctcttcagatgatattgatgaagaccctagccttgttccagaggcaattcaaggcggaacatttggtttcaattcatctgccaatgtaccaacagaagggttccagttttagaaagatgttgtggaagttaggtacaatgcagcactgagatatatatatatatatgtgtgtgtgtatatatatatatatatacatatatataaaaaggtttgatccatcaagcttggctcatgggatctgctgctgcattaaatcgggaaagaaaatgtgaagatttcatttggaatcacagaaaatgcccaaatgaggtcaagatggcgagtgggtgcgagtgagaatgagtggcaaaatgtaatgaaaactttacatgaatgcttatttaggttgttcaaagtaaaaagggctacaggtcacagatcgtcagtgcctgagaaagaacattgacttactctatatcaattgaggggaaagtgcagtaccgtcatcttcaagccttgtaagcataaaagagaataggctgcccatataagtcaaaggaaaatgagcccaggccttgctatgaagcagtgtgtgaatggacaatgttgaatgaatgtctggctcagtgatggagagccaggttcatctttgaaatctagggctcttcactcatgaagcagactcctagtcctggagtgactgtgtacgagagcgtggttgtggtgctgtatgtgaacgcatgcaagcttgattcaccttcagggggctgataacctagtaaatcatcaaaatgagatcataagtgttaatgtacactggacatgaaaacaaagactggtttagcagcagacattggtttactctgcagcctgtgttttctgtttccccctttcccacctccttccccccacccaatccttttttttttcttttttgcttttcttttctttttttttagtttttatttactttacctagtatgcctttttttagttgcttctcaagtcagaaaacttttcaggaaggtttccctgtgcatttgcaccagatgaatgtttgatgctatgaaaagctttccatatcatcaaaactaatttgtgtagatttttgcatgaaaaaaatcataaatttccctcaaaatagactgtgttgcagtacacaagttgccataatagtataaaacagtaaaatgtgcttaaaaggccatccttttcattttcagagataacataaagatctttgcatgaggtaaatctacagcatagttcatttttagattttgttgagtcctgtaaagaagaagaagaaaaaagtttcagttgtggtagaataccgtgctgtgtttaaatgttacttgttttcaaactttgttttctatgaaaatgatatggaaacttctaaaatggaatttggtgcatatgtactgctgaataaagaccgatgaagaggtttgagtagatgtacaaatcaagtaatggtttgaacacctttaataatatgcctaatctgttcaattgttttagaatctttttatcttagatgtaggcagccatgaacaatctattttgagccactttagggagaaaactttgtatttttaaaacttgcataaaagttatgcaagtggtttttataaattggaataatacctcagttttgaggttatgcacactaaattaaatgtgacataaattaatttgtacaaaaagaactctttataaggtggctcattgtaggaaatcctgtgccttcccctttgagcacaagtgttgcatgaacaacagtttgctataagaaacataccagattagccaccattagcatctatatctactttgtgtttaaaaatcaactggtaattctgaaacactgtagaatggataaaaattattttgtgatcataactctttgttgaactagagtatttttgcagcattccttgtcatcagaaacatggttaaagtttaaaactagaagcagcagaaaactagcttgtaaaatttatccaagtagagtgcaggctaggctgtcttggggaaataaacattaaaacttaaagcaaaaaaaaaaaaaaaa

SEQ ID NO: 12425 - DNA, 2487 bp, Homo sapiens
gttcccgccgtctccaccgccaccgcctcagccgcctcgcacatttagtcttgccgggagtggtgtgattcccgaccaagatggcggccgtggggcgagtcggctccttcggttcttctccgccgggattatcctcgacttacactggcggccccttgggcaacgagatagcgtcgggcaacggtggcgccgcggcaggcgacgacgaggacgggcagaacctttggtcctgcatcctcagcgaggtctccacccgctcgcgctccaagctccctgcggggaagaacgtgctactgctgggtgaagatggagctggaaaaacaagcttaataagaaaaattcagggaatagaggagtataagaaaggaagaggattggaatatttgtacttaaatgtgcatgatgaagacagggatgatcaaacaagatgtaatgtttggatcttagatggagacctatatcacaaaggcctccttaaattttcactggatgccgtatctctgaaggatactctagttatgctggttgttgacatgtcaaagccttggactgctttggattctttacagaaatgggcaagtgttgttagagaacatgttgacaaactgaaaatccctcctgaagaaatgaaacaaatggaacaaaagttgattagagacttccaagaatatgtagagccaggagaagacttcccggcttctccccagagaagaaatactgcgtcacaagaagacaaagatgacagtgtagttgtacctctgggtgcggatacacttacacataacttgggcattccagtactagtagtttgcacaaagtgtgatgccattagtgtattggagaaagaacatgactacagagatgaacattttgatttttttcagtcacatatccggaagttttgtttacggtatggtgcagcacttatttacacttcagtaaaagaaaacaaaaatatagacttagtatataaatacatcgttcagaaactatatggatttccctataagattcctgctgttgttgtggaaaaggatgcagtatttattccagcagggtgggataatgataagaaaataggaatattacatgaaaattttcaaacattaaaagcagaagataattttgaagacatcataactaaaccacctgttcgaaagtttgtacatgagaaggaaattatggcagaagatgatcaggtgtttcttatgaagctacagtcccttttagcaaagcaaccaccaactgcagctggaaggcctgtggatgcctcaccaagagtcccaggaggctccccacgaacaccaaatagatctgtatcatctaatgttgccagcgtgtcacccattcctgctgggtcaaaaaaaattgatccaaacatgaaagctggagctacaagtgaaggcgttctggcaaatttcttcaacagtttgttgagtaaaaagactggctctccaggaggccctggtgtgagtggtggtagccctgcaggtggggctggaggtggaagcagtggtttaccaccatccaccaaaaagtcaggccagaagcctgtcttagatgttcatgcagaactagacagaattacacgaaaaccagttacagtttctcccacaacacctacatctcctacggaaggagaagcttcttgaagataccaaataaagccatttattctgttttctgggataatgtaaacatgcctctgccttttccttcaaaagtgggaattagaaagctggagtgcttcttcagatggactaaatttatgtcgtgtgtgtgtgtgtgtgtgtgtgtggttacccattttttagaaggagccgtacagaagaaaaattattctacattatgtaggattgctgtttgcattgccattttgcataagaaagtaatttttgattttgaaaatctcaaaacttttagatctgaaatacagccatgtgatcgatcatattctaaaggctatttaaaacatgtaaaaggatttggggacggcagaaaacatgcagtttgggcattgactgacttggaagtctaagcttattttagttataactattaaaatcatttttaaaaatttgttagttttgctgacagagaaaaatcgtcagttgtcagattttgcacaccacaataaatgtaccaccacacacggaatatgctaagaaaactatcagatagcgtttgatacactagtcattgtctcaatcactgatcctgtaagttgtcatcaaaatatgatttagaaatattggccaaggtgttgctttaactgaggagaaaagaaagcacactgcctaaatgtgtaaaagaaaaatgcagaggttattaaaatgtaaagaagtaacaatctttggatttgtctatacatatatatatatatatcgctttgccttaatatacccccttttttgtttgtgactttcaactgtaatcagttaataaagtatttattctctgcattcaggttcaaaaaaaaaaaaaaaa

SEQ ID NO: 12426 - DNA, 8887 bp, Homo sapiens
atggggggagcccctccactggagcgtttgggaaggcttcctggaggagggagggggacccgtggcaacggtctaagcctctctgggatctgggagggcaccgcggccccgaagtaccgcgccgctccgccccggagtgacgccctccgcccatgggcctggccgagggcaaccggcgggcggcgcggaggaggcggcgacaggtggcgcgcagcagggccggagccgggccgggccatggccgcctcggagcggctgtacgagttgtggctgctctactacgcgcagaaggacctgggttacctgcagcagtggctgaaggcctttgtaggtgccttcaagaagagcatctcactgtcctctctggagccacgaaggccagaggaggcaggtgcagaggtcccgctgctaccactggatgagctgcatgtgctggccgaacagctgcaccaggctgacctggagcaagccctcctgctgctcaagctcttcatcattctctgcaggaacctggagaacatagaggcaggccggggccaagtgctagtgccccgagtgctggcactgttgaccaagttggtggcggagctgaaaggatgcccaccaccccagggccgaggcacgcagttggagaatgtggccctacatgctctgcttctctgcgagggcctctttgacccttaccaaacctggcggcgccagcgcagtggggaagtcatcagctccaaggagaagagcaaatacaagttccctcctgctgctttgccccaggaattcagcgccttcttccaagagagcctacagaatgcagaccacttgcctcccatactgctgttacgtctcatccacctcttctgcgccgtcctcgctggaggaaaggagaacgggcagatggctgtaagtgatggctctgtgaagggcctgctgagtgtggtgcggggctggagccgtgggccagccccggacccgtgcctagtgccactggctctagaggcactggtaggtgcagtccatgtcttgcatgccagccgcgcacctcctcgtggcccagagcttcgtgccctgcttgagagctacttccatgtccttaatgctgactggccagctggtctgagctcaggccccgaagaggcccttgtcaccctccgggtcagcatgctcgacgccatccccatgatgctggcatgtgaagaccggccagtgctgcaagccaccttcctcagcaacaattgctttgaacacctcactcggctcattcagaacagcaagctgtacctgcagtcccgggcgccccccgagggggacagtgacctggctacccggttactgactgagcccgatgtccaaaaggtcctggaccaagacacagacgccattgcagtccatgtagtcagagtgctgacctgcatcatgagtgactccccctcggccaaggaggtgtttaaggagcgcatcggctaccctcacctgcaggaggttctgcagagccatggtccccccacccatcggctgttgcaagagctgctcaacatggctgtggagggtgaccacagcatgtgcccacctccaccaatccgcaacgagcagccggtactggtgctggcgcagtggctgccgtcattgcccaccgctgagctgcggctcttcctagcgcaacgcctcaggtggctctgtgacagctgccctgccagccgtgccacctgtgtgcaggcaggcctggtgggctgcctgttggagacactcagcacagggctagccctggaggcccgctgccaagagcagctgctggcactgctacaagcactgggccgtgtatcaataaggcccatggagctgcgtcacctgctgcgcccccggccaggattggactcggaaccaggcggagctgaggctggaaaggcccgacacgcaggtgctgtcatccgcacattatcaggcatggccaggcaccagggtcctgcacgtgctctgcgctactttgacctcacgcccagcatggcgggcatcatggtaccccctgtacagcgatggccagggcctggcttcacctttcatgcctggctctgtctgcaccctatggatacagcacctacccctgcccccacccgaccactccagcgaaagcagctgtacagcttctttaccagcagcggctcagggtttgaggccttcttcacggcggccgggaccctggtggtggctgtgtgcacacggaaggagtatttgaccatgagtttgcccgaagtgtcctttgccgactctgcctggcactgcgtggctatcgtccatgtgcctgggcgccggcccttcagccagaacctggtccatgtctacaaagacggccatctggtcaagacagcaccccttcgctgcccctccctcagtgagcctttctcctcctgctgtatcggctccgctggataccgcacaacgaccaccaccacagggctgcccacaccaccagtccccgccaccctggcctacactcaccccgccctcacccgctcccagtcagtcccagcctccacagggcttggctgggggtccgggctggtggcccccctgcaggagggcagcatcgactctaccctcgcaggcacccaggacactcggtggggcagccccacatccctggagggtgagctgggggctgtggccatctttcacgaagccctgcaggcgacggctctgaggaccctgtgcaccctggggcccaatgagacggcacccttcaagcctgagggggagctgcatgagctcagcaccaggctgctcctccattactcacctcaggcttgtaagaacaacatctgcctggacctgtcccccagtcatgggcttgatgggcgcctgacgggccacagagtggagacctgggatgtgaaggatgtggtgaactgcgttgggggtatgggtgccctgctgcccctgctggagcgagtagctgcacagcccaaagaggctgaagcaggtccagctgaaacgcatgacctcgtgggtcctgaactgacctctggtcacaacacccagggcctggttctcccattgggtaaatcttcagaggaacggatggagaggaacgcagtggctgcttttctgctgatgctgcggaacttccttcagggtcacatggtgaaccaagagagcctggtgcagtgccaggggcctgccatcatcggggccctcctgcgaaaggtcccaagctgggccatggacatgaacgtgctcatgtccgcccagctgctgatggagcaggtggcagctgagggcagcgggcccctcctgtacctactctaccagcatttgctcttcaactttcacctctggaccctcagtgacttcgccgtgcgcctcggtcacatccagtacatgtccagcatagttcgggagcacagacagaagctgcggaagaagtacggcgtccagtttatcttggatgctctgcgcacccactacagcccgcagcgggagcgccccctggctgctgacgacctacgcaccgtgcagacctccctcctgggcctggcgagggagttcctggtgcggagtctctcagcagatgacgtgcaggtcacgcagaccatgctgagctttttggcggccacaggcgatgacggtcaggcggtgggtgcgctggacctgctgctggccctgctgcacggttccctggtgcaggagtccttggctgtctttctgttggagccagggaacctcgaagtgctactggccctgctagtgcggccagggtcactgcccctgctgcccgatcgagtctgcaagatcctgcgcagactgcagcagaatgagcggctacctgagcggagccgccagcgcctccggctgcgggagtgtggtctccagggtctggttgcctgcttgcctgaggggactgtttccccccagctctgccagggcctctacaagctgttcctgggggcagattgcctgaacctctcagatctgctggctgtggtacagctgtccctccaggctgacctcagcgttcgcctagacatctgtcgccagcttttccacctcatctacggacagccagatgtagtgcggcttctggcccgacaggctggctggcaagatgtgctgacccggctatatgtcctggaggctgccacagccggcagcccccctccgtcttccccagagtcacctacctcccccaagccagccccacccaagccacccactgagtcacctgctgagccttcagatgtcttcctgccctcagaggccccctgccctgaccctgatggcttttaccatgctctctccccattctgcacgccctttgacctgggcctggaacggtctagtgtaggatcaggcaacactgctggtggtggcggcagcagtgggactcttactccagccagccagcccggcactccttcgccactggatgggccgcggccctttcctgctgctcctggccgccacagctccagtctctccaatgtgctggaggacggcagcctcccggagcccaccattagcggggatgatacctcgaacaccagcaacccacagcaaacctctgaggaagagttgtgcaatctgctcaccaacgtgctgttctcggtgacgtggcgtggcgtggaaggcagcgatgaggctgcctggcgggagcgtggccaggttttctcagtgctcacccagctgggggcctcagccacacttgtgcgcccaccagactgcatcaagcgcagcctcctggagatgatgctggagtcagccctgaccgacatcaaagaggcccccgtgggggtcctggccagcctcacccagcaagcgctttggctgctgcgtctgctgcaggacttcctgtgtgctgaaggccatggtaaccaggaactgtggagtgagaagctctttgaaggtgtatgcagcctacttgatcgcctgggagcctggccccacctggccaacggcacagctgatctccgtgagatggcgcagattggcctacggcttgtacttggctacatcctgctggaagacccacagctgcatgcccaggcctacgtgagattgcacatgctgctacagactgcagtgccagcccgccgcgaggaggcctgctatgtgctctccaagctggaggctgcactggggcgggtgctgaacacctcttccttggagtcagccactgatgaggcagggtccccacttgcagctgcagcagctgcagcagctgcagagcgctgctcctggctggtgccactggtgcgcacgctgctagaccgtgcctatgagccgctggggctgcagtggggactgccctccctgccacccaccaatggcagccccaccttctttgaagacttccaggctttttgtgccacacccgaatggcgccacttcatcgacaaacaggtacagccaaccatgtcccagttcgaaatggacacgtatgctaagagccacgaccttatgtcaggtttctggaatgcctgctatgacatgcttatgagcagtgggcagcggcgccagtgggagcgcgcccagagtcgtcgggccttccaggagctggtgctggaacctgcgcagaggcgggcgcgcctggaggggctacgctacacggcagtgctgaagcagcaggcaacgcagcactccatggccctgctgcactggggggcgctgtggcgccagctcgccagcccatgtggggcctgggcgctgagggacactcccatcccccgctggaaactgtccagcgccgagacatattcacgcatgcgtctgaagctggtgcccaaccatcacttcgaccctcacctggaagccagcgctctccgagacaatctgggtgaggttcccctgacacccaccgaggaggcctcactgcctctggcagtgaccaaagaggccaaagtgagcaccccacccgagttgctgcaggaggaccagctcggcgaggacgagctggctgagctggagaccccgatggaggcagcagaactggatgagcagcgtgagaagctggtgctgtcggccgagtgccagctggtgacggtagtggccgtggtcccagggctgctggaggtcaccacacagaatgtatacttctacgatggcagcactgagcgcgtggaaaccgaggagggcatcggctatgatttccggcgcccactggcccagctgcgtgaggtccacctgcggcgtttcaacctgcgccgttcagcacttgagctcttctttatcgatcaggccaactacttcctcaacttcccatgcaaggtgggcacgaccccagtctcatctcctagccagactcccagaccccagcctggccccatcccaccccatacccaggtacggaaccaggtgtactcgtggctcctgcgcctacggcccccctctcaaggctacctaagcagccgctccccccaggagatgctgcgtgcctcaggccttacccagaaatgggtacagcgtgagatatccaacttcgagtacttgatgcaactcaacaccattgcggggcggacctacaatgacctgtctcagtaccctgtgttcccctgggtcctgcaggactacgtgtccccaaccctggacctcagcaacccagccgtcttccgggacctgtctaagcccatcggtgtggtgaaccccaagcatgcccagctcgtgagggagaagtatgaaagctttgaggacccagcagggaccattgacaagttccactatggcacccactactccaatgcagcaggcgtgatgcactacctcatccgcgtggagcccttcacctccctgcacgtccagctgcaaagtggccgctttgactgctccgaccggcagttccactcggtggcggcagcctggcaggcacgcctggagagccctgccgatgtgaaggagctcatcccggaattcttctactttcctgacttcctggagaaccagaacggttttgacctgggctgtctccagctgaccaacgagaaggtaggcgatgtggtgctacccccgtgggccagctctcctgaggacttcatccagcagcaccgccaggctctggagtcggagtatgtgtctgcacacctacacgagtggatcgacctcatctttggctacaagcagcgggggccagccgccgaggaggccctcaatgtcttctattactgcacctatgagggggctgtagacctggaccatgtgacagatgagcgggaacggaaggctctggagggcattatcagcaactttgggcagactccctgtcagctgctgaaggagccacatccaactcggctctcagctgaggaagcagcccatcgccttgcacgcctggacactaactcacctagcatcttccagcacctggacgaactcaaggcattcttcgcagaggttgtcagtgatggtgtacccctggtgctagccctggtcccccaccggcagccccactccttcatcacccagggttccccagacctgttggtgactgtgagtgccagtgggctgctgggcacccacagctggttgccctatgaccgcaacataagcaactacttcagcttcagcaaagaccccaccatgggcagccacaagacgcagcgactgctgagtggcccgtgggtgccaggcagtggtgtgagtggacaagcactggcagtggccccggatggaaagctgctattcagcggtggccactgggatggcagcctgcgggtgactgcactaccccgtggcaagctgttgagccagctcagctgccaccttgatgtagtaacctgccttgcactggacacctgtggcatctacctcatctcaggctcccgggacaccacgtgcatggtgtggcggctcctgcatcagggtggtctgtcagtaggcctggcaccaaagcctgtgcaggtcctgtatgggcatggggctgcagtgagctgtgtggccatcagcactgaacttgacatggctgtgtctggatctgaggatggaactgtgatcatacacactgtacgccgcggacagtttgtagcggcactacggcctctgggtgccacattccctggacctattttccacctggcattggggtccgaaggccagattgtggtacagagctcagcgtgggaacgtcctggggcccaggtcacctactccttgcacctgtattcagtcaatgggaagttgcgggcttcactgcccctggcagagcagcctacagccctgacggtgacagaggactttgtgttgctgggcaccgcccagtgcgccctgcacatcctccaactaaacacactgctcccggccgcgcctcccttgcccatgaaggtggccatccgcagcgtggccgtgaccaaggagcgcagccacgtgctggtgggcctggaggatggcaagctcatcgtggtggtcgcggggcagccctctgaggtgcgcagcagccagttcgcgcggaagctgtggcggtcctcgcggcgcatctcccaggtgtcctcgggagagacggaatacaaccctactgaggcgcgctgaacctggccagtccggctgctcgggccccgcccccggcaggcctggcccgggaggccccgcccagaagtcggcgggaacaccccggggtgggcagcccaggggggtgagcggggcccaccctgcccagctcagggattggcgggcgatgttaccccctcagggattggcgggcggaagtcccgcccctcgccggctgaggggccgccctgagggccagcactggcgtctgcggccgcagcagcactttttgcacagtctggggcggggttccccggcttccaagtcgctgtttcgtcaaagcacgagggccgcctgtggccttaattcctaacggcggccccggttctcccttctcggcaataaaccaggcctagttttgtagctg

SEQ ID NO: 12427 - DNA, 1427 bp, Homo sapiens
accggcgtattcccgccctgcttttcgcccgccgttccgtggcgggaactgaggcgactgtggggacatcagtgatcgtaagtctcctgggcccgttattctcagattaggtgacggagctaagacttcgagaccatctcgtcctttttgtatcgcggaaacctgaggaacgagccggcggcggtgacctgcacgagaagccaggctaactgggtgaagtaccatgcaagcatttcttaaaggtacatccatcagtactaaacccccgctgaccaaggatcgaggagtagctgccagtgcgggaagtagcggagagaacaagaaagccaaacccgttccctgggtggaaaaatatcgcccaaaatgtgtggatgaagttgctttccaggaagaagtggttgcagtgctgaaaaaatctttagaaggagcagatcttcctaatctcttgttttacggaccacctggaactggaaaaacatccactattttggcagcagctagagaactctttgggcctgaacttttccgattaagagttcttgagttaaatgcatctgatgaacgtggaatacaagtagttcgagagaaagtgaaaaattttgctcaattaactgtgtcaggaagtcgctcagatgggaagccgtgtccgccttttaagattgtgattctggatgaagcagattctatgacctcagctgctcaggcagctttaagacgtaccatggagaaggagtcgaaaaccacccgattctgtcttatctgtaactatgtcagtcgaataattgaacccctgacctctagatgttcaaaattccgcttcaagcctctgtcagataaaattcaacagcagcgattactagacattgccaagaaggaaaatgtcaaaattagtgatgagggaatagcttatcttgttaaagtgtcagaaggagacttaagaaaagccattacatttcttcaaagcgctactcgattaacaggtggaaaggagatcacagagaaagtgattacagacattgccggggtaataccagctgagaaaattgatggagtatttgctgcctgtcagagtggctcttttgacaaactagaagctgtggtcaaggatttaatagatgagggtcatgcagcaactcagctcgtcaatcaactccatgatgtggttgtagaaaataacttatctgataaacagaagtctattatcacagaaaaacttgccgaagttgacaaatgcctagcagatggtgctgatgaacatttgcaactcatcagcctttgtgcaactgtgatgcagcagttatctcagaattgttaacgtgaatatatctggatggggggttttgtaaataatgaagttgtaataaaaataaaatgaccaaaagcacctttaaaaaaaaaaaaaaaaaaaaaaaaaaaaaaaaaaaaaa

SEQ ID NO: 12428 - DNA, 1395 bp, Homo sapiens
accggcgtattcccgccctgcttttcgcccgccgttccgtggcgggaactgaggcgactgtggggacatcagtgatcggtgacggagctaagacttcgagaccatctcgtcctttttgtatcgcggaaacctgaggaacgagccggcggcggtgacctgcacgagaagccaggctaactgggtgaagtaccatgcaagcatttcttaaaggtacatccatcagtactaaacccccgctgaccaaggatcgaggagtagctgccagtgcgggaagtagcggagagaacaagaaagccaaacccgttccctgggtggaaaaatatcgcccaaaatgtgtggatgaagttgctttccaggaagaagtggttgcagtgctgaaaaaatctttagaaggagcagatcttcctaatctcttgttttacggaccacctggaactggaaaaacatccactattttggcagcagctagagaactctttgggcctgaacttttccgattaagagttcttgagttaaatgcatctgatgaacgtggaatacaagtagttcgagagaaagtgaaaaattttgctcaattaactgtgtcaggaagtcgctcagatgggaagccgtgtccgccttttaagattgtgattctggatgaagcagattctatgacctcagctgctcaggcagctttaagacgtaccatggagaaggagtcgaaaaccacccgattctgtcttatctgtaactatgtcagtcgaataattgaacccctgacctctagatgttcaaaattccgcttcaagcctctgtcagataaaattcaacagcagcgattactagacattgccaagaaggaaaatgtcaaaattagtgatgagggaatagcttatcttgttaaagtgtcagaaggagacttaagaaaagccattacatttcttcaaagcgctactcgattaacaggtggaaaggagatcacagagaaagtgattacagacattgccggggtaataccagctgagaaaattgatggagtatttgctgcctgtcagagtggctcttttgacaaactagaagctgtggtcaaggatttaatagatgagggtcatgcagcaactcagctcgtcaatcaactccatgatgtggttgtagaaaataacttatctgataaacagaagtctattatcacagaaaaacttgccgaagttgacaaatgcctagcagatggtgctgatgaacatttgcaactcatcagcctttgtgcaactgtgatgcagcagttatctcagaattgttaacgtgaatatatctggatggggggttttgtaaataatgaagttgtaataaaaataaaatgaccaaaagcacctttaaaaaaaaaaaaaaaaaaaaaaaaaaaaaaaaaaaaaa

SEQ ID NO: 12429 - DNA, 3536 bp, Homo sapiens
atggggacgacggccccagggcccattcacctgctggagctatgtgaccagaagctcatggagtttctctgcaacatggataataaggacttggtgtggcttgaggagatccaagaggaggccgagcgcatgttcaccagagaattcagcaaagagccagagctgatgcccaaaacaccttctcagaagaaccgacggaagaagagacggatttcttatgttcaggatgaaaacagagatcccatcaggagaaggttatcccgcagaaagtctcggagcagccagctgagctcccgacgcctccgcagcaaggacagtgtagagaagctggctacagtggtcggggagaacggctccgttctgcggcgtgtgacccgtgctgcggctgcagctgccgcggctaccatggcattggctgcaccttcttcacccacccctgagtctcccacgatgctgactaagaagcccgaggataaccacacccagtgccagctggtgcctgtggtggagatcggcatcagtgagcgccagaatgctgagcagcatgtcacccagctcatgtccaccgagcctctgccccgcactctgtccccgactccagcttcagccacagctccaacctcccagggcatcccgacatcagatgaggaatcaacacctaagaagtcgaaggccaggatactggagtccatcacagtgagctccctgatggctacaccccaggaccccaagggtcaaggggtcgggacggggcggtctgcgtctaagctcaggattgcgcaggtctcccctggcccacgggactcgccagcctttccagattctccatggcgggagcgggtgctggctcccatcctgccggataacttctccacgcccacgggctctcgcacggactctcaatcggtgcggcacagcccgatcgccccgtcttccccgagtccccaagtcttagcccagaagtactctctggtggccaaacaggaaagtgttgtccgcagggcgagcagaaggcttgccaagaagactgccgaagagccagctgcctctggccgcatcatctgtcacagttacctggagaggctcctgaatgttgaggtgccccagaaagttggttctgagcagaaggaaccccccgaggaggctgagcctgtggcggcagctgagccagaggtccctgagaacaacggaaataactcgtggccccacaatgacacggagattgccaacagcacacccaacccgaagcctgcagccagcagcccggaaacaccctctgcagggcagcaagaggccaagacggaccaagcagatggacccagagagccaccgcagagtgccaggaggaagcgcagctacaagcaggccgtgagtgagctggacgaggagcagcacctggaggatgaggagctgcagccccccaggagcaagaccccttcctcaccctgcccagccagcaaggtggtacggcccctccggacctttctgcacacagtgcagaggaaccagatgctcatgacccctacctcagccccacgcagcgtcatgaagtcctttattaagcgcaacactcccctgcgcatggaccccaaggagaaggagcggcagcgcctggagaatctgcggcggaaggaggaggccgagcagctgcgcaggcagaaggtggaggaggacaagcggcggcggctggaggaggtgaagctgaagcgtgaggaacgcctccgcaaggtgctgcaggcccgcgagcgggtggagcagatgaaggaggagaagaagaagcagattgagcagaagtttgctcagatcgacgagaagactgagaaggccaaggaggagcggctggcagaggagaaggccaagaaaaaggcggcggccaagaagatggaggaggtggaagcacgcaggaagcaggaagaggatgcacgtaggctcaggtggctgcagcaggaggaggaagagcggcggcaccaagagctgctgcagaagaagaaggaagaggagcaggagcggctgcggaaggcggccgaggctaagcggctggcagagcagcgggagcaggagcggcgggagcaggagcggcgggagcaggagcggcgcgagcaggagcggcgcgagcaggagcggcgggagcaggagcggcgcgagcaggagcgacagctggcagagcaggagcgtcggcgggagcaggagcggctccaagccgagagggagctgcaggagcgggagaaggccctgcggctgcagaaggagcagctgcagagggaactggaggagaagaagaagaaggaagagcagcagcgtctggctgagcggcagctgcaggaggagcaagagaagaaagccaaggaggcagcaggggccagcaaggccctgaatgtgactgtggacgtgcagtctccagcttgtacctcatctcccatcactccgcaagggcacaaggcccctccccagatcaacccccacaactacgggatggatctgaatagcgacgactccaccgatgatgaggcccatccccggaagcccatccccacctgggcccgaggcaccccgctcagccaggctatcattcaccagtactaccagccaccgaaccttctggagctctttggaaccattctcccactggacttggaggatatcttcaagaagagcaagccccgctatcacaagcgcaccagctctgctgtctggaactcaccgcccctgcagggcgccagggtccccagcagcctggcctacagcctgaagaagcactgaggctggcctgcggccttcttggcagcctcgcctcctgtccatgtctatctgtctgtctgtcggtctgtgtcttggtctgttgccctccttcttggcatgccattgtggagggcttggccaggtgtatataaacgtcctctgtgctgggtgtttctgctgcaggtggcaggtggccccaggcctgtttggaggatgggctgggtgggtgggtggggaagaaatgggcccagccccacatggcctgcagacagtgctctgtaaatagttgttttaatttagctgaatgttagcattttagtctttggcattttagcgtttgggaggtagattaataaagtatattccttcaagcctgctgttgataccatgaagactgggcgcctcagtcccagccctgtagctgtgtgtcttgggccaccagtggcctgcaggacgaaggtactgttccatcacctgcggtgtgcctcaggatcaccaggtgcaggcccccaccctcggagatgctgctgcagtgagtggttccactgcctggataacccttgaggaacacgtcagttactgtcacgatggggcaggtggagctccttcctattttttggggtgctccctgtttgtaaaggggagtttgttcattgggaaagacctgggtcttgacacggccctgccacttagtcccctaccctctccattccccaggctccacccgtgctgctcaagtgcaaatggacttgagagtatttatgtgctggtgaagtatgaggtctgagtagaaaagg

SEQ ID NO: 12430 - DNA, 3609 bp, Homo sapiens
gaatcctgctttttttttttctttgagacacggtctcgctctgtcacccttgctggagtgcagtggtgcaatcacagatcacggcagtgtctaattcctgggctcaagtgaaccttttgcatcagcctcctgaatagctgagaccacaggatatgaaagatggcaagtccagatagaagtaaacggaagatattaaaagccaaaaagacaatgcccctaagttgccggaagcaagtagagatgctgaataagtcaaggaatgttgaagcgctgaaaacagcaattgggagtaatgttccaagcggtaatcagagtttcagtcctagtgtcataactaggacgactgaaataaccaaatgtagcccttctgaaaatggtgcatcctcattggactctaataaaaattcaatatcagagaaaagtaaagtattctctcagaattgcataaaaccagtagaagaaattgttcattcagaaacaaaattggaacaagttgtttgttcgtaccaaaagccaagtagaacaacagaatcccccagcagagtcttcacagaagaggcaaaagattcactgaacacttctgaaaacgattctgagcatcagacaaatgtaacaagatccctttttgagcatgagggggcttgtagtctaaagtccagttgctgtccacccagtgtattgagtggtgttgttcagatgccagagtctacagtaaccagtaccgtgggtgacaagaaaactgaccagatggttttccatttagaaacaaactccaattcagaatcacatgataaaaggcaaagtgacaacattttatgttcagaagactcaggttttgtgcctgttgagaaaacacctaatttggtgaattcagtcacttctaacaactgtgctgatgacattttgaaaactgatgagtgtagtagaaccagtatttcaaattgtgaaagtgcagactcaacatggcagtcatcacttgacactaataacaacagccattatcaaaagaagaggatgttttcagaaaacgaggaaaatgttaaacgcatgaaaacttcagagcaaattaatgaaaatatttgtgtaagtttggaaaggcaaacagcattcctggaacaggtcagacatttgattcagcaggagatctatagcataaattatgaactatttgataagaaactgaaagaattgaaccaacgcattgggaagacagagtgcagaaataagcatgaaggaatagctgataaacttttggcaaaaatagcaaaacttcaaagacgtattaaaacagtattattatttcaaaggaattgtttgaaaccaaacatgttatccagtaatggagcctctaaggttgcaaattcagaggctatgattttggataagaatcttgagtcagttaatagtccaattgaaaagtcttctgtgaattatgagccttctaacccttccgaaaaaggaagtaaaaaaattaatttgtcatcagatcaaaataagtctgtttctgaaagtaacaatgatgatgttatgttgatttctgtggaaagtcctaatttgacaactccaattacatcaaatccaacagataccagaaaaattacatcaggaaattctagcaattctcccaatgctgaagttatggctgtacagaagaaacttgattctataattgatttgacaaaagaaggcctatccaactgcaatacagaaagtccagtatcccccctggagtcacattcgaaagctgcttcaaactcaaaggaaacaaccccattggcacaaaatgcagtccaggttcctgagtcctttgagcacctgccacctctcccagaaccaccagcaccactacctgaattagtagacaaaacccgagacacacttcctccccagaagcctgagctcaaagtgaaacgggttttcagacccaatggcattgccctgacttggaatataaccaaaatcaatcccaagtgtgctcctgtagaaagctaccacctcttcctgtgtcatgagaactctaataataagttgatttggaagaagattggagaaattaaagctttaccactccccatggcctgtactttatctcagtttttagcttccaacagatactattttactgtccaatcaaaagatatttttggacgatatggaccattctgtgatataaaatctatccctgggttttctgaaaatcttacgtaaaaggtgtttaataatgatatactactttttttttcatatttgtttgtttgcaatgttactgtaatactatttgccattgtaaaaggccagctcagattgtgagccctttctattgggacagtcctcttctatatgttttaagtggccagtaatttaatgaatttctggtttgtattaaatatgtccttccaatggataagttctaaaacatacgctatcattggcccatgttgctgaggtgcattgtgaacaatacctttagtgactgtggaactgctgcttctatcagaagacctaggatacaagcagccactgtttcctccgttaacaatcagcttttagtaacctgctgtggtcagcatagctacaggaaaagtcagcccttgactgagggccagatcatccctggagtgcacctctactaagattttatgaaaagatgacatgttgggctgcatgataaaagttaattataaaaattaaaagatttttttttttgagatggaatattgctctgttgcccaggctggagtacagtggtcactgcaacctccatctccctggttcaagcaattctcctatgtcagcctcccaagtagctgggactatagtcacttgccaccatgcccggctaatttatttttagtagagatgaggtttcaccttgttggtcaggctggtctcaaactcctgacctcaggggatccacccgcctcggcctcccgaagtgctgggattataggcgtaagccaccatgcctggccaaaaattaaaagattttatgaaacgaaatggcttcccattctttctattcagcttctaagtgggctattcatttgtgctctcctcttttttgttttgttttgcactttgtcaatcatttggggaaatagcctggaggtctttcctgaatctgtttgtagacataataaaatttgtgtgctgtgtacacaaaaacataatgtatcttatgaaagcattacccaacctgtttgagttgagaatgcatttgtccacctttgatttgaggctttagtttgctgatttcctaaatgctaccctttgatcatttcctggccaccatcacaatactaaggggctcagatgtgtcttgtgcccacctcttcctgagaagagatggaagtggagctgtgactagtacaagcagcccaagaaactctgaacggggcccaatggaggcaaacttgagcaaataattgggatgataagaaacaaaaataatcccaactgtttgaaagttcgaaagaggggcattcttttctggtacatggtgagagttcaggctccagagactcaaaacggaatggttttccttggcattttgtaaatgctctcacatctgtagcaataaagctgttattttctgcaaaaaaaaaaaaa

SEQ ID NO: 12431 - DNA, 3362 bp, Homo sapiens
cctttttgcaaatggtagttgatttttgcagaaggtttgtggccagatcgctatgtataatactgatgaagcatttttgttccagctctgtctcggaagacctaggctgtagacgtggggatttcagtaggaaacattatggatctgtggagctgcttatttccagtgatgctgatggagccatccaaagggctggaagattcagagtggaaaatggctcttcagatgagaatgcaactgccctgcctggtacttggcgaagaacagacgtgcacttagagaacccagaataccacaccagatggtatttcaaatattttttaggacaagtccgtcagaactacattggaaacgatgccgagaagagccctttcttcttgtccgtgaccctttctgaccaaaacaatcaacgtgtccctcaataccgtgcaattctttggagaaaaacaggtacccagaaaatatgccttccctacagtcccacaaaaactctttctgtgaagtccatcttaagtgccatgaatctggacaaatttgagaaaggccccagggaaatttttcatcctgaaatacaaaaggacttgctggttcttgaagaacaagagggctctgtgaatttcaagtttggggttctttttgccaaagatgggcagctcactgatgatgagatgttcagcaatgaaattggaagcgagccttttcaaaaatttttaaatcttctgggtgacacaatcactctaaagggctggacgggctaccgtggcggtctggataccaaaaatgataccacagggatacattcagtttatactgtgtaccaagggcatgagatcatgtttcatgtttccaccatgttgccatattccaaagagaacaaacagcaggtggaaaggaaacgccacattggaaacgatatcgtcaccattgtgttccaagaaggagaggaatcttctcctgcctttaagccttccatgatccgctcccactttacacatatttttgccttagtgagatacaatcaacaaaatgacaattacaggctgaaaatattttcagaagagagcgtaccactctttggccctcccttgccaactccaccagtgtttacagaccaccaggaattcagggactttttgctagtgaaattaattaatggtgaaaaagccactttggaaaccccaacatttgcccagaaacgtcggcgtaccctggatatgttgattagatctttacaccaggatttgatgccagatttgcataagaacatgcttaatagacgatcttttagtgatgtcttaccagagtcacccaagtcagcgcggaagaaagaggaggcccgccaggcggagtttgttagaatagggcaggcactaaaactgaaatccattgtgagaggggatgctccatcaagcttggcagcttcagggatctgtaaaaaagagccgtgggagccccagtgtttctgcagtaatttccctcatgaagccgtgtgtgcagatccctggggccaggccttgctggtttccactgatgctggcgtcttgctagtggatgatgaccttccatcagtgcccgtgtttgacagaactctgccagtgaagcaaatgcatgtgcttgagaccctggaccttctggttctcagagcagacaaaggaaaagatgctcgcctctttgtcttcaggctaagtgctctgcaaaagggccttgaggggaagcaggctgggaagagcaggtctgactgcagagaaaacaagttggagaaaacaaaaggctgccacctgtatgctattaacactcaccacagcagagagctgaggattgtggttgcaattcggaataaactgcttctgatcacaagaaaacacaacaagccaagcggggtcaccagcacctcattgttatctcccctgtctgagtcacctgttgaagaattccagtacatcagggagatctgtctgtctgactctcccatggtgatgaccttagtggatgggccagctgaagagagtgacaatctcatctgtgtggcttatcgacaccaatttgatgtggtgaatgagagcacaggagaagccttcaggctgcaccacgtggaggccaacagggttaattttgttgcagctattgatgtgtacgaagatggagaagctggtttgctgttgtgttacaactacagttgcatctataaaaaggtttgcccctttaatggtggctcttttttggttcaaccttctgcgtcagatttccagttctgttggaaccaggctccctatgcaattgtctgtgctttcccgtatctcctggccttcaccaccgactccatggagatccgcctggtggtgaacgggaacctggtccacactgcagtcgtgccgcagctgcagctggtggcctccaggtcggatatatacttcacagcaactgcagctgtgaatgaggtctcatctggaggcagctccaagggggccagtgcccgaaattctcctcagacacccccgggccgagatactccagtatttccttcttccctgggggaaggtgaaattcaatcaaaaaatctgtacaagattccacttagaaacctcgtgggcagaagcatcgaacgacctctgaagtcacccttagtctccaaggtcatcaccccacccactcccatcagtgtgggccttgctgccattccagtcacgcactccttgtccctgtctcgcatggagatcaaagaaatagcaagcaggacccgcagggaactactgggcctctcggatgaaggtggacccaagtcagaaggagcgccaaaggccaaatcaaaaccccggaagcggttagaagaaagccaaggaggccccaagccaggggcagtgaggtcatctagcagtgacaggatcccatcaggctccttggaaagtgcttctacttccgaagccaaccctgaggggcactcagccagctctgaccaggaccctgtggcagacagagagggcagcccggtctccggcagcagccccttccagctcacggctttctccgatgaagacattatagacttgaagtaacagagttgaatctcatttgccatctttagttttcttatggaggtttatactctttaaacagttctgatgtaatttctcaacaaaatgtggcttttagcctgtcagtgatctattggaccaaaccttctgcacactcggccagttccctctccaatgtccggtgccatctttcctgacctttgtttctttctgttcaggaaccatcagtccccttgtaataaaggtggtagatttcattgaggttttagattgaaactttgaataaatcaaaaatactcattcttatttactgcaaaaaaaaaaaaaaaa

SEQ ID NO: 12432 - DNA, 4826 bp, Homo sapiens
gggtcgaggtcgacggtatcgataagttttttttttttttttttttttttttttcctttcccctccccctccctctccaagccggaggggtcctgaggtgacagcgcctgcaactgaaatttcagcagcgggagaagatggacaagagaaagctcgggcgacggccatcttcatccgaaatcatcacagaaggaaaaaggaaaaagtcatcttctgatttatcggagataagaaagatgttaaatgcaaaaccagaggatgtccatgttcaatcaccactgtccaaattcagaagctcagaacgctggactctccctttgcagtgggaaagaagcctaaggaataaagtcatctctctagaccataaaaataaaaaacatatccgagggtgtcctgttacttccaggtcatcaccagaaaggatacccagagttatattgacgaatgtcctgggaacggagttaggaagaaaatacataaggaccccacctgtaactgagggaagtttgagtgatacagacaacttgcaatcagagcaactttcttcatcatctgatggcagcctagaatcttatcaaaatctaaaccctcacaagagctgttatttatctgaaaggggctcacaacgaagtaagacagtagatgacaattctgcaaagcagactgcgcacaataaagaaaaacgaagaaaggatgatggcatttctcttttaatatctgatactcagcctgaagaccttaacagtggaagtagaggttgtgatcatctcgaacaggaaagcagaaacaaggatgttaaatattctgattcaaaagtggaactcactctgatttccaggaagacaaagagaaggcttagaaataatttacctgattctcaatattgtacttctttggataagtcaacagaacagacaaaaaaacaagaagatgactcaacaatatccactgagtttgaaaggccaagtgaaaactatcatcaggatccaaaactgcctgaagaaattacaactaaacctacaaaaagtgattttactaagctatcctcacttaacagtcaggagttgactttgagtaatgccaccaaaagtgcctctgccggttcaaccactgaaaccgttgagtactctaattccattgatattgtggggatttcttccctggttgagaaggatgagaatgagttgaataccatagaaaagcctattctaagaggacataatgaagggaaccaatcactgatctcagctgaaccaattgttgtttccagtgatgaagaaggacctgttgaacataaaagttcagaaattcttaagttacaatctaagcaagaccgtgagacaactaatgaaaatgagagtacttctgaatcagcattgttagaactaccattgattacatgtgaatctgtacagatgtcatctgaattatgcccatataatcctgtcatggagaacatttccagtattatgcctagtaatgagatggatctacaactggattttatatttacttctgtttatattggtaaaataaaaggagcttctaaaggttgtgttacaatcacaaaaaaatatattaagatcccatttcaagtgtccctgaatgagatttcattgctagtggataccacacatttaaagcggtttgggttatggaaaagtaaggatgataatcacagtaaaaggagtcatgctattcttttcttctgggtctcttcagattatcttcaagagattcagacccaattagaacactctgtattaagccagcaatcaaaatctagtgaattcattttccttgaactacacaatcctgtttcacagagagaagaattgaagctgaaagatattatgacggaaataagtataatcagtggagaattagagctttcttacccgttgtcttgggttcaggcatttcctttgtttcagaacctctcttcaaaagaaagttcttttattcattattactgtgtttcaacttgttctttccctgctggtgttgctgttgctgaagaaatgaagctgaaatcagtatctcagccctcaaacacagatgcggccaagcctacttacaccttcctgcagaagcaaagtagcggttgctactccctttctattacatctaatccagatgaagaatggcgggaagtcaggcacactggacttgttcagaagttgattgtatatcctccaccacctactaaggggggattgggagtaactaatgaagatctggagtgtttagaagaaggagagtttcttaatgatgtaatcattgatttttaccttaagtatcttatattggagaaggcatcagatgaacttgttgaacgaagtcacatttttagtagctttttctataaatgcttgacaagaaaggaaaataatttaacagaagataatccaaatctttcaatggcacagagaagacataaaagagtaagaacatggactcgtcacataaacatttttaataaagattacatctttgtacctgtaaatgagtcgtctcactggtatctcgcagtcatttgttttccatggttagaagaagctgtgtatgaagattttccacaaactgtatcccagcagtcccaggctcagcagtcccaaagtgacaacaaaacaatagataatgatctacgtactacttcgacactgtctttgagtgcagaggattcccaaagtaccgagtcgaatatgtcagtaccaaagaaaatgtgtaaaaggccatgtattcttatactagactccttgaaagctgcttctgtacgaaacacagttcagaatttacgagagtatttagaggtagagtgggaagttaaactaaaaactcatcgtcaattcagcaaaacaaacatggtggatctatgccctaaagttcctaaacaggacaatagcagtgattgtggagtatatttattgcagtatgtggaaagcttcttcaaggatcctattgttaactttgaacttccaattcatttggagaagtggtttcctcgtcatgtaataaagaccaaacgggaagatattcgagagctcatcttgaaacttcatttacagcaacagaagggcagcagtagctagttaatctgtacaaacatgacacagatgttctctaagattactggaaagccccttaccagcatttgtgttagccagctcacagagaagaaaataacttgcagtagttttataataagtcattggaacattatttaaaatatgtaggacacattattagaattgttgggatctcatagatggaatgggaatgggggtgatatagataaacttactagatataaattaaaattttataaatatttcatatttttctgagtaaatatgattggattatgcaacagcatatgtaatatgggaatgttttgtagataataaaacttacatgatctgtacttccacgtgactgggtgctgaggggagttaaagcctccctggtgccagccccagtgcttgtcaaatttgctgacaggtcacatcatattgtaattctattctttgcagctcaagcatgcagtatgaatactgtgtattttttaaaaaaataatttagtatcaaggcttcagaaaatgccatttacggcatcccttctgtatgtaacaaaaagacattcataatgttaggaagatgataaaaattcgctcttttaaagtgcagcttattattctcaattgctaaatacgattactctgctttttttttttcatttcttttgatgtcatatgtgagtatcttataatttagttcatttgttcagggtaaaatttgaaacaaaaaattttacctgtgcaaaatagttttttaaaaattatacatgtagctcaacttgaggtactgctatataaatattcactcacattatcacggaatttatgtatagtttctctaatatagaagataaaattggtgtcctcataactttaacaaagaaaaccctcagtcctatttattaatgggtagaattaaatatataattttatagctcagtttacccagtattcatctgcaaagccagattgctctcattgcttttatatttttaaattgtagcttttagagacctatgatcctcatggaacttaattttttattaaatattcaggtaacagttctgaattcatgtgataatggtggcattatatatgattaaacacttcagaactttctaatgttatcaggagtattttgagggagatatgattatattgtattttctcagataagaaaaatgttttttaacaatattattttaatctgttttaagcatctcttagatttacattataactacataaagcagtgaagcaaaggcaaattaagataaagctagaaagtctgaacattttatttcaaaatcatacgaatcggggtcagttaagcctcagtattcttagcttttgttgattttggcactatctttatattattaaatatatttgttgtttggatatttcatataaagatggctataattacatatttcattcccaatttgtgtgtgttggggggtacttttaaaggtgactattgttttgtacatctaattttgggaaaccaagtctataagacatcttgtgatttcttaatgtttttgtttgtatgtttttcaaagatatcactgtcctttatcatgttttgaagattgtttaaaattcattttcctaaattaatgtgcaagtaatgttttgaggatatcggtgttttatattaaacatatttccaattcaaaaaaaaaaaaaaaaaaacttatcgataccgtcgacctcgatgatgatgatgatgatgatgatgtcgac

SEQ ID NO: 12433 - DNA, 4567 bp, Homo sapiens
ggcgcatgcgccacggtggccgacttgaaccgaggcttttattgctgtagtttatttccacccccttccctcctgtttctctctctccttctctctctctctctctctctctcttttttttccgccctagctggggctgtgttggaggagaggaagaaagagagacagaggattgcattcatccgttacgttcttgaaatttcctaatagcaagaccagcgaagcggttgcacccttttcaatcttgcaaaggaaaaaaacaaaacaaaacaaaaaaaacccaagtccccttcccggcagtttttgccttaaagctgccctcttgaaattaattttttcccaggagagagatgtcttatcaggggaagaaaaatattccacgcatcacgagcgatcgtcttctgatcaaaggaggtaaaattgttaatgatgaccagtcgttctatgcagacatatacatggaagatgggttgatcaagcaaataggagaaaatctgattgtgccaggaggagtgaagaccatcgaggcccactcccggatggtgatccccggaggaattgacgtccacactcgtttccagatgcctgatcagggaatgacgtctgctgatgatttcttccaaggaaccaaggcggccctggctgggggaaccactatgatcattgaccacgttgttcctgagcctgggacaagcctgctcgctgcctttgaccagtggagggaatgggccgacagcaagtcctgctgtgactactctctgcatgtggacatcagcgagtggcataagggcatccaggaggagatggaagcgcttgtgaaggatcacggggtaaattccttcctcgtgtacatggctttcaaagatcgcttccagctaacggattgccagatttatgaagtactgagtgtgatccgggatattggcgccatagcccaagtccacgcagaaaatggcgacatcattgcagaggagcagcagaggatcctggatctgggcatcacgggccccgagggacatgtgctgagccgacctgaggaggtcgaggccgaagccgtgaatcgtgccatcaccatcgccaaccagaccaactgcccgctgtatatcaccaaggtgatgagcaaaagctctgctgaggtcatcgcccaggcacggaagaagggaactgtggtgtatggcgagcccatcactgccagcttgggaacggacggctcccattactggagcaagaactgggccaaggctgctgcctttgtcacctccccacccttgagccctgatccaaccactccagactttctcaactccttgctgtcctgtggagacctccaggtcacgggcagtgcccattgcacgtttaacactgcccagaaggctgtaggaaaggacaacttcaccctgattccggagggcaccaatggcactgaggagcggatgtccgtcatctgggacaaggctgtggtcactgggaagatggatgagaaccagtttgtggctgtgaccagcaccaatgcagccaaagtcttcaacctttacccccggaaaggccgcattgctgtgggatccgatgccgacctggtcatctgggaccccgacagcgttaaaaccatctctgccaagacacacaacagctctctcgagtacaacatctttgaaggcatggagtgccgcggctccccactggtggtcatcagccaggggaagattgtcctggaggacggcaccctgcatgtcaccgaaggctctggacgctacattccccggaagcccttccctgattttgtttacaagcgtatcaaggcaaggagcaggctggctgagctgagaggggttcctcgtggcctgtatgacggacctgtgtgtgaagtgtctgtgacgcccaagacagtcactccagcctcctcggccaagacgtctcctgccaagcagcaggccccacctgtccggaacctgcaccagtctggattcagtttgtctggtgctcagattgatgacaacattccccgccgcaccacccagcgtatcgtggcgccccccggtggccgtgccaacatcaccagcctgggctagagctcctgggctgtgccgtccactggggactggggatgggacacctgaggacattctgagacttctttcttccttcctttttttttttttgtttttttttttaagagcctgtgatagttactgtggagcagccagttcatggggtcccccttggggccccacaccccgtctctcaccaagagttactgattttgctcatccacttccctacacatctatgggtatcacacccaagactacccaccaagctcatacagggaaccacacccaacacttagacatgcgaacaagcagcccccagcgagggtctccttcgccttcaacctcctagtgtctgttagcatcttccttttcatggggggagggaagataaagtgaattgcccagagctgcctttttcttttctttttaaaaattttaagaagttttctttgtggggctggggaggggccggggtcagggagagtcttttttttttttttttttaaatactaaattggaacatttaattccatattaatacaaggggtttgaactggacatcctaatgatgcaattacgtcatcacccagctgattccgggtggttggcaaactcatcgtgtctgtcctgagaggctccacaatgcccacccgcatcgccattctgtagtcttcagggtcagctgttgataaaggggcaggcttgcgttattggcctagattttgctgcagattaaatcctttgaggattctcttctcttttaccatttttctgcgtgctctcactctctctttctctctctagctttttaattcatgaatattttcgtgtctgtctctctctctctctgtgtttcctccagcccttgtctcggagacggtgttttcctcccttgccccattatcttttcacctcccaggtctaccatttcatggtggtcgttgggtccgcctaaaggatttgagcgtttgccattgcaagcatagtgctgtgtcatcctggtccatgtaggactggtgctaaccacctgccatcatgaggatgtgtgctagagtgtgggaccctggccaagtgcaggaatgggccatgccgtctcacccacagtatcacacgtggaaccgcagacagggcccagaagctttagaggtatgaggctgcagaaccggagagattttcctctgtgcagtgctctctggctaaagtcacggtcaaacctaaacaccgagcctcattaacccaagtgaaccaaccaaagtcaccagttcagaagtgctaagctaataggagtctgacccgagggcctgctgcttcctggttaagtatcttttgagattctagaacacatgggagctttttattttcggggaaaaaccgtatttttttcttgtccaattatttctaaagacacactacatagaaagaggccctataaactcaaaaagtcattgggaaacttaaagtctattctactttgcaagaggagaaatgtgttttatgaacgatagatcacatcagaactcctgtggggaggaaaccttataaattaaacacatggcccccttagagaccacaggtgatgtctgtctccatccttccctctccttttctgtcacctttccccctagctggctcctttggacctacccctgtccttgctgacttgtgttgcattgtattccaaacgtgtttacaggttctcttaagcaatgttgtatttgcaggcttttctgaataccaaatctgctttttgtaaagcgtaaaaacatcacaaagtaggtcattccatcaccacccttgtctctctacacattttgcctttggggatctggttggggttttgggttttttgttgttgttgtttatttgttattttaaaggtaaattgcacttttaaaaaaataattggttgacttaatatatttgctttttttctcacctgcacttagaggaaatttgaacaagttggaaaaaaacaatttttgtttcaattctaagaaacacttgcagctctagtattcacttgagtcttcctgtttttcctgtaccgggtcatggtaatttttggttgttttggttgttttcttaaaaaacaagttaaaacctgacgatttctgcaggctgtgtaagcatgtttacctgttggcttgctttgtgtgtctgttaaatgaatgtcatatgtaaatgctaaaataaatcgacagtgtctcagaactgaataactgcagtgacttgatgctctaaaacagtgtaggatttaagaatagatggtttttaatcctggaaattgtgattgtgacccatgagtggaggaactttcagttctaaagctgataaagtgtgtagccagaagagtacttttttttttgtaaccactgtcttgatggcaaaataattatggtaaaaaacaagtctcgtgtttattattccttaagaactctgtgttatattaccatggaacgcctaataaagcaaaatgtggttgtttcaggaaaaaaaaaaaaaaaaaaaaaaaaaaa

SEQ ID NO: 12434 - DNA, 1921 bp, Homo sapiens
atttggagtcaggcctggctgttgctcaggtgaccagcttgtgtctctgggagggcgctgctttccccggccacccggcgcgatgatccagaatgtcggaaatcacctgcgacggggcttggcctctgtgttctccaaccgcacatcccggaagtcagccttacgtgcggggaacgacagtgccatggcagacggcgagggataccggaaccccacggaggtgcagatgagccagctggtgctgccctgccacaccaaccaacgtggtgagctgagcgtcgggcagctgctcaagtggattgacaccacggcttgcctgtccgcggagaggcacgctggctgcccctgtgtcacagcttccatggatgacatctattttgagcacaccattagtgttggacaagtggtgaatatcaaggccaaggtgaaccgggccttcaactccagcatggaggtgggcatccaggtggcctcggaggacctgtgctctgagaagcagtggaatgtgtgcaaggccttggccaccttcgtggcccgccgagagatcaccaaggtgaagctgaagcagatcacgccgcggacagaagaggagaagatggagcacagtgtggcggctgagcgccggcgcatgcgccttgtctatgcagacaccatcaaggacctcctggccaactgcgccattcagggcgatctggagagcagagactgtagccgcatggtgccggctgagaagacccgtgtggagagtgtggagctggtcctgcctccccacgccaatcaccagggcaacacctttgggggccagatcatggcctggatggagaatgtggccaccattgcagccagccggctctgccgtgcccaccctacgctgaaggccattgaaatgttccacttccgaggcccgtcccaggtcggcgaccgtctggtgctcaaagccatcgtgaacaatgccttcaaacatagcatggaggtgggcgtgtgcgtggaggcctatcgccaggaggctgagacccaccggcgccacatcaacagtgcctttatgacctttgtggtcctggacgcagatgaccagccccagttgctgccctggattcggccccagcccggcgatggtgagcggcggtaccgagaggccagtgccagaaagaagatccgcctggacaggaagtacatcgtgtcctgtaagcagacagaggtgcccctctccgtcccctgggaccctagcaaccaggtgtacctgagctacaataacgtctcctccttgaagatgcttgtggccaaggacaactgggtgctgtcctcggagatcagtcaggtccgcctgtacactctggaggatgacaagttcctctccttccacatggagatggtggtgcatgtggatgcagcccaggccttcctgctgctctcggacctgcgtcagaggccagagtgggacaagcactaccggagcgtggagctagtgcagcaggtagacgaggacgacgccatctaccacgtcaccagccctgccctcggaggtcacacaaagccccaggacttcgtgatcctggcctcgaggcggaagccttgtgacaatggggacccctatgtcatcgcgctgaggtcggtcacgctgcccacacaccgagagacgccagagtacagacgcggagagaccctctgctcaggcttctgcctctggcgcgagggggaccagctgaccaagtgctgctgggttagggtctccctgactgagctggtctcggcaagtggcttctattcctgggggctcgaatccaggtcaaagggtcgcaggagcgacggttggaatggaaaactagctggaggacacctgagtactcttaaagcaatccccgtggccaaaatcaacagccgatttggataccttcaagacacctgaaaccttatcatgagc

SEQ ID NO: 12435 - DNA, 3082 bp, Homo sapiens
atttggagtcaggcctggctgttgctcaggtgaccagcttgtgtctctgggagggcgctgctttccccggccacccggcgcgatgatccagaatgtcggaaatcacctgcgacggggcttggcctctgtgttctccaaccgcacatcccggaagtcagccttacgtgcggggaacgacagtgccatggcagacggcgagggataccggaaccccacggaggtgcagatgagccagctggtgctgccctgccacaccaaccaacgtggtgagctgagcgtcgggcagctgctcaagtggattgacaccacggcttgcctgtccgcggagaggcacgctggctgcccctgtgtcacagcttccatggatgacatctattttgagcacaccattagtgttggacaagtggtgaatatcaaggccaaggtgaaccgggccttcaactccagcatggaggtgggcatccaggtggcctcggaggacctgtgctctgagaagcagtggaatgtgtgcaaggccttggccaccttcgtggcccgccgagagatcaccaaggtgaagctgaagcagatcacgccgcggacagaagaggagaagatggagcacagtgtggcggctgagcgccggcgcatgcgccttgtctatgcagacaccatcaaggacctcctggccaactgcgccattcagggcgatctggagagcagagactgtagccgcatggtgccggctgagaagacccgtgtggagagtgtggagctggtcctgcctccccacgccaatcaccagggcaacacctttgggggccagatcatggcctggatggagaatgtggccaccattgcagccagccggctctgccgtgcccaccctacgctgaaggccattgaaatgttccacttccgaggcccgtcccaggtcggcgaccgtctggtgctcaaagccatcgtgaacaatgccttcaaacatagcatggaggtgggcgtgtgcgtggaggcctatcgccaggaggctgagacccaccggcgccacatcaacagtgcctttatgacctttgtggtcctggacgcagatgaccagccccagttgctgccctggattcggccccagcccggcgatggtgagcggcggtaccgagaggccagtgccagaaagaagatccgcctggacaggaagtacatcgtgtcctgtaagcagacagaggtgcccctctccgtcccctgggaccctagcaaccaggtgtacctgagctacaataacgtctcctccttgaagatgcttgtggccaaggacaactgggtgctgtcctcggagatcagtcaggtccgcctgtacactctggaggatgacaagttcctctccttccacatggagatggtggtgcatgtggatgcagcccaggccttcctgctgctctcggacctgcgtcagaggccagagtgggacaagcactaccggagcgtggagctagtgcagcaggtagacgaggacgacgccatctaccacgtcaccagccctgccctcggaggtcacacaaagccccaggacttcgtgatcctggcctcgaggcggaagccttgtgacaatggggacccctatgtcatcgcgctgaggtcggtcacgctgcccacacaccgagagacgccagagtacagacgcggagagaccctctgctcaggcttctgcctctggcgcgagggggaccagctgaccaaggtatcctactacaaccaggccaccccaggtgttctcaactatgtgaccaccaacgtggccggcctctcctctgagttctacaccaccttcaaggcttgtgagcagtttctcttggacaaccggaatgatctggcccccagcctccagaccctctagatgccctcagtggccacatcatgcccactcccactccatcctgtccccaaggactcacatacagtgcctggagaaagccaaagacctttatttcttcctgcctccccgtgggaagcctccgccctgaggtccgctggcccaccacccctgggtgctcagtttctaccaacatgagccagcaagtccttgtggtagccctggggtagcctgtagtagactcgggtcctgtccacagccctagctgccagcaatgctgtcctcacagaggcatagtcgcccccagctgggttgtgctccactgtgacggtggcccggggggaggatgccagcagcctgcctatggctccagctgtgctgtggcccagcagcatggcctgcatctggaaggacacaggttgccagagcccctggcacaactctagcatatctgtgagcagctgttccctgtagccactgcccagcacctcctcaggccagcctggtgccacagtcacgtgggggaagacctcagccacagctgtaagcagctctctgccagccacatggccggggaccgaaaaactcccgtgggagattttggccccaacccacacaggccaatgcaagaggccaaggctggagaggcgtgccagcaaggccagggatggccggagggctgcgggctccgctatttgcaaatggatgccccagtgtccgggatgtgtggccagctgctgcaggcaggactccagcgtcaggatgttgccacttggagtatgaacaatgggcacggggttttcagccacagttccctcgaggccagtgttcagcaggatcatgccttctgtgtctggaagaggcggcagaggcaacagtgtttaggatttgggttatcataaggtgttaagagtcccttgttaaaggggcagtgggagttatggggtcatcaaggaccttgcctctctggaatctgtcaacccagttttgggctccaggtggatgggttgctttataaatgtgcctggtgcatgagaaactcttgtttcagctcttggcctttacccatgactcagcctgggggctggtgccggccttgcctgcagcaatgtagctgaggactggtctgaaggccaggagccctgtgctcttgacatcactgtactccctctccctccccgcaaccctgccccaccttgcatccagggtatggtgtaaataaacctgtgttgccatggc

SEQ ID NO: 12436 - DNA, 1717 bp, Homo sapiens
tcgctcgctcctccttcgcttcgcctcgccgccgccatgcaggaaatcatcgccagcgtggaccacatcaagtttgacttggagatcgcggtggagcagcagctgggggcgcagccgctgcccttccccggcatggacaagtcgggcgctgctgtctgtgaattctttttgaaagctgcctgcggcaaagggggcatgtgtccgtttcgccacatcagtggtgagaagacagttgtgtgcaaacactggctgcgtggcctatgcaagaaaggggaccagtgtgagttcctgcatgagtatgacatgaccaagatgcccgagtgctacttctactccaagttcggggagtgcagcaacaaggaatgtcccttcctgcacatcgaccccgagtccaagatcaaggactgtccttggtatgaccgcggcttctgcaagcacggtcccctctgcaggcaccggcacacacggagagtcatctgtgtgaattacctcgtgggattctgcccggaggggccctcgtgtaaattcatgcaccctcgatttgaactgcccatgggaaccaccgagcagcccccactgccacagcagacacagcctccagcaaagcaaagtaacaatccgccattacaaaggtcgtcctccttgatccagttaacgagtcagaactcttctcccaatcagcagagaaccccgcaggtcatcggggtcatgcagagtcaaaacagcagcgcgggcaaccggggaccccggccactggagcaggtcacctgttacaagtgtggcgagaaaggacactacgccaacagatgcaccaaagggcacttggcctttctcagtggacagtgacagcagctggagccagctccgagcagcccgggggccccgctgttgggagtgtgcatttaactgtttcatgcgcttgttggcgcgactgtggctcgagctggcccgcagacacgtgggtttcatcactctgaggggccacgtctgttagtttcctatcattttgccgtagtattttttgaaaaagggacatgtgtcctgtgggtccctgcagtcgacatcatgtttggctgggcatcgatgcctcctttctgggactcccggcacaactcccctcatccagggagggaggcagctgctggggaggggcttggctaggtagttctgtgtggcggtggtcattcccctcattaaacaccagttcttggtgacgccaggggctggtaggtcattcaaagctgtggccagctcacgcctgcttcctccctccctgccctgctgaatcctaaagctgtgcctatatctgtgatttgaatgagggagccctttggggcaaattcaggtgcccccattgcctcaggctggccctggtcccaggtggcagcggttgaggaggggtacagggctctcaagcctgaggttttcttctctgggcttaattttctcttggggtacgtgcctgacagtgtttaaggtgtccgttgaactggagttgcagacttttaaatagatgaccccttcagatcatctgtgcctacctcctgcccatcaggcgtctacactgtcactcagacacctgtggcatgtggaggagactgccctgtcctgagcctggaaaatgtgaaactgtctcctgcaacctgctgggcatgtgggcctggctgtgttcaattgcaagaacaatttttatgaaatggattaaagcttgtttttt

SEQ ID NO: 12437 - DNA, 2727 bp, Homo sapiens
ggcgcctgccgccagtctcctggcgactttccctatatcgcagagactcatccctctgaccccagcccggaagcactgtccctcggagtccgagacttccacctgggtcgtgtccaaggccccggcgactccccggactcggggtgccgggccaacctccccgccgaggcccacccgccgtcgctatggcgtgcagtttgcagaagctgtttgctgtggaagaggagtttgaagatgaggatttcttgtctgctgtggaggatgcagagaaccggtttactggctcactgcctgtgaatgctgggcgcctgagacctgtctcttctaggccacaggagactgtgcaggcacagtcctccaggctgctgctgttacaccccactgctccctcagaggctttgggcctgccagacttggacctctgcctccctgcctccagcacgcccagtgctgacagccgtccatcatgcataggagcagctcccctaaggcctgtctctacttccagcagctggattggcaatcagagaagagtgacagtgacagaagtgctcagagagacagcaagacctcagtcctcagccttacaccccctactcacctttgagagccaacagcagcaagttggtggctttgaggggcctgaacaagacgaatttgataaagtcctggcaagcatggagttggaggagcctggcatggagctggaatgtggagtcagcagtgaggccataccaatcctgcctgcccagcagcgggagggttcagtattggctaaaaaagcccgggtagttgatctgagtggatcttgccagaaggggcctgtgcctgccatccacaaagcgggtatcatgtccgcccaggatgagtctctagatcctgtcatccaatgtaggactccacgaccccccttgagacctggtgctgtgggtcaccttcctgttccaactgccttaacagttcccactcagcaactccactgggaagtctgtccgcaacgctcccctgttcaagcacttcagcctctccaagctgctagagggaccattcagagcagccctcaaaatcgtttcccttgtcagccattccagtctccaagttcctggttaagtggcaaagctcatttacccagacctcgaactcccaactcaagctgttctactccctcaaggactagctctggattatttcctcggatacccttacaaccgcaagctccagtgtcttccattgggtctcctgttggtaccccaaaaggtccccagggagctctgcagacacccatagtcaccaaccacctggtgcagctagtcactgctgccagccggacaccccagcagcccacccatccctccacccgagccaaaactcgccgtttccctggcccagctgggatcctgcctcaccagcagagtgggagaagtctggaggacatcatggtttccgcgccccaaactccaacccatggtgctctggctaaattccagacagagattgttgctagttcccaggcatctgtggaggaggattttgggcgagggccctggctgaccatgaaatccacgctaggcctggatgagagagaccctagctgcttcctctgtacctacagcattgtcatggtgctgcgcaagcaggcagccctgaagcagcttcctaggaacaaggtccccaacatggcggtgatgatcaagtccctgactcggagcacaatggacgccagtgtggttttcaaggaccccacgggagagatgcaggggacggtgcacaggttgctgctggagacgtgccagaatgagctgaagcctggctcagtgctgctgctgaagcagattggagtgttttctccttcacttcgaaatcactacctcaacgtgacacccaacaacctggtccatatttacagcccggattctggggatgggagcttcctcaagccatctcagcccttccccaaggattcagggagcttccagcatgatgtggctgcaaagcccgaggaaggcttcagaacagcacagaacctagaggcagaggcgtcccctgaggaagaactcccagaagcagatgacctggatggactcctgagtgagcttcctgaagacttcttctgtgggaccagtagttgagactgccccaacgcaggacaacccaccatgagcaggcagctctgggcatgtgtctggtcacatccaagggggagaagaaggccagcatgattggagagtggacacagccggggggcttctgtggttgctcccaccctgggtgttttccctgagagccccctcatctctgcgctgccctcactttgggccttcctttgccgttggcaccagaatccggccggagactggctctccagccaacaagaaaggcctgtcaccctcgccttgggtgtccctctcctgcctcagcttaattttagaggatattgggcctggttttcttgtcccttcataccctagtccctggacagctgaggagatgaaaggagccacaccacaacaatggcggcctgcccctccacacaggggagaagcacgctcaggcttcctctgctttgtctcttcagacctgtggttgctctgctcatccatgcccaaggttcccaggtgcaggacagaggtgtggcctattgtaccttgttctgaaataaagcatctcctgcttaaaaaaaaaaaaaaaaaaaaaaaaaaaaaaaaaaaataaaaaaaaaaaaaaaaa

SEQ ID NO: 12438 - DNA, 5039 bp, Homo sapiens
caagccgactgtgagccaggaagtgctcttggggagcccaggccaagccatccattcttgggtcctttggagggtagatatggattcccagtttctccagcggccagtgctccccctagtccacacagtgagaccgtgaaagcagatgctccggggcactcctgggcagcttttgctcagtggatgatgggtgactacagactccctgaccacccccagcccatggaaattctcaacctgtacttgggagacagcctggagccccacccaggagagtgcccaagggaaacgtgcagccatgaggatccaccggagcctttcgaggagcaaacctgggccactgaccctcctgaacctaccagacaaaatgttcctccctggggctccggtgtggagctcacacacctggggagctgggtccatcaggacgggctggagccttgccaggagcaaacccgggccactgaccctcctgaatctaccagacaagatgctcctccctggggctccggtgtggagctcacacacctggggagcccctctgcccagagggagcacaggcagaacacagcatcaccagggtcaccagtgaacagccatctaccggggagcccaaagcagaaccggagcacgtccacacaggtagtgttctgggcaggcatcctgcaggcccagatgtgtgtcctagacctggaggaggagctggagaagacggaagggctcaaggctgggctgaaatgctgtctccccacgccccctgtggacctccccggggacacgggcctgcactccagcccacctgagaatgaagactcaggggaagacagcagtgagcctgagggagagggccaggcatggctgagagagggaaccccagactcttccccacagtggggagctgaggaggagagcatgttcttcagcaaccccctcttcctggcgagtccttgctcagagaacagtgcttctggagagtgcttttcctggggggcttcagactcccatgcaggtgtgaggactggacctgagagcccagcgactctggagcctcccctcccagaagacacagtgctgtgggagctggaaagtgagccagatttgggggacggcgctgctatcagtgggcattgtacccctccattccctgtgcccatctataaaccacactccatctgctgggcctcagtggctgccgctgagggggctcctgcagcacctcctggtcacggggagagtgagggagataggcttggtcctgctccatctgcagcaccgtgtgtggacgaagcattgacctgggaatcaggatgtgtcggatctgatcttggccctgctgcacatcctgtgcaaccttgggcctctctcagccctgagggctggcagagaggaggtcctttttggccccaggtgactcttaactcccaggacagagatgagagggagggtggacacccccaggaatctcttccctgcaccttggccccctgcccctggaggagcccagcttcttctccagagcctagcagcccagaatctgagagcagaggccctggtcccaggcccagccctgcatcgtcccaggagggcagcccgcagcttcaacaccacagctcaggcattttgcccaagtggacactagatgcttcacagtcttcactcttggagacggatggggaacagccaagttccttgaagaaaaaggaggcaggggaggccccaaaaccaggcgaggaagtaaagagtgaaggaacagccaggcctgcagagactggagacgtccagcctgacattcacctgacttctgcagaacatgagaatctgaggacaccgatgaactcttcttggcttcctgggagccctatgccccaagcacagtccccagaggaaggccagagaccaccagctggagacaagctagctaatggcgtcaggaacaacaaggtagcctggaacttggcctcacgcctctatcgcctggagggcttccggaagtctgaagtggctgcctacctgcagaagaacaatgactttagcagggctgtggctgaggagtacctgtccttcttccagtttggaggccagagtctggaccgagccctccggagcttcctccaggccttggtgctcagtggggagactcaggaacgggagcgaatcctctaccagttctccagacgcttccaccattgcaatccggggatcttcccctcagtagattctgtacacaccttgacatgtgcaatcatgctgcttaacacggacctgcatggacagaacattgggaagagcatgagctgccaggaattcataaccaacctgaatgggctgagggatggcgggaacttccccaaggagctgctgaaggccctctactggtctatccgcagcgagaagctcgagtgggccgtggatgaagaagacacagccagacctgagaaggcccagccgtccctgccagctggcaagatgagcaagcccttccttcagctggctcaggatcccacagtgcccacctacaagcagggcatcctggctcggaaaatgcatcaagatgcagacggcaagaagacgccatggggcaagcgtggctggaagatgttccacaccttactgcgagggatggttctctacttcctgaagcagggagaagaccactgtctggagggggagagcttggtggggcagatggtggatgagcccgtgggggtgcaccactcgctggccacccccgccacgcattacaccaagaagccgcacgtcttccagctgcgcacggctgactggcgcctctacctcttccaggcacccactgccaaggagatgagctcctggatcgcgcgcatcaacttggctgcggccacgcactccgcgccgcccttccccgccgctgtgggctcccagcgcagattcgtgcggcccatcctgcccgtgggccccgcccagagctccctggaggagcagcatcgatcccacgagaactgcctggacgctgccgcggacgacctgctggatctacagaggaacctgccggagcggcggggccgtggccgcgagctggaggagcaccgcctgcggaaggagtacctggagtacgagaaaacccgctacgagacctacgtgcagctgctggtggcccgcctgcactgcccctctgatgctctggacctgtgggaggagcagctggggagggaagctggaggcactcgggagcccaagctcagcctgaagaagtcccactcgagcccgtccctgcaccaggatgaggctcccaccacggccaaggtgaagcgcaacatctcagagcgcagaacctaccggaagatcatccctaagcggaaccgcaatcagctgtgaagccagcaccacctcagagacactgttccctgctccagggtagacctgagatgaacctccctggaggagacttatttcaatgagtccaccatgacggatgaggcacctcctttccctgctgaaggacaaaccttgtttccctgtggccctcattcttgtgctccctgaagctttcctaatattgctgtgctccccaccacccccatggcagtccctccgcagccccagtccctggccacgcccaagggaagagggaggtgaggacttgactttcctcccagagctcagcccatgtcaccctccaggccccagaatccagagtggcctcatttcctagacttgctgagaactcagcacttgtttgagaaccagtgcttatgtggtgtgcccttggcttctgggggagagcttggggcagcagaggcccctgggcagcccagccaggggagccacagccccgaggatggtcttgctctgggaattaggtgaccttcctggggaggccccaggagagtgaatcagggactcttgagaaattcctaaccagcctcctgtgacccagggagcagggtcgctaaggtcctgcccactgaggggacagccttctgggcagggacctcggggggcttcaagggctctgcacggctgtggggccctgtgcctttgtctccttgtgtctcctttcccccgaagtagatgaaacagtctcacatacccaactgctcatcaacagagcagagctgatggcatgagtgagggctgggcggggtggggcctccagagctttgcagggaaccctggaaccctaggaacaaggagcctttgttccaacagagcagagaaggaggttctctatgttcagaccactggagaggatagagaggtaaaaggtggcgacagtttcccttaggggtctgcctggcaggagccacagctcaggagagttgtgagggatgggacggaggctggcgaccaggcgaggcctaggccaggctcgggagacttttctgtgctcctttctacacatgccttaaaccttccttcctgtggggtgcctggaccccttccccatctctggcagctcagagggtctctgctgctctcccctgggaaatcccctcatcctgccctctggctgcctcccagctgggcttgttctctgagggaggttccggagactcatggacttggggctctgcctgtaggaaggaggctgggccggagggaccagccaccattgtctctgttcagccaagtgtgcaagtaggctgcccgccaagagggggcctctgctacccgctgctgcctgccggctgacacactgcctccccagccttcctgctaggccaccctcctcccttcccatgcttgtaaccagctctggggcttgcacctccacaaagtaaggttggcccttggaggccatgtttgggtctccggccagggcctagggctaggccatgcacccaatgggtgcacaataaataacaggtcaacaaagagggaggtgtgtcagtgtgtgaggaagggaggtcaggcagctaggaccacctgcagtgtggcaggcttcatccctctttgctccaagtgtgtatgtgtgtctgtgcatgtgtgtagtgtctgtgtctgtgtgttcatgcatatgcaggagtcacacggtcataggccatcaaagctggaggaga

SEQ ID NO: 12439 - DNA, 6278 bp, Homo sapiens
cttccatgtgtgaaagctacttggcatgaatgcctgggccgtaccaagtgtcaccgcagcaagagggggagtcagaagaaaaacagatcagaccagagcagacaataggcccctaaagtgttccccctaagttgctttgatgttgtcctggtgtcttgataccaggaggccagggattgcaggaaaagggtcttttttgtcttcattcactttcccccctcagtttctgaaatgattctccagaatttctcctcataaaaaaggactgaatgtgggcccagttggcgtcattctgctttgacctaaacattcccatctgattgggtggcagagatcatttttggaaagttcttccgtgtcccgatgtagaagaaatagcaaattggacatattgaaagacaagggtcatctttgagaagggggttcctggactcctcacctccaggatgagcactgcagtgtcgtgacccttggggttttgtatgccctggagatgcgagattttcctctggcagcaggaggcacgcacccagagaatgctggagctgcaaggggaaaggacccacttccacagcagagaaaaacaaagaggaaaaaggcatacaggcagcgagcgctaagggacgcacccagcaagcagtgggccagtgccactgcccccagcagctgtttctgctgcaacccgagaggaactcggtgagcctgtcccgtttgtgactgcaagctcaggatttcaatcaatgcattccagtaaccctaaagtgaggagctctccatcaggaaacacacagagtagccctaagtcaaagcaggaggtgatggtccgtccccctacagtgatgtccccatctggaaacccccagctggattccaaattctccaatcagggtaaacaggggggctcagccagccaatcccagccatccccctgtgactccaagagtgggggccatacccctaaagcactccctggcccaggtgggagcatggggctgaagaatggggctggaaatggtgccaagggcaaggggaaaagggagcgaagtatttccgccgactcctttgatcagagagatcctgggactccaaacgatgactctgacattaaagaatgtaattctgctgaccacataaagtcccaggattcccagcacacaccacactcgatgaccccatcaaatgctacagcccccaggtcttctaccccctcccatggccaaactactgccacagagcccacacctgctcagaagactccagccaaagtggtgtacgtgttttctactgagatggccaataaagctgcagaagctgttttgaagggccaggttgaaactatcgtctctttccacatccagaacatttctaacaacaagacagagagaagcacagcgcctctgaacacacagatatctgcccttcggaatgatccgaaacctctcccacaacagcccccagctccggccaaccaggaccagaattcttcccagaataccagactgcagccaactccacccattccggcaccagcacccaagcctgccgcacccccacgtcccctggaccgggagagtcctggggtagaaaacaaactgattccttctgtaggaagtcctgccagctccactccactgcccccagatggtactgggcccaactcaactcccaacaatagggcagtgacccctgtctcccaggggagcaatagctcttcagcagatcccaaagcccctccgcctccaccagtgtccagtggcgagccccccacactgggagagaatcccgatggcctatctcaggagcagctggagcaccgggagcgctccttacaaactctcagagatatccagcgcatgctttttcctgatgagaaagaattcacaggagcacaaagtgggggaccgcagcagaatcctggggtattagatgggcctcagaaaaaaccagaagggccaatacaggccatgatggcccaatcccaaagcctaggtaagggacctgggccccggacagacgtgggagctccatttggccctcaaggacatagagatgtacccttttctccagatgaaatggttccaccttctatgaactcccagtctgggaccataggacccgaccaccttgaccatatgactcccgagcagatagcgtggctgaaactgcagcaggagttttatgaagagaagaggaggaagcaggaacaagtggttgtccagcagtgttccctccaggacatgatggtccatcagcacgggcctcggggagtggtccgaggacccccccctccataccagatgacccctagtgaaggctgggcacctgggggtacagagccattttctgatggtatcaacatgccacattctctgcccccgaggggcatggctccccaccccaacatgccagggagccagatgcgcctccctggatttgcaggcatgataaactctgaaatggaagggccgaatgtccccaaccctgcatctagaccaggtctttctggagtcagttggccagatgatgtgccaaaaatcccagatggtcgaaattttcctcctggccagggcattttcagcggtcctggccgaggggaacgcttcccaaacccccaaggattgtctgaagagatgtttcagcagcagctggcagagaaacagctgggtctccccccagggatggccatggaaggcatcaggcccagcatggagatgaacaggatgattccaggctcccagcgccacatggagcctgggaataaccccattttccctcgaataccagttgagggccctctgagtccttctaggggtgactttccaaaaggaattcccccacagatgggccctggtcgggaacttgagtttgggatggttcctagtgggatgaagggagatgtcaatctaaatgtcaacatgggatccaactctcagatgatacctcagaagatgagagaggctggggcgggccctgaggagatgctgaaattacgcccaggtggctcagacatgctgcctgctcagcagaagatggtgccactgccatttggtgagcacccccagcaggagtatggcatgggccccagaccattccttcccatgtctcagggtccaggcagcaacagtggcttgcggaatctcagagaaccaattgggcccgaccagaggactaacagccggctcagtcatatgccaccactacctctcaacccttccagtaaccccaccagcctcaacacagctcctccagttcagcgcggcctggggcggaagcccttggatatatctgtggcaggcagccaggtgcattccccaggcattaaccctctgaagtctcccacgatgcaccaagtccagtcaccaatgctgggctcgccctcggggaacctcaagtccccccagactccatcgcagctggcaggcatgctggcgggcccagctgctgctgcttccattaagtccccccctgttttggggtctgctgctgcttcacctgtccacctcaagtctccatcacttcctgccccgtcacctggatggacctcttctccaaaacctccccttcagagtcctgggatccctccaaaccataaagcacccctcaccatggcctccccagccatgctgggaaatgtagagtcaggtggccccccacctcctacagccagccagcctgcctctgtgaatatccctggaagtcttccctctagtacaccttataccatgcctccagagccaaccctttcccagaacccactctctattatgatgtctcgaatgtccaagtttgcaatgcccagttccaccccgttataccatgatgctatcaagactgtggccagctcagatgacgactcccctccagctcgttctcccaacttgccatcaatgaataatatgccaggaatgggcattaatacacagaatcctcgaatttcaggtccaaaccccgtggttccgatgccaaccctcagcccaatgggaatgacccagccactttctcactccaatcagatgccctctccaaatgccgtgggacccaacatacctcctcatggggtcccaatggggcctggcttgatgtcacacaatcctatcatggggcatgggtcccaggagccaccgatggtacctcaaggacggatgggcttcccccagggcttccctccagtacagtctcccccacagcaggttccattccctcacaatggccccagtggggggcagggcagcttcccaggagggatgggtttcccaggagaaggcccccttggccgccccagcaacctgccccaaagttcagcagatgcagcactttgcaagcctggaggccccgggggtcctgactccttcactgtcctggggaacagcatgccttcggtgtttacagacccagatctgcaggaggtcatccgacctggagccaccggaatacctgagtttgatctatcccgcattattccatctgagaagcccagccagacgctgcaatatttccctcgaggggaagttccaggccgtaaacagccccagggtcctggacctgggttttcacacatgcaggggatgatgggcgaacaagcccccagaatgggactagcattacctggcatgggaggtccagggccagtgggaactccggacatccctcttggtacagctccatccatgccaggccacaaccccatgagaccaccagcctttctccaacaaggcatgatgggacctcaccatcggatgatgtcaccagcacaatctacaatgcccggccagcccaccctgatgagcaatccagctgctgccgtgggcatgattcctggcaaggatcgggggcctgccgggctctacacccaccctgggcctgtgggctctccaggcatgatgatgtccatgcagggcatgatgggaccccaacagaacatcatgatccccccacagatgaggccccggggcatggctgctgacgtgggcatgggtggatttagccaaggacctggcaacccaggaaacatgatgttttaagctgctaagatgggatgtgccgatccttgtcaaaatgagattccaggtcctgagagctgctttgaggcagttccaggagtacttactattggtcatgcaataggagaacagagacccgagggctgctttgggggaggggggaactcgagaatgtatggatttacctgaaaacaaattattcatttaatcaacaggtgtgttttttttaagatttattttttaaaaattatttttgtggacttgggtatcaatgatggcacctacttttgggaatctgtagctgtgctttgagaattgccatcggtcatgtgttgcaccgttctctgtatgtttacgtcctttggactggcttctcccaggattcttttctgtttttgtttttttgatttgggctttatttttttctgtgtactgtactatattgtaaaagggattttagcagagactttagtctttggggcaagaggagaacaggaatgctgggctgtttactttaggtggagaatccatcttcagacctttggactattttctttcaactgcagtgtatagaaaaaccaaactacgacctcagagcagagtattaatgaaaagcacaaaaaaaggaactaagttcagcgaggggtggggggaggggggagatttttcttttgaaaaataatgactcttaggacatttgtttttcagttcaagtgctcttcagcactgtcttgtctcccaatataccaacccactggcacatttttctcttgttttctctctccgattttgctctgtctcctcagttaagtgtttccttcctttgtgccccccgctggtgaccctctgcttccctctctctttccctttggcagctgcaatacacagtgttattctggggaaataaatctagcaaagcctcgccttccatgccgagcgtcctcttggctctgagagggaaaggtctgtccttgggatgctctctggtcttttttccccctaagtctttctctttcccatcatacccttccctgcccaccttgttttctgttctccttttattaggaattcccaagtgaattttattaatgtgggagtggaacagatgctaaaagctatccaggattttgtttctgtttgttttaaattttgtggttccttccctttcctccccctcccatgcgtaagacgttctgtgtaacctccattaaatttggtacaaaaccactcgccagagctgtggtgtcagaaaaataaaatatattgtttcttacaaaa

SEQ ID NO: 12440 - DNA, 4534 bp, Homo sapiens
gggggcagcggcgccgcagcctgggctggcggaacctcgcgctccgactcgccccccgcctgtagctcggtcggcgttgcgggcaggcgccgctccgctggggattgctatgctatgccttgtatgactaagacctcttaccaagaatacgtgtcagaccataaaaccactgccaaggagtgcgggggtggcaatgaaacagcccaacaggaaaaggaagcttaatatggattccaaagagcgtttggatcaggacggacgcttggagcaagctgaagaggaaaagaagcccaaggatagcacaacccctttgagtcacgtcccttcagcggctgcacagggagcatggtcttgggagtggtacttgaaagaacagaaggctgtcgcagcacctgttgagctgttttccaaggatcagtcctttccagagcatgaaaatggttttcagattggaatgagattagaaggcattgatccccgacatccatcggtattctgtgtgctttctgtagcggaggtttgtggttaccgtctaagacttcattttgatggttatttaagttgctatgatttttggaccaatgctggttcccctgacattcatccagtaggatggtgtgaaaagaccaaacatgaactgcacatccctaagggttatagaaaagataaatttgtttggatggattacttgaaggcctgcaaattgcaaaatgctccaaagaaattattcagaaacagaagtcctaatgggccaatgtctaaagaatttcaggttggaatgaagctggaggccgtggacaggaagaacccttccttggtgtgtgtggcgaccatagcagatattgttgaagatcgcttactagtgcattttgacaactgggatgatagttacgattactggtgcgatgttaatagcccttatgtccagccagttggttggtgtcaggagaatggaagaactctgatagcaccccaaggttatcccaatccagaaaatttttcctggacagaatacctggaagctactcaaaccaatgcagttcctgccaaagtttttaaaatgaggttgcctcatggttttctgccaaatatgaaacttgaagttgtggataaacggaaccccaggttaattcgtgttgctacgattgtagatgttgatgaccaaagagtaaaggttcattttgatggttgggaccataagtatgactactgggtggaggcagacagccctgatatccacccgatcggatggtgtgatgtcacagggcatccactggaagtgccacagcgaacgaatgacctgaagatccttccaggtcaagctgtctgtcctactcccgggtgccgaggaataggccatatccgtggtccacgttattcgggacatcacagtgcttttggctgcccgtattcagacatgaacttgaaaaaggaggcaacacttcacgatcgtttgagagaacaaacacaggcaaatttggaatcagactcttcacattcaaaatcaaaaagcctctgtagtttgaacttcaatggaaaacatgaaaaggtgaacagtcagcccagacttgtacagcaggcaaagtgtttgaaaatcaaaggaaaagaagatattgacttggataatctcttcagaggccgagtgcggtggctcatgcctgtaatcccagcactttgggaggccgaggcaggcagatcacgagatcaggagatcaagaccatcctggccaacgcagtgaaaccccgtctctaccaaaaatacaaaaaattagccaggcgtggtggcgggtgcctatagtcccacctactggggaagctgaggcaggagaattgcttgaacctgggaggcagagattacactgacctgagattgcaccactgcactccagcctgggcaacagagcaagactccgtctcaaaaaaaaaagaaagaaagaaaaaatggtggaaagggtggagaaattccttttaatgggtacaaaccacacaatgcaggtgaccattactctaaaagcccaggcttcatcactatgcaatatatctgtgtaacaaaactgtacttgtgcctgctaaatctgtgaaattaaaaaaaaaaaaaaccatgaatctgatttgcctttagtcaccagatgactgcagataggcacacagaggtgtgagacagcactttccatttgcccttcatctcttgttcctctgccattccccatgaagccgtgctggggctgacctgctggaggatgagacctgtgaagctgagtcagctgccctggtcatcccagccaaggccatgtcctctctgctcagccaacaactgtccaacaaacatgtgaatgagccctgctgaaatcagaactgaccggcccacctgagcctaaattcctgacaaacagatgtgtgaactaagtaaatacttaaaaaaatgagatgctgatggtccctgaatttctcaagaggcaaagaatggtcccacctcgcaacttataaatgttcagaagttagacggccacaaagaagtagcacctcatatacattctcttgctatctacaataaggtgaaggaaggcatttatcttctctgcaaccagaaaacctataacccaaatgcccaggaacacaagaacactgttcaccattctgctgtgcttattagcagaagatatatcagctcacaaaatcccctttgaaacagaaactaaaataatgctcaatgatcattctactcccacgggggaggagggagaggagcataaatcaggacaagagctgggtttagaacttggatcacgtgtggcttttctccatgatcacaaaccccagcttcctataattaataattggatgtattaagtgttttatggagcagtccagccagagagcaactataaaatggaaacatggaccagcttggtaaagggaaagatgaaattgtagaattaatttgtttgttcgttcattgagtatttcataacaataaacttattgtatttataaagggaaaaacctctgggtgtaatttggctgcctggttgtttatatcctacagtgcagtttcagtatgtttcatgttagtgtgcctgttttaaaatgttttacttcattatcgtaagacgtttttaatgcaatgaaacttcaagccagaaaaatcttagaaaattaacgaaatagggagtagagagaaatggagatagcattaaactaaatacaaagaaaaaattgaaacaaatttttttatttgacaaaaattagccgggtgtggtggcaggcacctgtaatcccagctactcaggaagctgaggcgagagaatcgcttgaacctgggaggtggaggcagtgagctgagatcgtgccactgtacatcaccagcctgggcgacagagtgagactccttctccaaaaaaaaaaagagtctcttcattaaaataaacctaatacttcacttgtttagtaaagcaatgcaaattaatacctgatgataaagtcagaagatgtatatatgtttgtgttcctgctttctttcatttcacagtctaattctcccagactaggatttttgctagctatttgttctatcacccagaattttgagaaggcttaaaagcatattattgatttgtgcatttggtgcaaaattcaacaggtataagggggtatctctccctgaacctgatcctcagccttcagtttcctcccttggaataatcactgtatacttctcttgtgtgtctttctaaaaatatgttctgtttatttaaatatatgtgtgtatgtgtatttacacaagtgatggcataccacatacattgttaaacagtttcctcgtgtcctttagcaataaaatctgacgagcagttcttaacacatggagcggcacactataagtgaccagtccctgcccatggccatctggatggttttcatgttgctgtgtaaaggaggcttcaaagtgtcttctgtaggtgtcagcttgactggaaaataaaaagtgtcttctgtactcatcactcatgcttgtgagaatctacaggatagattctgtgtgtgaatctatcctattctaatccttttcggcatttcctcagctacccttactcgttcatttttccaaatgaactttaatatcagtttttctggtacaacttttttccattccagttggttaatttttggattgcaataaatttatgatttaacttttaattttaccctttgtgaacttgaccatagtaagctgttcccatactcaaatatttcctgtcctgtaattgcattttaagttttcctttatgtagaacttgcgtccttcttacgaagtttattcctaagcagtttatcgtttttgttgctgcaataaatggacgtatttcttccttgatgtcctccacctaagattgtctgtatggaaagattgtatatttctgtgtattacatttaatcctgccactgtaatctcttctaatttgtaatttttttcatgtaattattttgggtttctaggtaaataaacatgtcacctacaaaaaaaaaaaaaaaa

SEQ ID NO: 12441 - DNA, 5041 bp, Homo sapiens
aaaatggcggctgccactgtggggcttctgccggccggtagtccctggcgctgctgacccagcatcggcttttctacgtcttgaacctggattcgcctaggggttgggaagggctgtggacggcgttgggggaggcctgacgagattaataaagaactcttcagaattcctggtgtttcatcatatatacgactaagatatcaactcttctagcttgctgtttctggaccaaaaaaaatgacgtctattatcaaattaactaccctttctggggtccaagaagaatctgccctttgctatcttctccaagttgatgagtttagatttttattggactgtggctgggatgagcacttttctatggatattattgattccctgaggaagcatgttcaccagattgatgcagtgctgttgtctcaccctgatcctctccaccttggtgccctcccgtatgctgtcggaaagttgggtctgaactgtgctatctatgcaaccattcctgtttataaaatgggacagatgttcatgtatgatctttatcagtctcgacacaatacagaagattttacactctttacattagatgatgtggatgcagcctttgataaaatacagcagctaaaattctctcagattgtgaatttgaaaggtaaaggacatggcctgtctatcacacctctgccagctggtcatatgataggtggaacaatatggaaaatagtcaaagatggagaagaagaaattgtttatgcagttgacttcaaccacaagagggagatccatttaaatggatgttccctggaaatgctaagcaggccttccctacttatcacagattcattcaatgctacatatgtacagcctagaagaaaacagagagatgagcagcttctgacaaatgtcctggaaacacttcgaggtgatggaaatgtgttaatagcagtggacacagcaggcagagttttggaacttgctcaacttcttgatcagatttggaggactaaagatgcaggattgggtgtttactcattggcactcctaaataatgtcagttacaatgtggtggagttttctaagtcccaggtagaatggatgagtgataaattgatgagatgttttgaagacaaaagaaataatccgtttcagtttcgccatctctctttatgtcatggtctttctgacttggcccgtgtacctagccctaaagttgtacttgccagccaacctgacctggaatgcggattttcaagggatctctttattcagtggtgtcaggaccctaaaaactcaatcattctaacctacagaactactcctgggactttagcacgtttcctaattgataatccttctgaaaaaattacagaaatagagttgaggaaacgtgtgaagcttgaagggaaagaacttgaagaatacttggaaaaagagaaactaaagaaagaagctgccaaaaagcttgagcagtcaaaagaggcagatatagattccagtgatgagagtgatattgaggaagatattgaccagccatcagctcataagacgaagcatgacttgatgatgaaaggtgaaggcagtcgtaaaggaagttttttcaaacaggcaaaaaagtcctatcctatgtttcctgccccagaagaaagaattaaatgggatgaatatggagagattatcaaaccagaggatttcttagtgccagagcttcaagctactgaagaagaaaaaagcaaattagaatctggtttgacaaatggagatgaacctatggatcaggatttatctgatgttcctactaaatgtatttctacaacagagtctattgaaataaaagcccgggttacctacatagactatgaaggacgctctgatggggattccattaaaaaaatcattaatcagatgaaaccacgacagttgatcatcgtccatggcccaccagaggccagtcaagatctggcagagtgctgtcgcgcctttggtgggaaagatattaaagtgtacatgccaaagctacatgaaacagttgatgccactagtgaaactcacatctaccaggtgaggttaaaagactcacttgtcagctctcttcagttttgtaaggcaaaagatgctgaattagcttggatagatggtgtcttagatatgagagtttccaaagtggacacaggggttattttagaagaaggagaactaaaggatgatggagaagactcagagatgcaagtggaagctccctcagattctagcgttatagcacaacaaaaggccatgaaaagtctgttcggagatgatgaaaaagaaacaggtgaagaaagtgagatcattcctactttggaacccttgccacctcatgaggttcctggacatcagtcagtttttatgaatgaaccaaggctgtcagacttcaagcaagttctcttacgggaggggattcaagctgaatttgtaggaggtgtacttgtttgcaacaatcaagtagcagtccgcagaacggaaactggacgcattggattagaaggctgcctttgtcaagatttttataggataagagaccttttatatgaacaatatgccattgtataaaggacatgatgtcaagaagtatctgcttgacctttctaagaaaaagggattcttatcttactctgagcttttgatgttttgttttgtaacatacaaaaagaatctgccagaaaaacttacatgtatcagatttttaaaaatataaatagagaacattttgcaaatgctcaaatgagcattctatcttttggctttcagagtgatagagctcctaacaggtgtacaggcccaagagttgaaggtgattggttttctttacagactccttgttctctagaagggctttttacttgaataaaacaatgcaacttagcaaaccaatttatggccttagagaaacatttttgcatgagttcttacaaactgtttgttatattttctggaatgataagtgagaattatttagaaaagacatgctccaaaaaaaaaacaaaactgataaaacagtttttcgaaacttacttttaaaagcatacgtgctatgactctctccagtttgaatatgcaattgttttcacaggcaggatgtctgttttctgcctgtatttcccagtgatttactctagggtaaggtagtacacatttggttcagaaattaatttttatttctcctatatcttgttttatcaagattttgttgtggcatttcaatgtaaattataacaccatcatttgagtatacataattcaaaagaactacttgatgcagtatagtcttaagggttctgcatacattttagaaacatcttagccgtaagttaggtcctgtgttaaactgtttagtgctctgtttttaagaaaacaaatgttgaacctcacacttttatgtggtgacagtgtaatttaattaaaaggtgtaaatgttttcatctcttaggcttgctgtctcctaaggtcacccaagcagtggttggattttatacacattactactaaaataatactgaagttggataaggttatcctttctgtatttgcgtctttcttgtgactaaccaccctgatatagtattaaccactgtgttcaagagtaaaaacaatatatgcaattttcattgaacttaaagagtgaaaaccatgtaaactattgaaactattgtaatccattaatgcttttttagaatggcagaccttgatgtttatttctcaaatggttaagccctcttctttactcttaatttttttttgagacagagtcacccaggctggagtgcagtggtgagattttggctcactataacctcttcctccagggttcaagtgattctcccacctcagcctcccaagtagctgggactacgggcacatgccactgcacctggctaatttttatatttttggtagagacagggtttcaccatgttggccaggctggtctcaaactcctgacctcaagcgatccacccacctaggcctcccaaagtgctgggattacaggcatgaatcaccacaactagcctacccttagatttttggaaggatcgatcttatttaactatgtgtggaacaacccagtaatatcagactcgaattactatttcattctatttcaaatgcttataaagctactattgtagattatagtgttaatgcaaagtttacagacttttgatatggaaaaccagataaaacaatgttacaaaaggcaaatataaagagtatgttttctttttagtgctttggaaaaatttcacttaaactcttattactgtatagattaagccctataatgctatttatattccaggggaacgaaaatctgaatttgttttatgatttaaagcatctggtttgcatattgtattgtaatactgatacagtttggctgtgtccccaccaaattgaattgtgttaatagttcccataatccctacgtgttgtgggagggacccagtgggcagtaatttaatcatggtggtggttaccctcatgctgttcttgtgatggtgagttctcatgagatctgatgggtgtttttttttgttttgttttttgttttttgagatggagttttgctcttgttgcccagactggagtgcaatggcacacgatctcggctcaccgcaacctctgcctcctgggttcaagcgattctcctgcctcagcatctcgagtagctgggattacaggcatgcaccaccacgcccagctaattttgtatttttagtagagacggggtttctccatgttggttaggctggcctcaaactcccgacctcaggtgatccgcccgcctgggcctcccaaagtgctgggattacaggcgtgagccactgctcctggcccaagatctgatggttttgtaagggaattttccccctttgcttggcacttcttcctgctgccatgtgaagaaggatgtgtttgcttccccttccaccatgattgtaagtttcatgaggcctccccagcctgtgggactgtgagtcaattaaacgtgtttactttataaatt

SEQ ID NO: 12442 - DNA, 4603 bp, Homo sapiens
gactcattgcgtacacgccctcaccgccgcccagtttcggttcctaacaaaagcacgttcctcatcagccacccataatcaagacaaatttgccaaataaatcattgtagaaacgctagtttgggcctgaaaaattccaggagcaagagtcaagatttgtcactccatgagaatctggaggggactcccttcccagaaacttgacgatgaagtactggttgtaattttagaaagacacccaatcggcttttttaaaagatcgcccagggcccttgtcctgagagctgggagctggtcggagtgacagagaagccatggaagcagcagtgaaagaggaaataagtcttgaagatgaagctgtagataaaaacattttcagagactgtaacaagatcgcattttacaggcgtcagaaacagtggctttccaagaagtccacctatcaggcattattggattcagtcacaacagatgaagacagcaccaggttccaaatcatcaatgaagcaagtaaggttcctctcctggctgaaatttatggtatagaaggaaacattttcaggcttaaaattaatgaagagactcctctaaaacccagatttgaagttccggatgtcctcacaagcaagccaagcactgtaaggctgatttcatgctctggggacacaggcagtctgatattggcagatggaaaaggagacctgaagtgccatatcacagcaaacccattcaaggtagacttggtgtctgaagaagaggttgtgattagcataaattccctgggccaattatactttgagcatctacagattcttcacaaacaaagagctgctaaagaaaatgaggaggagacatcagtggacacctctcaggaaaatcaagaagatctgggcctgtgggaagagaaatttggaaaatttgtggatatcaaagctaatggcccttcttctattggtttggatttctccttgcatggatttgagcatctttatgggatcccacaacatgcagaatcacaccaacttaaaaatactggtgatggagatgcttaccgtctttataacctggatgtctatggataccaaatatatgataaaatgggcatttatggttcagtaccttatctcctggcccacaaactgggcagaactataggtattttctggctgaatgcctcggaaacactggtggagatcaatacagagcctgcagtagagtacacactgacccagatgggcccagttgctgctaaacaaaaggtcagatctcgcactcatgtgcactggatgtcagagagtggcatcattgatgtttttctgctgacaggacctacaccttctgatgtcttcaaacagtactcacaccttacaggcacacaagccatgccccctcttttctctttgggataccaccagtgccgctggaactatgaagatgagcaggatgtaaaagcagtggatgcagggtttgatgagcatgacattccttatgatgccatgtggctggacatagagcacactgagggcaagaggtacttcacctgggacaaaaacagattcccaaaccccaagaggatgcaagagctgctcaggagcaaaaagcgtaagcttgtggtcatcagtgatccccacatcaagattgatcctgactactcagtatatgtgaaggccaaagatcagggcttctttgtgaagaatcaggaaggggaagactttgaaggggtgtgttggccaggtctctcctcttacctggatttcaccaatcccaaggtcagagagtggtattcaagtctttttgctttccctgtttatcagggatctacggacatcctcttcctttggaatgacatgaatgagccttctgtctttagagggccagagcaaaccatgcagaagaatgccattcatcatggcaattgggagcacagagagctccacaacatctacggtttttatcatcaaatggctactgcagaaggactgataaaacgatctaaagggaaggagagaccctttgttcttacacgttctttctttgctggatcacaaaagtatggtgccgtgtggacaggcgacaacacagcagaatggagcaacttgaaaatttctatcccaatgttactcactctcagcattactgggatctctttttgcggagctgacataggcgggttcattgggaatccagagacagagctgctagtgcgttggtaccaggctggagcctaccagcccttcttccgtggccatgccaccatgaacaccaagcgacgagagccctggctctttggggaggaacacacccgactcatccgagaagccatcagagagcgctatggcctcctgccatattggtattctctgttctaccatgcacacgtggcttcccaacctgtcatgaggcctctgtgggtagagttccctgatgaactaaagacttttgatatggaagatgaatacatgctggggagtgcattattggttcatccagtcacagaaccaaaagccaccacagttgatgtgtttcttccaggatcaaatgaggtctggtatgactataagacatttgctcattgggaaggagggtgtactgtaaagatcccagtagccttggacactattccagtgtttcagcgaggtggaagtgtgataccaataaagacaactgtaggaaaatccacaggctggatgactgaatcctcctatggactccgggttgctctaagcactaagggttcttcagtgggtgagttatatcttgatgatggccattcattccaatacctccaccagaagcaatttttgcacaggaagttttcattctgttccagtgttctgatcaatagttttgctgaccagaggggtcattatcccagcaagtgtgtggtggagaagatcttggtcttaggcttcaggaaggagccatcttctgtgactacccactcatctgatggtaaagatcagcctgtggcttttacgtattgtgccaaaacatccatcctgagcctggagaagctctcactcaacattgccactgactgggaggtccgcatcatatgacaaagaactgcccctggtgatgtgagcagggacctgcctgcccctttcaacctttcccctcaccttttttgagatttttgctgcaatctgtttgccttccctgaatcaaaataatctttcattcgtcaccattatactaatgaacaatagatttcatgtttcaaaatttcagattttacatgttaagatgtactaacaatattccttgtatcaaacatctccttttctccctgatacatagccctgagacatttatagcgttcaggagtcttctattgcttccattccttcagcagggctgcgtgggtctgttttaacgtgggccaagcctacctgggcagcccatttgccagggcttgcctcaggccatgcagcattggcgctctggctgcagcagctgagttgctcaaggccagtgtccaagtggacagcagcctctggtactccccccagttatcttccacccacatggactgggcagagcagccctcttctgtgtgcactgcatacgctgcagccgtgggagttattctcccctagagatcgacttggcagcacgaaggattcttttctctttcatgcttctcaggctcaatagtttctaattaatcttaaaatccatgtcttttacattgtttttttaattaagtgctgtttactaaccaaataatatttataacatgagtaagctataattaataacaatgaaataaatacccatgtacccaccactggacttcagaagtagaactcatgactgggactaggatgaggcaagggagaccctggccttgggcacaaaatgtaagggatgccaaaaaaatacagtaatcaaagtaagtaatatttcaatccaatatttttaaaaatcagaattaatgcaaaaaaaaccatgatgaacaaaatattaaaatttaaaataaagacaggattagtattactgagttttccttttgtcccaggctctaatatggcttggcatggggcagaacattacaacataccagtcgtgtcatggtgcccaaggctccacagacctcagtggctccctgctgcctgccacagcatctgttttagcagcctcgactcctcagcactcctcagcacacacctcttcttatcaggcttcctccacttagcaacttgctaacggccacctctgtgccttctgatccctgggcgccaatatcctcctgcccttaccatccttccaggcccaacttaaatcccactttcccatgaagcctaactgcgtgaacacccctacccccatacccattagcagtgattttgcccttccccgtaatgctgtcccacttataactgtgctctacttagcattctcagggatcataccttaatgttttcagtatgtctgcgttctcctactagattgtatgtccctcaagagcatgttctgtttctcttctgtctgacagagcactattatacctgactttcagtaactgttagctgtgattagttagctggtggatttaattgattaaaaaattacgattgaatgtaaaaaaaaaaaaaaaaaa

SEQ ID NO: 12443 - DNA, 2297 bp, Homo sapiens
ggaggctgtgggaggtgttggcggcggcggcgcgggcgcctgaggaggaggaggagaagcggatgagatcgtggggctcaccagcgtcccccatggcttctgagtagcgtgggagtggagtcagcaccaagccaggctccccgcgcctgccttgccctcacctgctcctgctctctgccagaggcagcatggtccgcagggcaccatggggcccgacagagtgacagcacgagaactgtgcgagaacgacgacctggccaccagcctcgtcctggacccctacctcggtttccgcacccataagatgaacgtcagccctgtgccccccctgcggcgacagcagcacctgcgctcagcgctggaaactttcctgaggcagcgggacctggaggctgcgtaccgggccctgacgctgggaggctggacggcccgctacttccagagccggggcccgcggcaggaggctgccctcaagacccacgtctatcgctacctccgtgccttcctgccggaaagtggctttaccatcctgccctgcacgcgctactccatggagaccaacggggccaagatcgtgtccactcgtgcttggaaaaagaatgagaagctggagctgctggtgggctgcattgcagagctgcgggaggcagatgaggggctgctgagggccggtgagaatgacttcagcatcatgtactcaacccgcaagcggagtgctcagctgtggctgggcccagccgccttcatcaaccatgactgcaaacccaactgcaagtttgtgcctgcagatgggaacgcagcctgcgtgaaggtgctccgggacattgagcctggggacgaggtgacatgcttctacggcgagggcttcttcggcgagaagaatgagcactgtgaatgccacacctgtgagaggaaaggtgaaggagctttccgaaccaggcctagggagcccgcgttgccaccacggcccctggacaagtaccagctgcgtgagaccaagcggcggctgcagcaaggcctggacagtggcagccgacagggcctgctgggccctcgggcctgcgtgcacccatccccgctgcgccgggacccattctgcgccgcctgccagcccctgcgcctgccagcctgcagcgcccgcccagacacctcacccctctggctccagtggctgcctcagccccagccccgagtgcggccccggaagcgccgacgcccccggccccggagggccccagtgctctccacccaccacgctgcccgcgtctccctgcaccgatggggaggctgtggcccccactgccgcctgcgaggagaggccctggtggccctgggccagcccccccacgcccgctgggcccctcagcaggactggcactgggcccggcgctatgggctgccttacgtggtgcgtgtggaccttcgtcgcctggccccagccccaccagctaccccagcccctgctgggaccccaggccccatcctgatcccgaagcaggccctcgccttcgcccccttctccccacccaagcgcctacggctggtggtcagccacggctccatcgacctggatgtcggcggtgaagagctgtgacaggccggacggggaggcccagcagggagagagggtctctctcctagctgctacccaggacctccagaaggagcccttggacctctgggagggagctgacccttgactccagcatagctctgaccctggaatggggttggtttggacacccccagggatctgagccctgaccctttgtgactgctgacccctgagccacccccactcccacagggagccccggccatttgctgccctccccacccctgccccagcctcaggactgcaggagccatccgcccccctcagccccttcctccccagggagcaaagccataaggggcaggggccaccccacggcatctccccagaagtacaggcctcaggaggaggtggaactgatgtagggggtggcactccccagagactgccctcacgaggggactgggttcgctctcagctctgcagctgtctgcggtggggggaaggttggggggtgtctggaggcatgttcccctcaccaccccccgtgggtctcagggaggccgggtgtgacctcatctttctcatggtgctatcctggtgctattggggtggggagttccctcccctcccccacaccagaaaggggtatgttgggggattggaagcacttgaactttttattttattaaaaccttgttataagcagcaaaaaaaaaaaaaaaaaaaaaaaaaaaaaaaa

SEQ ID NO: 12444 - DNA, 5403 bp, Homo sapiens
acgagagtttgcacagatgtggaaaggagctggcagggcagttccctgggacagaagggagtcagggggtccaacaggggccccccactgccaccccagagcctccagtccagctttagccaggggccccggggggcctgtgggaagtgccaggggcccccaagcacactctgctctcattggctggctgcgcctacatgcaaatgagggccaacgtcacttcctgaggccaatcgagcgccattttctctttctggctgcgcgggaggaggggaccagtcgcgctgggggtgggcgcgcgctgaggcgggggtcccgccgcgcggggcggaggcgcgggcgggcgcaggcggccccacgggacgcggctgcgctcggcggaagacgcggcagccctgcgagaggcagcagcggagacgcggtgctcctcgggcgccaagcggaaaatttcaaaaatgtttcaaattcctgtggaaaatcttgacaacatcagaaaggtgcgaaaaaaggtgaaaggtattcttgtggatattgggcttgacagctgcaaggagttactgaaggaccttaaaggctttgatccaggagagaaatactttcataacacatcatggggagatgtttctctctgggaaccttctggaaagaaagtgagatatcgaacaaagccatactgttgtggcctctgtaaatactctacaaaggtgcttacttcattcaagaatcatttacatcgttaccatgaagatgaaattgaccaagagctggtgatcccttgcccaaactgtgtatttgcatctcagcccaaagttgtgggaaggcacttcagaatgttccatgcgcctgtccggaaagtccagaactacacagtgaatattttaggtgaaactaaatcatctaggagcgatgtgataagtttcacatgtctaaaatgtaacttttcaaacactttgtactacagcatgaagaagcatgtgctggtagcccattttcactacttaattaactcctactttggcctaagaactgaggaaatgggtgagcaaccgaaaactaacgatactgtttctatagagaagatcccaccacctgacaaatattactgtaaaaagtgcaacgccaatgccagcagccaggatgcgttaatgtatcacattttgacatcagacatacacagagatttggagaataagcttagatctgtgatttcagaacatattaagaggactggactcttgaagcaaacgcacattgctccaaaaccagcagcacatttggctgcaccagcaaatggcagtgctccaagcgctccagcgcagcctccttgcttccatcttgctttgccacagaacagtccaagcccagccgcaggacagccagtgactgtggcccagggtgcccctggaagcctcactcattccccccctgctgctggccaatcccacatgactctggtctccagccctctgcctgtgggccagaacagcctcaccctgcagcccccagcacctcagcccgtctttctttctcacggggttccacttcatcagtctgtgaatcctcctgtgttgcccttgagtcagccagtcggacctgtcaataagtctgttggaactagtgtcctccccataaatcagactgttcgccctggggttttacccctcacccagcctgtgggacccataaacagacctgttgggcctggtgttcttcctgtgagcccctctgtcacccctggggtcctgcaggctgtctcgccaggggtgctttctgtgagtcgggcggtcccgtctggagtccttcctgcaggccagatgactcctgcaggccagatgactcctgcaggggttatccctgggcaaacagcaacttctggggttcttcctactggccagatggtccagtcaggagttctccctgtgggccagacagctccgtcacgggttcttcccccaggccagacagccccattgagggttatctctgcaggccaggtggtcccgtctgggcttctttctcccaaccagacagtctcctcctcagctgttgtgcctgtaaaccagggtgtgaattctggtgttctgcagcttagtcagcctgttgtgtcgggagttcttcctgtgggccagccagtgaggcctggggtcttgcaactcaaccagactgtgggcaccaacattctgcctgtgaatcagccagtgagacctggtgcttcgcagaacaccaccttcctgacatcaggctctattctcagacagctcatccctacagggaaacaagtgaatgggattccaacctacacgctggcccccgtgtctgtcactctgccggttccccctggaggccttgcaactgtcgctccgccccagatgcccatccagctcctgccgtcaggtgcagctgcaccaatggccggttccatgcccggcatgccctctcctccagtgctggtgaatgctgctcagagcgtgtttgttcaggcctcctcctctgcagcagacacaaaccaggtgctcaaacaggccaagcagtggaagacctgccctgtctgcaacgagctctttccgtccaacgtctaccaggtccacatggaggtagcgcataagcacagcgagtccaagtctggtgagaaacttgagcctgaaaaactggcagcgtgtgcaccatttctaaagtggatgagagagaaaacggtgcgatgtctgtcttgtaagtgcttggtctctgaggaagagcttatacaccacttgctgatgcatggcttggggtgcttgttctgtccatgcaccttccatgatatcaaaggtctttcagagcacagcaggaataggcacctggggaagaagaagttgcctatggattatagcaacagaggttttcaattagatgtcgatgccaatggcaacctgctctttccccaccttgatttcatcaccatattgccaaaggagaagcttggggagcgggaagtctacttggcaatcctggctgggatacactccaagtcactggtgcctgtgtatgtgaaggtgaggcctcaggctgagggcacccccgggagcaccggcaagcgagtgtccacctgccccttttgctttggcccctttgtgacaactgaggcctatgagctgcatttgaaggagaggcaccacatcatgcccacagtccacacggtcctgaagtctcccgccttcaagtgcatccactgctgtggggtctacacgggaaatatgaccctggctgccatcgccgtccatttggtgcgctgcagaagtgctcccaaggacagcagctcagacctgcaggcccagccgggttttattcacaacagtgaactgcttttagtcagtggtgaagtgatgcatgattccagtttttctgttaagagaaagctgcctgacggccacttaggggccgaagaccagcggcatggggaggagcagcctcccatcctaaatgccgatgcagccccgggtccagaaaaggtgacgagtgttgtgccttttaaaagacaaaggaatgaaagcagaacagagggacctattgtcaaggacgaggctcttcagattttagcattagatcctaaaaaatatgaaggccgttcttatgaagaaaagaagcaatttcttaaagattatttccataagaaaccatatcctagtaaaaaggaaatagaactgttgtcctcactcttttgggtgtggaaaattgatgtggcttcattttttggaaaaagaaggtatatttgcatgaaagcaataaaaaatcacaagccttctgtacttttaggctttgatatgtctgaacttaaaaatgtgaaacatagattgaactttgaatatgaaccataaaacttgcaaaaaaaaaaaaaaagtaactctaaagtagtaggtagatttttttcagttgaaatttcacagtgttgtcctcactgtgttggtgaatcaacctcagtggtcactgtgctgctctgcagagttacttcaggtgctggagagacccctgttaccaggaagccagtagttatttcacatctattgtttcctgcagtttgatttgtaacagaacagttgttttcaggtttttttctctgtcatgtaaatgaaatcttttgatatttcatgcacgccttgttttcccactagtgtcagtatcgtatgataagaaactgaaatctataaataatttgctttttcattaaggacatttcagcctttttcagaatacttgatttaactgcgagtggaagcatcgatctccttcagctttccctgtagcagcagatggtacagtgagtgttcagagacgtgggtacaaaccctgtgatgtatgtataaggctccctgaggatgcactgcattaacttacgctgacttctttgtaagatctttgcttatagattataatttagatctgtatttttttaggtttatcctaatagctgttttttttttttaaccataactcatagaaaatcaaatgtttttatttgttaaaagtagactgaatttgacatctggtatgctggtatgtagctcatacatcaagagttattttacaaataaatttattctgtagatgcagaaatatttttcagtgtagattttcccttttgatatgctaagtcatttctccgttcagaggtaaaacaataaatttttagtgcctttagaataaacattgaaagaatacaccccaaaactcttctcctaacttaactactcataaactagtgaaagggaaggtctatgatactcaggaataaaattattgcccctgagtgtgaaaactaacttaaatttcagcatagggtttcaggggacatggcgaagtttacagactgagatctcagtctccatggttggtacagtaagtctttgaccacattttctgaaggtcatgtttagtggagaaacgggcttttctctagctggtttaggctggaagctgtgtccgggtcgatgggatggcatattgttaaagaatctccattgtcgtcactgtcctgtggatgttaaacctcgtttttttccccacacgatattaaaacttaaagcaccagaaccagtcatggagaccagccagtttagatggtaagtcatatttctggtggtacacagcagaggaaccccttcactctatctttaggtagaaatatttggaggatgtgacagcctctgagaaacataatgttactatgtggattttaaaaaatataatacttgcatgtaattgctataatgttcatatttgaggcagttgtgaaaccggtttatgattgttggtgtactctgttgtaaattcaaagagagcttgttgaacattttttttttttacctattgttttcagagtgtctattttgaattaaaatttgttacaccgctgcaaaaaaaaaaaaaaaa

SEQ ID NO: 12445 - DNA, 2941 bp, Homo sapiens
ccccgggccgggccctgagcgcgcgggctccgcgccgccgccgcgccatggcggagaccaagattatctaccacatggacgaggaggagacgccgtacctggtcaagctgcccgtggcccccgagcgcgtcacgctggccgacttcaagaacgtgctcagcaaccggcccgtgcacgcctacaaattcttctttaagtccatggaccaggacttcggggtggtgaaggaggagatctttgatgacaatgccaagcttccctgcttcaacggccgcgtggtctcctggctggtcctggctgagggtgctcactcggatgcggggtcccagggcacggacagccacacagacctgcccccgcctcttgagcggacaggcggcatcggggactcccggcccccctccttccacccaaatgtggccagcagccgtgacgggatggacaacgagacaggcacggagtccatggtcagtcaccggcgggagcgtgcccgacgccggaaccgcgaggaggccgcccggaccaatgggcacccaaggggagaccgacggcgggatgtggggctgcccccagacagcgcgtccaccgccctcagcagcgagcttgagtccagcagctttgtggactcggacgaggatggcagcacgagcaggctcagcagctccacggagcagagcacctcatccagactcatccggaagcacaaacgccggcggaggaagcagcgccttcggcaggcggaccgggcctcctccttcagcagcataaccgactccaccatgtccctcaacatcgtcactgtcacgctcaacatggaaagacatcactttctgggcatcagcatcgtggggcagagcaacgaccgtggagacggcggcatctacattggctccatcatgaagggcggggctgtggccgctgacggccgcatcgagcccggcgacatgttgctgcaggtgaatgacgtgaactttgagaacatgagcaatgacgatgccgtgcgggtgctgcgggagatcgtttcccagacggggcccatcagcctcactgtggccaagtgctgggacccaacgccccgaagctacttcaccgtcccacgggctgacccggtgcggcccatcgaccccgccgcctggctgtcccacacggcggcactgacaggagccctgccccgctacgagctggaagaggcgccgctgacggtgaagagtgacatgagcgccgtcgtccgggtcatgcagctgccagactcgggactggagatccgcgaccgcatgtggctcaagatcaccatcgccaatgccgtcatcggggcggacgtggtggactggctgtacacacacgtggagggcttcaaggagcggcgggaggcccggaagtacgccagcagcttgctgaagcacggcttcctgcggcacacggtcaacaagatcaccttctccgagcagtgctactacgtcttcggggatctctgcagcaatctcgccaccctgaacctcaacagtggctccagtgggacttcggatcaggacacgctggccccgctgccccacccggctgccccctggcctctgggtcagggctacccctaccagtacccgggacccccaccctgcttcccgcctgcctaccaggacccgggctttagctatggcagcggcagcaccgggagtcagcagagtgaagggagcaaaagcagtgggtccacccggagcagccgccgggccccgggccgtgagaaggagcgtcgggcggcgggagctgggggcagtggcagtgaatcggatcacacggcaccgagtggggtggggagcagctggcgagagcgtccggccggccagctcagccgtggcagcagcccacgcagtcaggcctcggctaccgccccggggctccccccgccccaccccacgaccaaggcctatacagtggtgggggggccacccgggggaccccctgtccgggagctggctgccgtccccccggaattgacaggcagccgccagtccttccagaaggctatggggaacccctgcgagttcttcgtggacatcatgtgactcgtggcgcatgccccagccctgcctgaggtggggagctggcggtcctgccgcatgcagagctcgcgtgggcttgccttcgtgggggccaggacgggaggcagggtggggggcaggctggaccaccaccatctgccctggcagcctggctgctccagctcctgacagcacctgtgtctgagcagccgtgttgggggcgctccctctctgcccctcagcgagagcctcggacctcccaaccccttgtgtctggtggggatccctcctgggatgaggaagaccccctcgggctctcggctgacccccacctcctgcacagctgtgcccaggcccccagggtggtccatgcggggcaaccccctgcggtgcacaggccccctgtctggagtagggatctaatttatttatttattgcctggccggtgactcgggggaggaggcgaccctgtcatctgtcccacctgctgctgccccttggagcagcctgcaccttctctcctcccatccggcaacagtctgaaagtacgtggaggacgggaccggaagacgagagagggctggacatcctgcccaccgtgtcccagccagggcagggagggaccatggcccgcagggtcaaggggccccgatgtgcacagctgccacagggagggaggtcttggggagatgggcagtcaggtggcccgtccttggtgagtgcacacactgcgcgcacacatcgcggccttcctggcttctctggcccccacgtgtctgtgctgtagatactgtatcaaagtcccagcgtttagatggttaacatagagctgcttctgtgtaaatgctgcttattttaaacactaaaaagcgtttaattttatgggaaaaaaaaaaaaaaaaaa
